United States Patent Application Publication US 2024/0327476 A1 - sequence listing, part 60

SEQ ID NO: 113879 - DNA, 879 bp, synthetic construct
  misc_feature 1..879: note = Description of Artificial Sequence: Synthetic coding sequence
  source 1..879: mol_type = other DNA
atgcactcggatgccgccgccgtcaatttccagcttaactctcatttgagcaccctcgcgaatattcataagatttaccacaccctgaacaaactgaatctgacagaggatattgggcaggatgatcatcagaccggatcacttaggtcctgcagcagtagtgactgtttcaacaaggtgatgcctccccgaaagaaaagaaggccagctagtggggacgacctgtctgctaagaaatcgaggcacgactctatgtataggaagtacgattccacgcggatcaagactgaagaagaggccttcagctccaagaggtgtctggagtggttttatgagtatgctggtactgatgacgtagttgggcccgaaggaatggagaaattttgcgaagacattggagtggaacctgaaaatgtggtgatgttagtgttagcctggaagttggacgctcagaacatgggctactttaccctccaagaatggctgaagggaatgacatccctgcagtgcgacaccaccgagaagcttagaaatacactcgactacctcagaagctttctcaacgattcaacaaactttaaactcatctaccggtacgccttcgatttcgctcgggagaaggaccagcgatcgctagatataaatacggcaaaatgcatgctcggtttgctgctggggaaaatctggcctttattccctgtcttccatcagtttctggaacaatcaaagtacaaggtcatcaacaaggatcagtggtgcaacgtactcgagttcagtcgcactattaatttggacttgagtaactacgatgaggatggggcatggcccgtgctcctcgatgagtttgtagagtggtacaaagacaagcaaatgagttag

SEQ ID NO: 113880 - DNA, 699 bp, synthetic construct
  misc_feature 1..699: note = Description of Artificial Sequence: Synthetic coding sequence
  source 1..699: mol_type = other DNA
atgcccccacggaagaagaggcgccccgcttctggtgacgatctgtcagcaaaaaaaagccgacacgactccatgtaccgtaagtacgattcaactcgaatcaagacagaggaagaggccttttctagcaagcgctgcctcgagtggttttatgaatatgcagggacagacgatgtggttggtcccgaaggcatggaaaaattttgcgaggatatcggagtggagcctgaaaacgtggtgatgctggtgctggcttggaaactggatgcacagaatatgggttacttcaccctgcaagagtggctcaagggtatgaccagtctgcagtgcgacactaccgagaagctaagaaatacgcttgactacctcagatctttcctgaacgatagtacaaacttcaaactcatttatagatacgccttcgactttgcaagggaaaaagatcagaggagcttggacatcaatacagcgaagtgcatgttaggcctgttacttggcaaaatatggccactgtttcccgtcttccaccaatttctcgagcagtccaaatataaagtgatcaataaagatcaatggtgcaatgttctggagttcagccgtaccatcaatctggacttgtccaactacgacgaagatggagcatggcctgtccttctagacgagtttgttgaatggtataaagacaagcagatgagctag

SEQ ID NO: 113881 - DNA, 774 bp, synthetic construct
  misc_feature 1..774: note = Description of Artificial Sequence: Synthetic coding sequence
  source 1..774: mol_type = other DNA
atgcattccgatgctgctgctgtgaacttccaactgaacagtcatcttagcacactggccaatattcacaagatttatcacaccctcaacaaactgaacctgaccgaggatataggtcaagacgatcatcaaacggggagtcttaggtcctgcagctcttctgattgtttcaataaagtcatgccgccaagaaagaagcgtcgacctgccagcggggacgacctgtcagctaaaaagtcaagacacgattctatgtaccggaagtatgattcgacgcggattaaaaccgaagaggaggctttctccagtaaacggtgcctcgaatggttctacgagtacgcaggaacagatgacgtggtgggacccgaggggatggagaagttctgcgaggacatcggtgtcgagcctgagaacgtggtgatgctggtccttgcatggaaacttgacgctcagaacatgggatattttacactgcaagaatggctcaaagggatgacatccttacagtgcgacaccactgagaagctaaggaataccctcgattacctccgtagttttttgaacgactcaacgaactttaaactgatctacaggtatgcctttgacttcgccaggcagagcaagtacaaggtaattaataaagatcaatggtgtaacgtgctggaattttcaaggactattaatctcgacttatctaattacgacgaagatggagcatggcctgtgctgctagatgagtttgtagagtggtacaaagacaaacaaatgagctag

SEQ ID NO: 113882 - DNA, 1011 bp, synthetic construct
  misc_feature 1..1011: note = Description of Artificial Sequence: Synthetic coding sequence
  source 1..1011: mol_type = other DNA
atggaagtggaggccgcactgggctgcagcggtcaaggtcgcggctgtggtggcgtcgcacctgccggccgcggcagggagagagcctccgagcgaggcactagagtacgcatctccaagggtctttctggcgctgggggatcagtgcgtaaagccgatttccagctgaatagccacttgtcaaccttggccaatattcacaaaatctaccacacactgaataagctgaaccttacagaagacattggccaagatgatcatcagaccggctccctgaggtcctgttcaagcagcgactgtttcaataaggtcatgccgcccagaaaaaagcggaggccggcctccggggatgatctgagcgctaaaaagtcacgacacgattccatgtacaggaagtacgactccacacgaattaagaccgaagaggaggcattctcttctaaaaggtgcctggagtggttctatgaatatgcggggactgacgatgtagtcggtccagagggtatggaaaagttctgcgaagatattggggtggaacctgaaaatgtggtgatgctagtgttagcgtggaagcttgacgctcagaacatgggctactttaccttgcaagagtggctcaagggcatgacatctctgcagtgcgatacgaccgagaagcttcgtaataccctggactatttacggagctttctgaatgatagcactaatttcaagctgatctaccgctacgcgtttgacttcgcacgggaaaaggatcaaaggtcactcgatataaacaccgctaagtgcatgctgggattactcctggggaaaatttggcccctcttccctgtgtttcaccagttcctggagcaatctaaatacaaagtgatcaataaagatcaatggtgtaatgtcctggaattcagtcgaactataaatctggacctctccaactatgacgaagacggcgcttggccagtgctcctcgacgagtttgtggagtggtataaagataagcagatgtcatag

SEQ ID NO: 113883 - DNA, 1854 bp, synthetic construct
  misc_feature 1..1854: note = Description of Artificial Sequence: Synthetic coding sequence
  source 1..1854: mol_type = other DNA
atggctgccgtggccgcaggcggcctggttggcaagggtcgggatattagtctcgctgcacttcagcggcatgatccttatattaacagaatcgtagatgtcgcaagtcaggtagctctctatacattcggccaccgagcaaatgaatgggaaaagacggacgtggagggtaccctgttcgtctacaccagaagcgcgagtcccaaacatggcttcaccataatgaacaggctctccatggaaaatcgcaccgagcctatcaccaaggatttggattttcagttgcaggacccatttctgctctatcggaatgcacgattatctatatacgggatttggttctatgataaagaagagtgccagcggatcgccgaacttatgaagaacttaactcagtacgaacaacttaaagcccatcaggggaccggggcgggaattagccccgttatcctgaattccggggaggggaaggaggtggatatcctgaggatgttaatcaaagcaaaggacgagtatacaaaatgtaaaacctgctcagaacccaagaagataacttcttcctctgcaatatacgataatccaaatctcatcaaacccatccccgttaagccctccgaaaaccaacagcaaagaatcccccaaccgaatcagaccctggatcctgagcctcagcacctttctttgactgcactgtttggaaaacaggataaggccacatgtcaggaaaccgtcgaacccccccagactctacatcagcaacagcaacagcagcagcagcaacaagagaagctgcccattcgccaaggtgttgtgcgatctctgtcctatgaggagcccaggcggcattccccacctattgagaaacaactctgccccgcgatccagaagctgatggtgcgaagcgccgaccttcaccctctgtccgaactgcctgaaaaccggccatgcgagaacgggtctacccatagcgctggagagttttttacgggccccgtgcagcctgggagccctcacaacattggaacctcccgtggggttcaaaatgctagccggacccagaacctatttgagaagctccagagcacacccggcgccgccaacaaatgtgacccctccaccccagcccccgcctcttcagcggcactgaatcgctcgcgcgcacctacctccgtaactcccgtcgctccaggcaaggggctagctcagcccccacaagcatacttcaatggttcgctaccgccacaaacagttggccaccaggctcacggcagagaacagtcgactttaccaaggcaaacgctaccaatctctggttcccagactgggtccagtggagtgatcagccctcaagagctgcttaaaaaactacaaattgtgcagcaggaacaacagttgcacgcctcgaaccgacctgcattagctgccaaattcccagtcctcgcacagagctccggaactggaaaaccattagagtcctggatcaataaaaccccaaatactgagcagcagaccccgctgtttcaggtcatttcacctcagcgcattcccgccaccgcggctccatccctgctgatgtcgcctatggtgtttgcccaacctacttccgtccctcccaaggagagagaaagtggactgttgcccgtcgggggccaggagcctcctgcagcggccactagtttattactgccgatccagtcacccgagccaagcgttattacttctagtccactcacaaagctccagctgcaggaagccttgctgtatctgatccagaatgacgataacttccttaacataatttacgaagcgtacctttttagcatgacgcaggccgcaatgaagaagactatgtag

SEQ ID NO: 113884 - DNA, 1548 bp, synthetic construct
  misc_feature 1..1548: note = Description of Artificial Sequence: Synthetic coding sequence
  source 1..1548: mol_type = other DNA
atgcagatcaaagtgtcaatctacggcatatggttttacgataaagaggaatgccaacgcattgctgagctgatgaagaacttaacgcagtacgagcaactgaaagcccaccaggggaccggggccggtattagccctgtcattctgaatagcggggagggtaaagaagtggacattcttcggatgttaataaaagctaaagacgagtatactaagtgtaagacatgctcagagccaaaaaaaatcacatcgagttccgcaatttatgataatcctaacctgattaagccgattcctgtcaagccatcagagaaccagcaacagagaataccgcagcccaatcagaccctggaccccgagccccagcacctgtcactaactgctctgttcgggaagcaggacaaagcaacttgccaagaaaccgtggagcctccccagactcttcaccagcagcaacagcaacaacagcagcagcaagaaaagctgcccattagacagggggtggtgaggagcctctcgtacgaggagccccggagacatagccctccgatagagaaacagctgtgcccagccatccagaagctgatggtcagatccgctgacctacaccctctgtccgagctgcctgagaatcgcccttgtgagaacggtagtacacacagcgctggtgagttctttacaggccctgtccagcctggaagccctcacaacatcggcactagccgtggagttcagaacgcaagtcggacgcaaaacctttttgaaaagctccagtccacacctggcgccgcgaataaatgcgatcccagcacccccgctccagcgtcatccgctgctcttaaccgtagcagggcccccacttctgtaacaccagttgctcccggcaagggactagctcaaccgccccaggcatattttaacggctccctgcctccacagacagtcggccaccaggctcacggacgagaacagagcacattaccacggcagactttaccaatctctggctcacagaccggcagctccggcgttatttctccacaagagctgctgaagaagttgcaaattgttcagcaggagcagcagctgcacgcctcaaataggcccgcgctagccgctaagtttcccgtgcttgcccagtcgagcggcaccggaaagccgctcgagtcatggattaataagactcctaacacggagcagcaaacccctctgttccaggtgatcagcccacagcgtattcccgccaccgccgcaccatctttactcatgagtccaatggtgtttgcacaaccgacctctgtgcctccaaaggagagagaatcagggctcctcccagtgggcgggcaggagcccccagctgcagctacttcgctgctgttgcccatccagtcccccgagccctctgtgataacgtccagcccactgacaaagctacagctgcaggaggccctgctgtatctaattcaaaacgacgacaactttctcaacataatctacgaggcttatctgttctctatgactcaagccgcaatgaaaaagactatgtag

SEQ ID NO: 113885 - DNA, 1263 bp, synthetic construct
  misc_feature 1..1263: note = Description of Artificial Sequence: Synthetic coding sequence
  source 1..1263: mol_type = other DNA
atggaaaccaagagggtggaaatcccaggctccgttttagacgatttctgttctcggttcatattacacattccctccgaagaaagagacaacgccatccgcgtgtgttttcagatcgaactggcacattggttctacctcgatttctacatgcagaatacacctgggcttcctcaatgtgggatcagagattttgccaaagccgtattttcccattgccctttcctcctcccccagggggaagacgtcgaaaaggtgctcgatgagtggaaagaatacaagatgggagtacctacatatggcgctataattctcgacgagacgttggaaaatgtacttttggttcagggttatcttgctaaatcaggttggggattccccaagggaaaagtaaacaaggaagaagcacctcatgattgcgcggcgagggaggttttcgaagaaacgggtttcgacatcaaggactatatatgcaaggatgattacattgaactcagaattaacgaccagttggcaagactatatatcattcccggcattcctaaagacactaagtttaacccaaagaccagacgggaaatccgcaacattgagtggttctccatcgaaaaactgccatgccacagaaacgatatgactcctaagtctaagcttgggctagctcctaacaaattcttcatggccattccctttatacgccccctacgcgactggctgagtaggaggttcggcgactcgtcagactccgataatggattctctagcaccggtagcactcccgctaagccgaccgtggagaagctgagcaggactaagttccgacattcccagcagctcttccccgatggatcacccggcgaccagtgggtaaaacaccgccagccattacaacagaaaccatataacaaccactcagagatgtccgacctccttaaagggaagaatcagtctatgcgggggaatggacgcaagcaataccaggactcgccaaaccagaagaagcgaaccaacggcctgcaaccagccaaacagcagaatagtttaatgaagtgtgaaaagaagctgcatccacgtaaacttcaggacaactttgagacggacgcagtgtacgatctcccctcaagttcagaagatcagctgctagagcatgccgaagggcagcccgtggcttgcaacggccactgtaagttcccattctcctccagggctttcctgtcgttcaaatttgatcataacgctatcatgaagatcctcgatctatag

SEQ ID NO: 113886 - DNA, 1158 bp, synthetic construct
  misc_feature 1..1158: note = Description of Artificial Sequence: Synthetic coding sequence
  source 1..1158: mol_type = other DNA
atggagactaagagagtggagatcccagggtcagtcctggatgacttttgcagccgctttatcttacacatacctagcgaagagagggataacgcaatccgcgtttgttttcagatcgaattagcacactggttctatctggacttctatatgcagaacacccctgggctccctcaatgtggcatcagggatttcgccaaagcagtgttctcacactgcccttttctgctaccccagggcgaggacgttgagaaggtgcttgacgagtggaaagagtacaaaatgggggtaccaacgtacggcgccataatcctggacgaaacactagagaacgtcctgctggttcaaggatatttggcaaagtccggatggggtttcccgaagggaaaagtcaacaaggaggaggccccccatgactgcgctgcgcgagaagtgtttgaggagaccgggttcgatataaaagattatatctgcaaggacgattatatcgaactcaggataaacgatcagcttgcccgactttatatcattcccgggatccccaaggataccaaattcaaccctaaaacccggagagaaattcggaacatagagtggttctcaatagaaaagttaccttgccatagaaatgacatgacccccaaatccaaattgggactcgcaccaaataaatttttcatggccatcccatttattcgccccctccgggattggctcagtagacgcttcggggattcctcagactctgataacgggttctcatctaccggcagcacccccgcgaagccaaccgtagagaagctctcgcgtactaagttccgacattctcaacagcttttcccagacgggagtccaggggaccaatgggtgaaacaccgccaacctttgcaacagaaaccatataacaaccatagcgagatgtctgacctgctgaaaggcaagaaatgtgaaaagaaactccacccaaggaaactccaggataatttcgagacggacgccgtctatgatctgccaagcagcagtgaggaccagttgctcgagcatgccgagggccaaccggttgcatgtaatgggcactgcaagtttccattttcctcccgtgcatttctcagtttcaaattcgatcataacgcgattatgaaaatcctggatttgtag

SEQ ID NO: 113887 - DNA, 630 bp, synthetic construct
  misc_feature 1..630: note = Description of Artificial Sequence: Synthetic coding sequence
  source 1..630: mol_type = other DNA
atgactcctaagtcgaaattgggcctggctcccaataaattttttatggctattccttttatcaggccattgcgggattggttatccaggcgctttggagatagctccgacagtgataacggtttttcaagcacagggtcgacccctgccaagccaactgtagaaaagctgtcgagaaccaagttccggcattcacagcagctgttcccagacggaagtcccggagatcaatgggtaaagcacagacagcccctccagcagaagccgtataacaaccatagtgaaatgtcagacctcttgaagggtaagaaccaaagcatgaggggcaacgggaggaagcaataccaggactccccaaaccaaaagaagcgtactaatgggctccaacccgccaaacagcaaaactcgctgatgaaatgcgaaaagaaattacatccacggaaacttcaggataatttcgaaacggatgcagtttacgacttgcctagttcgagcgaagaccaactcctcgaacatgcagagggacaacctgtcgcgtgtaatggccattgcaagtttccgttcagttcaagagcgtttctgagtttcaaatttgatcacaatgctattatgaagattctcgatctttag

SEQ ID NO: 113888 - DNA, 1341 bp, synthetic construct
  misc_feature 1..1341: note = Description of Artificial Sequence: Synthetic coding sequence
  source 1..1341: mol_type = other DNA
atgactgagcttgggatggtcgtgctcggtatcgacactacccacctttggatgctccccctcactccaggatcttggaatagcatgcgcagccggcacaagtggaactggcctcagggctcttggggacttgggggcccaccccggtccacggcatttcttgagtgctgcaccagcttcctccctaacgatttgggattcaccgacagttacagtcagaaagccttttgtggaatttatagcaaggacgggcagatctttatgtcggcctgccaggaccagactatccgcctctacgactgtcggtatggacgcttcaggaaattcaaaagcattaaagcccgggacgtgggttggtctgtgctggatgtcgccttcacccccgacggcaaccacttcctttactcttcttggagtgactatattcatatctgcaatatatatggagaaggcgatacacacaccgccctcgacttgcgccccgatgaacggaggtttgctgttttcagtattgccgtgtcctcggacggaagggaggtgctgggcggggctaacgatgggtgcctttatgtgttcgatcgtgagcaaaacaggagaacccttcagattgagtcccacgaagatgacgtgaatgccgtagccttcgccgacattagcagtcagattttattctccggcggggatgacgccatctgcaaggtctgggatcgtcggacaatgcgcgaggacgaccctaagccggttggggccctggcggggcaccaggatggtatcacgttcattgactctaagggggatgcaagatatcttatcagtaatagtaaggatcagacaatcaagttgtgggacattcggaggttcagctcccgagagggaatggaggccagccgtcaggctgcaacacagcagaactgggactaccgctggcagcaagtgcccaagaaggcctggcggaaactaaaactccccggagattcgtctctgatgacttacagaggccacggagtgttgcacactttgatccgctgcaggtttagcccaatccattccacagggcagcagttcatctactcaggatgtagtaccggtaaagtagtcgtgtatgatttgctcagcggtcacatcgtgaaaaaattaactaaccacaaagcttgcgtgcgagacgtttcgtggcacccttttgaagagaagatcgtgagcagctcttgggacggaaacctgcggctgtggcagtatcggcaggccgaatacttccaggacgatatgcccgaaagcgaggagtgtgcgagtgcccctgctcccgtcccgcagtcctcaaccccctttagttcgccccaatag

SEQ ID NO: 113889 - DNA, 1563 bp, synthetic construct
  misc_feature 1..1563: note = Description of Artificial Sequence: Synthetic coding sequence
  source 1..1563: mol_type = other DNA
atgggttctagaaacagtagtagtgcgggctctggatccggcgacccttcggagggattaccccggcgtggggctggacttcggaggtctgaggaagaggaagaggaggatgaagatgtcgacctagcccaggcactgctggactcagaggaggaaaatgaccgcgcatgggacggtaggctgggtgaccgctacaacccccccgtggatgctacacctgacaccagagagctggaattcaatgagatcaagacacaggtggagctggctacaggtcagctcggactgagacgcgcagcacagaagcatagctttccccgtatgctgcatcagcgggaacgcggcctgtgccacaggggaagtttctcattaggagaacaatctcgagtcatcagccacttcctccctaatgatctcgggttcacggactcatatagtcaaaaggccttctgcggaatctattctaaagatggccagatttttatgtccgcctgtcaggaccagaccattaggttgtacgattgccggtatggaagatttcggaaattcaaatctatcaaggctagagatgtcggatggtctgtcttggatgtggcgtttactcctgacgggaatcactttctttactcgtcttggtcggactacattcacatctgtaatatttacggcgagggcgacacccacactgctctggacctgaggcccgacgagcggcggtttgcagttttcagcatagcagttagctcagatggtcgtgaagtccttggaggagctaatgacggatgcctgtatgtcttcgacagagagcagaataggagaacgctccaaatcgaaagtcatgaagatgatgtcaacgccgtggcttttgccgacatttctagtcagatactgttttcaggtggcgatgatgctatttgcaaagtatgggatagaaggactatgcgggaggacgatccaaaacctgtgggcgccttggccgggcatcaggatggaattacgtttatcgatagcaagggcgacgcccggtacttaatctccaattccaaggatcagactatcaagctgtgggacattaggaggttttcgtctcgggagggcatggaagcgagtagacaagctgccactcagcaaaattgggattatagatggcagcaggtgcctaagaaggcctggcgcaagctcaaacttcccggtgacagcagcttgatgacttaccgaggacacggggtcctgcacactttgattaggtgcaggttttcacccatccactctacggggcagcagttcatttacagcggatgtagtaccggaaaggtggtcgtgtatgatctcctgtccggacatattgtgaagaagctgactaatcacaaagcgtgcgtacgtgacgtttcctggcaccctttcgaggagaagattgtgtcatcatcgtgggatggaaatttaagactgtggcaatatcggcaagccgagtactttcaggatgatatgcctgagtccgaggagtgtgctagcgccccagctcccgtgccacagagttccacacctttttctagcccacagtag

SEQ ID NO: 113890 - DNA, 1641 bp, synthetic construct
  misc_feature 1..1641: note = Description of Artificial Sequence: Synthetic coding sequence
  source 1..1641: mol_type = other DNA
atgggcagccgtaattcttccagcgccgggagtggatccggcgaccccagcgagggcctgcctcgaagaggcgccggtctgcgccggtccgaggaggaagaagaggaggatgaagacgttgacctggcccaggtgttggcatacctacttagaaggggacaggtgcgactcgtccagggcggtggagctgcaaatctccagtttatccaagcactgctggactccgaagaggaaaatgatagggcctgggatggtcgcctaggggacagatacaatcctcctgtggacgctacgcctgatacccgggagctggaatttaatgaaattaagacccaggtggaacttgcaacagggcagctaggacttcggcgggcggcccagaaacatagttttcctcgtatgctgcaccaacgtgagcgtgggctgtgtcataggggatccttttctttaggagagcagtctagagtgatttcacacttcctgcccaacgacctgggtttcaccgacagctattcccagaaagcattttgtggaatatatagcaaggacggtcagatatttatgtcagcatgtcaagaccagacgatccggctgtacgactgtcgatatggacgcttcagaaagtttaagtctatcaaggcccgagatgttgggtggagtgttctcgacgtggcctttacgccggatggaaaccatttcctgtacagcagttggtccgactacattcatatctgcaatatttacggtgaaggggatacccataccgccttagacctgcggcccgatgagcgccgctttgccgtgtttagcatcgccgtgagtagcgacggaagggaggtattgggtggggccaacgatggatgcttatatgtgtttgatcgggagcagaaccggcgcacactgcaaattgaaagccatgaggacgacgtcaacgccgttgccttcgcagatatcagtagtcagatattgttctcgggcggcgatgatgctatatgtaaagtgtgggaccggaggacaatgcgtgaagacgatccaaagccggtaggtgcactggctgggcaccaggatggcatcacatttatcgactctaaaggcgatgcacggtatctgattagcaattcaaaagatcagacaattaaactgtgggacattagacgattcagtagccgagaaggcatggaggctagccggcaggctgccacacaacagaactgggactatagatggcagcaggttcctaagaaggcgtggcgcaagttgaaactcccaggcgattcaagtctgatgacctaccgaggccacggtgttcttcatactctgatccgatgccgatttagccccattcatagcacaggccagcagtttatttactccgggtgcagcaccggcaaagtagtggtgtatgatctgttatccggtcacattgtgaagaaattaaccaaccacaaagcctgtgtgcgggatgtgagctggcacccctttgaggagaagattgtctctagtagctgggacggcaatcttaggttgtggcagtatcgacaagcggagtacttccaggacgacatgccagagtccgaagaatgtgcatcggcccctgccccagttccacaatcctcgactcctttttcatctccccagtag

SEQ ID NO: 113891 - DNA, 369 bp, synthetic construct
  misc_feature 1..369: note = Description of Artificial Sequence: Synthetic coding sequence
  source 1..369: mol_type = other DNA
atggggagccgcaactcctcatccgcaggatctgggtccggggacccaagcgaagggctgccccggagaggcgcgggtcttcgcagaagcgaggaggaggaagaagaagatgaagatgtcgatttagcccaggtgttggcatacctcctgagaaggggacaagttcgtctcgtgcagggcgggggggcggccaatctccagtttattcaggccctgctggactcagaggaagaaaatgacagggcatgggatgggcgcttgggcgaccgctacaaccctcccgtggacgcaacccccgataccagagagctcgagtttaacgaaattaagacacaggtcgaactggctacaggtcaactcggcctctag

SEQ ID NO: 113892 - DNA, 222 bp, synthetic construct
  misc_feature 1..222: note = Description of Artificial Sequence: Synthetic coding sequence
  source 1..222: mol_type = other DNA
atgggctctaggaatagttcttcagccggttctggctccggcgaccctagcgaagggctgcctagacgcggcgccggcctccgcaggagcgaggaggaagaggaggaggatgaagatgttgacttagcccaggtgctggcatacctccttcgtagaggacaggtgagactggtgcagggcggcggggccgctaacttgcagttcatccaggcactactctag

SEQ ID NO: 113893 - DNA, 282 bp, synthetic construct
  misc_feature 1..282: note = Description of Artificial Sequence: Synthetic coding sequence
  source 1..282: mol_type = other DNA
atgggatcccggaactccagctctgctggtagcgggagtggcgatccaagcgagggacttccccgcaggggggcagggctccggagaagcgaggaggaggaggaggaggacgaagatgttgacctggctcaagtgctggcctatctgctgcggcgaggtcaagtaaggctagtacaggggggtggcgcggcaaacctgcaatttattcaggcgctgctggattcggaggaggagaacgatcgggcctgggatggtagactgggcgaccggtacaacccctag

SEQ ID NO: 113894 - DNA, 327 bp, synthetic construct
  misc_feature 1..327: note = Description of Artificial Sequence: Synthetic coding sequence
  source 1..327: mol_type = other DNA
atgggtagtcggaactcctcttccgccgggagcggcagcggtgacccctctgaaggtctcccacggcgcggtgctgggcttcggcggagcgaagaagaagaagaagaagacgaggacgtggatttagcccaggtgttggcttatctcctacggcgcggtcaggtgaggctggtgcagggcggcggagccgccaacttgcagtttattcaggcattgcttgatagcgaagaggaaaatgatagagcctgggatggtcgactgggggataggtataacccccccgttgacgcaacccccgacacccgagaattggagttcaatgaatag

SEQ ID NO: 113895 - DNA, 1641 bp, synthetic construct
  misc_feature 1..1641: note = Description of Artificial Sequence: Synthetic coding sequence
  source 1..1641: mol_type = other DNA
atgggcagtaggaattcttcaagcgccggctcaggtagcggtgatccctctgaggggttgccacggagaggggcgggactccgtcggtctgaagaggaggaggaagaggacgaagatgttgatttggcccaggtcctggcttaccttctgaggcgtggccaggtgcggctggtccagggcggtggtgctgcaaatctgcagtttatccaagcactgctagattcagaggaagagaacgacagagcatgggatgggcgcctcggcgaccggtataaccctccagttgacgctacgcctgacacaagagagcttgagttcaatgagatcaagacccaggttgagcttgctacgggccagctgggcctcaggagagccgcccaaaagcactcattccctcgcatgctccaccagagagaaagaggactctgccaccgcggaagtttctccctcggcgaacaatccagagtgatctctcacttcctccccaacgacctggggttcacggatagttactcacagaaggctttctgtggtatatacagtaaagacgggcaaatattcatgtccgcctgccaagatcagaccattcgcctttacgactgtcgctatggccgtttccgcaaatttaagtcaattaaggcgcgcgacgtcgggtggtcagtcttggacgttgcgtttactcccgatggaaatcactttctctactcgagctggtccgactacattcatatttgcaatatatacggggagggggatacgcacacggctcttgacctcaggcctgatgagcggcggtttgccgtgttctcgatagcggtgagttctgatgggagagaagtgctgggcggggccaatgacggatgcctgtacgtgttcgacagggaacagaaccgccggaccctgcagattgagagccacgaggacgacgtaaatgctgtagctttcgccgatatctccagccagatactgttctcgggaggtgacgatgctatttgtaaagtgtgggatagaagaacgatgagagaagacgaccctaagcccgttggcgcattggccggacaccaggatgggattacattcatcgacagtaagggtgacgccagatacctgatatccaacagtaaagatcaaaccattaaactctgggacattcgcaggttttcttctagagaaggcatggaagcaagcagacaggccgcaacccaacagaactgggattatagatggcagcaggtgccgaaaaaggcatggagaaagctaaaactaccaggggatagcagccttatgacctacaggggccatggagttctccatactctgataagatgccgattttcccccattcactccacaggccaacagttcatctactcaggatgttccacaggtaaggtcgtggtatatgatctactctctggccacattgtcaaaaagttgaccaatcacaaggcatgtgtgagggatgtatcctggcatccattcgaagagaaaatagtgagttcttcttgggacggaaatctccgtctgtggcagtatcgtcaggctgaatatttccaggatgatatgccagaatccgaggagtgtgcgtccgcgcctgcgcctgtacctcagagctctacaccttttagttcccctcagtag

SEQ ID NO: 113896 - DNA, 273 bp, synthetic construct
  misc_feature 1..273: note = Description of Artificial Sequence: Synthetic coding sequence
  source 1..273: mol_type = other DNA
atgggctcccgtaactcttcttctgccggttccggaagcggcgacccatccgaggggttgcccagaagaggagccggcctgagaagatcagaagaggaggaggaggaggatgaggacgtcgacttagcacaggcactgctagatagcgaagaggaaaatgatagagcctgggatggacggctcggggatcgctataatcctcccgtcgacgcaacacccgacaccagggaattagaatttaacgagattaagacccaagtcgagctcgcttag

SEQ ID NO: 113897 - DNA, 93 bp, synthetic construct
  misc_feature 1..93: note = Description of Artificial Sequence: Synthetic coding sequence
  source 1..93: mol_type = other DNA
atgggctctcgcaactcctcatctgccggaagcggttctggagacccctcagaaggtctccccaggagaggagccggattaagaagaagctag

SEQ ID NO: 113898 - DNA, 429 bp, synthetic construct
  misc_feature 1..429: note = Description of Artificial Sequence: Synthetic coding sequence
  source 1..429: mol_type = other DNA
atgggatcaaggaactcatctagtgcaggtagcgggtctggagacccctctgaggggttgccacggaggggcgccggcctgaggagaagtgaagaggaggaagaggaggatgaagacgtagatctggcccaagtcctggcatacctcctcaggcggggacaagtcagacttgtgcagggggggggcgcagcaaacctgcagtttatccaagccttgctggacagcgaagaggagaatgaccgagcgtgggacggacggttaggcgatcgctacaacccccccgtagacgcgaccccggacactagagagttggaatttaatgaaataaaaacacaggtggaactggccacaggacagctgggtctgcgaagagctgctcaaaagcattctttcccgcgcatgttgcaccaaagagagcggggtctgtag

SEQ ID NO: 113899 - DNA, 204 bp, synthetic construct
  misc_feature 1..204: note = Description of Artificial Sequence: Synthetic coding sequence
  source 1..204: mol_type = other DNA
atggggtctagaaacagctcatctgcgggcagcggaagcggcgatccttccgagggactccctcgccgaggggctggtctcagaagatccgaggaagaagaggaggaagacgaggacgttgacctggcccagcgcccttcagaggtcggcgcaggacgccggtgcagcaaatttacaattcatagtgggcctctgggcctctag

SEQ ID NO: 113900 - DNA, 321 bp, synthetic construct
  misc_feature 1..321: note = Description of Artificial Sequence: Synthetic coding sequence
  source 1..321: mol_type = other DNA
atggggtcgagaaacagctcaagtgccggtagcgggtctggcgacccctccgaagggctgccaaggcgcggggccgggctgcgcagatccgaggaggaggaagaagaagatgaggatgtcgatctcgcgcaagtgctggcatatcttttgcggaggccgtcttggacccagcggaaaaggatgaccgagctcggaatggttgtgttgggtattgacaccacccatctatggatgctgccactgaccccgggctcctggaattcaatgaggagtcgccacaagtggaattggcctcagggctcctggggtttgggcggctag

SEQ ID NO: 113901 - DNA, 387 bp, synthetic construct
  misc_feature 1..387: note = Description of Artificial Sequence: Synthetic coding sequence
  source 1..387: mol_type = other DNA
atgggatcccgcaactctagctctgccggctcgggcagtggggacccatctgagggactgccgcgcaggggtgctggactgcgccggtcggaagaggaggaagaagaggacgaggacgtggatctcgcacaggcactgttggatagcgaggaggagaatgatcgggcatgggacgggaggctcggagacaggtataatccccctgtggatgccacccctgatactcgggagttagagtttaatgagatcaagactcaggttgagctcgcaactggtcagcttgggctacggagagcagcccaaaagcactcttttcccaggatgttacatcaacgcgaacgaggcttgtgccacaggggctcgtttagccttggggaacagtcatag

SEQ ID NO: 113902 - DNA, 465 bp, synthetic construct
  misc_feature 1..465: note = Description of Artificial Sequence: Synthetic coding sequence
  source 1..465: mol_type = other DNA
atggggagtagaaactctagctcagccggctccgggtccggcgatccctcagagggactgcctaggaggggtgccggactcaggcgtagtgaagaggaagaagaggaggatgaagacgttgatttggctcaagttctcgcctatctgcttcggagaggccaggtgagactggtgcagggaggaggagcagctaacctacagtttatacaggcacttctcgactcagaagaggagaacgatcgcgcctgggacggacgcttgggtgacagatacaacccacccgtcgacgccacccccgatacccgagagttggagtttaacgagattaaaacccaagtcgagcttgctacaggacagctgggactcaggcgcgctgctcaaaagcactcattcccgcgaatgttacatcagagggagcggggactatgccacaggggatccttttccctgggagagcagagttag

SEQ ID NO: 113903 - DNA, 2829 bp, synthetic construct
  misc_feature 1..2829: note = Description of Artificial Sequence: Synthetic coding sequence
  source 1..2829: mol_type = other DNA
atgaagcgccgcgccgggctgggaggctcaatgcgtagtgtggtggggtttcttagccagagaggacttcatggcgaccctctccttacccaggactttcaacggaggcgcctgagggggtgccgaaatctgtacaaaaaagacctgctgggacactttggatgtgtgaatgcaatagagttcagtaacaatggaggccagtggttagtgtccggtggggacgaccgccgagtgctgctgtggcacatggaacaggcaattcattcacgggtgaagccaatccagctgaaaggggagcatcatagcaacattttctgtctagcgtttaattcaggcaacactaaggttttctcgggtggtaatgacgagcaagtgatccttcacgacgtcgagagctctgagaccctggacgtgttcgctcacgaagacgcagtttatggtctgtccgtctctcccgttaacgacaatatcttcgcgtcctcctctgatgacgggagagtgctgatctgggacatccgcgaatcgccacacggtgagccattttgcctcgcaaactacccttcagccttccactctgtcatgtttaacccagtcgaaccaagactgctggccacagcaaatagcaaggagggagtgggattgtgggacatcaggaagcctcaatcgagtctcctccgctacggcggcaacctgtctttgcagtctgcaatgagcgtgaggttcaacagtaatggcacacagttgctggcactgaggcggaggctgcctcccgtcctgtacgatattcactcccgccttcctgtgttccagtttgacaatcagggctactttaatagctgtacgatgaagtcatgttgctttgcaggtgaccgagaccaatatatcctgagtggtagcgacgacttcaatctttacatgtggcggatacctgccgatccagaagcagggggaattgggcgcgtggtgaacggagccttcatggtgctgaaaggtcacaggtctatcgttaaccaggtccgctttaacccacatacctacatgatctgttccagcggagtagaaaaaatcataaagatctggtcgccgtataaacagcctgggtgcacgggagatttggacgggcgtattgaggacgattcgcgctgtctctatacccatgaagagtatatatccctggtgctcaattctggaagcggtctttcccatgactatgccaatcagagcgttcaggaggaccctcggatgatggccttctttgatagcttggtcaggagagagatagaagggtggtcaagcgactctgacagtgatctttcggaaagcacaattttacagcttcatgctggagtgtccgagagatcaggctacacagacagtgagagctctgcatcccttccccgctcccctccaccaacagtggacgaaagcgcagacaatgccttccatttgggtcctctgagggtaacaaccaccaatactgtcgcttcgaccccacctacgcccacctgtgaagatgccgcctcccgtcaacagcgcttgagcgctctgcgtcgctatcaggacaaacggctcctggcattgtctaatgaatcagatagcgaagaaaacgtctgtgaggttgagctcgatactgatctctttccaaggcctcgctccccatcacctgaggacgagtctagctcttcatctagcagcagctcaagcgaggatgaggaagagttgaatgaacgacgggccagtacatggcaacgcaatgccatgcgtaggaggcagaaaacaactcgtgaggacaaaccctcggctcctataaagccaactaatacatatattggggaagacaattacgattatccccagattaaggtggacgacctgtccagttctccaacctcctcccctgagcggtcaacaagcaccttggaaattcagccaagcagggcctcccccacctccgacatagagtcagttgagcggaagatttacaaggcctacaaatggttgcggtattcatatataagctattcaaacaataaggatggcgaaaccagtctcgttaccggggaagctgacgaagggcgcgctggaacgtcgcacaaggataaccctgccccaagttcgagtaaggaggcctgcttgaatatcgctatggcgcagagaaaccaggatctgcctcccgaaggctgcagtaaggacacatttaaagaggagaccccgcggactccatccaacggcccagggcatgagcacagctctcatgcctgggctgaggttcctgaaggcacatctcaggacactgggaattctggtagcgtagaacacccttttgagaccaagaaactgaacgggaaagcgctctcatcccgcgcagaggagccccccagtccgcctgtcccaaaggcttctggatccaccctgaacagcggttctggtaattgtccccggactcagtccgatgactcagaggagaggtcactggagaccatctgtgcaaatcataataatggaagattgcatccccgccctccccatcctcacaataacggccagaatctcggcgagttggaagttgtagcatactcgtcccctgggcacagcgacaccgaccgagacaattcatcccttaccgggactttgttgcacaaagactgctgcggatccgagatggcctgcgaaacccctaatgccggtactcgcgaggacccaacagatacgcctgctactgattcaagcagggccgtgcacggacactctggcctgaagcgtcagagaatagagctggaggacacagattccgaaaactcgagctcagaaaagaagctcaagacgtag

SEQ ID NO: 113904 - DNA, 2583 bp, synthetic construct
  misc_feature 1..2583: note = Description of Artificial Sequence: Synthetic coding sequence
  source 1..2583: mol_type = other DNA
atggaacaagccatccactcgagggtgaagccaatccaacttaaaggtgagcaccacagcaatatattttgtttggcctttaacagcgggaacaccaaggtctttagcggaggcaacgacgagcaagtaattctccacgacgttgaaagctccgaaacactcgacgttttcgcccacgaagacgccgtgtatgggctgtccgtgtctccagtgaacgacaacatctttgccagctctagcgacgatggtagggtcctcatttgggacatccgcgaatctccacacggcgaacctttttgtcttgcaaattacccgtccgccttccattccgtaatgttcaaccccgtggaacctcgtctgctggccaccgctaacagcaaggaaggagttggcctctgggacatcagaaaaccccaaagttcattattgcgctatggtggtaatctctcactccagtctgccatgtcagtgcgctttaacagtaacggcacgcagctgctggcattaaggaggaggcttcccccagttctttacgacattcattcacgtctccccgtctttcagtttgacaaccaagggtacttcaattcttgtaccatgaagagctgctgtttcgccggcgaccgggatcaatacattctttccggctctgatgattttaatctgtacatgtggcgaatcccagctgaccctgaggcaggcggaatcggaagagttgtcaacggggcttttatggtgcttaagggtcacaggagcatcgtgaatcaggtgcgatttaaccctcatacctatatgatttgcagttcaggtgtggaaaagatcattaaaatatggtccccctacaaacagccaggctgcaccggagatcttgatggcagaattgaggatgattcacggtgcctctatacccacgaagagtacatatcattagtgctaaacagtggtagtggcctgagtcacgactatgccaaccagtctgtgcaagaagacccccggatgatggcattttttgattctttggtaagacgggaaatagagggatggtcaagcgacagcgactctgacctgtctgagagtacaattctccagctgcatgccggcgtcagtgagagaagcggctataccgattcagaatcatcggcctcactgccaaggagcccaccgccaactgtggacgaatctgccgacaacgccttccatctgggccctctccgtgtgaccaccaccaatacagtggcgtccacaccccccactccaacgtgtgaggatgctgcgtctcggcagcagcgcctgtcggccttgcgccggtatcaggataaaagattgcttgcactgagcaatgaaagcgatagtgaggagaacgtgtgcgaggttgagctagacactgacctgtttcctcgcccacggtctccttcaccagaagacgagtcttcctccagctcttcttccagctctagcgaggacgaggaggagcttaacgaacggagggccagcacttggcagcgtaacgccatgaggaggcgccagaagacgacccgggaagacaagcccagtgcacctataaagccaacaaacacatatattggcgaagacaactacgactatcctcagattaaagtggacgatctttccagctcaccaacgtccagccccgagagatcgacatctactcttgagattcaaccctcacgtgcatcaccgaccagtgacatcgagagcgttgagagaaaaatatacaaggcctataagtggctgaggtattcctacatctcgtacagtaacaataaagacggcgagacctccctagtcaccggagaggccgacgagggtagagccggtaccagtcataaagacaaccccgctccctcttcctccaaggaggcctgcctaaatatagcgatggcccaacgtaaccaagacttacctcctgaggggtgttccaaggacacgttcaaagaggagacaccacgaaccccttctaacggtccaggccacgaacatagctctcacgcatgggcagaagttcccgaaggcaccagccaggacaccgggaatagcggcagcgtggagcatccgtttgaaaccaagaagttgaatggtaaagcactctcttcccgagccgaggaacccccttccccgcccgtgccaaaggcaagcggatcaaccttgaattctggtagcggaaactgcccacgaacccagtcagacgactctgaagaacgctccctagagacaatttgcgctaaccataataatggcaggctgcatcctagacccccccacccacacaataatggccaaaatttaggagagctcgaggttgttgcgtattcatctccggggcactctgatacagaccgcgataacagcagcctcaccggcactttgctgcataaggactgttgcggatcagaaatggcatgcgagacccccaacgcaggcacccgggaagaccctaccgataccccggctacagatagttctcgcgccgtacacggtcatagcggtctgaagcgccagcgcatagaactggaggatactgacagcgagaatagttcgagcgaaaaaaagctgaagacatag

SEQ ID NO: 113905 - DNA, 633 bp, synthetic construct
  misc_feature 1..633: note = Description of Artificial Sequence: Synthetic coding sequence
  source 1..633: mol_type = other DNA
atggagcaagcaatccatagcagagtgaagccaatccagctgaaaggcgagcatcactctaatattttttgcctcgcgtttaatagcggcaacaccaaggtgttctccggggggaatgatgagcaggtcatcctgcatgacgtggagtcggaaacgctggacgtatttgctcatgaagatgcagtgtatggcctgtccgtgtctcccgttaacgataacatattcgcctcttcatccgacgacggtcgggtactaatctgggatatccgcgagtctcctcacggcgagcctttttgccttgcaaactacccctctgctttccactcggtgatgtttaacccagtggagccgcggctcctagccactgctaattccaaagaaggagtcggactgtgggatatacgaaaaccccagtcttctctcttgaggtacggcggcaatttgtccctccagagtgcaatgagcgtgcggttcaattctaacggcacccagctcctggccttgcggcggcggctgcccccagtgctgtacgacattcactctcgcctccctgtgttccaattcgacaaccagggatacttcaacagttgtaccatgaaatcatgttgcttcgctggcgatcgagaccagtag

SEQ ID NO: 113906 - DNA, 2583 bp, synthetic construct
  misc_feature 1..2583: note = Description of Artificial Sequence: Synthetic coding sequence
  source 1..2583: mol_type = other DNA
atggagcaggcaattcactcacgtgtcaagcctattcagttaaagggcgagcaccactctaacattttttgtcttgcattcaattcaggtaacactaaagtgttttcgggcggaaacgacgaacaggtaattctgcatgacgtggagtctagcgaaactctggacgtcttcgcccacgaagatgccgtttatggtctgtctgtgagtcctgtgaatgataacattttcgctagctcttcagatgatgggcgcgtgctaatttgggatattagggagagccctcatggggagccattctgcctggccaactacccgtctgccttccactccgtgatgttcaaccctgtggagccaagactgttggccactgccaactcaaaggagggtgttgggctatgggacataaggaagccccagtcgagtctcctcaggtatggcggaaacctgtctctgcaatccgccatgtccgtgaggttcaactcaaacggcactcagctcctcgcccttaggcgcaggctcccgcccgtgctgtacgatatccattcaaggctcccagttttccagtttgataatcaaggctatttcaattcatgtaccatgaagtcctgttgttttgccggagaccgtgaccagtacattctctccgggagtgacgacttcaatctgtatatgtggagaattccagctgatcccgaggccgggggaattggccgggttgtaaatggcgcgtttatggttctgaaagggcacagaagcatcgtaaatcaggtgcgatttaatcctcacacctacatgatctgttccagcggcgttgaaaaaatcatcaagatttggtccccctacaaacaacccggctgcaccggagacctggacggccgcatcgaggatgattctcgctgtctgtacacccacgaagagtatattagcttagttcttaactctggaagtggcctgtcccacgattacgcaaaccagtcagtgcaagaagatccgcgcatgatggccttttttgattcccttgttcggagagagattgaaggatggagctctgactctgacagcgacctctccgagtcaaccatactgcagcttcacgcaggcgtgagtgagcggtccggctacactgacagtgaatctagtgctagcttaccgcgaagtcccccaccaacagttgacgagtccgctgacaacgcatttcatctgggacccctacgcgtcaccacgactaatactgtggcatcaacaccgcccacacctacctgtgaggatgccgcttcaaggcagcagcgcctgtcagctcttcgcagataccaagataagagacttctggcccttagtaatgaatcagattccgaagaaaacgtgtgcgaggtcgagcttgacacagacctgttcccacgccccagatctcctagccctgaagatgagagctcaagcagttcttcatcaagctcctctgaggatgaggaggaactgaatgaaaggagggccagcacatggcaaagaaacgccatgaggcgtaggcagaaaacaactcgtgaggataagcccagtgcccccataaagcccaccaacacctacatcggcgaggacaactatgattatcctcaaataaaggtggacgacctcagttcgtcgcctacatcaagcccagagcggtctacgagcactttagaaatccagccaagcagagctagtccaacctccgatattgaatcagtagagcgaaagatttataaagcctataaatggcttcggtatagctacatcagctacagcaacaacaaggacggagagacttcactggtgaccggggaagctgacgagggtcgagcagggacttcacataaagacaaccccgccccgtcctctagtaaagaggcctgtctgaacattgcaatggcccaaaggaaccaggacctaccgcccgagggatgcagcaaagacacattcaaggaggagacccccaggacaccatcaaacggaccaggccatgaacattcctcacacgcctgggcagaggtgcccgaaggcacgagccaggacacaggaaattctgggtccgtggaacatccgttcgaaacaaagaaattaaatggcaaagcactaagcagtagggccgaggagcccccttccccacccgtccccaaggccagtggctcaaccttgaattcaggcagcggcaattgtccacgtacacagtctgacgacagcgaagagcgaagcctggagactatttgcgccaaccacaataatgggaggctccatccgagacctccccaccctcataacaatggacagaatctcggcgagctggaggtagtagcgtatagtagccctggtcacagtgacacagaccgggacaactccagccttactggcactctgctccacaaagattgctgcggctcggagatggcatgtgaaacacctaacgccggaaccagggaggaccccacagacacacccgctactgattcatccagggcagtgcatggtcattctgggttgaagcgtcagcggattgagctggaggataccgacagtgagaactctagcagcgagaaaaaactgaaaacgtag

SEQ ID NO: 113907 - DNA, 357 bp, synthetic construct
  misc_feature 1..357: note = Description of Artificial Sequence: Synthetic coding sequence
  source 1..357: mol_type = other DNA
atgcccttcctcgagttggacacgaacttgcccgcaaatcgggtccctgcggggcttgaaaaacgtctgtgcgcagccgccgctagcatcctgggtaagccggcagatcgggtgaacgttacggtgcgccctgggctggcgatggccctctctggaagcacagagccctgcgctcaactttcaatatcaagtatcggcgtggttggaaccgctgaggataacagatctcacagcgcgcactttttcgagttcctcaccaaggagcttgctctgggacaagacagaattctgatcaggttttttccccttgaaagttggcagataggcaaaattggaactgtgatgactttcctttag

SEQ ID NO: 113908 - DNA, 357 bp, synthetic construct
  misc_feature 1..357: note = Description of Artificial Sequence: Synthetic coding sequence
  source 1..357: mol_type = other DNA
atgccatttctcgagctggatacgaatttaccggcaaaccgagtcccggccgggctggagaagcggttgtgcgctgccgcagccagcattcttggaaagcccgcagatcgggtgaatgtgaccgtgcggcccggactcgctatggctctatcggggtcaacagaaccctgcgcgcaactgagtatcagcagcatcggagtggtgggtacagccgaagataaccgatcccacagcgcacactttttcgagtttctgaccaaagaactggcactagggcaagatagaattctgatcaggttcttcccccttgaatcttggcaaatcggcaagatcggtaccgtaatgacatttttatag

SEQ ID NO: 113909 - DNA, 399 bp, synthetic construct
  misc_feature 1..399: note = Description of Artificial Sequence: Synthetic coding sequence
  source 1..399: mol_type = other DNA
atgcagctgttcctcctcgctgtgtccgtgcccctgcccgctatgccctttctggagctcgataccaacctgcccgcgaatagagtgcccgccggactcgagaaacggctgtgtgccgccgctgctagtatcctggggaagccagcagacagggtgaatgtgactgtacggccagggctagccatggctctctctgggtctacagaaccctgcgcacagctgtccatcagctccattggcgtagtggggaccgccgaggacaacagatcacatagcgcccatttttttgagtttctgactaaagagttggcacttggtcaagacaggatcctaatccgctttttccccttggaatcatggcagataggcaagatcggtactgttatgaccttcctctag

SEQ ID NO: 113910 - DNA, 348 bp, synthetic construct
  misc_feature 1..348: note = Description of Artificial Sequence: Synthetic coding sequence
  source 1..348: mol_type = other DNA
atgcccatgttcattgtgaacactaatgtccctcgggcctccgtgcctgacgggtttttatcagaacttactcagcagctggcgcaggctactggcaagccaccccaatacatcgcggtgcatgttgtcccagaccagttgatggcgtttggcggatcaagcgaaccatgtgccctctgctccctgcattccattggtaaaatcgggggcgcacagaaccgctcctatagcaagctgctgtgtggacttctcgcagagagacttcggatatcccctgatcgcgtctacatcaactactatgacatgaatgcagccaacgtggggtggaataactccaccttcgcttag

SEQ ID NO: 113911 - DNA, 1224 bp, synthetic construct
  misc_feature 1..1224: note = Description of Artificial Sequence: Synthetic coding sequence
  source 1..1224: mol_type = other DNA
atgaacaattcaggggcagatgagatcggcaagctgtttgtgggcgggctcgactggagcaccacacaggagacactgcgctcctatttctctcaatacggggaggtagtggactgtgtcatcatgaaggataagaccaccaaccagagtaggggttttggcttcgttaaattcaaggacccgaactgcgtaggcacagtgctcgcttctcgcccacacaccctggacgggcggaacatcgatcccaagccgtgcacgcccagaggcatgcagcccgagcggacacggcctaaggagggatggcagaagggtcctaggagcgacaacagtaagagtaacaaaatcttcgtaggtggcatcccacacaattgtggagaaacagaactgcgcgaatactttaaaaaatttggggtggtgacagaggtggtgatgatctatgacgccgagaagcaaaggcctcgaggcttcggctttatcacttttgaggacgagcaatctgtggatcaagcagtgaatatgcacttccacgatattatgggaaagaaagtcgaggtgaagagggccgaaccgcgcgattcgaaatcacaggcacctgggcagccgggggcctcacagtgggggagtcgcgtagtgcccaatgccgcaaacggctgggccgggcaaccgcctccaacttggcaacagggatacggcccccagggcatgtgggtgccagcaggtcaggcaatcggcgggtacggccccccccccgccggcagaggagctccaccccctcctccccctttcactagctatattgtctctaccccgccaggaggatttccacctcctcaggggttcccccaaggatacggtgctcccccccagttctcatttggatacgggcctccccccccaccccctgatcagtttgctcctcccggagtcccccctccaccagcaacacctggtgccgcacctctggctttcccaccccccccttcacaggctgcacccgatatgtcaaagcccccaaccgcgcagcctgacttcccttacggccagtacgcaggatatggtcaagacttgagtggcttcggtcaaggctttagcgatccctcacagcagccccctagctacggcggaccctctgtccccgggtccggtggccctccagctggcgggtcagggtttggaaggggccagaatcataatgtccaaggttttcacccatatcggaggtag

SEQ ID NO: 113912 - DNA, 2223 bp, synthetic construct
  misc_feature 1..2223: note = Description of Artificial Sequence: Synthetic coding sequence
  source 1..2223: mol_type = other DNA
atggctgccttctctgagatgggagtgatgccagagatagctcaagccgtggaagaaatggactggctccttccaaccgacatacaggccgaaagcattcccctgatcctcggcggtggggatgttctgatggctgccgagacgggttcagggaaaacaggtgctttctcaatccccgttattcaaatcgtctatgagactttaaaggaccaacaggagggaaagaaggggaaaacgacgatcaaaactggcgcttctgtcttaaataagtggcagatgaatccttacgacaggggcagtgcattcgcaatcggctccgatggactttgttgccagagtcgagaggtgaaggagtggcatggatgccgagcaacgaaagggctgatgaagggcaagcattattacgaggtctcctgtcatgatcaaggattgtgtagggtcggttggagcacaatgcaggctagtctggacctgggaaccgataagttcggcttcggctttggcggcaccgggaagaagagtcacaacaaacagtttgataactatggagaggaatttactatgcacgacacgattggctgttacctcgatatcgacaaggggcatgttaagttttctaagaacgggaaagatctcggcttagcttttgagatccccccccatatgaagaatcaggcattgtttcctgcgtgtgtcctcaagaacgccgaactaaagtttaactttggggaggaggaattcaaatttccgccgaaagatggatttgtggccttgagtaaggcacctgatggctacatagttaagtcccagcatagcggcaacgcacaggtgacccagactaagttcttacccaacgcacccaaagccctgatagtcgaaccatctagggagctcgctgagcagaccctcaacaacatcaaacaattcaaaaagtacattgataacccaaaactgcgggagctgctgatcatcggtggggtggccgcccgtgatcaactgtctgtcctcgagaatggtgttgatattgtggttggcacccccgggagattggacgacttagtgagcaccggcaaactgaacttgtcccaggtaagattcctcgtgctcgacgaggccgacgggctactgtctcagggttacagcgacttcatcaatagaatgcacaaccagattccgcaggtgaccagcgacggcaaaaggctgcaagtgatagtgtgctcggcgacgttgcactccttcgatgtgaagaaactgtccgaaaagataatgcacttcccaacttgggtggaccttaagggtgaggactccgtgccagacacagtgcaccacgtggtggtcccggtgaatcccaaaacagatcgcttatgggagcgactcggcaaatcacacataaggacagacgatgtgcatgctaaggacaacactcgtcctggggcaaacagcccagaaatgtggagcgaagccattaagatcctcaagggggagtacgctgttcgggccatcaaggagcataaaatggatcaggccatcattttttgccgtactaaaattgattgcgacaacctcgagcagtattttatccaacaaggcggaggaccagacaagaagggccaccaatttagctgcgtctgccttcacggagaccgtaagcctcacgagcggaaacagaacctggaaaggtttaagaagggggatgtaaggttcctgatctgcacagatgtggccgcgcggggaatagacatacatggggtaccctatgtgattaatgtgacactgcccgatgagaagcaaaactacgtgcatcgcataggaagggttggaagggcagagcggatgggacttgctatctcactcgttgctaccgaaaaggagaaggtgtggtatcacgtgtgttcaagccgtggaaaaggctgctacaatacaagactgaaagaggacggagggtgtacaatctggtataacgaaatgcaactactgtctgagattgaggagcacctcaactgtaccatttcacaggttgagccagatattaaggtgcctgtggatgaatttgacggaaaggtgacctatgggcagaagagggcggcagggggaggttcttacaaggggcatgtagatattctagcccctaccgtacaggagctcgctgcacttgagaaagaagcacagacctctttcctgcatctcgggtaccttcctaaccagctgttccgtactttttag

SEQ ID NO: 113913 - DNA, 51 bp, synthetic construct
  misc_feature 1..51: note = Description of Artificial Sequence: Synthetic coding sequence
  source 1..51: mol_type = other DNA
atggcagcattcagcgagatgggcgtgatgcccgagattgcccaagcctag

SEQ ID NO: 113914 - DNA, 1869 bp, synthetic construct
  misc_feature 1..1869: note = Description of Artificial Sequence: Synthetic coding sequence
  source 1..1869: mol_type = other DNA
atggcagcattctcagaaatgggtgtcatgcccgaaatagcccaggccgtggaagaaatggattggttgctgcctactgacatccaggctgagagcatcccgctaattctgggcggcggggatgtgctcatggccgcagaaactggcagcgggaagaccggggccttcagcatccccgtgatccagatcgtgtacgagaccctaaaagatcaacaggagggtaaaaagggcaaaacaacaataaaaactggcgcatccgtcctgaataagtggcagatgaatccatacgaccgagaggtcaaagagtggcacggctgtcgtgccacaaaaggtctgatgaaaggcaaacactactacgaagtaagttgtcatgaccagggcctatgtagggtgggctggtcaaccatgcaagcctcactggacctagggacagacaaatttggcttcggatttggaggaacagggaagaaatcccacaacaagcaattcgacaactatggcgaggagtttacaatgcatgacacaattgggtgctatttagatatcgataagggacacgtgaaatttagcaaaaatggcaaagacctggggctggcatttgagatacctccccacatgaagaaccaagcactgtttcccgcttgcgttttgaagaatgctgaactgaaattcaacttcggcgaagaggagttcaaattccctcccaaggacggatttgtggctctgagcaaagcccccgatggttacatcgttaaatcacagcacagcgggaatgcacaggtgacccagacgaaattcttaccaaatgccccaaaagcactgattgttgagccatcccgcgaacttgctgagcagaccttgaataatatcaagcaattcaagaagtacatcgataatcccaaacttcgggagctgctcattattggaggcgtggccgcaagagatcagctgtcagtcctggagaatggagtagatatcgtcgtggggacacctggtagactggacgatctggtgtcgactggcaaactgaatctgagccaggtacggttcctcgtcctggacgaggccgacggtttgctgtcacagggctacagcgactttatcaacagaatgcacaatcagattccgcaggtcactagcgatggcaaacggctacaagtaatagtgtgtagcgccaccctgcatagcttcgatgtcaaaaagctgtctgaaaagataatgcacttccccacgtgggtcgatttaaaaggcgaagacagtgtccccgataccgtccatcacgtcgtcgttccagttaatccgaagaccgacaggctatgggagcggttgggaaaatctcacatacggactgacgatgtccacgcaaaggataacaccagacctggcgcaaatagcccagaaatgtggagcgaggctatcaagatcctcaaaggagagtatgctgtccgcgccataaaagagcacaaaatggaccaggctattattttctgtaggaccaagatagactgcgataacctggaacagtacttcattcaacaaggagggggtcccgacaaaaagggtcaccagttttcctgcgtctgcctacacggagaccgcaagccacatgaacgaaaacagaatctcgaacggtttaaaaagggcgatgtgcgatttctgatctgtactgacgtcgccgccagaggtattgacattcacggcgtgccatacgtaatcaacgtgaccctgccggacgagaagcagaactatgtacatcgaataggtcgcgtgggccgcgcggaaaggatggggttggcgatcagtctggtagctaccgaaaaggaaaaagtttggtaccacatggttcagagagacgctgtcaccatctag

SEQ ID NO: 113915 - DNA, 2628 bp, synthetic construct
  misc_feature 1..2628: note = Description of Artificial Sequence: Synthetic coding sequence
  source 1..2628: mol_type = other DNA
atggggaagacagcaaacagccctgggtccggggctcgccccgatccagtgaggtcattcaacagatggaagaagaagcattcgcacagacagaacaaaaaaaagcagctgagaaaacagctcaaaaagccagaatggcaggtggagagagagtcaatttcccggttaatgcagaactacgagaaaatcaacgtgaacgagatcacgcggttttctgatttccctctgtcaaagaagaccctgaaggggctgcaggaagcccagtatcgactcgtgaccgaaattcagaaacaaaccatcggactggccctccaggggaaggacgttctgggcgccgcaaagaccggttcaggcaaaacactggctttcctggtaccagtgctcgaggcactgtaccggttacagtggacatcaactgacggcttgggggtgctcatcatatcacctacccgggaattggcttaccaaacctttgaggtgctgagaaaggtcgggaaaaaccacgacttttctgcagggctcataataggtgggaaagatctcaagcatgaggctgaacgcattaacaacattaacattctggtgtgtacgcccggccgcctactgcagcacatggatgagactgtaagttttcacgccacagatctccagatgctggtgctcgatgaggcagacaggatccttgacatgggtttcgctgatacaatgaacgctgtcatcgaaaatctgcccaagaagcgacaaacgctgctcttctccgcaacacagaccaaatcggtgaaggatttggcacggctcagtttgaagaacccagaatatgtatgggttcatgagaaggccaagtactcaacccctgcaaccctggaacaaaactacattgtgtgtgaactgcagcaaaaaatttccgtcctgtatagcttcctaaggtcacacttgaaaaagaagtcgatagtcttcttctcctcttgcaaggaagtgcagtacctgtacagagtgttctgtcgcctgagacccggggtgagcatcctcgccttacatgggaggcagcagcagatgcgccgcatggaggtctataatgagttcgtgaggaagcgcgcagcggttctgttcgctactgacatcgcagctcgcggactggatttccccgccgttaactgggtcctgcagttcgattgccccgaagatgccaacacatacattcacagagccgggcgcaccgccagatataaggaggacggcgaagctttactcatcctgctgccctccgaaaaggctatggtgcagcaactgttgcagaaaaaggtgccagttaaagaaattaagattaatccagagaaactgattgacgtgcagaaaaagcttgagtctatactggctcaggatcaggatttaaaggagcgggctcaacgttgtttcgtatcctatgtgagaagtgtttacctaatgaaagataaagaagtgtttgatgtctcaaaattgccaatacccgaatatgccctctctttggggctcgccgtggccccgcgggtgaggttcttacaaaaaatgcagaaacaacccaccaaggaactggtgcgctcccaggcagataaagttattgagcctagggctccgagcctgactaacgatgaagtagaggagtttcgcgcctactttaatgaaaagatgtcaatcctgcaaaaggggggtaaaagacttgaagggacagaacacagacaggacaatgataccggcaacgaagaacaggaggaggaagaagatgacgaagaggagatggaagaaaagttggccaaggccaagggctctcaagcaccctccctgccaaacacgtccgaggcccaaaagatcaaggaggtaccaacccaattcctcgaccgagatgaggaagaggaggacgccgacttcctgaaggtcaagcggcacaatgtatttggattagacctaaaggacgagaagaccctacaaaagaaggagccttctaagagttcaataaagaaaaagatgaccaaggtcgctgaagccaagaaggtgatgaagcggaactttaaagtgaacaagaagatcacatttactgatgagggcgagctagttcagcagtggccccagatgcaaaagagcgccatcaaagacgccgaggaggatgacgacaccggaggcattaatctgcacaaagctaaagaaagactgcaagaagaagataagttcgataaagaagagtatcggaagaagatcaaggcgaagcaccgagagaagcggctaaaggaaagagaggctaggagggaggccaataaaagacaggcgaaagcgaaagacgaagaggaagccttcctagattggagtgatgacgatgacgacgatgacgatggatttgatcccagtactctccccgatccagacaagtataggtcttctgaggattctgattccgaggacatggagaacaagatcagcgataccaaaaagaaacaaggcatgaagaagcgctcgaacagcgaggtcgaggacgtcggacccacatctcacaatcgtaaaaaggctagatgggacactctggaacccctagacaccgggctgtcgttagcggaagacgaggagctagtactgcatttgctgcgctcacagtcgtag

SEQ ID NO: 113916 - DNA, 2346 bp, synthetic construct
  misc_feature 1..2346: note = Description of Artificial Sequence: Synthetic coding sequence
  source 1..2346: mol_type = other DNA
atgggtaagacggcgaactctccgggtagcggcgcaagacccgacccagtgcgcagttttaacagatggaagaaaaaacatagccataggcagaataagaaaaagcagctcagaaagcagctcaaaaagcccgagtggcaggtcgagcgagagagtatctcccggctgatgcagaattatgagaagattaatgtcaacgagatcaccagattttcagactttcccctgtccaagaaaacactgaagggtctgcaagaagctcagtatcgcttggtgacggagattcaaaagcagacgatcgggctggctctgcagggaaaagacgtcctgggcgcggctaagaccggatcaggaaagactctggccttccttgttcctgtgaacgaggcggaccggattcttgatatgggtttcgccgacacaatgaacgccgttattgaaaacctacctaaaaaaaggcagacactcctgttcagcgctactcaaacaaaatccgtgaaggacttggcccgcctatccctgaagaacccggaatacgtctgggtgcacgagaaggcaaaatacagtacacctgccacattagaacagaactacatcgtttgtgagttgcaacagaagataagtgtcttatattcatttctgaggtcccatctcaagaaaaaaagtatcgtgtttttcagttcctgtaaggaagtgcaatacctctaccgtgtcttctgcagactccgacctggcgtatcaatacttgctttgcatggacgccagcaacagatgcggcgcatggaggtctacaatgaattcgttaggaagcgagcagccgtcctgtttgctactgatatcgcagccagaggcttggattttcccgcagttaactgggtcctgcaatttgactgccctgaggacgcaaatacatatatccaccgggcaggcagaacggcccgctataaagaggatggcgaggcccttctgattctgcttccatctgagaaagctatggttcaacaactgctccaaaagaaagttcctgtgaaagagatcaagatcaatcctgaaaaactgatcgacgtgcaaaagaagttggaatctatcctggcgcaagaccaggatctgaaagaaagggcccaaagatgtttcgtttcatacgtacgttccgtatatctgatgaaggataaagaggtcttcgacgtttcaaagctgcccattcctgaatacgctctttcccttgggttagccgtggccccacgagtgaggttcctacaaaagatgcagaaacagccaaccaaggagctcgtgcggagccaggcagataaggttattgagccacgcgccccctcactgacaaacgacgaggtcgaggaattcagggcctattttaatgagaagatgtctattcttcagaagggaggcaagcgactcgaaggcactgaacacaggcaggacaacgacaccggtaatgaggagcaggaggaagaggaagatgacgaagaagagatggaagagaagctagcaaaggctaagggctcccaggcaccttccttacctaatacatcagaagcccagaaaatcaaggaagttccaacccaattcctagaccgcgacgaagaagaagaggatgctgactttctgaaggtgaagcggcacaatgtctttggcctggacttgaaggacgaaaagacactgcagaaaaaggagccgtctaagtcaagcataaaaaagaagatgacaaaagtggcagaggcaaagaaagtgatgaagagaaatttcaaagtgaataaaaaaatcactttcactgacgaaggcgagctggtccagcagtggccacaaatgcagaaatccgcaatcaaagacgccgaagaggacgacgacactggaggcatcaatctgcacaaggccaaagaacggctgcaggaagaggacaaatttgataaggaggaataccggaaaaagattaaggctaaacatcgggagaaacgactgaaagagagggaggccaggagagaagcaaataagagacaggccaaagcgaaagatgaagaggaggcgtttctggattggtcagatgacgatgacgacgacgatgatggattcgacccctctacactccctgacccggacaagtatagaagtagcgaagactcagattccgaggacatggagaacaagatttctgacactaaaaaaaaacagggaatgaagaaacgctcaaatagtgaagtcgaggatgtgggcccaaccagccacaacagaaaaaaagcacgatgggacaccttggagcctcttgatactggcctgtcgttagcggaggacgaggaactggtcctgcacctgctgcgttctcagagctag

SEQ ID NO: 113917 - DNA, 1959 bp, synthetic construct
  misc_feature 1..1959: note = Description of Artificial Sequence: Synthetic coding sequence
  source 1..1959: mol_type = other DNA
atgagggggggcgggtttggcgaccgagatagggacagggaccgggggggcttcggcgcccgagggggcggtggcctccctccaaaaaagttcggaaatcctggagaacggctccgtaagaaaaagtgggatcttagtgaactccccaagtttgagaagaatttttatgttgaacacccagaagttgcacgattgacaccatatgaggtggacgaactaagaagaaaaaaagagatcactgttcggggtggggacgtctgtccaaagccagtctttgcatttcaccacgcaaactttcctcagtatgtcatggatgtgcttatggatcagcatttcaccgagccaacccctatccagtgccaggggttcccactggccctgtccggtcgggatatggtgggaatcgctcagacagggtcgggtaagacgctagcctacctcctccctgctattgtgcatattaaccaccaaccatatctcgaaagaggagatggtccaatctgtctggtattggcacctactcgggagctcgcacaacaggtgcaacaggttgcagacgactacggtaaatgttcacgtttgaaaagcacatgcatttatggcggggctcccaagggacctcagatacgggatctggagcggggggtggagatatgcattgccacgccaggacgcctgatagatttcctcgaaagcggcaagactaacctgaggcgttgcacataccttgtcctggatgaagcagacaggatgttggacatggggttcgaaccgcagatccggaagatcgtggaccagatcagacctgataggcagacactcatgtggagcgcaacatggccaaaagaagttaggcagctcgccgaagacttcttgagagattatacacagatcaacgtgggtaatctggaactcagtgcaaaccacaacatcttgcagattgtagacgtttgcatggaatcggagaaagaccacaagctgattcagctgatggaggaaattatggctgagaaagaaaataagactattatttttgtcgaaacgaagagacgctgcgatgacctgacgcgccgaatgcgccgcgacggttggccggccatgtgcatccacggcgataagagccagcccgagcgagactgggttctgaatgagtttcgcagcggcaaagcaccgatcttaatcgccacagacgtcgcaagtcgcggcctgggctttgacgtggaggacgtcaagttcgtaattaattacgattatcctaacagctccgaggactatgtgcacaggatcgggaggacagccaggtccacaaacaagggcaccgcttacacctttttcactccagggaacctgaagcaggctcgcgaactaattaaggtcttggaagaagcaaaccaggccattaatcctaagctgatgcaactagtcgatcataggggtggtggcggcggcgggggaggcaggtcccgttatcgcaccacgtcctctgcgaataacccgaatctgatgtatcaggatgagtgcgataggcgactgcggggcgtgaaggacggaggaaggagggactccgcgagttacagggaccggtccgaaactgatcgcgccggatacgccaatgggagtggctatggatcgccaaactcagcgttcggtgcccaggcgggtcagtacacgtacggccagggaacttatggagccgcggcctatggtacatcttcatatacggctcaggaatacggcgccggaacttatggcgcctccagcaccacttccactgggcggtcctctcagtcctcttctcagcaatttagcggcatcggtcgatcgggtcagcagcctcaacctctgatgtcccaacagtttgcccagccacccggcgccacaaacatgataggttacatgggccagactgcttaccaataccccccacctccccctccgcccccgccctcccgtaaatag

SEQ ID NO: 113918 - DNA, 2196 bp, synthetic construct
  misc_feature 1..2196: note = Description of Artificial Sequence: Synthetic coding sequence
  source 1..2196: mol_type = other DNA
ctacccaccggctttgtcgcacctattttgtgcgtgctgctgccatcgccaaccagggaggctgcaactgttgccagcgccaccggcgattccgcttcagagcgagaatctgcagctcccgctgctgcgcccaccgcggaagcacccccgcccagtgttgttactaggcccgaacctcaggccttgccgagtcccgccattagggcgccccttccagatctatatccttttgggactatgagagggggtggcttcggagacagggaccgcgaccgagataggggaggctttggcgcgcgtggcggaggagggcttcctcctaagaaattcgggaatcctggcgaacgactgcgcaagaagaaatgggacctgtcagagttgcctaaattcgaaaagaacttttacgtggaacatcctgaggtcgcccggctgactccctatgaagtggacgagttaaggaggaaaaaggagataacagttcgtgggggggacgtgtgcccaaagcccgtattcgcctttcaccacgccaatttcccccagtacgtgatggatgtactgatggaccaacacttcaccgaacctactcccatccagtgtcagggattcccattggcgctgtccgggagggacatggtggggatcgctcagactggctccggcaaaaccttagcctaccttcttccagctattgtccacattaatcaccaaccctacctggagaggggagacggtccaatttgtctggtgttggccccaaccagggaactggctcaacaggtgcagcaggtggccgatgattatggaaagtgctccaggctgaagtctacttgcatctacggcggtgcacctaaggggccccagattcgggacctagaacgaggagtcgaaatatgtatcgccactcctggaaggctcattgactttctcgagtctggtaagaccaatctgaggagatgtacctacctggtgcttgatgaggccgatcggatgctggacatgggatttgagccccagatccgcaagattgttgatcagattaggcccgatcggcaaaccctgatgtggagtgctacttggcccaaggaggtgcgacagcttgcagaagatttcttgagagattacactcagatcaatgtggggaaccttgaactgtctgcaaatcacaacatactgcaaatcgtggacgtttgcatggaatcagagaaagatcacaaattgatccaactgatggaggaaatcatggccgagaaagagaataagacaatcatttttgtggagaccaagcggcggtgtgatgacctgacaagaagaatgaggagagacggctggccagccatgtgcatccacggagacaaaagccaaccagagcgcgattgggtcctcaatgaattcaggtcggggaaagctcctatcctgatcgccactgatgtagcaagtagggggctcgatgtcgaggatgtgaagtttgtgattaactacgactacccaaactcgtcagaggattacgtgcaccgcatcggacggacggctcgttctactaacaaaggtacagcatacaccttcttcacccccgggaacctcaagcaggctcgggaattgatcaaggtattggaggaagcaaatcaggccattaaccccaagctcatgcagttagtggaccaccggggcggcggcggtgggggagggaaaggaggtagatcccggtatcgaactacaagtagtgccaacaacccaaacttgatgtaccaagacgaatgcgatagacgcctccgcggcgtcaaagacggcggacggcgggattccgcatcatacagggatagatccgagacagacagagctggatacgcaaatggctccggatacggttctcccaacagtgcctttggagcccaggccggccagtatacctatgggcagggtacctatggcgctgcggcatatggcacatcatcctataccgcccaggaatacggtgccgggacgtatggggcaagtagcactacgtctacagggagatcttcacagagttcatcccagcagttcagcggcatcggccgatccggacagcagcctcagccacttatgagtcagcagttcgcacagcccccaggagctaccaatatgatcgggtacatgggtcagactgcatatcagtaccccccaccaccccccccccccccgccttcccgcaaatag

SEQ ID NO: 113919 - DNA, 2190 bp, synthetic construct
  misc_feature 1..2190: note = Description of Artificial Sequence: Synthetic coding sequence
  source 1..2190: mol_type = other DNA
ctgccaacggggttcgtggcaccaatattgtgcgtgctcctgccctcgcctacaagagaagccgccactgtggcctctgccactggcgattctgcgtccgagagggagagcgcggcccctgcggctgcccccaccgcggaagcaccacccccaagcgtggtaactcgtcccgaaccacaggcactgccttcccccgcaattcgtgcccccctaccagatttataccccttcggcacaatgcgagggggaggattcggagatcgagaccgcgaccgggaccgtggaggattcggtgcccggggaggtggtgggttaccgccaaaaaagtttgggaatccaggagaaaggttgaggaagaaaaaatgggatctgtcagaactgcctaagtttgagaaaaatttctacgtggaacatccggaggtggcaaggttaactccatatgaggtcgacgagctccgtagaaagaaggaaataaccgtcagaggcggcgacgtgtgtcccaagccagtgttcgcatttcaccatgcaaactttccacagtacgtaatggatgtgctgatggatcagcacttcaccgaaccaactcctatccagtgccaaggattcccactcgctctcagtggaagggatatggtggggattgcccaaacaggaagcggcaagaccctggcttacctcttgccggccatcgtccatatcaatcatcagccataccttgaacgcggggatggtcctatctgtttggtacttgcgcctacccgagaattagcgcagcaggtgcaacaggtcgcagacgactacggtaagtgttccagactgaaatccacctgtatttacggaggtgctcccaaaggcccacagatacgcgatttagaaagaggagtcgagatctgcatcgcaactcccggaagattgatcgattttctcgaatccgggaagacaaacttgagacgctgcacctacttggtccttgatgaggcggaccggatgctcgacatgggcttcgagccacaaatccgcaaaattgtggaccaaattcgtcctgatcgacagaccctcatgtggtcagcgacttggcctaaagaggttcgccagttggcggaagactttcttagggactatactcagatcaatgtgggtaacttggaactaagtgccaaccacaatatcctccagatcgttgacgtttgtatggagtcagaaaaggatcataagctcatccaattaatggaggagattatggccgagaaggaaaataaaactataatcttcgtcgagacgaaaagaagatgtgatgatctgacacgtcgaatgcgacgggatggatggcctgccatgtgcatccacggggacaagagtcagccagagcgcgactgggtgctgaacgaatttcggtctggtaaggcacccatccttatcgccactgacgttgccagtcgcgggctggacgttgaagatgtgaaattcgtgatcaattacgattacccaaactcatctgaggattatgtgcatcggatagggcggaccgcaagatccaccaacaaaggcacagcctacactttttttacacctggtaacctcaaacaggcgagagagctgataaaagtgctcgaggaggcaaatcaagcaataaatccaaagctgatgcaactggtggatcataggggtggaggcggaggcggggggggcagaagtagatataggactacatcatctgctaacaatccgaatctcatgtatcaggatgagtgcgatcgcaggctcaggggcgtcaaggacgggggtagaagagatagcgcctcttatcgcgaccgctctgagacagatagggcgggatacgctaatggttcaggctacggaagcccaaatagcgccttcggcgctcaagccggacaatacacatatggtcagggtacctatggcgccgccgcatacggcacctcttcctacacagctcaggaatatggcgcaggcacatacggtgcctctagtacaacctcgacgggaagatcatcgcagtcctcctcacagcagttttccggaattgggcggtctggacaacagccccaacctctgatgtcacagcagttcgctcagccccctggtgcaaccaacatgatcggctatatgggtcagacagcctaccaatacccacctcctcctcccccccccccaccttcacggaagtag

SEQ ID NO: 113920 - DNA, 2214 bp, synthetic construct
  misc_feature 1..2214: note = Description of Artificial Sequence: Synthetic coding sequence
  source 1..2214: mol_type = other DNA
ccaaacctgccaacgggattcgttgcacctatcctatgcgtgctgttgccgtcccccacaagggaggccgccacagtggcctctgctaccggtgacagtgctagtgagcgggaatcagctgctcctgctgctgccccaacagcggaagcacctcccccatctgttgtaacaaggccagagcctcaagccttgcctagcccagctatccgggccccactgccagatctgtaccccttcggcacaatgcgaggagggggatttggggatcgcgacagggatcgggacagagggggattcggagccagaggaggagggggcttgccccctaaaaagttcggcaatcccggtgagagacttcgtaagaagaaatgggacctgagcgaacttcctaaattcgagaaaaacttttatgttgagcatcctgaggttgccagactgaccccttatgaggtggatgagttgcgccgaaaaaaagagatcaccgtccgtggcggtgatgtctgtccaaagccggtttttgcatttcatcacgccaatttcccccagtacgtgatggacgttttgatggaccagcactttacagaacccacccccatccaatgccaaggtttccctttagcattatccggacgcgatatggttggaattgcacagaccgggtccggaaaaaccctggcttacttgttacccgccatagtgcatattaatcaccagccttacctggaacgaggagacggccccatctgcctcgtcctagcaccaactagagagctggcgcaacaggtgcaacaggtggccgatgactacggaaaatgctcgcgcctgaaatccacctgcatctacggtggggctcccaaagggcctcagattagggacctcgaaagaggggtggaaatctgcatcgcaacacctgggcgtctgatcgacttcctggagagcggcaaaaccaacctcagacgttgcacatatctggtgctggatgaggcagataggatgctggacatgggtttcgagccgcagatacgaaagatagtcgaccagattcgaccggaccgccagactctcatgtggtcagccacgtggccgaaggaggtcagacaactggccgaggactttctaagggactacacacagatcaacgtgggcaatcttgaactgtctgcaaatcacaacattctgcagatcgtagacgtgtgcatggagtctgaaaaagaccacaagctgatccagctcatggaggagatcatggccgagaaagagaacaagactatcatcttcgtggaaacaaagcgaaggtgcgatgacctgactagaagaatgcgtagagatggctggcccgccatgtgtattcacggtgacaagtcacagcctgaaagggactgggttctaaacgaattcagatccggcaaggcacctatactgatcgctacagacgtcgcctctagaggacttgacgtggaggacgtcaagttcgttatcaattatgactatccgaactcaagcgaggattacgtgcataggatcggcagaaccgccaggtccacaaacaaaggtaccgcgtacacatttttcactccaggtaatctgaagcaggcccgcgagctaattaaagtgcttgaggaagccaaccaggctataaaccccaagcttatgcagcttgtggatcataggggcggtggcggtggagggggaaaagggggccggtctaggtaccggacaacgtcttccgccaacaaccccaatcttatgtaccaggatgaatgtgatcgccggctgcgcggggttaaagacggggggcgtagagacagcgcgtcctaccgggatcggagtgagacagatcgggcaggctacgctaatggcagtggatacggatcgcctaattccgcgttcggcgcccaggccggccagtacacatatggccagggaacgtacggggccgctgcgtacggaacgagctcctataccgcacaggaatacggggccggcacgtatggtgcatcctccactacctcgacaggccgttcatctcagagctcctcacaacagttcagcggtattgggagaagcggccagcagccacaaccactgatgagccagcaattcgctcagccaccgggcgcgaccaatacacttctgcttcttcccttgctgctgctgcacgttaacgaaaccacacaggtcgttgtgacacctgcggatctaatcaccttttag

SEQ ID NO: 113921 - DNA, 546 bp, synthetic construct
  misc_feature 1..546: note = Description of Artificial Sequence: Synthetic coding sequence
  source 1..546: mol_type = other DNA
atgcagctggtggatcataggggggggggaggcggcgggggcggacgaagccggtataggactactagcagcgctaataacccgaacttaatgtatcaggacgaatgcgatcgaagactcagaggagttaaggatggggggagaagagattccgcttcttacagagatcggagcgaaacagatcgagccggatatgcgaatggcagtgggtacggcagcccaaacagtgcatttggagcccaggcaggccagtacacatacgggcagggcacgtatggagccgccgcatatggaacgagctcctacacagctcaggagtatggagcgggtacctatggcgctagtagcaccacctcaactgggagatcatcccagagtagtagccagcaattctccggcatcggccgctctggacaacagccacaaccccttatgagccagcaatttgcacaaccacctggcgctacaaatatgatcggctatatgggccagacggcataccagtatcctccaccccccccgcctcctccaccaagccggaaatag

SEQ ID NO: 113922 - DNA, 2013 bp, synthetic construct
  misc_feature 1..2013: note = Description of Artificial Sequence: Synthetic coding sequence
  source 1..2013: mol_type = other DNA
atgagccacctgcccatgaagttattgcgcaagaagattgaaaaaaggaacctaaagctccgacagcggaacctgaagtttcagggggcaagcaaccttactctcagcgagactcagaatggtgacgtgtctgaggagaccatgggaagcaggaaagtcaagaaaagtaaacagaaacccatgaacgtcggcctgagtgagactcagaacggaggtatgagccaggaagccgtgggcaacatcaaagtgaccaagtccccacagaagtctaccgtcctgacaaatggggaggctgccatgcagtcctctaattcagagagcaagaagaagaagaagaagaagagaaagatggtgaacgatgccgagcctgacactaaaaaggccaaaaccgagaacaagggcaaatctgaggaagaaagtgccgaaaccaccaaggagaccgaaaataatgtcgagaagcccgataatgatgaggacgagtccgaggtcccaagcttgccactgggtctcaccggcgcctttgaagacacatcttttgcatccctgtgcaaccttgttaatgagaatactttgaaagccatcaaggagatggggttcaccaatatgaccgagatccaacataagagtataaggccattactggagggaagggacctgctggcagctgcaaaaaccgggtctggtaagaccctcgccttcctcatcccagcagtcgagctgatcgtgaagctccgttttatgcctcggaacggtaccggggtgctcattttaagcccaaccagggagctggccatgcaaaccttcggggtccttaaggaactaatgacccatcacgtgcacacatatggcctcatcatggggggatctaaccggtcagccgaggcccaaaagctcggaaacggcatcaatatcattgtggccactccaggccggctgctggatcatatgcagaacacaccaggcttcatgtacaaaaacctccagtgtctggtaattgacgaggccgaccgaattctggatgtcggctttgaggaggagctgaagcagataattaagcttctacccactcggagacaaactatgttgtttagcgccactcagacccgaaaagtggaggaccttgcccgcatcagcctcaagaaagagcccctttacgtgggcgttgacgatgacaaagcaaacgcaactgtggatgggctcgagcagggatatgtcgtttgtccttcagaaaagcggtttcttctactgtttaccttcctgaagaagaataggaaaaaaaagctgatggtgtttttttcctcatgtatgagcgtaaagtaccattatgagttgcttaactacatcgaccttcccgtattggccatccatggcaaacaaaaacagaataaacgaaccacaactttctttcagttttgcaacgccgattcagggactctcctctgcactgatgttgcggcacgcggtctggatattccggaggtggactggattgtgcagtacgacccccctgacgatccaaaagagtatatccacagggttggaaggacagcacgcggactgaacggaagaggtcatgctctactgatcctgcgtccggaggagctggggtttctacgttacctgaaacagtctaaggtcccgctcagtgaatttgacttctcttggtctaagatctccgacatacagagccagctggaaaagcttatcgaaaaaaactacttcttacataaatccgcgcaggaggcgtacaagtcgtatattcgcgcgtacgactcacatagtttgaagcagatttttaacgtgaataacctaaatctccctcaggtagctctgagcttcggtttcaaagtgccacccttcgtggacctaaacgtaaactcaaatgagggaaaacaaaaaaaaaggggcggtgggggaggctttgggtatcaaaaaacaaagaaagtagagaaatctaagatttttaaacacatttccaagaaaagctcggattcccgacagtttagtcattag

SEQ ID NO: 113923 - DNA, 1230 bp, synthetic construct
  misc_feature 1..1230: note = Description of Artificial Sequence: Synthetic coding sequence
  source 1..1230: mol_type = other DNA
atggagcaagaacagactttcggggtgctgaaagagttgatgacacatcatgttcatacttatgggttaattatggggggcagcaacagatctgccgaagcacagaagctggggaatggaatcaacatcatagtagcaacccctgggaggctgctcgatcacatgcagaacacaccggggttcatgtacaagaacctccagtgcctggtgatcgacgaggctgatcgaattcttgacgttgggtttgaggaagagctcaagcagataattaaactgctacctaccaggaggcaaacgatgttgtttagcgcaacccagacccgaaaggtggaagacctggctaggatctccttgaaaaaagagcccctctacgtgggagtggacgatgataaagctaacgctaccgttgatggcctggagcagggctatgtagtgtgtccttctgagaagaggttccttctcctgttcacttttctgaaaaagaatagaaagaaaaaacttatggtttttttttcctcatgcatgtccgtaaagtaccactatgaactgctgaattacattgacctccccgtgttggccatccatggcaagcagaaacagaacaaaaggactactaccttttttcagttctgtaacgcagacagcggcactctcctgtgcaccgacgtcgccgctagaggactggacattccagaggttgactggatcgttcaatacgatccccctgatgatccaaaggaatacattcaccgggtaggtcgcaccgctagagggctaaacggaagaggtcatgcactgctgattctgaggccagaagagctgggattcttgagatatttgaaacaatccaaagtgcctctctctgagtttgatttctcttggagcaagatatcagatatacaaagccagcttgagaagctgatagaaaaaaattacttcctgcataaatcagcccaggaggcttacaagtcctatatccgggcttacgatagccacagcctgaagcagattttcaacgtcaataacttgaatctgccccaggttgcactcagcttcggctttaaggtgccgccctttgtggacctcaatgtaaactctaatgagggtaaacagaagaaaagagggggaggaggcggctttggctatcagaagacaaagaaagtcgaaaaaagcaaaattttcaaacatattagcaagaaatcaagcgacagccggcagttttcccactag

SEQ ID NO: 113924 - DNA, 2475 bp, synthetic construct
  misc_feature 1..2475: note = Description of Artificial Sequence: Synthetic coding sequence
  source 1..2475: mol_type = other DNA
atggctgctgcattcgaagcctccggcgctctggccgctgtggccacggccatgcctgctgagcacgtagcagtgcaagtacctgcacctgaacccactccgggccctgttagaatcttgcgaactgctcaagacctctcctctccaaggacccgaactggagacgtgctgctggctgaacccgccgactttgagagtttattactgagtcgacccgtcctggagggcctgcgcgcagccggcttcgagcgcccctccccagttcaactcaaagccatccctcttggaaggtgcggtctggacctgattgttcaggcaaagagcggaacagggaagacctgtgtgttcagcaccatcgctctggattcactggtgttggagaatctgagtacacagatcctaatcctggcacccacccgcgaaatcgctgttcagatacattctgtgatcactgctatcggaattaaaatggagggattggagtgtcatgtgttcattggcggcacgccattgagccaagacaagacacggctgaagaagtgtcacatcgctgttgggagccccggccgaattaagcagttgatcgagctggactatctgaatccaggcagcatacgcctgttcatactggatgaagccgataagctgctggaggaaggctcgtttcaggaacagatcaattggatttattcttccttgcccgcatcaaaacagatgctggctgtctcagccacttacccagagttcctcgcgaatgcccttacaaagtatatgcgggaccctactttcgtgagactgaactccagcgatccatctctcatcggtttgaagcagtattacaaggttgtaaacagctaccccctagctcataaggttttcgaggagaagacacagcatctgcaagaactcttctctcgtatcccatttaaccaagctctggtcttttccaacctacattcccgggcccagcatttagctgatattctgtcttcaaaaggattccctgctgagtgtatttctggcaacatgaaccagaaccagcgcctggacgctatggccaaactgaaacactttcactgtagagtgttaatcagtacagatctgacatccagaggcatcgatgctgaaaaggtgaacctggtggtgaacctcgatgttccgttggattgggagacgtacatgcatcgcatcggtagggctggtcgctttggaaccttagggctgactgtgacctactgttgtcgcggcgaagaggagaacatgatgatgcgcattgcccaaaaatgcaatataaatctgctcccactccccgaccctattcccagtggcctcatggaggaatgcgtggactgggacgtggaggtgaaggcagcagtgcacacttacggcatagcctcagtgcctaaccagcccctgaagaaacagatacagaagattgaaagaaccctgcagattcagaaagcccacggcgatcatatggcttccagcagaaataactccgtgtccgggctgtctgttaaatccaaaaacaatactaaacagaaactgcctgtgaaaagccattcggaatgcggcatcatcgagaaagccacttccccaaaggagctcggctgcgaccgacagtccgaggaacagatgaagaacagtgttcagactccggtcgaaaatagcacaaacagtcagcaccaggtcaaggaggctctgcccgtgagtctccctcagattccctgccttagctcctttaagattcatcagccgtatactctcacattcgcagaactggtcgaggactacgaacactacattaaagaaggtttagagaagccggttgagatcatccgccattacacaggacctggcgaccagacggtgaatcctcagaacggtttcgtgagaaataaagttattgaacaacgagtgccggtccttgcatcatcttcacagagtggcgatagcgagtccgattccgatagctactcctcacgcacctcaagccagtctaagggtaataagtcatatcttgagggttcaagtgacaaccaacttaaggatagcgagagtacgccagtggatgatagaattagtctggagcagcctcccaacggaagcgatactcccaatcccgagaagtatcaggaaagtcctgggattcaaatgaaaacgcgtctaaaggagggcgcctctcagcgggcgaagcaaagtaggcgcaatctgccaaggcgaagcagctttaggttgcagacagaagctcaggaagacgactggtatgactgccatcgcgagatccgcctttccttttcagacacataccaggattacgaggaatattggagagcatattatagggcatggcaggaatattatgcagccgcttcacacagttattactggaatgcacagaggcatccaagttggatggctgcgtatcacatgaataccatctacctacaggaaatgatgcactccaatcaatag

SEQ ID NO: 113925 - DNA, 417 bp, synthetic construct
  misc_feature 1..417: note = Description of Artificial Sequence: Synthetic coding sequence
  source 1..417: mol_type = other DNA
atggccgccgcatttgaagccagcggggccttagctgccgttgccacagccatgcccgcggagcacgtggctgttcaggtgcccgctcctgaaccaacccctggccctgtcagaattctcaggacggcccaggacctgtccagcccaaggacacgcacaggtgacgtgttgcttgcagaacccgcagactttgaaagtctgctcctgtccagacccgtcctcgaaggattgagggctgctgggtttgagcgaccttccccagtgcagctgaaggccattccacttggacggtgcgggttggatctgattgtccaagccaagagcgggaccggcaagacgtgcgtcttctccactatcgccttggactctctggtgctggagaacctgtccacccaggctgagctgtccaacagttag

SEQ ID NO: 113926 - DNA, 2352 bp, synthetic construct
  misc_feature 1..2352: note = Description of Artificial Sequence: Synthetic coding sequence
  source 1..2352: mol_type = other DNA
atgcctggcaaactgcgctccgacgcaggactggaaagtgacaccgcaatgaaaaagggggagacgctgcggaaacaaacagaggaaaaagagaaaaaggagaagcccaaatccgataagacggaagaaattgccgaggaggaagagacagtgtttcccaaagccaagcaggtgaaaaagaaggccgaaccctcagaggtggacatgaattctccaaagagcaaaaaagcgaaaaagaaagaagagccatcccaaaacgatatctccccaaagacaaagagccttagaaagaaaaaagagcccatagaaaaaaaggtagtgtctagtaagaccaagaaggtcacaaagaacgaggagcccagcgaggaagagattgacgcaccgaagccgaaaaaaatgaaaaaggaaaaagagatgaacggcgaaaccagagaaaaatctcctaagctcaaaaatggctttccacatccagaacctgactgtaacccttccgaggcagcatctgaagaatcaaattccgagatcgagcaggagatccccgttgaacagaaagaaggggcctttagcaattttcctatctccgaggaaactattaaactcctcaagggccggggagtgacctttctcttccctatacaggctaaaacgtttcaccatgtttactctgggaaggacctgatagctcaagctaggactggcacaggaaaaactttctccttcgccataccactaatcgagaagctgcacggggagctccaggaccggaagcgcgggagggccccgcaggtgcttgtgctggctcctactcgggagttggccaaccaagtatccaaggacttcagcgatattactaagaagttgagtgtcgcttgtttctacggtggtacgccctacggcgggcagttcgaaaggatgaggaacgggatagacattctcgtgggcacgccgggcagaataaaggatcacatccaaaatggaaagttggatctgaccaagctcaagcatgtcgtcctggacgaggtggaccagatgcttgacatgggctttgcggaccaagtcgaggagatcttatccgtagcttataagaaggactcagaagacaatccacagaccctgctctttagcgcaacgtgccctcattgggtgttcaatgtggccaagaaatatatgaagtccacatacgagcaggtggacctgattggcaagaaaacacagaagacggcaattaccgtggaacacctggccattaaatgtcattggacacagcgggcagccgtgattggggacgtcatccgagtgtacagcggacaccaaggcagaactatcatcttttgcgagacaaagaaggaggcccaagagctgagtcagaactcagctataaaacaagatgcccagagcttacatggagatattccacagaagcaacgggaaattactttgaaaggtttccgcaacggaagttttggggtgctggtcgctaccaacgtggctgcacggggtctcgatatccctgaggtggatctggtaatccagagctctccacccaaggatgtggagagttacatacacagatcaggccgcactggacgtgcgggcaggaccggggtgtgcatctgcttttaccagcacaaggaggaataccagctggtccaggtcgagcaaaaagcaggcatcaagttcaagcgaatcggcgtgccttcggcaaccgagataataaaggcctcttctaaagatgccattagactgttggattcagtgcctcctacggcgatatcccattttaagcaaagtgccgagaagctgattgaggagaagggtgccgtggaagctttggctgctgcactagcccacatttccggcgcaacatctgtcgaccagaggtctctaatcaattctaatgtcggttttgttaccatgattctgcagtgttcgattgagatgccaaacatttcctacgcttggaaagagctgaaagagcagctcggcgaagaaatcgatagtaaggtgaaggggatggtgttcctgaaggggaaactgggtgtctgtttcgatgtgcctaccgcctccgtgaccgaaatccaggagaagtggcacgattctcggcgttggcagctgtccgtagccaccgagcagcctgagcttgaaggacccagggaagggtacggtggcttccgaggccagcgcgaagggagcagggggttcagaggccaaagagatggcaatagaagatttaggggtcagcgtgagggttctaggggaccccgtggccagagaagcggtggtggaaataaaagtaacagaagtcagaacaagggtcaaaagcgaagcttcagcaaggcattcgggcagtag

SEQ ID NO: 113927 - DNA, 249 bp, synthetic construct
  misc_feature 1..249: note = Description of Artificial Sequence: Synthetic coding sequence
  source 1..249: mol_type = other DNA
atgccagggaaactgcggagcgatgccgggctggaaagtgacacagccatgaagaaaggggagacattgagaaaacagactgaggaaaaggaaaagaaagaaaagcccaagtccgacaaaactgaggagattgcggaagaagaggaaacagttttcccaaaagccaagcaggttaaaaaaaaggccgagccaagtgaagtagacatgaactcgccaaaaagtaaaaagaagaagaagaagaagaaatag

SEQ ID NO: 113928 - DNA, 2463 bp, synthetic construct
  misc_feature 1..2463: note = Description of Artificial Sequence: Synthetic coding sequence
  source 1..2463: mol_type = other DNA
atggccggagagcttgctgataaaaaagatagggacgcctcgccttcaaaagaagaacgcaaacggtcccggacccccgatagggaaagggatcgtgaccgggatagaaaatcctctcccagcaaagatcggaaaaggcaccgctctcgcgaccggaggcgtggcggttcccgctcaaggagtcgtagcaggagcaagagcgcagagcgggagcgcaggcataaggagagagagcgggacaaagaaagggaccgaaacaaaaaggaccgagatagagacaaggatggccaccggcgggataaggatcgtaagagaagtagcctcagccctggccggggaaaggatttcaaatcgaggaaggaccgggactcaaagaaggatgaggaggacgaacacggcgacaaaaaacccaaggcccaaccactgtccctcgaggaacttctggctaagaagaaggccgaagaagaagcggaggccaagccaaagttcttgagtaaagcagaacgagaagccgaggccttgaagaggcggcagcaggaagtggaggaaaggcagcggatgctggaagaagaacggaagaaacgtaagcagttccaagatctgggtaggaagatgctagaggaccctcaagagcgcgagcgcagagaacgccgcgaacggatggagcgtgagacaaacggcaatgaggacgaagaggggcgccagaagattagagaggaaaaggacaaatctaaagaattacacgccattaaggaaaggtatctgggtgggataaagaagcgcagacgtactcgccacctcaacgatagaaaattcgtgtttgagtgggatgcatctgaggatacgagtatagattacaatcccctgtataaggagcgccatcaggtacagttactggggaggggctttatagctggaatagatctgaagcagcaaaaacgtgagcagtcgcggttttacggggatctgatggagaagagacggaccctggaggaaaaggagcaggaggaagcacggttgcgcaagctaagaaagaaagaggctaaacaaaggtgggacgataggcactggagccagaaaaagcttgatgagatgaccgatagagactggaggatcttccgggaggactatagcatcacgacgaagggcgggaaaatccccaaccccattcgttcttggaaggactcgagtctgccacctcatatcctcgaggtgatcgacaagtgcgggtataaggaacctacacccattcaacgccaggccatacccataggcttgcagaaccgagacatcatcggggttgccgaaaccggttctgggaagaccgccgccttcttgatccctctgcttgtctggatcactacactgcctaagatagaccggattgaagagagtgatcaaggaccatacgctattattctagctcctacaagagaactggcccagcaaatcgaggaggagacaattaagttcgggaaaccgctgggaatccgcaccgtggccgtgataggcggtatctctcgcgaagaccagggttttagattgaggatgggttgcgagatcgttatagccactcccggtcgtttgatcgacgtacttgagaataggtacttggtgctgagcaggtgtacgtatgtagtcttggatgaagcagaccgcatgattgacatgggcttcgagccagatgtgcaaaagatcctggagcatatgcctgtaagcaatcagaaacccgataccgatgaggcggaggatccagagaaaatgctggccaactttgagagtgggaaacataaatatcgccagacagtgatgtttaccgctaccatgccccctgcggttgaacgccttgccagatcctatttacgacggcccgccgtggtgtacattggaagcgccgggaaaccacatgaacgcgtggagcaaaaggtgtttttgatgtcagaatcagagaaacgtaaaaaactactcgcaatcctggagcagggtttcgaccctccaattatcatattcgtgaaccaaaagaaaggctgcgatgttctcgccaagagcctggagaagatgggatataatgcttgtacgctgcacggcggcaaagggcaggaacagcgcgagttcgcgctgtcgaacctgaaggccggggcaaaggacatcctggtcgcgactgacgtggcgggacggggaattgacatccaggacgtaagcatggtcgtaaattatgatatggccaagaacatcgaggattatattcataggatcgggagaaccggccgggccggaaaatccggagtggctatcacttttctcacaaaagaggacagcgccgtgttttacgagctgaaacaggctattctcgaatctcctgtatcaagttgtccgcccgaactggccaatcatccagatgcgcagcataaaccagggacgatattgacgaagaagcgtagagaggagaccatttttgcttag

SEQ ID NO: 113929 - DNA, 417 bp, synthetic construct
  misc_feature 1..417: note = Description of Artificial Sequence: Synthetic coding sequence
  source 1..417: mol_type = other DNA
atggccggcgaattagcagataaaaaggaccgggacgcgtctccttctaaggaggagagaaagcggtcccggactcccgatagggagagagatcgggatcgggaccggaaatcctccccttccaaagacaggaaaagacatcgcagcagagaccgccggcggggtgggtccaggagccgatccaggagccgtagcaaatctgctgagagagaacgcagacataaggagagggaaagggacaaggagcgcgaccggaacaaaaaagatcgggatcgtgataaagacgggcatagacgagataaggaccggaaacgttccagtctctcacccggccgaggcaaagacttcaaatcaagaaaagacagggactctaagaaagacgaggaggacgagcatggcgataaaaagcctaagtag

SEQ ID NO: 113930 - DNA, 549 bp, synthetic construct
  misc_feature 1..549: note = Description of Artificial Sequence: Synthetic coding sequence
  source 1..549: mol_type = other DNA
atggcgggggagcttgccgacaagaaggaccgggacgcttccccctctaaggaggagcggaagagaagtcgtaccccagatcgggaacgcgaccgggaccgcgacaggaaatcaagcccttctaaagataggaagagacatagatcccgggaccgccggcgggggggttccaggtcccgctctcggtcccgaagcaagagcgcagagagagagaggaggcacaaagaacgcgagagagacaaagagagggatcgtaataaaaaagaccgagacagagataaagatggtcacaggagggacaaagaccgcaaaaggtcttccctgtcaccgggccgtggaaaagacttcaagtcgagaaaggaccgggactcaaagaaggacgaggaagatgagcacggggacaaaaaacctaaagcacaaccactgagtttggaggagctcctcgctaaaaaaaaagcagaggaggaggccgaagccaaacctaaatttctttcaaaggcggagagggaggcagaggctctgaagcgcagacaacaggaagtggagtag

SEQ ID NO: 113931 - DNA, 2580 bp, synthetic construct
  misc_feature 1..2580: note = Description of Artificial Sequence: Synthetic coding sequence
  source 1..2580: mol_type = other DNA
atgaaattgaaagacactaaatcacgccctaaacagtctagctgtggaaaatttcaaaccaagggtatcaaagtggttggaaaatggaaggaggtaaaaattgacccgaatatgtttgctgacggccaaatggatgatttggtgtgctttgaggagctgaccgactatcagctggtgtctccggcgaagaatcctagcagtctgttttccaaggaggctccgaaacgaaaggctcaggctgtgtccgaggaagaagaggaggaagaagggaaatctagctcccctaagaagaaaatcaaactgaaaaaatctaagaatgtggccactgagggcacctccacacagaaggagttcgaggtgaaggaccctgagctggaagcacaaggcgacgacatggtctgcgacgatcccgaagctggggaaatgacatcagagaacctggtgcagacagcacctaagaagaaaaaaaacaagggaaagaagggactggagcccagccagtctacggccgccaaggtccctaagaaggctaaaacgtggattccggaagtccacgatcagaaggcggatgtttccgcttggaaggacctctttgtgccccgcccagtcctgagagccctaagctttctggggttttctgcccccactccgatacaggctctgaccctcgcaccggccattagagacaagctggacatattgggagccgctgagactggatcaggcaaaaccctggcattcgctattcctatgatacacgctgtcctacagtggcagaagaggaacgctgcaccacctccctccaatactgaggcccccccgggggaaacaagaaccgaggccggtgcagagacccgctctcctggcaaggcagaagcggagtctgacgcgctgcctgacgatactgtgatagaaagcgaggcgctgccgtctgacatcgctgctgaggctcgcgccaagacggggggcactgtgagcgaccaggcgctgttatttggtgatgacgacgccggcgaagggccctcttccctgatcagagagaagccagttcccaaacaaaacgaaaacgaggaggaaaatttggataaagagcagacggggaacttaaaacaggaactggatgataagtccgccacctgtaaggcatatcctaaaaggcccctccttggactagtgctgacccctacacgggagctcgcagtgcaagtcaaacagcatatcgacgcagtggcacggttcaccggaatcaagacagctattttagtcggcgggatgagcactcaaaagcagcagagaatgctcaaccgacgccctgaaattgtcgtcgccacccccggcagactgtgggagctcatcaaggaaaagcactaccacctgaggaaccttaggcagttaaggtgtttagtggtagacgaggcagataggatggtcgaaaagggccattttgccgagctgtcacagctgcttgagatgctcaatgacagccagtataaccccaaaagacagacattggttttctctgctaccttgaccctcgtccaccaagcccccgcccgcattctacataagaaacacaccaaaaaaatggacaaaacagccaagctagacttgctgatgcagaaaatcgggatgaggggtaagccaaaagtgatcgacctcacccgcaacgaggcaaccgtggaaactctgacagaaacaaagatccactgtgaaacagatgaaaaggatttttatttgtattacttcttgatgcagtatcccggacgttcgttggtctttgccaatagcattagttgtattaagaggctgtcaggcctcttgaaagtccttgatatcatgcctctgactctccatgcctgcatgcaccagaaacagcgcctcagaaatttggaacagttcgctcggttggaggactgtgtcctgctcgctacagatgtcgcagccaggggactggacattccgaaagtccagcatgtgattcattatcaagttcccagaaccagtgagatctatgttcacaggtcagggcgtactgcgcgtgctaccaacgaggggctctcccttatgttgatcggccctgaggacgtgatcaacttcaagaagatatacaagactctgaaaaaagacgaggatatcccactgttccctgtgcagacaaagtacatggacgtggtgaaggagaggatcagactagcacgacaaattgagaaatccgagtataggaacttccaggcttgcctgcataattcatggattgagcaggccgcggctgctctcgaaattgagctcgaggaagacatgtataagggcgggaaggccgaccaacaggaagagaggaggcgacagaagcagatgaaagtgcttaagaaagaactgcgccatcttttaagccagcccctcttcaccgagtctcaaaaaactaagtacccaacacagtccggaaaaccacccctcctcgtgtcagccccttccaaatctgagtctgcactcagttgcctaagcaaacagaagaagaagaaaacaaagaagcccaaggagccccaaccagagcagccgcagccctccactagcgcaaattag

SEQ ID NO: 113932 - DNA, 2415 bp, synthetic construct
  misc_feature 1..2415: note = Description of Artificial Sequence: Synthetic coding sequence
  source 1..2415: mol_type = other DNA
atgaagctgaaggataccaagtctagaccaaagcaatcaagttgtggaaagttccagaccaagggcatcaaagtagtcggtaagtggaaagaagtgaagattgacccgaatatgtttgctgatggacagatggacgatctggtgtgtttcgaggagcttaccgattaccagctggtgtcccccgctaaaaatccatccagtttgtttagcaaggaggctcccaagaggaaggcacaggctgtgtccgaagaagaggaggaagaagaaggaaaaagcagtagtcccaagaagaagataaaactgaagaagtcgaaaaatgtggcaaccgagggaacctccacccagaaagaatttgaggtcaaggatccggagctggaggctcagggggacgacatggtctgcgatgatcccgaggcaggtgagatgacatcagagaacctcgtgcagaccgcccctaagaagaagaagaataaaggcaaaaaagggctggaaccaagtcaatctaccgccgcgattagggataagctggacatccttggagctgcagaaaccggctccgggaaaaccttggcttttgcaattcccatgatacatgcggttctgcaatggcagaaacggaacgctgcgcctccccctagtaacacggaggctcctcccggggagaccaggaccgaggcaggggctgagacacggtcgccaggcaaagcagaagctgaatctgatgctctgcctgacgacactgtcatcgaaagcgaagccttgccgtctgatatcgctgccgaggcccgcgccaagactggcggcactgttagcgaccaggccctgttgtttggagacgacgacgccggtgagggacctagctctctcatcagggaaaagccggtgcccaagcagaacgaaaatgaagaggagaacttagataaagagcaaacaggtaacttaaagcaggagctggatgacaaatctgcgacctgcaaggcttatcccaagcgacctctgctgggcctggtgctgactcccactagagaactggccgtgcaggtgaagcaacatatagacgccgtagctcgtttcaccggcatcaagacagcaattctggtgggcgggatgtctacacagaagcagcagcggatgctgaacaggagacctgagatcgtagtcgcgacgccaggtagactgtgggagctgattaaagagaaacattaccacctacggaacctacgtcagttacgctgcctggttgttgacgaggccgatagaatggtcgagaagggccatttcgcggaactgtcccagctgttggagatgctgaacgactctcaatacaaccccaaacgacaaaccttggtctttagtgccacgctcactcttgtccatcaggcccctgcacggatccttcataaaaaacacaccaagaagatggataagaccgctaagctggatttgctgatgcagaagatcggcatgagaggaaagcctaaggttattgatctgacaaggaatgaggctaccgtcgaaactttgacagagaccaagatccattgtgagaccgatgaaaaagatttttatctgtactattttttgatgcaatatccgggacgttccctggtgttcgctaactctatttcctgtatcaagagactgagcgggctactcaaagtcctcgacatcatgccattgactcttcacgcatgcatgcaccagaaacagcgacttaggaatctggagcagtttgcccgactcgaagactgtgtgttgctggccaccgatgtggcagcacgaggccttgatattcccaaggtgcagcacgtgatacactatcaggtcccgaggacatccgagatttatgtgcaccggtcggggagaactgcacgggccacaaacgaggggttgagcctgatgctcatcggtccagaggacgtgatcaacttcaagaagatctacaagacactgaaaaaggatgaagatatcccactattccctgtgcagactaaatacatggatgtggtgaaggaacgcattcggttagcaagacaaattgaaaagagtgaatacaggaatttccaggcttgcttgcacaacagctggattgaacaggccgcagcggccctggagattgaactggaagaagacatgtacaaaggaggaaaggctgatcagcaggaagagaggcgaagacaaaagcagatgaaggtcctaaagaaggaattgaggcacctgctatcacagccactgtttaccgaaagccagaagactaagtaccccacccagtccggtaaaccccccctactggtgtccgccccatctaaatcagaatccgccctgtcctgtctatccaagcagaagaagaagaaaaccaagaagcctaaagaacctcagcccgaacagccgcagcccagcacttctgcgaactag

SEQ ID NO: 113933 - DNA, 2292 bp, synthetic construct
  misc_feature 1..2292: note = Description of Artificial Sequence: Synthetic coding sequence
  source 1..2292: mol_type = other DNA
atggacgacctggtctgcttcgaggagctgacagactaccaactcgtgtctcccgccaagaaccccagctcccttttttctaaggaagcccccaaaaggaaagcgcaggccgtgtcagaagaagaggaagaggaggagggcaagagcagtagcccaaaaaagaagatcaaactgaagaagtcaaagaatgtcgctacggagggcacaagtacacagaaggaattcgaagtcaaggatccagaacttgaagcccagggcgatgatatggtctgtgacgatcctgaggcaggcgagatgactagtgaaaacctcgtgcagacagctcctaaaaagaaaaagaataaaggtaagaagggcctggaacccagccagtcgaccgcggctaaagtcccgaagaaagctaagacgtggatccccgaggtgcacgaccagaaagcagacgtctccgcttggaaggatttgtttgtgcccagaccagtgttacgagcgctgtcctttctgggtttctctgccccaacgcccatccaggccctgacccttgctcccgctattcgggacaaattggatatccttggggcagccgaaactggtagcggaaagactttggcgtttgctatacctatgattcatgctgtgttgcagtggcaaaaacggaacgctgctccaccccccagtaatacggaggcgcctccaggggaaacacgtacggaggccggtgctgagaccagaagccctgggaaggccgaagcagagagtgatgcactcccggacgataccgtgattgagtccgaggcgctaccttctgatatcgcggccgaggctcgcgctaaaacagggggcacagtctcggatcaggcattgttgttcggcgacgacgatgccggtgaagggcctagcagcctaatcagggagaaaccagtgccaaagcaaaatgaaaacgaggaggagaacctggataaagagcagactggaaacctgaaacaggagttggacgacaagagcgccacctgtaaagcctacccgaaaagacctctgctcggtctggtcctcaccccaactcgggagctagccgtgcaggttaagcagcatatcgacgcggtcgccaggttcacggggatcaaaacagcgattctggtgggcggaatgtcaactcagaagcagcagagaatgcttaacaggcggcccgagatcgtggtggctacccccggtagactctgggagctcatcaaggaaaaacattaccacctgaggaacctccggcagctgcggtgcttggtggtggacgaggccgataggatggtggaaaaaggtcatttcgcggaactgtcacagctgctggaaatgctgaacgatagtcaatataaccctaagaggcagactttagtcttctcggcaactctgacactcgttcatcaagcacccgcccggattcttcataagaaacacacaaaaaaaatggacaaaaccgcaaagctggacctcctgatgcagaagattggtatgcgcggcaagcccaaggttatcgaccttacacggaatgaggcaaccgtagaaaccctcacagagacaaaaatccattgcgagaccgatgagaaagacttttatctttactattttcttatgcagtatcccggcaggtccctggtgtttgccaacagcataagctgcattaaaaggttaagcgggcttttaaaggttttagacatcatgcctctgacactccatgcttgcatgcaccaaaagcagcgactgaggaatctcgagcagtttgccagacttgaagactgtgtgttactcgccaccgacgtagccgctcggggtctcgatatcccgaaggtgcagcatgtgattcattaccaggtccctaggacctctgaaatctatgttcaccggagcggacggactgccagggccactaatgaggggctctcactcatgcttatagggcctgaggacgttataaacttcaagaagatctacaagacactcaagaaagacgaggacattccactcttccccgtacagacaaaatacatggacgtggtgaaggagcgcatccgtctggcccggcagatcgaaaagtctgagtaccgaaatttccaggcctgcctccacaacagctggatcgaacaggcagcagcagcgctcgaaattgagctggaggaggatatgtacaagggaggaaaagccgaccagcaggaggaacgccgccgacaaaaacagatgaaggtgcttaagaaagaattacgacatctgctatcccagccacagccaagcacttctgcaaactag

SEQ ID NO: 113934 - DNA, 1458 bp, synthetic construct
  misc_feature 1..1458: note = Description of Artificial Sequence: Synthetic coding sequence
  source 1..1458: mol_type = other DNA
atgaccaaagccccatgcaaagcctatcccaaacgtcccctgctgggtttggttctcactcctacgcgggagctggccgtgcaggtgaagcagcacatagatgccgtggcccggtttactggcatcaagacagctatccttgtgggaggaatgtccacccaaaagcagcaaagaatgcttaaccggaggcccgagatagttgtcgcaacacccgggaggctttgggagcttatcaaggaaaaacattaccatcttcggaatcttaggcagctgcgctgcctggtggtagacgaggccgatcggatggtggaaaaaggccacttcgccgaactctctcagctgttggagatgttgaatgatagtcagtacaatcccaaaagacaaacacttgtgttctcagctacgcttactctcgtgcatcaggctccagccagaattcttcataaaaagcacaccaaaaagatggataagacggccaaactagacctcctgatgcaaaaaatagggatgagagggaaaccgaaagtcatagatctgacaaggaacgaggccaccgtcgaaactctgaccgaaacaaaaatccattgtgagacagacgaaaaagacttctatctatattatttcctgatgcagtatcccggccgtagcctggtgtttgccaattctattagctgcatcaagcggctgtctgggctgctcaaggttctagatatcatgcccctgaccctgcatgcctgtatgcatcaaaagcagagacttcggaatttagaacaatttgcccggctggaagactgtgtgctcctagccaccgatgtggcggcccggggtctagacattcccaaggtccagcatgtgattcattaccaggtgccccgcactagtgagatctatgttcacaggagcggtcggacagctagggccaccaatgaggggctatccctgatgttgattggcccagaagatgtgattaatttcaagaaaatttataagacactcaaaaaggacgaggacatccccctgtttcccgttcagacaaagtacatggacgtggtcaaggaaaggatacggctcgcacggcagatcgaaaagtctgagtatagaaacttccaggcctgtctgcacaacagctggatcgaacaggcagctgccgccctggaaattgagttagaagaagacatgtataagggcggcaaagcagaccagcaagaggaacggaggcgtcaaaagcaaatgaaggtcttgaaaaaagaactgaggcacttactgtcccagcccctatttacagaatctcaaaaaacaaaatatccaacgcaaagtggcaagccacctctcctcgttagtgcaccatctaaatccgagagcgcactttcttgcctctctaagcaaaagaaaaagaagacaaaaaagcccaaggaaccgcagccggagcagcctcaaccatcgaccagtgccaattag

SEQ ID NO: 113935 - DNA, 1623 bp, synthetic construct
  misc_feature 1..1623: note = Description of Artificial Sequence: Synthetic coding sequence
  source 1..1623: mol_type = other DNA
atggctctcacccggccagtcaggctgttctcccttgtcactcgacttttactagcaccaagacggggactgacagtgagaagcccggacgaaccgctgcccgtcgtgcggatacccgtagcccttcagaggcagctcgaacagcgtcagagtaggcgacgcaatctcccccgcccagtattggtgcgtcccggcccactgctggtttccgcacggaggcctgaacttaaccagcccgcccggcttactctgggccgctgggagcgagctcctctcgcgagccagggttggaagtcccgaagggcacgacgcgatcacttttcaatcgaacgggctcaacaggaggctccagccgtgaggaaattgtcatccaaaggcagtttcgccgatttgggactggaaccccgtgtgttacacgctctgcaggaggcggctcccgaagtagtccagccaacaacggttcaatccagtaccattccttctttacttagaggcagacacgttgtgtgtgctgcggagactggctccgggaagaccctttcttacctcctcccactgctccagaggcttctgggacagcctagtctggattccttaccaattcctgccccacgcggactcgtgctggttccatctagagagctcgcccagcaggtgagagctgtggcgcaacctttgggccggtcgctcggtctcttagtgagggaccttgaaggcggacacggcatgcggcgcatcagactgcagttatctcgccagccaagcgccgatgtccttgtggcaacacccggggctctctggaaagccttgaagagtagactgatttctcttgaacaactctcctttctggtgttagacgaagcagacacactcctggatgagagttttttggaactggtggattacatcctcgaaaagagtcacatcgccgaggggcctgctgatttagaagatcctttcaacccaaaggcccagctggtcctcgtgggggctacttttccagagggcgtcggacagctgctcaacaaggtggcgagcccagatgccgtgaccaccattactagctccaagctgcactgcattatgcctcacgttaagcagacatttctcaggctcaagggtgccgataaggttgccgagctggttcatattctgaagcacagggaccgcgccgagcggacggggccatcgggcaccgtacttgtattctgcaattcctccagcacagtcaattggctgggatacatacttgatgaccacaagatacaacatctcagacttcagggacaaatgccagccttgatgagggtcggtatcttccagagttttcagaaaagcagtcgagacatactcctttgcactgacatcgcatcccgggggctagactcgacaggcgtcgagctggtggttaattatgattttccccccacactccaggattacatccaccgcgccggacgagtcggccgtgtcggctctgaggtgcctggcactgttattagcttcgtaacccatccctgggatgtgtctctagttcagaagatcgagctggccgccaggagaagacggtcactgcccggattagccagttctgtgaaggagccccttccccaggccacatag

SEQ ID NO: 113936 - DNA, 1989 bp, synthetic construct
  misc_feature 1..1989: note = Description of Artificial Sequence: Synthetic coding sequence
  source 1..1989: mol_type = other DNA
atgtcacacgtggctgtggagaatgccctcggcttggaccaacaattcgcaggcctcgatctgaactcatcagacaaccagagcggaggttccaccgcgtccaaaggacggtacatccctcctcatctgaggaatagagaggctaccaagggattctacgacaaggactcctctggatggtccagtagcaaagacaaagacgcgtacagcagtttcggtagccggtccgactctaggggtaaatcctctttcttctctgatagaggctcagggagtagaggccgttttgatgatcggggccgctcagactacgatggcattggcagcaggggggataggagtggttttggaaaattcgaaaggggcggaaatagtagatggtgcgataagtctgacgaagatgactggtcaaagccactccccccaagcgagcggcttgaacaggaactgttttccgggggcaatactggaatcaattttgagaagtatgatgacatccctgtggaggctactgggaataattgtccaccccacatcgagagcttctctgacgtggagatgggggagatcatcatggggaacattgagctgacccggtatacaaggccgacacccgttcaaaagcacgctattcccatcatcaaggagaaaagggacctgatggcgtgtgcacagaccggtagcgggaaaaccgcggcgtttctattgcctatcctttctcaaatctattcagacggccccggggaagctcttagagctatgaaagagaacgggcgatacggacggcggaagcaatatcccatttctctcgtgttggcaccaacaagagagcttgcggtccagatctatgaggaagcccggaaattctcttatagatcacgagttaggccctgtgttgtttacggaggcgccgatattgggcagcagattagagatctcgagcgcggttgtcacctcctggttgctactcctgggaggcttgtggacatgatggaacgcggcaagatagggctggacttttgcaaatatctggttctagatgaggccgatagaatgcttgatatgggctttgagcctcagatccgcagaatcgtagaacaggacactatgccgcccaagggagtccggcacactatgatgttcagtgcaacgtttcctaaggagatacaaatgctcgctcgcgatttcctagatgaatatatctttcttgcagtcggtcgagtgggctctacatcagagaatatcacacagaaggttgtgtgggtggaggagagcgacaaacgctcattccttctcgacctcctgaacgccactggcaaagattccttaacactcgtgttcgtagagactaaaaagggggcagactctcttgaggatttcctgtaccacgaaggctacgcatgtactagtattcacggtgatcgcagccaaagggacagagaggaggcgttacatcagtttaggtcaggaaaatcccctatactcgtagcaacagccgtagcagcccggggcctggacatcagcaacgtaaaacatgtgataaatttcgatttgcccagtgatattgaagagtacgtgcaccgaatcgggcgtacagggagggtggggaatctgggactggccacatccttcttcaatgagcgcaacattaatatcaccaaagacctgctcgatctgctggtggaggccaaacaggaagtgccgagctggctcgaaaacatggcatacgaacatcactataaaggcagtagcagaggacgaagcaagtctagtagattctccggaggattcggagcacgggattaccggcagtcatctggggccagctcctcttcattctcgtcaagcagggcatccagctccaggagcggtgggggcggccacggcagctctcggggcttcggtggtggcgggtacggcggcttttacaactccgacggttacgggggaaattacaactcacaaggtgtcgactggtggggcaactag

SEQ ID NO: 113937 - DNA, 420 bp, synthetic construct
  misc_feature 1..420: note = Description of Artificial Sequence: Synthetic coding sequence
  source 1..420: mol_type = other DNA
atgagtcacgtcgcagtggaaaacgctctgggcttggaccaacagttcgcaggtctggacctaaattcttccgataaccagtccggtggcagcactgcatccaagggcagatatatcccccctcacttgcgcaatcgggaagcaaccaagggattctacgataaagactcaagcggatggtcctctagcaaagacaaggacgcatactccagttttgggtccaggagcgactcacgaggcaaaagttccttcttttccgacagggggtctggttctagaggacgtttcgatgatagagggcgtagcgactatgatgggatcgggtcccgcggcgatcgaagtgggtacggaggcttctacaatagtgatggatacggcggcaactataatagtcagggagtcgactggtggggaaattag

SEQ ID NO: 113938 - DNA, 1941 bp, synthetic construct
  misc_feature 1..1941: note = Description of Artificial Sequence: Synthetic coding sequence
  source 1..1941: mol_type = other DNA
atgagccatgtcgcagtggaaaacgcactgggtctggatcagcaatttgccggactagacctaaactcatcagacaatcagagcggcggctcgacagcttcgtccttctatgataaggatagctctggatggtcatctagcaaggataaagatgcctattcttctttcggttcccggtcggacagccggggtaaatcttcatttttttcagacaggggaagcggcagtcgcggtcgattcgatgatcgagggagatcagactatgacggcataggtagtcggggagataggagcggttttggaaagtttgagcgggggggaaatagccggtggtgcgacaagtctgatgaagacgattggagtaaacctctgccaccatctgaacgtctggagcaagagctgttctcgggggggaacaccgggatcaactttgaaaagtacgatgatataccagtggaggcgactgggaacaattgccctccccatatagagagtttcagcgacgtggaaatgggcgaaataattatgggcaatattgagctgactcgctacacccgccccacacccgtacagaagcacgccatccccataataaaggagaaacgggaccttatggcatgtgcacagacagggtcaggcaagactgctgcttttcttttgcctatcctcagtcaaatctacagcgatggccctggtgaggcacttcgcgctatgaaggagaacgggcggtatggccgtaggaaacagtatcccatttcactagtccttgcacccacaagagaactcgccgtgcagatctatgaggaagcaaggaagttctcataccggtcaagggtgcggccttgcgttgtgtatgggggcgccgacatcggtcagcagatccgcgacttagaaagggggtgtcacctccttgttgccacgccaggcagactagtagacatgatggagcgtggaaagatcggcttggacttctgtaagtatctcgtactggacgaggcagataggatgctggatatgggatttgagccccagatcagacgcatagtggagcaggatacaatgcctcctaagggcgttcggcacactatgatgttctcggcaacgttccctaaggagatccagatgctggcacgcgatttcttggacgagtatatcttcttagcagtgggtcgggtcggatcgacttctgaaaatataacacagaaagtcgtctgggtggaggaatccgacaagcgctcgtttctacttgatctgcttaacgcgacgggcaaggactctctcacgctcgtgtttgtcgaaacaaagaagggggctgatagcctggaagatttcctgtaccacgaaggatacgcgtgtacttccatacatggagacaggtcgcaaagggatagggaggaagccctgcaccaatttcggtctgggaagagccctatactggtagccacggcagtcgccgcccggggactagatatttcaaacgtcaaacacgttattaattttgacctcccgtcggatattgaagagtacgtacatcggatcggcagaacaggaagggtaggtaacctgggactggctaccagcttcttcaacgagcgaaacatcaatatcaccaaagacctgttagatctgctcgtggaagctaagcaggaagtgccatcctggctggagaacatggcatacgaacaccactacaaaggttcaagtcggggccggagcaagtcgtcaaggtttagcggggggttcggtgctcgcgattatagacaaagttccggggcctcctcatcatctttctccagcagtcgtgcatcctctagtcgtagtggaggaggtgggcatggctcttcaagaggcttcggggggggcgggtacggcggcttctacaacagtgatggctatggtggcaactataactctcagggggtggactggtggggaaattag

SEQ ID NO: 113939 - DNA, 927 bp, synthetic construct
  misc_feature 1..927: note = Description of Artificial Sequence: Synthetic coding sequence
  source 1..927: mol_type = other DNA
atgagggagagtagactgatttccgacttggggggcttcgccggggtgcgtagcgctgccggccgcgattggcggcccttctggttaggcgggcttaggccctcaaggttagctcagcccgggttcccgtccggtggtccaggtgggacacgttgccttagagcttgtgaacaggggttcgcggggttggacctgaattcatcagacaatcagtcagggggctccaccgccagtaagggacgttacatcccgccccatctgcgtaatcgggaagccactaaggggttctacgataaggactcctctggctggtcctcttcgaaggacaaagatgcatattcctcattcggatcaaggtccgacagccggggcaagtcttccttcttctcagataggggcagcggatcaagaggacgcttcgacgacaggggacgctccgactacgatgggatcggctcaagaggtgataggagtggattcgggaagtttgaaagggggggaaacagtcgatggtgcgacaagtctgacgaagacgattggtctaagccactccctccatccgaacggctcgaacaggagctgtttagcggcggaaacaccggcatcaacttcgagaaatacgacgatatcccggtagaagccacaggtaataactgtcctccgcatatcgagtcgttttcagacgtagagatgggtgagatcatcatgggaaatatcgagcttacccggtacacccgacccacccctgtgcagaaacacgccatcccaataataaaggagaagcgagacctcatggcatgtgcacagactggtaagtggaaagtctgggctcctcaaactattcctaacctgcttggcatctcaactaacgagcgcgtaggttctactgacctgcgcggttcacagaaaatcttcatcccaatctag

SEQ ID NO: 113940 - DNA, 1983 bp, synthetic construct
  misc_feature 1..1983: note = Description of Artificial Sequence: Synthetic coding sequence
  source 1..1983: mol_type = other DNA
atgagtcatgtagtggttaaaaatgaccccgagttggatcagcagcttgcaaaccttgatctcaactccgaaaagcagtccggcggggctagcactgccagcaaaggtagatacattcccccgcaccttaggaacagggaggcctccaagggctttcacgataaagacagcagtgggtggagctgtagtaaggataaggatgcttatagctcatttggatcaagagattcacgcggcaagcccgggtatttctccgagagagggtccggatctcggggaaggttcgatgaccgggggcggagcgactacgatgggattggcaatcgggagaggcccgggttcggacgctttgagagatcggggcattccaggtggtgcgataaaagtgtggaggatgattggtccaaacccctgccaccgtccgagcgcttggaacaggagctgtttagtggtggcaataccggcatcaactttgaaaagtacgatgatattccagtggaggctaccggctcaaattgtcctcctcatatcgaaaacttcagcgacatcgatatgggtgaaataatcatgggaaacattgagctaactcgatatactcgcccgacgccggtgcagaaacacgcaattcctatcataaaaggaaaacgtgatctgatggcctgtgcccaaactgggtccggcaagactgcagcatttctgctccccattctgtcacaaatctatacggacgggcccggggaagccttaaaggccgtcaaggagaatggcaggtacggaagaaggaaacagtatcctatcagccttgtgcttgctccaacacgggaattggcggtgcaaatctatgaggaggctagaaaattcagctataggagcagagtaaggccctgcgtggtgtatggcggagccgacattgggcaacagatcagagacctcgaaagagggtgccacctgctggtcgcaacccctggacggttagtcgacatgatggagagaggcaagatcggcctggatttttgcaagtacctagtgctcgacgaggctgacagaatgctggacatgggcttcgagccacagattcgcaggatagtggagcaggataccatgccccctaagggcgtccgtcacacaatgatgttctccgccaccttccctaaagaaattcagatgctggcgcgggatttcctagacgaatacatctttttggctgttggtcgagtggggagtacgtcagagaacattactcagaaggtggtgtgggttgaagatttggacaagagatcgtttctgctcgatattctgggggccaccggttccgactcactgaccctggtgttcgtcgagaccaaaaagggtgcagatagcctggaggactttctatatcacgaagggtacgcttgtacctcgattcacggagatcggtcccagagggatcgggaagaagccttgcaccagttccgatccggtaagtcccccatcttggttgctacagccgtggcagcaaggggactggacattagcaatgtgagacacgtgatcaatttcgatttaccgtccgatatcgaggaatatgttcatcgcattggacgaacaggtcgggtgggaaacttgggactggccacatccttctttaatgagaagaatatgaatattacaaaggacttgctggacttgcttgttgaagcaaaacaggaggtgccttcttggttggagaatatggcctacgagcatcactacaagggaggtagtaggggccgctctaaatccaatagattttcgggaggcttcggggcgagagactataggcagtcaagtggaagcagcagcagcggtttcggcgctagccgtggctctagcagtcgcagtggagggggtgggtatggaaattctcgcgggttcggcgggggcgggtatggcggattctacaacagcgatggatacgggggcaactataactcccagggcgtggactggtggggcaactag

SEQ ID NO: 113941 - DNA, 1983 bp, synthetic construct
  misc_feature 1..1983: note = Description of Artificial Sequence: Synthetic coding sequence
  source 1..1983: mol_type = other DNA
atgagtcatgtcgtcgtgaaaaacgatcccgagctcgaccagcagttggccaacctcgacttaaactctgaaaaacagtctggcggcgcctcaactgcctccaagggtcggtacattcctccccacctacggaatcgcgaagcttctaaaggatttcatgataaggacagcagtggctggtcatgctccaaagacaaagatgcctactccagcttcggctctagggattctcggggcaagcccggatacttttctgagagagggagtggctctcgcggccgctttgatgatcgaggtaggagtgactatgacggcatcgggaaccgcgaaaggccaggctttggcaggttcgagaggtcaggtcatagtaggtggtgcgataaaagtgtggaagatgactggtcgaaaccactaccaccatctgaacgcctcgagcaggaactcttcagcggaggaaatacaggcataaactttgagaagtatgatgatattccagtcgaggcgacagggtcaaattgtcccccgcacatagagaacttttccgacattgacatgggcgagattattatgggaaatatcgaattgacccgttacaccaggcctacccctgttcagaagcacgcaatcccaataatcaagggcaaacgcgatcttatggcgtgtgctcagacaggctccggaaaaacagccgctttcctcctgcctattctttcccaaatttatacggacggccccggtgaggctttaaaggctgtgaaagagaatggaaggtacggccgcagaaaacaatacccaatatcattagtcttggcccctacccgggagctcgccgtgcaaatttatgaagaagcgcgtaagttcagctataggagcagggtgaggccatgcgtggtgtatgggggagctgatatcgggcaacaaattagggaccttgaaaggggatgccatttgctcgttgccacccccggacgcttggtggatatgatggagaggggcaaaattgggttggatttctgcaaatacctggtactggacgaagcggacagaatgctcgatatgggctttgagcctcagatcagacggattgtagagcaggacacgatgcctccaaagggtgtgaggcataccatgatgttttcagccaccttccctaaagagatccagatgctcgcgcgcgactttttggatgaatatatctttcttgccgtgggcagagtgggcagtaccagcgagaatatcacgcagaaggttgtttgggttgaggatctcgataaaaggtcctttctcttggatatcctgggagcgaccggaagcgactcgctgacactggtgttcgtggagactaagaaaggggccgatagcctggaggactttctctatcacgagggatatgcatgtacatcaatacatggcgatcggtcccagagggatcgcgaggaagccctgcatcagttcagaagcgggaaatcacccattcttgtggctaccgcagtcgcggctagaggactcgatattagcaatgtgcgccatgtcattaattttgacttgccatcagatatagaggagtacgttcataggatagggcgtaccggacgcgtgggaaacctcggtctagcaacatccttcttcaatgagaaaaacatgaacatcaccaaggacctgttggacctcctggttgaagctaaacaagaggtcccaagttggctagaaaacatggcatatgagcaccattacaaaggcggcagtcgcggccgaagtaagtcaaatcgattcagcggggggttcggagcccgtgattaccgacaatccagcggcagctcgagtagcggttttggtgcgtcccggggcagctcgtctagatctggaggaggcggctatgggaacagcagaggattcgggggtggcggatacggcggattctataattctgatggctatggtggaaattataacagtcagggggtggactggtggggtaattag

SEQ ID NO: 113942 - DNA, 753 bp, synthetic construct
  misc_feature 1..753: note = Description of Artificial Sequence: Synthetic coding sequence
  source 1..753: mol_type = other DNA
atggagatcggtcgcccgcggaaggatacttggaagctcgcgaacctggacttgaatagtgaaaagcagtccggtggtgcttccaccgctagtaagggtcgctacatcccgccgcatctgcgtaaccgggaagcctctaaaggcttccatgacaaggattctagcgggtggagttgtagcaaggataaggacgcatattcatcctttggttccagagattcccgcggaaagcccggctacttcagcgagagagggagtggaagccgcggccgcttcgatgaccgtgggcgcagcgattacgacgggattggcaaccgcgagcgccccggctttggcagatttgagagatcaggacacagccgctggtgtgataaatctgttgaagacgattggtcaaagccactcccacccagcgaacggctcgagcaggagctcttttctggaggcaatacaggcatcaacttcgagaaatacgacgatatcccagtcgaagctactgggtcaaattgcccaccacacatagagaatttctccgatatcgatatgggagagatcattatgggtaatatagaactgacccgctacactaggcctacaccagtgcagaagcacgccatccccattattaagggcaagagagatttaatggcatgtgcacaaaccggcagcgggaagacggcagcctttctcctccctatcttaagtcagatctataccgacgggccaggagaggccctcaaggcagtgaaatag

SEQ ID NO: 113943 - DNA, 675 bp, synthetic construct
  misc_feature 1..675: note = Description of Artificial Sequence: Synthetic coding sequence
  source 1..675: mol_type = other DNA
atgagccacgtggtggtgaagaatgaccctgagctcgaccaacagttggccaacctggatcttaattctgagaagcagagcggcggggccagtaccgcctcaaaaggtaggtacatacctccgcatttacgaaatagagaagcctctaagggctttcatgacaaagatagcagcggctggtcttgctctaaggacaaggatgcttactctagctttggctccagggatagtcggggcaaaccaggttacttttccgagaggggctcaggctcgagggggcgattcgacgaccgtggcaggtccgactatgatgggataggaaatcgagagaggcccggattcggcagattcgaaagaagtggacactctaggtggtgcgacaagtcagtcgaagacgactggagcaagcccctgcccccaagcgagcggttggagcaagagttattctccggtgggaacactggtataaacttcgagaagtacgacgatatacccgtggaagccactgggtccaactgtcctcctcacattgaaaatttttccgacatagatatgggagaaatcattatgggtaatattgagttgaccagatacaccaggccaacgcctgtccagaagcacgctatccccatcatcaaaggcaaaagggatctcatggcttgtgcgcagacttag

SEQ ID NO: 113944 - DNA, 1974 bp, synthetic construct
  misc_feature 1..1974: note = Description of Artificial Sequence: Synthetic coding sequence
  source 1..1974: mol_type = other DNA
atggagatagggaggccacgcaaagatacatggaaacttgctaacctggatctgaatagtgagaagcagagtggcggggcaagcaccgctagtaaggggcgatacatccctccacatctccggaacagagaggcctcaaaggggttccatgacaaagattcttccggctggtcatgtagtaaggacaaagacgcttactcaagctttgggtcaagggacagcagagggaaacccggttacttcagtgagagggggagcgggtctcgcggccggttcgatgacagaggccgttccgattacgatggtataggcaacagggagcggcctggatttggccgatttgagcgcagtggccacagtcgatggtgcgacaagagcgtcgaagacgactggagcaaaccgctacccccttccgagcggctcgaacaggaattattctcaggtggaaatacagggattaattttgagaaatatgatgacataccggtggaggcaactgggagcaactgcccccctcacatagaaaacttctcggatattgatatgggggaaataattatggggaacatagagcttaccagatacacccgtcctactcccgtgcagaagcacgcaatcccaataatcaagggaaagagggatctgatggcatgcgctcagacgggcagtgggaagaccgccgccttcctactgcctatcctgtcccagatctatacggatgggcccggcgaagccctgaaagccgtgaaggaaaatgggcgttatggacgcagaaagcaataccccataagtcttgtcctcgcccccacaagggagctggctgtacaaatttacgaggaagcgcggaagttttcttacaggagtcgtgtacgcccttgtgtggtctatggtggtgccgatattggccagcaaatccgtgatctcgaacggggatgccatctgctggtggcaacgccaggacgtctcgttgatatgatggagcggggtaagatcgggcttgatttctgtaagtatctggtactggacgaggctgaccggatgctcgacatgggctttgagcctcagataaggcgcatcgtggaacaagacacaatgccccctaagggggtgcgtcataccatgatgttttctgctacatttccgaaggagattcagatgcttgccagagatttccttgacgagtacatcttcctggcagtgggacgggtgggatccacaagtgaaaacataacacagaaagttgtgtgggtggaggacctggacaaacggagctttctgcttgacatccttggggctaccgggagcgactcactaacgcttgtgtttgtggaaacaaagaagggcgccgatagcttagaagatttcctctatcacgaaggttacgcctgtacaagcatccacggagataggagtcagcgagatcgagaggaggccctgcatcagttccgttcaggcaagtcgcctattctcgtggccacggctgtggctgcgcgcggcctggacatcagcaatgtccgtcatgtgatcaactttgatctcccctcggacatcgaagagtacgtccatcggatcggccgcaccggccgagtcggcaacctcggcctggccacgtcatttttcaatgagaagaacatgaacatcaccaaggacctcctagacctcttagtcgaagctaaacaggaagtcccatcatggttggagaatatggcctacgagcaccactacaagggaggctctagagggcgaagtaaaagcaaccgtttctccgggggtttcggagccagagactatcggcagtcctctggatcatcttccagcgggttcggcgcatctcgcgggtcctctagccggtcaggcggcgggggttatggaaatagccgtggcttcggtggagggggctatggaggcttctataattcagacgggtatggtggaaactacaattcacagggggtggactggtggggtaattag

SEQ ID NO: 113945 - DNA, 1278 bp, synthetic construct
  misc_feature 1..1278: note = Description of Artificial Sequence: Synthetic coding sequence
  source 1..1278: mol_type = other DNA
atggccgaaaatgacgttgacaacgagctcttggactatgaagacgacgaagtggaaactgctgctgggggggacggagccgaggctcctgccaaaaaggacgtgaaaggcagttacgtcagtattcactccagcggatttcgcgatttcctcctgaaacctgagttgcttcgtgcaatagttgactgtgggttcgaacatccatccgaagtccagcacgagtgtattcctcaggcaatcctgggcatggatgtgctgtgccaggccaaatcaggaatgggcaaaacagcggttttcgtactggctacgctccagcagcttgaacccgttactggccaggtaagcgttctcgtgatgtgtcacacaagagagctcgcttttcaaatcagcaaagaatatgagaggttcagcaaatacatgcccaatgtgaaggttgcggtcttctttggagggctcagcattaagaaggatgaggaggtcctgaaaaagaactgtcctcacattgtggtgggcacccctggtaggattcttgcacttgccagaaataagagtctcaacctgaagcatatcaaacactttatccttgacgagtgcgacaagatgttagagcagctggatatgagaagagacgttcaggaaatattccgtatgaccccgcatgaaaagcaggtgatgatgttcagcgctaccctctctaaggaaatcagacccgtctgcaggaaattcatgcaagaccctatggaaatttttgtggacgacgagaccaaacttaccctgcatggcctgcaacagtattacgtgaagcttaaggacaacgaaaagaacaggaaactgtttgacctcctggatgtgctggagttcaatcaggtggtgatcttcgtaaagtctgtgcagcgttgtatcgcattggcccagctcctggttgaacaaaattttcctgccatagctatccaccgcggcatgccccaagaggaaagactgtctcggtatcagcaattcaaagactttcagcgcaggatactggtggccactaacttatttggaaggggcatggacatcgagcgagtcaatatagcattcaactatgacatgcccgaggattccgatacctacttacaccgctgttatccactcagcccgtcgcggtggccagaacaggcgggcctcgccccccgagcatggctgtcacacctatgcccaatgcggatgatgccccgatcatctatgatgtgtcgcatcgcactgaggagcatcctggtgtcatgcttaatgcgatag

SEQ ID NO: 113946 - DNA, 1287 bp, synthetic construct
  misc_feature 1..1287: note = Description of Artificial Sequence: Synthetic coding sequence
  source 1..1287: mol_type = other DNA
atggccgaaaacgacgtcgacaacgagttgcttgattacgaagacgacgaggtggaaacagcagctggcggagatggagctgaagcaccagccaaaaaggatgtgaaaggctcgtatgttagcattcatagtagcgggttccgcgactttcttttaaagcctgagctgctgagggctattgtggactgcggtttcgaacacccttctgaagtgcagcacgagtgtattccacaggctatcctgggtatggacgtgctctgtcaagcaaaatccggcatggggaaaactgccgtgtttgtcctggcaacacttcagcagcttgagccagtgacaggccaggtctccgttctggttatgtgccatacccgggagctagcattccaaatatctaaagagtacgagcgctttagcaagtacatgccaaacgtcaaagttgcggtcttcttcggcggcttgagtatcaagaaggatgaggaagtgctaaagaaaaactgtccacatatagtggtgggcactcccggacggatattggccctggcgagaaataaatctctgaacttgaaacacattaagcacttcatcctggacgaatgcgataagatgctcgaacaattggacatgcgacgggacgtgcaagaaatcttccggatgactccccacgagaagcaggtgatgatgttttctgcaacgctgtctaaagagatccgtcctgtatgcagaaaattcatgcaggatcccatggaaatctttgtggacgatgagaccaagctgactctgcacggccttcagcagtactatgttaagcttaaagataacgagaaaaatcgcaagctgttcgacctcctggacgtcttggaattcaatcaggttgtgatctttgtcaagtccgtccagagatgtatagcactcgcccagttattggtggaacagaactttcctgcaatagctatccatcggggcatgcctcaagaggagaggctatcccggtatcagcagtttaaggacttccagaggcggatcttagtcgctaccaacctgttcggccgcggcatggacattgagagggtcaatatcgcatttaactacgatatgccggaagactcagatacctacctgcacagagtggcacgggcaggacggttcggcacgaaaggactagcgatcacttttgtctccgacgaaaatgatgccaaaatattaaatgatgtgcaggacagatttgaagtgaatatttccgagctgccagatgaaatcgacatcagttcctacattgaacagacacgatag

SEQ ID NO: 113947 - DNA, 1287 bp, synthetic construct
  misc_feature 1..1287: note = Description of Artificial Sequence: Synthetic coding sequence
  source 1..1287: mol_type = other DNA
atggctgagaacgatgtggacaatgagctcctggattacgaggacgacgaagtggagaccgcagccgggggtgacggggcggaggctcccgcaaagaaggatgtgaagggcagctacgtgagcatacacagctcaggtttcagagacttcctgctgaagcccgaactcctccgtgccatcgtcgattgcggcttcgaacacccctccgaagtccagcacgagtgcattccccaggctatcctgggcatggatgtgctgtgtcaggccaagtctggaatgggtaaaactgcagtgttcgtactggccaccctgcagcaactggagcctgtaactggacaggtgtccgttcttgtcatgtgccacacccgagagctggccttccaaatctctaaagagtacgagcggttcagcaaatacatgcccaatgttaaggtagcagtgttcttcggcgggctgagtattaagaaggacgaggaggttctcaaaaagaattgccctcatatcgtcgtggggacacctggccgaattctggccctcgcgaggaacaaatcactgaacttaaaacatattaaacattttattttggatgagtgtgataagatgttggagcagctcgatatgcgacgtgacgtacaggagatctttcgcatgactcctcacgagaagcaggtcatgatgtttagcgccacactgtccaaagaaattcggcctgtctgccgaaagttcatgcaggacccaatggaaatttttgtagacgacgagacaaagctcaccctgcatggtcttcagcagtactatgtcaaattaaaagataacgaaaagaaccgcaagctgttcgacctgttagatgtgctggagttcaaccaggtcgtgatatttgttaaatccgtgcagcgatgtattgctctggcccagctgctcgtggaacagaattttcccgcaattgcgattcacagagggatgccccaggaagaacggctatcccgatatcagcagtttaaagatttccagcgccggatcctggtcgccacaaacctattcggtagggggatggatattgaaagagtgaacatcgcttttaattatgacatgccagaggacagtgatacatacctccaccgagtcgcaagggccggaagattcggtacaaagggtcttgctatcacctttgtttctgatgagaatgatgctaaaatcctgaacgacgtgcaggaccgcttcgaagtcaacattagtgagctgccagacgaaatagatatctcatcgtatatcgaacaaacccgctag

SEQ ID NO: 113948 - DNA, 1278 bp, synthetic construct
  misc_feature 1..1278: note = Description of Artificial Sequence: Synthetic coding sequence
  source 1..1278: mol_type = other DNA
atggcggagaacgacgtcgacaatgaactgttagactatgaggacgatgaggtagagactgctgcaggaggggatggggctgaggctccggcaaaaaaggacgttaaggggtcatatgtgtccatccacagcagcggttttagggacttcttgcttaaacctgagcttttgcgcgccattgtcgactgtggattcgagcacccatccgaagtacagcatgaatgtatccctcaggccatactgggcatggatgtgctgtgccaggctaagtccggaatgggaaaaacggcagtgttcgtacttgccactctgcaacagctggaacccgtgacagggcaagtgagtgtactggtcatgtgccatacaagagagcttgcctttcagatctctaaggagtacgagaggttttccaaatacatgcctaacgtgaaggtggccgtattcttcggtggattaagcatcaagaaggacgaggaagttttgaaaaagaattgtcctcacatcgtagtagggactcctggtcgcatcctcgccttggctaggaataagtccctgaatttgaagcatatcaagcacttcattttggacgaatgcgataaaatgttggaacagttagacatgcgcagagacgtgcaagagattttccgcatgaccccccatgagaaacaggtgatgatgttttctgcaaccctgtccaaggaaattcgcccggtgtgtcgcaagttcatgcaggatcctatggaaatttttgtggatgacgagacaaagctgaccctacatggtctgcagcaatattacgtgaagctgaaagataacgagaaaaatagaaagcttttcgatctgcttgacgtactggagtttaaccaggtggtgattttcgtgaaatccgtacagcgttgcattgccctagcccagctactggtagaacagaattttccagctatcgcaatccacagagggatgcctcaagaggagcgcctgtcccgctaccaacaattcaaagactttcagcgcaggattctggttgctaccaacctgttcggccgggggatggatatagaaagagtcaatattgctttcaactatgatatgccagaagatagtgacacctatctgcaccgctgctaccctctgagtccatcacgttggccggagcaggcaggtctggcccctcgcgcgtggctatctcatctctgtcctatgcggatgatgcccaggagttccatgatgtgccgcattgcccttaggtccatcctggtatcctgtctcatgagatag

SEQ ID NO: 113949 - DNA, 1287 bp, synthetic construct
  misc_feature 1..1287: note = Description of Artificial Sequence: Synthetic coding sequence
  source 1..1287: mol_type = other DNA
atggcagagaacgacgtcgacaatgagctgctggactacgaggacgatgaggtcgagacagccgccggtggagatggagcagaggcaccagcaaagaaagacgtgaagggctcatacgtctccatacattcctcgggctttagagacttcctattaaagcccgaattactgcgggcgatcgtggattgtggctttgaacatcctagcgaggtgcagcatgaatgtatccctcaggcaatacttgggatggatgtgctctgtcaggcgaaatcaggaatgggaaagacagcagtattcgtcctggcaaccctacagcagctcgagcccgtgaccgggcaggtgtccgtcttggtgatgtgtcacacccgtgagctggcgttccagattagcaaagaatatgagcgcttttctaagtacatgcctaatgtaaaagtggctgttttttttggtggcctttcaatcaaaaaagacgaagaagtgctgaaaaagaattgcccacacatcgtagtggggaccccaggacggatcctcgctctggctcggaacaagagtctgaatcttaaacacatcaagcatttcattctagacgagtgtgacaagatgctcgaacaattggacatgcgcagggatgtgcaggaaatctttagaatgacaccacatgagaaacaggtaatgatgttttccgccacactgagcaaagaaataaggccagtctgccgcaagtttatgcaggaccccatggaaatcttcgttgacgatgagaccaaactgactttgcacgggctccagcagtattacgtcaaattgaaggataatgaaaaaaacagaaaactctttgatctcctggacgtcctcgaattcaatcaggtagttatctttgtcaagagcgttcagcggtgcattgcactggcacagttattagttgagcaaaactttcctgccatcgccatccatcgggggatgccacaggaggagagactctctcggtatcaacagtttaaggattttcaacgaagaatactcgtggccaccaatcttttcggccggggaatggatatcgaaagagttaacatagcgtttaactacgacatgcctgaagactctgatacttacttgcatcgtgttgccagggccggaaggttcgggacaaagggcctggctattacattcgtgtccgacgagaacgatgccaaaattttaaacgacgtgcaggacagattcgaggtcaacatcagcgagctgccagatgagatcgacatctcatcctacattgaacagactcgatag

SEQ ID NO: 113950 - DNA, 1287 bp, synthetic construct
  misc_feature 1..1287: note = Description of Artificial Sequence: Synthetic coding sequence
  source 1..1287: mol_type = other DNA
atggcagagaacgacgtcgataacgagcttctcgactacgaggacgacgaggtggaaaccgccgccggcggtgacggtgctgaagccccagctaagaaagatgtgaagggttcctatgtttccatacattcttccggcttcagagatttcctgcttaagcctgaactgctgagggcaattgtcgattgcgggttcgagcacccatccgaggtccagcacgagtgcatcccacaggccattttaggcatggatgttctttgccaggcaaagtccgggatgggaaagactgcggtgttcgtcctggccactcttcagcagctcgaacccgtgactggtcaggtatctgtgctcgtgatgtgccacacacgggagctggcctttcagatctcaaaagagtatgagcgcttcagtaaatacatgccgaacgttaaggtggccgttttcttcggcggtctgtccattaaaaaggacgaagaagtcttgaagaaaaactgtccccacattgtggttggcacacctggtcgtattctggccctggctaggaacaagagtctcaacctgaaacacatcaagcatttcatcttggatgagtgtgacaaaatgctggaacaactcgatatgcgccgcgacgtgcaggagatatttcgtatgacgcctcacgaaaagcaggtaatgatgttctccgcgacattgtccaaagaaattcgcccagtgtgtaggaagttcatgcaggaccccatggaaattttcgtagacgacgagaccaaactgacccttcatggacttcaacagtactatgtgaaactgaaagataatgagaagaaccggaaactttttgacctgttggatgtcctcgagtttaaccaggtcgtaatcttcgtgaaatcagtgcaaagatgcatcgcactggcccaactgttggtggagcagaacttccctgcgattgctatccatagaggaatgccacaggaggagcgtctgtccaggtatcagcaattcaaagattttcagaggagaatcctcgtagctaccaatctgtttgggcgcggaatggacattgagagagtcaacattgcgtttaattacgacatgcctgaggattccgacacatacttacacagggtggccagggcaggacgtttcgggacaaagggcttggctatcacattcgtctctgatgagaacgatgcaaaaattttgaatgatgtccaggatcgattcgaggtgaacatctcggagctcccggatgagattgacatcagctcctacatagagcagactcggtag

SEQ ID NO: 113951 - DNA, 564 bp, synthetic construct
  misc_feature 1..564: note = Description of Artificial Sequence: Synthetic coding sequence
  source 1..564: mol_type = other DNA
atgggcagctctcatatcggagggctcagtataaatgaacgacgatgctcagcgagcttgggcctggttatggccgaaaacgatgtagacaacgagctgttagattacgaagacgatgaggtcgagaccgcagcaggaggcgatggtgcagaagcacctgccaaaaaagacgttaaggggagctatgtgagtattcactcttcgggctttagggacttccttctcaaacctgagttgttgcgcgcgatcgtggattgcggatttgaacatccttctgaagtccagcacgaatgcatcccgcaagcaatactgggcatggatgtcctatgtcaggcgaaatccggaatgggaaagacagccgtgttcgtcctggccaccttacaacaactggaaccagtgacagggcaggtgtctgtcctagttatgtgtcatactagagagctggcctttcagatctcaaaagaatatgagaggttctctaagtacatgcccaatgtcaaggtcgcagtgttcttcggtggccttagcattaaaaaggatgaagaggttctgaaaaagaattag

SEQ ID NO: 113952 - DNA, 1287 bp, synthetic construct
  misc_feature 1..1287: note = Description of Artificial Sequence: Synthetic coding sequence
  source 1..1287: mol_type = other DNA
atggcggagaatgatgttgataatgagctgctcgattacgaagacgatgaagtcgagacggcagcaggaggagatggcgcagaagcaccagccaaaaaggacgtgaagggcagctacgtgagtatccattcttcaggattcagagacttcctcctgaagccagaacttttacgagcaatagtggattgcggctttgaacaccccagcgaggttcaacacgagtgcataccccaggccatcttggggatggacgtcctgtgccaagcaaagtctgggatgggaaagactgcagtgtttgtgctcgccacactgcaacaactggagcccgttaccggccaagtctccgtgctggttatgtgtcacaccagggaactcgctttccagatatccaaggaatacgaacggttcagcaaatacatgcctaatgtgaaggttgctgtcttctttggtgggctcagcatcaagaaggacgaagaagtgttaaaaaagaactgtcctcatattgtcgtaggcacgcctgggcgcatccttgccctcgcccgcaataagagcctcaatctgaaacacatcaaacacttcatcctggatgagtgcgacaagatgctagagcaactggacatgaggcgagatgtgcaagagatcttcagaatgacgccccatgaaaaacaggttatgatgttttccgccaccctgtctaaggagattagacccgtctgccggaagttcatgcaagatccaatggagatatttgtggatgatgagacaaagctgaccctgcacgggctacagcaatattacgtgaagctgaaggataacgagaaaaatcgcaagcttttcgatttgctcgacgtgcttgagttcaaccaagtggtgattttcgtgaagagcgtgcagaggtgcattgctctagctcagctgctggtcgaacagaattttcctgcaatcgcaatccatcgggggatgcctcaggaagaaagattgagccgataccagcagtttaaggacttccagcgaaggatcctagttgccaccaacctgttcggacgtgggatggacattgaacgggttaatatagctttcaactatgacatgccagaggatagtgatacctacttgcatcgcgtggctcgggcagggcgcttcggtaccaagggtctggcgataacattcgtgtctgacgaaaacgatgcgaagatcctcaatgacgtacaggacagatttgaggtgaatatttccgaattgcccgatgagatagacatcagcagttacatcgaacaaactcggtag

SEQ ID NO: 113953 - DNA, 378 bp, synthetic construct
  misc_feature 1..378: note = Description of Artificial Sequence: Synthetic coding sequence
  source 1..378: mol_type = other DNA
atggccgaaaacgacgtcgataacgagctgctggactacgaggatgacgaggtcgaaacagccgccggcggtgacggagcggaggcccccgcgaagaaggatgtgaagggtagctacgtcagcattcattcctccggatttagagacttcctactgaagccagaactgctgcgcgctatcgtggattgtggttttgagcacccttctgaggtgcagcatgagtgtatacctcaggcgatactggggatggatgtgctttgccaagccaagtctgggatgggcaagaccgctgtattcgtactggccacgctgcaacagttggagcctgttaccggacaggtgagtgtgcttgtcatgtgtcatacacgggagctgtag

SEQ ID NO: 113954 - DNA, 1287 bp, synthetic construct
  misc_feature 1..1287: note = Description of Artificial Sequence: Synthetic coding sequence
  source 1..1287: mol_type = other DNA
atggcagaaaacgatgtggataacgagctgctggactatgaagatgatgaagtggagacagccgctggaggcgacggggctgaggctccggccaaaaaagacgtgaaaggctcctacgtgtccatccactccagcgggttcagagatttccttctcaaaccggaactactgcgggcaattgtcgactgtggcttcgaacacccatccgaggtccagcatgagtgcattccgcaagccatcttaggaatggatgtgttgtgccaagccaagagcggaatgggaaaaacggcagtgtttgtgcttgccaccctccagcagctagagcccgtgaccggtcaggttagtgtcctggtcatgtgccacacccgcgagctcgcatttcagatttccaaggagtacgagcgcttttctaagtatatgcccaacgtaaaggttgcagtgttttttggaggcctgagcatcaaaaaagatgaagaagtgctaaaaaagaattgcccgcacatagtagtgggtacccccggacggattctggcattagcccggaacaaaagtctgaatttaaagcatatcaaacacttcatcctggatgaatgcgataaaatgctggagcagcttgatatgcgccgcgacgtgcaggaaattttccgcatgaccccgcatgagaaacaggtgatgatgttttccgccaccctgtctaaggaaatcaggcccgtctgcaggaagttcatgcaagacccgatggagattttcgtggacgacgagaccaaattgaccctgcacggtctccagcagtattacgtcaagctgaaggacaacgagaaaaatcgcaaactctttgatctgctcgacgtactggaattcaatcaggtggtgattttcgtcaagtctgtccaaagatgtatagcactcgcccagctgctcgtggaacaaaacttccctgcaattgctatccatcggggaatgccgcaggaagaaaggctgagtcgctaccagcagttcaaagatttccagcgcaggatcttggtggcaacgaatctgttcggccggggaatggatatagaaagggttaacatcgcgtttaactacgatatgcccgaagattctgacacatatctacaccgagtagccagggctggccgtttcggcactaaagggcttgccattaccttcgtaagcgacgaaaatgacgccaaaatcttgaacgatgttcaagatcggttcgaggtcaacatttcggagctaccagacgagatcgacatcagttcgtacatcgagcaaacacgctag

SEQ ID NO: 113955 - DNA, 564 bp, synthetic construct
  misc_feature 1..564: note = Description of Artificial Sequence: Synthetic coding sequence
  source 1..564: mol_type = other DNA
tgatctgaggagcgggatatcgggaagcccatggaaatcttcgtggatgacgaaactaagttgactctgcatggccttcagcagtactacgtgaagctgaaggataatgaaaaaaaccgtaagctgttcgacctcctcgacgtgcttgagttcaaccaggtagtgatctttgttaagtctgtgcaacgttgcatagcattggctcagctcctcgtggaacaaaatttccccgccatagccatccatcggggtatgccacaggaagaacgactgtcccggtaccagcagttcaaagattttcagcgacgcatcctggttgcgaccaacctttttggtcgaggcatggacatcgaaagagttaacattgcattcaactatgacatgccggaagattctgacacctatctgcaccgggtggccagggccggccgctttggaacaaagggactggcaataacattcgtgtccgacgaaaatgacgccaagatacttaacgacgtacaggatcgcttcgaagtcaacatttcggaattgcccgatgagatcgacatcagcagctattag

SEQ ID NO: 113956 - DNA, 378 bp, synthetic construct
  misc_feature 1..378: note = Description of Artificial Sequence: Synthetic coding sequence
  source 1..378: mol_type = other DNA
atggccgaaaatgacgtggacaatgagttactggactacgaggacgacgaagtggaaacagctgctggcggagacggcgccgaagcgcccgcaaagaaggacgtgaaagggtcatatgtctctattcattccagcgggttccgggattttctgttaaaaccagagctgttgagagccattgtggactgtggcttcgagcatccctccgaagttcaacatgagtgcattccccaggctatccttggaatggatgtcctctgtcaggcgaagagcgggatgggcaaaacggcggtctttgtgctggccaccctgcagcagcttgagccagtgacaggtcaggtctccgtacttgtgatgtgccacacacgggaactttag

SEQ ID NO: 113957 - DNA, 1287 bp, synthetic construct
  misc_feature 1..1287: note = Description of Artificial Sequence: Synthetic coding sequence
  source 1..1287: mol_type = other DNA
atggcagaaaatgatgtcgacaatgaattgctggactatgaggacgatgaggtcgaaacagccgccggaggcgatggtgccgaagcccccgccaaaaaggatgtcaaagggagttatgtcagtatacactcgtctggcttccgggacttcctgctgaagccagaattattgagggccatcgtggattgtgggttcgagcatccttcagaggtgcagcacgagtgcattcctcaagcaattttgggcatggacgtattatgtcaagccaaaagtgggatgggaaaaacagcagtcttcgtcctcgcaacactccaacaattagagcccgtgaccgggcaagtctcggtgcttgtcatgtgtcacacccgcgagctggccttccagatatcgaaggaatatgagcgtttcagcaagtatatgccaaatgtgaaagtggcagttttctttggcgggctatccataaaaaaggacgaggaggtactcaagaagaattgcccccatatcgtggtgggaaccccagggaggattttggctctggcacggaataagtcactgaacctgaaacatataaagcacttcattctggacgaatgcgataagatgcttgagcaactagatatgcgccgggacgttcaggagatctttcggatgacccctcacgagaaacaggtgatgatgttctcagccaccctttctaaagaaattcgcccggtgtgtagaaagtttatgcaggaccctatggagatcttcgtcgatgatgaaaccaagctgactcttcatgggctgcagcagtattacgttaagctcaaggataatgagaagaaccggaaactcttcgacctcttggatgtgctggagttcaaccaggttgtgatttttgtgaaaagcgtccaaaggtgtatagcgctggcgcagttgctcgtcgagcagaacttcccggctatagccatacatagaggaatgccgcaggaggagaggctctcacggtaccaacagttcaaagacttccagaggcgcatcttggtggcaacaaatctcttcggcaggggcatggacatagaaagagtgaacatagcttttaactacgatatgccagaggacagcgacacttacttgcatcgggtcgcgagagccggccggtttggaacgaaaggcctagcaattaccttcgtgtctgacgagaacgacgctaaaatcctgaacgacgttcaggataggtttgaagtgaacatttccgagctaccggacgaaatcgacatttcaagttatattgaacagactagatag

SEQ ID NO: 113958 - DNA, 870 bp, synthetic construct
  misc_feature 1..870: note = Description of Artificial Sequence: Synthetic coding sequence
  source 1..870: mol_type = other DNA
atggctgagaacgatgtcgacaacgagctattggattacgaagacgacgaagtggaaactgccgctggcggagacggagctgaggccccagctaagaaggatgtgaaggggagctacgtcagcatccatagctcaggctttagagattttctgctgaaacccgaattactgcgcgcaatcgtggattgcggttttgaacacccctctgaggttcagcacgaatgtattcctcaggcaattttaggcatggatgtactgtgccaggccaagtctggtatgggcaagacagccgtgtttgtgctcgccactctgcagcagctggagccggttaccggccaggtgtcggttttagtgatgtgccacacgcgggagttagcttttcagatctctaaggaatatgagagattctctaagtatatgcctaatgtaaaggtagcggtcttttttggtggactttcgattaaaaaggacgaggaagtgctcaagaagaactgtccacatatagttgtggggactcccggtaggatactggccctggctagaaataaatctctgaatctgaagcacattaaacatttcattctggatgagtgtgataagatgcttgaacagctggacatgcgaagagacgtccaggagatattccggatgacgccccacgagaagcaggtcatgatgtttagtgctaccctgtctaaggaaattcggccggtgtgccgcaagtttatgcaggacccaatggagatcttcgtggacgacgagaccaaactgacactccatgggttacagcagtactacgtgaaactgaaagataacgaaaaaaaccgcaaactgttcgatcttcttgacgtgctcgaattcaatcagtag

SEQ ID NO: 113959 - DNA, 1287 bp, synthetic construct
  misc_feature 1..1287: note = Description of Artificial Sequence: Synthetic coding sequence
  source 1..1287: mol_type = other DNA
atggcagaaaacgatgttgataacgagctgctggactatgaggatgatgaggtggaaacagcggccggtggggacggtgcagaggcacccgccaaaaaagatgtgaaagggagttatgttagcatccatagcagcgggtttagagattttctgctgaagccagagctactgcgtgctatcgtggattgtggctttgaacacccttcagaagtgcagcatgaatgcatccctcaggcgatacttgggatggacgttctttgccaggctaaatcaggaatgggtaaaaccgccgtgtttgtcctggccaccttgcagcagctcgagccagtgactggccaggtgagcgtacttgtcatgtgccacacacgcgagcttgccttccaaatcagcaaagaatatgaacgcttctccaaatatatgccaaacgtcaaggtggccgtgttctttggcggcttaagcataaaaaaagacgaagaagtcctgaaaaaaaactgcccccacatcgtggtggggactccaggccgcattttggctttggcccgcaacaagtctctaaaccttaagcacattaagcacttcattcttgacgagtgcgataaaatgttggaacaactggatatgaggagagacgtgcaggaaatctttagaatgaccccacacgagaaacaggtgatgatgttcagtgcaaccctctccaaagagatccgccccgtgtgtagaaaatttatgcaggatcccatggaaatcttcgtcgatgatgaaaccaagctgacacttcatggcctgcagcagtactatgtgaagttaaaagacaatgagaagaacagaaagctgtttgacctgttggatgtgcttgagttcaaccaggtggttatcttcgtcaagtccgtgcagcggtgtattgctctggcacaactgctggttgaacagaattttcctgcgatagctatacatcgggggatgccgcaggaagaaagattgagtcggtaccagcaattcaaggattttcagcggcgcattctggtggcaaccaacctttttggccgaggcatggacattgagagggtcaatatcgcttttaactatgacatgccagaggactcagatacgtacctccaccgagtggcacgcgctggacggttcggaacaaagggccttgccataacatttgtctcagacgaaaatgatgctaaaatccttaacgatgtgcaagacagattcgaggtgaatatcagtgaacttcccgatgaaatcgacatttctagctatattgaacagacccgatag

SEQ ID NO: 113960 - DNA, 291 bp, synthetic construct
  misc_feature 1..291: note = Description of Artificial Sequence: Synthetic coding sequence
  source 1..291: mol_type = other DNA
atggccgagaacgatgtcgacaacgagctcctggattacgaggacgacgaagttgagacagctgctggcggtgatggcgctgaggcgcctgccaagaaagacgttaaaggctcctatgttagtattcatagctctggattccgcgatttcctgcttaagcctgaacttttgagagctattgttgattgtgggttcgaacatccaagcgaagtgcaacacgaatgcatcccccaggccatcctgggaatggacgtgctgtgtcaggccaagagtggtatggggaagacctag

SEQ ID NO: 113961 - DNA, 378 bp, synthetic construct
  misc_feature 1..378: note = Description of Artificial Sequence: Synthetic coding sequence
  source 1..378: mol_type = other DNA
atggctgaaaatgacgttgacaacgagctgctggattacgaggacgacgaggttgagactgctgccggcggagatggcgccgaggcaccggctaagaaggatgtcaaaggctcttacgtgtctatacactcgtcagggttccgcgatttcctgcttaaacccgagctcctcagagcaatcgtggactgtggatttgagcatcccagtgaggtgcaacacgaatgcataccccaggcaattctgggtatggatgtgctgtgccaggccaaatccggaatgggcaaaaccgcagttttcgtgctcgccacactgcagcagctcgagcctgtgaccggccaggttagcgtgctagtcatgtgtcacacaagggaactgtag

SEQ ID NO: 113962 - DNA, 696 bp, synthetic construct
  misc_feature 1..696: note = Description of Artificial Sequence: Synthetic coding sequence
  source 1..696: mol_type = other DNA
atggctgaaaatgacgtagacaacgagcttctggactatgaggacgacgaggtcgagaccgcagccgggggtgatggggcggaggcaccagccaagaaggatgttaaggggagctatgtgtcaatccactcctcggggtttcgagactttctcttgaaaccggagctgttgcgggctatagtggattgtggcttcgaacatccaagcgaggtgcaacatgagtgcattcctcaagcaatacttgggatggacgtgctgtgtcaggcgaaatctgggatgggtaagacggcagtgttcgttcttgctacactgcagcagcttgaaccagtcaccggccaggtttccgttcttgtgatgtgtcatacgcgcgagcttgccttccagatcagcaaagaatatgagcgcttcagtaagtacatgccaaacgtgaaggttgccgtgttctttggagggctatccatcaaaaaagatgaagaagtactcaagaagaattgcccacacatcgtggtcggcacgcccggaagaatcctggctctggcaaggaataagtcactgaatctgaagcacattaagcactttatcctggatgagtgcgacaaaatgctcgagcagttagatatgcggagggatgtgcaagaaattttccgtatgaccccgcacgaaaaacaagttatgatgttttcagcaacactgtag

SEQ ID NO: 113963 - DNA, 399 bp, synthetic construct
  misc_feature 1..399: note = Description of Artificial Sequence: Synthetic coding sequence
  source 1..399: mol_type = other DNA
atggcggagaacgacgtggataacgagctattagactacgaggacgatgaggtggagactgccgctggcggggacggagctgaggcacccgcaaagaaggacgtcaaagggtcttatgtctctattcactcttccggctttcgagatttcctgctgaagccagagctcctccgcgctatagttgattgtggctttgagcatcctagtgaagtgcaacacgagtgtataccgcaggccatcctgggaatggatgtactgtgccaggcaaagagcgggatgggcaaaactgccgtgtttgtgctggccactctgcagcagctggagccagtcaccgggcaggtttgcttttgtgactcccactttccaaggggcgataacgaggagctgcatttgccctag

SEQ ID NO: 113964 - DNA, 1053 bp, synthetic construct
  misc_feature 1..1053: note = Description of Artificial Sequence: Synthetic coding sequence
  source 1..1053: mol_type = other DNA
atgtggacaatgtcttcgtggactatgaaaatgatgcgttggcgacagcaacttggggagatgggcctacggcccctcccgcggaggatgtctcgtgcaccaatgtctccctccacagccctggcgttcgtgacctcttgtagctctcaatcatgctccggtcccctctcaaccgttgccctgtctatccgacaaaaggtggccgtgttcttcggtggccttagtattaagaaagacgaggaagtgctcaagaagaattgtcctcacatagtggtggggacaccagggcgcattttggccctggctcgaaacaaatcattgaacttaaaacacataaagcattttatcttggatgagtgtgataaaatgcttgagcaattagacatgaggcgggacgtgcaagagattttccggatgactcctcatgagaagcaggtcatgatgttcagcgcaacactctccaaagagattaggcccgtttgtagaaaattcatgcaagatcctatggagatattcgttgacgatgagacaaagctgactcttcatggcttacagcagtactacgttaagctgaaggacaatgaaaagaaccggaaactatttgaccttcttgatgtactggaattcaatcaggtggtaattttcgtaaagtcagtgcaacgatgtatagccctggcacagctcttggtggaacagaacttccccgcaattgcgatacaccggggcatgccccaggaagagcgtcttagccgctaccagcaattcaaggattttcagaggcgcattcttgtcgctaccaaccttttcggaaggggtatggacattgagcgggtaaacatcgcttttaactacgatatgcccgaggactctgacacttatctgcaccgggtcgcaagagctgggaggttcggtactaagggcctcgctattactttcgtgtctgacgaaaacgatgctaagattctcaacgacgtccaggacagattcgaggttaacatatccgagctcccagacgaaatcgacattagcagctatatcgagcagactcggtag

SEQ ID NO: 113965 - DNA, 738 bp, synthetic construct
  misc_feature 1..738: note = Description of Artificial Sequence: Synthetic coding sequence
  source 1..738: mol_type = other DNA
atgtggactatgagctcgtggaccatgaaaatgatgcgctggcgacagcaactgggagagatgggcctccggcccctcccgcgaaggatgtcccgtgcacctatgagtcccagtaccgccctggcttttgttacaagttgctctagccaatcttgtagcgggcccctgtctaccgttgcattatctatccgacagaaggtggcggtgtttttcggcggcctgtctattaaaaaagacgaagaggtattgaaaaagaactgcccgcatatcgttgtggggaccccagggcggatcctggcgctggccaggaacaagtctcttaatctgaaacatatcaagcatttcatattagacgagtgtgacaagatgctcgagcagctggacatgcgaagggacgtccaagagatcttccgcatgacacctcacgaaaagcaggtgatgatgttttccgcaaccctatccaaagagatccgacctgtctgtcgaaaattcatgcaggacccgatggaaatttttgtcgatgatgagacaaaactcacactacacgggctccaacagtactacgtcaagttgaaggataacgagaagaataggaagttattcgatttgcttgatgttctggaatttaatcaagtggtcatattcgtcaaaagcgttcaacgctgtatcgccctagctcagctgctggttgaacagaactttccggctatcgctattcatcgagggatgcctcaatag

SEQ ID NO: 113966 - DNA, 411 bp, synthetic construct
  misc_feature 1..411: note = Description of Artificial Sequence: Synthetic coding sequence
  source 1..411: mol_type = other DNA
atgggtggtggtagacggccctatgacgttttcttctccaaggtgatggccgaaaatgatgtggataatgagctgttggactacgaggatgatgaagtggagacggcagcaggtggcgatggggctgaagcacctgccaaaaaggatgtgaagggtagttacgtgtcaatccattcctccggctttagagatttcctgcttaagcccgagttattacgcgcgatcgtggactgcggctttgagcatccttctgaggtccagcatgagtgtataccccaggccattctgggaatggacgtcttgtgtcaggccaagtccggaatggggaaaaccgctgtcttcgtcctcgccacgcttcagcagctggagcctgtgactggccaagtatctgtactcgtgatgtgccactag

SEQ ID NO: 113967 - DNA, 1287 bp, synthetic construct
  misc_feature 1..1287: note = Description of Artificial Sequence: Synthetic coding sequence
  source 1..1287: mol_type = other DNA
atggccgagaacgatgtggataatgagctgctcgattacgaggacgacgaggtcgagaccgctgccggcggagatggggccgaagctcccgccaagaaagacgtgaaaggctcctatgtgagcattcatagtagtggcttccgggatttcctgctgaagcccgaactgctgagagcaattgtcgattgcggctttgagcatcccagcgaagtgcagcacgagtgtataccacaagcaatcctcggaatggacgttctgtgccaggctaagtcggggatgggaaagacagcagtattcgtactcgctacactgcagcagctggagccggtgacgggccaggtcagcgtgctggtgatgtgccatacccgtgaattggcatttcagatctccaaggagtacgagagattttccaagtacatgcctaacgttaaggtggccgtgttttttggaggccttagcattaagaaggatgaggaggtgttaaaaaagaattgccctcacattgtagtcgggacaccaggccgaattcttgcccttgcaagaaataagagtctcaacctgaagcacataaagcacttcatactcgacgaatgcgacaagatgctcgaacagctggatatgcgacgtgacgtccaggagattttccgcatgacaccccatgaaaagcaggtaatgatgttcagcgcaaccctctcaaaggaaattagaccagtttgccgcaaatttatgcaggatcccatggaaatcttcgtggatgacgagacaaaactcaccctgcatggcctgcaacaatactacgtcaagcttaaggacaatgagaaaaatcgaaaactgtttgacctgctggatgtactcgagtttaatcaggtcgtgatctttgtgaaaagcgtgcaaaggtgtattgccctggcccagctgctcgtggaacagaatttccctgcaattgctatccacaggggaatgccccaggaagagaggctgtccagataccagcaattcaaggatttccagaggaggatcctcgtggcgacgaacctcttcggcaggggtatggacatagagcgggtgaacatagcttttaactacgacatgcctgaagatagcgatacatacctccaccgcgtggccagagcagggagattcgggacaaaggggttagccatcacatttgtgtcagacgagaatgatgctaagatcctcaacgatgtgcaagatagatttgaggtcaacatttctgagctgcctgatgaaatcgatatctcttcctacatagagcaaacaaggtag

SEQ ID NO: 113968 - DNA, 594 bp, synthetic construct
  misc_feature 1..594: note = Description of Artificial Sequence: Synthetic coding sequence
  source 1..594: mol_type = other DNA
atggcggagaatgacgtggacaatgaattgctggattatgaggatgatgaggtcgagactgcggccggtggggacggcgctgaagcccccgctaaaaaggatgtgaaagggtcctatgtgtccatccatagcagtgggttccgggactttttactcaagccagagttgctgcgcgcaattgtagattgtggttttgagcatcctagcgaagtgcagcacgagtgtataccccaagccattttgggaatggatgtgctgtgtcaggcaaaatctggaatgggaaagacggctgtgttcgtattggccactttgcaacagcttgagccggtgacaggccaagtttgcttttgcgactctcatttccccaggggcgataatgaggagctgcatctaccctatgtgagcgtgtactttctacccaaggtgagcgtactagtcatgtgtcacacccgcgagctcgcgtttcagatcagcaaagagtatgaacggttttcaaaatacatgcccaatgtgaaggtggccgttttcttcggcggcctgtctatcaaaaaggacgaagaagtcctgaaaaagaattgtccacacatcgtgtag

SEQ ID NO: 113969 - DNA, 570 bp, synthetic construct
  misc_feature 1..570: note = Description of Artificial Sequence: Synthetic coding sequence
  source 1..570: mol_type = other DNA
taagccactcttcagcagctggagccagtcacgggtcaggtttctgtcctggtcatgtgtcatactagagaacttgcatttcagataagcaaagaatatgaacggtttagcaaatacatgccaaacgttaaggtcgccgtgttctttggtggtctgagcataaagaaagacgaagaggttctgaaaaaaaattgccctcacatcgttgtaggtacgccaggcaggattctggcgctggcacgcaacaaaagcctgaatctgaaacacatcaaacacttcatcctggacgaatgcgacaagatgctggagcagctggacatgcggagggacgtgcaggaaatatttcgcatgaccccacacgaaaagcaggtaatgatgttttcagccacactgagcaaggaaatccgccctgtgtgccgcaaattcatgcaagatccaatggaaatttttgtcgacgatgagaccaaactgaccctccacggcctgcagcagtactatgtgaagcttaaggataatgaaaagaataggaagctcttcgacctcttagatgtgctagagtttaaccagtag

SEQ ID NO: 113970 - DNA, 1287 bp, synthetic construct
  misc_feature 1..1287: note = Description of Artificial Sequence: Synthetic coding sequence
  source 1..1287: mol_type = other DNA
atggctgaaaatgacgtggacaacgaactgcttgactacgaagacgacgaagtggagaccgccgcaggtggcgatggcgccgaggcgccagccaagaaagatgtaaaggggagctacgtgtcaatccattccagcggcttccgggatttcctcctgaaacctgagctgcttcgcgccatcgtggactgcggctttgagcacccttccgaagtacaacatgaatgcataccacaagctatcctggggatggacgtcctgtgccaggctaaatctggtatggggaagacagccgtgttcgtgctagcaaccctccaacagcttgaaccggtgaccggacaagtctctgttctcgttatgtgccatacgcgtgagctcgcctttcagatttccaaggagtacgaacgtttttctaaatatatgcccaatgtgaaagtggccgtgttcttcggcggcttgagtattaagaaggatgaagaggtactcaagaagaactgcccacatatcgtggtcggaaccccaggccggatcctcgccttagctcgcaacaaatcactcaatctcaagcacatcaaacattttatactggacgagtgtgacaagatgctcgagcagcttgatatgcgtagagacgttcaggagatcttccgcatgactccccatgagaagcaggtgatgatgtttagtgccacactgagtaaggaaatcaggcctgtgtgtcgtaagtttatgcaggaccctatggagatatttgtggacgatgagacaaagctgacactccacgggctccagcaatattacgtgaagctgaaggacaacgagaagaacaggaagctgtttgatctcctagacgtgctagaattcaaccaggtggtcatcttcgtaaagtcagtgcaaaggtgcatcgcactggcgcagttactagtggaacagaacttcccagccattgcaatccatcgcgggatgcctcaagaggaacgtctttcacgatatcaacagttcaaagattttcagcgccggatcttagtggctaccaacttattcggaagggggatggacatcgaaagagtgaacattgcattcaattacgatatgcccgaagactcggacacctacctgcatcgggtggcacgagctggcaggttcggcacgaagggcctggctatcacatttgtgtctgatgaaaacgacgccaagattttaaacgacgtgcaggacagattcgaagttaatatcagcgagctgcccgatgagatcgatatcagctcttacatagaacagacacgatag

SEQ ID NO: 113971 - DNA, 711 bp, synthetic construct
  misc_feature 1..711: note = Description of Artificial Sequence: Synthetic coding sequence
  source 1..711: mol_type = other DNA
atggcagaaaatgacgtggataatgagctgttggattatgaggacgatgaagtggagacagccgcgggaggtgatggcgccgaagccccggccaaaaaagatgttaaggggtcttacgtctctatccactcttctggatttagagatttcctgcttaaaccggagttactgcgcgctattgtagattgtggatttgaacacccaagcgaggtccaacatgaatgtattccacaggccatccttggcatggatgtgttgtgccaggcgaagtccggtatggggaaaactgccgtcttcgtactggcgacattacagcaacttgagcctgttaccggacaggtatcagttttggttatgtgccacacccgcgaacttgcctttcagatcagtaaagaatatgagcgattctctaaatacatgcccaacgtcaaggttgccgtgttcttcgggggactcagcatcaaaaaagacgaagaggttttaaagaagaactgcccacacattgtcgtgggcaccccaggtcggatccttgccctggctaggaataagtccctcaacctgaaacacataaagcactttatccttgatgaatgtgataagatgctggagcagctggacatgagaagggacgtgcaggagatcttcagaatgaccccgcacgagaagcaggtaatgatgttttcagcgacactaagtaaggaaattagatag

SEQ ID NO: 113972 - DNA, 564 bp, synthetic construct
  misc_feature 1..564: note = Description of Artificial Sequence: Synthetic coding sequence
  source 1..564: mol_type = other DNA
atgggatcctcacacatcgggggcctgtccataaatgagaggcgaaggtccgcatcactcggtctggtcatggccgagaacgatgtagacaatgaactgctcgactacgaagatgatgaggtggaaactgctgccggtggggacggcgcggaagcccccgccaagaaggatgttaaagggagttacgtttctatccactctagtggcttcagagattttctgctcaagcccgagctgctgcgcgccatcgtggactgtggtttcgaacacccatccgaggtgcagcatgagtgcatcccccaggctatcttgggtatggatgtgttgtgtcaggctaagtctggaatgggaaagacagctgtttttgtgctggctacccttcagcagctggagcccgtcacaggccaggtcagtgtgctcgttatgtgccacactagagagcttgctttccagattagtaaggaatacgaaagattctcaaagtacatgcctaacgtcaaggtggcggtgttctttggtggtctgtctattaaaaaggatgaagaggtcctcaagaagaactag

SEQ ID NO: 113973 - DNA, 399 bp, synthetic construct
  misc_feature 1..399: note = Description of Artificial Sequence: Synthetic coding sequence
  source 1..399: mol_type = other DNA
atggctgagaacgacgttgacaacgaactgctcgattacgaagatgacgaagtcgaaacggccgctgggggagatggtgctgaggctcctgccaaaaaggatgttaaagggagttatgtttccatccattcctctggtttccgggacttcttactgaagccggagctgctgcgggcgatcgtggattgcggattcgaacacccatccgaagtgcagcacgagtgcattcctcaggcaatcctcgggatggacgtcctatgccaggctaagtccgggatgggcaaaactgccgtctttgtccttgcaacactccagcaacttgagccagttacaggtcaagtgtgcttttgcgacagccatttcccccgaggcgacaacgaagaattgcatttgccgtag

SEQ ID NO: 113974 - DNA, 1332 bp, synthetic construct
  misc_feature 1..1332: note = Description of Artificial Sequence: Synthetic coding sequence
  source 1..1332: mol_type = other DNA
atggctgagaatgatgtagacaatgagctgctggattacgaggacgatgaggtagagaccgccgccggaggtgatggggcagaagccccagcgaagaaggacgtgaaaggatcttatgtgagcatccactcatctggcttcagagacttcctgctcaaacctgagctgctgcgggccattgtcgactgtggattcgagcaccctagcgaagtccagcacgaatgtatccctcaagctatcttaggtatggacgtgctgtgccaagcgaagtccggcatgggcaaaaccgctgtgtttgtcttggcaactctacagcaactcgagcctgtgactggtcaggtctacctcggacgggtgttaggcaggggcttttggtgcgtatttgtcagcgttctcgtgatgtgtcacacgagggaactggctttccagattagtaaagagtatgaaagattttccaaatacatgcccaatgtgaaggtcgccgtcttttttggcggccttagtattaaaaaggatgaggaagttctgaagaagaattgtccacacattgtggttggaaccccaggccgcatcctggccctggcccgcaataagtcgctgaacttgaagcacattaagcacttcattctggacgaatgcgacaaaatgctcgagcagttggacatgcgtcgggacgtacaggagatctttcgcatgacccctcacgaaaagcaggtgatgatgttcagcgcaacgctaagcaaggagatacggccagtatgccgaaagtttatgcaagacccaatggagattttcgtcgatgacgaaacaaaattaactctgcatgggctgcaacaatactacgtcaagctcaaggacaacgaaaaaaacagaaagctctttgatctgctcgacgtgctggagttcaaccaggtggtgattttcgttaaatccgtgcagcggtgtatcgctttggcacagctactagtggaacagaacttccccgccattgctatccatagaggcatgccacaagaggagaggctttcacgctaccagcagttcaaggactttcagaggcggattctggtggccacaaacttgttcggccgcgggatggatatagaacgagttaatatcgcttttaattacgacatgccagaagactccgatacttaccttcaccgagtagcacgagccggacgctttggaaccaaggggctcgccattacgttcgtgagcgacgagaatgacgccaagatacttaacgacgtgcaggatcgtttcgaggtgaatataagcgagctccccgatgagattgacatctcgtcatacatcgagcagaccaggtag

SEQ ID NO: 113975 - DNA, 870 bp, synthetic construct
  misc_feature 1..870: note = Description of Artificial Sequence: Synthetic coding sequence
  source 1..870: mol_type = other DNA
atggccgagaatgacgtagacaatgagctattggactacgaagacgacgaggtggagaccgccgccggaggggacggagcggaggctccagcaaagaaggacgtcaaggggtcttatgtctctatacattcatccggttttagagatttcctcttaaagccagaattgctaagggccattgtcgactgcgggttcgagcatccatctgaagtgcagcacgagtgcattcctcaggcaattctcgggatggacgtgttatgccaagctaagagcggcatggggaaaaccgcggtgtttgtcctggctaccttgcagcaattggagccggtgaccggtcaagttagcgtgttggtgatgtgtcatacaagagaactggcatttcaaatttcaaaagagtacgagcgcttctcgaaatacatgcctaacgtgaaagtggctgtgttcttcggaggactgtccattaagaaagacgaagaagtactgaaaaagaactgccctcacatcgttgtggggacaccgggcaggatcctagcccttgccaggaataagtctctgaacttgaagcacatcaagcacttcatcctggacgaatgcgataaaatgctcgagcagctagatatgcggcgagatgtccaggagatttttcgaatgacgccccacgaaaaacaagtgatgatgttcagcgcaaccttatctaaggagattcggcctgtgtgcaggaagttcatgcaggacccgatggagatttttgtggatgatgagactaagctgactctgcacggcttgcagcagtattacgtgaagttgaaagataacgagaaaaaccggaaactgttcgatctgctcgatgtgctcgaattcaaccagtag

SEQ ID NO: 113976 - DNA, 564 bp, synthetic construct
  misc_feature 1..564: note = Description of Artificial Sequence: Synthetic coding sequence
  source 1..564: mol_type = other DNA
taatctgaggaacgggacattggcaaaccaatggagatctttgtggacgacgagacaaaactgaccctccacgggctacaacaatattacgtaaagctgaaggacaatgagaaaaaccgtaagctgttcgacctgcttgacgtgcttgagttcaatcaagtcgtgatcttcgtaaagtcggtgcagaggtgtatcgcattagcccagctcctcgttgaacagaactttcccgccatagcaattcataggggaatgcctcaggaggaacgccttagccgctatcagcagttcaaagactttcagagacggatcttagtcgcgactaatctatttggccggggcatggacatagagcgggttaatatcgccttcaactacgacatgcccgaagatagtgacacatacttgcatcgcgtggcgagggccggtagatttggaaccaaaggactagccatcacctttgtgagtgacgaaaatgacgctaagattctcaacgacgtgcaggatagattcgaagtgaacatctcagagctgccggatgaaattgacatcagctcctactag

SEQ ID NO: 113977 - DNA, 411 bp, synthetic construct
  misc_feature 1..411: note = Description of Artificial Sequence: Synthetic coding sequence
  source 1..411: mol_type = other DNA
atgggcggcggtaggcgaccttacgacgtctttttttctaaggtgatggccgagaacgacgtggataacgagctactggattatgaggatgatgaggtggagacggccgctggcggggatggggccgaggctcctgctaagaaggatgtcaaggggtcatacgtaagcatacattcttccggttttcgggatttcctgttaaaacctgagctgctgcgtgcaattgtggactgtggctttgaacatccatctgaggtgcaacatgaatgcattccgcaagcaatcctgggcatggacgtgctttgtcaggctaaatccggcatgggaaaaacagccgtgttcgttttggctactcttcaacagctggagccggtgaccggtcaggtgagcgtcttagtaatgtgccattag

SEQ ID NO: 113978 - DNA, 411 bp, synthetic construct
  misc_feature 1..411: note = Description of Artificial Sequence: Synthetic coding sequence
  source 1..411: mol_type = other DNA
atgggagggggacggaggccttatgacgtgttttttagtaaggtgatggctgaaaatgatgtcgacaatgagttgctggactatgaggacgacgaagtggagacagccgcgggtggagatggcgccgaggcacctgccaaaaaagatgtcaagggttcctatgtgagtatacactcctccggattccgcgattttcttcttaaacccgagctactccgcgcaatagtggactgcggattcgagcacccaagcgaggtgcagcatgaatgcattccacaggctatcctgggcatggatgtattgtgccaggctaagtctggtatggggaaaaccgctgtgtttgttctggccacactgcaacagctcgagccggtgactgggcaagttagcgtgctggttatgtgtcactag

SEQ ID NO: 113979 - DNA, 399 bp, synthetic construct
  misc_feature 1..399: note = Description of Artificial Sequence: Synthetic coding sequence
  source 1..399: mol_type = other DNA
atggctgagaacgatgtggacaatgagctgttagattatgaggacgatgaggtggaaaccgccgccggcggcgatggtgccgaggcgcctgcgaaaaaagacgttaaggggagctatgtgtcaatccattctagcgggttccgtgatttcttgttaaaacccgagctcctgcgcgccatcgtggactgcgggtttgagcacccaagtgaggtgcagcacgagtgcataccccaggcaattctaggaatggacgtgttatgccaggcaaagtccggtatggggaaaacagcagtcttcgtgctcgctacactgcaacagctggaacctgttaccgggcaggtgtgcttttgcgactcgcatttccctcgcggggataatgaagaactgcatctgccctag

SEQ ID NO: 113980 - DNA, 711 bp, synthetic construct
  misc_feature 1..711: note = Description of Artificial Sequence: Synthetic coding sequence
  source 1..711: mol_type = other DNA
atggcggaaaacgacgtggacaatgaacttctcgactacgaggacgacgaggtggagacagctgctgggggcgatggggccgaagcgcctgcaaaaaaggatgtgaaggggtcctatgtatccattcattcaagcggtttcagggacttcctgctcaagccagaactgctgagagctatagtcgattgtggatttgagcacccatcagaggtccagcacgagtgcataccgcaggcaatcttgggtatggacgttctctgccaggcaaaaagcgggatggggaagactgccgtatttgttcttgccacgctccaacaattagagccagttaccggacaggttagtgtcctggtaatgtgccacactcgtgaactcgcgtttcagatttccaaagaatatgaacggttcagtaagtacatgcccaatgtgaaggtggcggtgttttttggcgggctgtccattaaaaaggacgaggaggtgctcaagaaaaactgcccacatatagtcgtaggcacgcccggacggatcttagcccttgcgaggaacaagtcacttaacctgaagcacatcaagcacttcattctcgatgagtgcgacaagatgctcgaacaattagacatgcgccgggatgtccaggaaatcttccgaatgactccacacgaaaagcaggtgatgatgttcagcgcaaccctttcaaaggaaatccgatag

SEQ ID NO: 113981 - DNA, 378 bp, synthetic construct
  misc_feature 1..378: note = Description of Artificial Sequence: Synthetic coding sequence
  source 1..378: mol_type = other DNA
atggctgagaacgacgtagataacgaactattggactatgaagatgacgaggtggaaacggcggccgggggcgatggcgccgaagcaccagcaaagaaggacgtaaagggtagttacgtgagcatccacagcagtggattccgagactttctgctgaagcccgagctgctacgggccattgtcgattgcggcttcgagcaccctagcgaagtgcaacatgaatgcatccctcaggccatcctcggcatggatgtgctgtgccaggccaagtcaggtatgggaaagaccgctgtctttgtgctggccaccttgcagcagttggagcctgtgacaggacaagtctccgtcctggtgatgtgccacaccagggagctctag

SEQ ID NO: 113982 - DNA, 987 bp, synthetic construct
  misc_feature 1..987: note = Description of Artificial Sequence: Synthetic coding sequence
  source 1..987: mol_type = other DNA
taagccaccctccagcaattggagcccgtgacaggacaagtgagcgtgctggttatgtgccacaccagagagctggcatttcagatttccaaagagtatgagcgatttagcaagtatatgccaaacgtcaaggtcgcggttttcttcggaggattgagcatcaagaaagacgaagaggtgttaaaaaagaattgtccccacatcgtcgtgggaacccctgggcggattctggctctagcccgcaacaaatccctgaatctgaaacatattaaacactttatccttgatgagtgtgacaaaatgcttgagcaactggatatgcggagagacgttcaggagattttcagaatgacgcctcacgagaagcaggtgatgatgttttcagccacactcagcaaggagattaggcccgtgtgcagaaagtttatgcaggatccaatggagattttcgtggatgacgaaaccaaattgacacttcacggattacagcagtattatgtgaaactgaaggataatgagaagaacaggaagttattcgatcttttggacgtgcttgagttcaaccaagtggtgatatttgtgaagtccgtgcagcgatgtatcgccttggctcagctgctcgtcgaacagaacttccctgccatagctatccaccgtgggatgccccaagaggagagactgagtcgttaccagcagttcaaagactttcagaggcgcatcctggtggcaactaatctgtttgggcggggaatggatatcgagcgagtcaacattgctttcaattacgacatgcctgaagattctgacacctacctgcatcgggtcgcaagagccggccgattcggaactaagggactcgctatcacgttcgtatccgatgagaatgacgccaagattctcaacgatgttcaggatcgattcgaagtcaacatctctgaactccccgatgagatagacatcagtagctatattgagcagacacggtag

SEQ ID NO: 113983 - DNA, 711 bp, synthetic construct
  misc_feature 1..711: note = Description of Artificial Sequence: Synthetic coding sequence
  source 1..711: mol_type = other DNA
atggctgagaatgatgtcgacaacgagctcctagattatgaagacgacgaggtggagaccgcagctggcggggacggcgccgaggcccctgcgaaaaaggatgtcaaaggctcatatgtgtcgatacattcatcgggcttccgtgactttctgctgaagccagagctgctccgcgccatagtggactgcgggtttgaacaccctagtgaagtgcaacacgagtgtatcccacaagcaatattagggatggacgtactctgccaggccaaatctggcatgggaaagactgcagtcttcgttcttgccacgctccagcagctggaacccgttaccgggcaggtttcggttttagtcatgtgtcatacaagagagctggcgtttcagatatctaaagagtacgagcgtttttctaaatatatgcccaatgtaaaggtggccgtattcttcggaggcctctccatcaagaaggacgaggaggtgctcaaaaagaactgtccccacattgttgtgggtacccccggccgaatcctggcactggcccggaataagtctctgaaccttaagcacataaaacattttatacttgacgagtgtgacaaaatgctggaacaactggacatgagacgcgacgtgcaggaaatctttcgaatgaccccgcacgagaagcaggtgatgatgttcagtgctactctcagtaaggagatcaggtag

SEQ ID NO: 113984 - DNA, 564 bp, synthetic construct
  misc_feature 1..564: note = Description of Artificial Sequence: Synthetic coding sequence
  source 1..564: mol_type = other DNA
tgatcggaggaacgcgatattgggaaacccatggaaatcttcgtcgatgatgagaccaaacttactctgcatggtctgcaacagtactatgtgaagttgaaggataacgagaagaacagaaagctcttcgacctgctcgacgtcttagagttcaaccaggttgtgatatttgtgaagtccgttcagcggtgcattgccctcgcccagctgcttgtggagcagaactttccagccatcgcgatccatcgtggcatgccccaagaagagagactctcccgatatcagcaatttaaggacttccagcgtcgaattctggtcgcaaccaacctgtttgggaggggcatggacatagagagagtaaatatcgcctttaactatgatatgcctgaggattcagatacctatctgcacagagtcgctagagctgggaggtttggcacaaagggactggcgatcacttttgtaagtgatgagaatgatgccaaaatcctgaacgatgtccaggacagattcgaagtgaacatttccgagctgcctgacgagatcgacatatcttcatattag

SEQ ID NO: 113985 - DNA, 378 bp, synthetic construct
  misc_feature 1..378: note = Description of Artificial Sequence: Synthetic coding sequence
  source 1..378: mol_type = other DNA
atggctgagaatgacgttgacaacgaactgttggattatgaggatgatgaagtggaaactgcagccggtggagatggcgcagaggcccccgcaaaaaaggacgtcaagggatcctacgtgagcatccactcgtcgggctttcgcgacttccttctcaaacccgagctgcttcgggccatcgtggattgtgggtttgaacacccctcggaggtgcagcacgaatgtattcctcaggctatactgggcatggatgtactttgccaggcaaaaagcggaatggggaaaacggcagtctttgtgctggccactctgcagcagctggaacccgttacgggccaggtgtcagtgctcgtgatgtgccacacacgcgagctttag

SEQ ID NO: 113986 - DNA, 291 bp, synthetic construct
  misc_feature 1..291: note = Description of Artificial Sequence: Synthetic coding sequence
  source 1..291: mol_type = other DNA
atggcagagaacgacgtggataatgaactgctggattacgaggatgatgaggtggaaaccgcagctgggggagatggcgccgaggccccagctaaaaaggatgtgaagggttcatacgtatcgatccattcatcaggtttccgcgacttcctcttaaagccggagcttctgcgagccatagtagactgtggatttgaacatccctcagaagttcagcatgaatgcatcccccaggccatactcggcatggatgtgctgtgtcaggctaagtcagggatgggcaaaacctag

SEQ ID NO: 113987 - DNA, 378 bp, synthetic construct
  misc_feature 1..378: note = Description of Artificial Sequence: Synthetic coding sequence
  source 1..378: mol_type = other DNA
atggctgaaaacgacgtggataatgagttactcgactacgaagatgacgaagtcgagactgctgcgggtggggatggggctgaggccccagcaaaaaaggatgtcaaaggatcctacgtctctatccacagttccggcttccgggatttccttctcaaacccgagctcttgcgggcaatcgttgattgtggatttgaacacccttctgaagtgcagcatgagtgcatacctcaagctatcttgggcatggatgtcctttgtcaggccaaatccgggatgggcaagactgccgtctttgttctggccactctgcagcagctggagccggtgacaggccaagtgtctgtccttgtaatgtgccataccagagagctctag

SEQ ID NO: 113988 - DNA, 987 bp, synthetic construct
  misc_feature 1..987: note = Description of Artificial Sequence: Synthetic coding sequence
  source 1..987: mol_type = other DNA
taagctactcttcagcagctggagcccgtgacaggtcaggtgtccgtcttggtgatgtgccatacccgcgaacttgcatttcaaatctctaaagagtacgagaggttctccaaatacatgccgaacgttaaggttgccgtttttttcgggggactctccataaagaaagacgaagaggttctgaaaaagaactgcccacacatagtcgtgggtactccaggccggatcttagccctcgctagaaacaagagtttaaacctcaagcatatcaaacacttcatcctggatgaatgtgacaaaatgctggaacaactggacatgcgccgcgacgtgcaggagatctttcgaatgacacctcacgaaaaacaagtgatgatgttcagcgccacattgtcaaaagaaatccggccggtgtgtaggaaattcatgcaggatcccatggagatctttgtggacgatgagaccaaactgaccctccacggattgcagcaatattatgtgaagctgaaggataatgagaagaaccgaaagctttttgaccttctggacgttcttgagtttaatcaggtagtaatctttgttaagtcggttcaacgttgtattgccttagctcagctgctggtagaacagaatttcccagccatagcgattcacaggggcatgcctcaggaggagagactaagtcgatatcaacagtttaaggacttccagcgcagaatcctcgtcgctaccaatcttttcggccgggggatggacattgaacgcgtgaacatagccttcaattatgacatgccagaagacagcgatacatatcttcaccgggtggcaagggctggccgctttggtacaaagggcctggcaatcactttcgtctcggacgaaaacgatgccaagatcttaaacgacgtgcaagaccgctttgaagtcaatatctccgaacttcccgatgaaatcgatatcagcagctatatagaacaaactcgctag

SEQ ID NO: 113989 - DNA, 870 bp, synthetic construct
  misc_feature 1..870: note = Description of Artificial Sequence: Synthetic coding sequence
  source 1..870: mol_type = other DNA
atggccgaaaacgacgtggacaatgaattattagattacgaagatgacgaagtggaaactgccgcagggggggacggcgccgaagctcctgctaaaaaagatgttaagggctcatatgtctctatccattctagcggcttcagggacttcctgctgaaaccagagctcctcagggcgatcgtggattgtggattcgagcacccaagtgaagtccaacatgaatgcatccctcaggcaatcctcgggatggatgtgctttgccaagctaaaagcggaatgggtaagacggctgttttcgtgttggcgaccttgcagcaacttgagcctgtgaccggccaggtctctgtattggtgatgtgtcacacaagggagctggcttttcagatttccaaggagtatgagcgattctctaagtacatgcccaacgtcaaggttgcagtgttcttcgggggcctaagtatcaagaaggacgaagaggtgttgaaaaagaattgcccgcacatcgtggtggggacacctggccgcatcctggcattggctcgtaataagtctcttaacctcaagcacatcaagcactttatactggatgagtgtgacaagatgctcgaacagctggatatgaggcgtgacgtgcaggagatctttagaatgacaccccatgagaagcaggttatgatgttctcggcgacgctgagcaaagaaatcaggcccgtgtgtagaaagtttatgcaagatccaatggaaatttttgtcgatgacgagaccaaactgaccctgcatggactgcagcagtattatgtcaaactcaaggataacgaaaaaaacagaaagctttttgaccttctcgacgtgcttgagttcaaccaatag

SEQ ID NO: 113990 - DNA, 738 bp, synthetic construct
  misc_feature 1..738: note = Description of Artificial Sequence: Synthetic coding sequence
  source 1..738: mol_type = other DNA
atgtggactatgagctcttggaccatgaagatgatgaggtggcgccaacaactgggggaaatgggtcttcgcccgttaccacgacggatgtctcgggcgcccatgagcccctcgacagcactggcatttgtcacttcctgctcttcccaaagttgttcgggccccctgagcacagtggcactatcaatacgacagaaagtggccgtgttctttgggggcttgagcataaagaaggatgaggaggttctgaaaaagaattgcccacatattgtggtcggcactcccggccgcattctagcccttgcgcgtaataagtctctgaacttgaagcatattaaacatttcatcctggacgagtgcgacaagatgttagagcagctggatatgaggcgcgatgttcaggagatttttcgcatgactccccatgaaaagcaggttatgatgttttcagccactctcagtaaagagattcgccctgtgtgtcgtaagttcatgcaggatccgatggaaattttcgtggatgacgagacaaagttgacactccacggcctccagcagtattacgtgaagttgaaggacaacgagaaaaacagaaaactgttcgacttgctggacgtgctggagttcaaccaggtcgtgatttttgtcaaaagcgtccagcgttgcatcgcacttgctcaattgttagtggaacagaactttcctgcgatagcaattcaccgcggcatgccacagtag

SEQ ID NO: 113991 - DNA, 738 bp, synthetic construct
  misc_feature 1..738: note = Description of Artificial Sequence: Synthetic coding sequence
  source 1..738: mol_type = other DNA
atgtggacaatgtccagctggaccatgaaaatgatgcgttggagacagcagctgggagagatggggctccgccctttgccacgtagaatgtcacgagctcctatgtcacctagtactgcgttagcttttgtaacatcatgtagctctcaaagctgttcaggccccctcagcaccgttgcacttagtatccgccaaaaggttgcagtgttcttcggaggcctgagtattaaaaaagacgaggaggtgcttaagaagaactgtccccatattgttgtgggtacccctgggcggatcctggcattagcccggaataaaagtttaaacctgaagcacataaagcattttatcctggatgagtgtgacaagatgctcgaacagctggacatgcgcagagatgtacaagagattttcagaatgacaccccatgagaagcaggttatgatgttcagtgccacccttagcaaagaaattagaccagtgtgtcgcaagttcatgcaagaccctatggagatcttcgtggatgatgaaaccaaactgacactccacggtttacaacagtattacgtaaaactcaaggacaatgaaaagaacaggaagctctttgacctgctggatgtgctcgagttcaaccaggtggtaatatttgtcaaatcggtgcagagatgtattgctttggctcagcttctcgttgagcagaatttcccagccatcgcgattcaccggggtatgcctcaatag

SEQ ID NO: 113992 - DNA, 396 bp, synthetic construct
  misc_feature 1..396: note = Description of Artificial Sequence: Synthetic coding sequence
  source 1..396: mol_type = other DNA
taagctacactgcagcagttagagcctgtgacaggccaggtgagcgtactggtgatgtgccatacacgagagctcgctttccagattagcaaggagtatgagcgtttcagtaagtatatgccaaatgttaaagtggcagtgttctttggtggattaagcatcaagaaggatgaagaagtcctgaaaaaaaattgtcctcacattgttgtggggacgcctggcaggatcctggcgctggccagaaacaagtcattgaatctcaagcatataaaacacttcatcttagacgagtgcgataagatgctggaacaacttgatatgagacgagacgtacaggaaatcttccggatgacaccacacgagaaacaggtgatgatgttctcagccactctctag

SEQ ID NO: 113993 - DNA, 411 bp, synthetic construct
  misc_feature 1..411: note = Description of Artificial Sequence: Synthetic coding sequence
  source 1..411: mol_type = other DNA
taagcgactttgcaacagcttgaaccagtgactgggcaagtctctgtccttgtgatgtgccacactcgcgagctcgcattccagataagcaaggagtatgagaggttctccaagtacatgccgaatgtcaaggtcgcagttttcttcggtgggctgagcatcaagaaggacgaggaggtgctcaaaaagaactgcccccatattgtcgtagggacacccgggagaatcctggctctggctcgcaataagtctttgaatctcaaacacatcaagcattttattctggacgaatgcgataagatgctggaacagctcgatatgcggagagatgtgcaggagatcttcaggatgactccccacgagaagcaggtgatgatgttctccgctactctgtccaaagaaataaggtag

SEQ ID NO: 113994 - DNA, 717 bp, synthetic construct
  misc_feature 1..717: note = Description of Artificial Sequence: Synthetic coding sequence
  source 1..717: mol_type = other DNA
atggcagaaaacgacgttgacaacgaattactcgattatgaggatgacgaggtcgaaactgcggccgggggcgacggggcagaggcccctgcaaaaaaggatgtgaaaggctcttacgtgtccatacactcgagtggcttccgcgactttttactgaagcctgaactgcttagggccattgtggactgtggtttcgagcatccttccgaagtccagcacgagtgtataccgcaggcgattctcggcatggatgtgctctgtcaggctaaatctgggatgggaaagacagcggtgtttgttctggccacgctacagcagctggaacccgtaacggggcaggtctcagtgttagttatgtgtcacacacgcgagctggcttttcagatcagtaaggaatacgagcgcttctcgaagtatatgccaaatgtgaaggtggccgtgtttttcggtggactgagcattaaaaaggacgaggaggtcctcaaaaaaaactgcccacacattgtcgtgggcactcctgggagaatcctggccttggctagaaataagtccctgaacttgaagcatattaagcactttatactcgatgagtgtgacaagatgttggaacaactagacatgagacgtgacgtgcaagagattttccggatgacaccacacgagaagcaggtcatgatgttctccgccaccctcagcaaagaaataagacccgtgtag

SEQ ID NO: 113995 - DNA, 564 bp, synthetic construct
  misc_feature 1..564: note = Description of Artificial Sequence: Synthetic coding sequence
  source 1..564: mol_type = other DNA
tgaagcgaagagcgggacatcggcaagcctatggaaatttttgtcgacgacgagacaaaactaactctgcatggacttcagcagtactacgtgaagctgaaggacaatgaaaagaatcggaaactgttcgatttgttagacgtgttggaattcaaccaggtggtgatattcgtaaaatctgtgcaaaggtgcatagctctagcccagctgctggtcgaacaaaatttccctgcaatcgcgatccaccggggaatgccccaggaggaacggctctctcgatatcaacaattcaaagatttccagcgccgaatcctggtggccacgaacctcttcggccgtggcatggatattgaacgcgtgaatatcgccttcaattatgatatgccggaagactccgatacttatttacatcgtgtggcccgtgcaggccggtttggcaccaaggggctcgctataacctttgtctccgatgagaacgatgctaagattttgaatgatgtgcaggatcgcttcgaggtcaatatcagtgagctccccgacgaaatcgatatcagctcatactag

SEQ ID NO: 113996 - DNA, 594 bp, synthetic construct
  misc_feature 1..594: note = Description of Artificial Sequence: Synthetic coding sequence
  source 1..594: mol_type = other DNA
atggccgaaaatgatgtagataacgagttgttggactacgaggacgatgaagttgaaactgctgccgggggagatggggccgaggcgcccgccaagaaagacgtcaaaggatcgtacgtgagcatccatagcagtgggtttagagatttcctgctgaagcctgaactcctccgggctatcgtggactgtggatttgaacaccctagtgaggtgcagcacgagtgcattccacaagcgatcttaggaatggacgtgctctgccaggccaagagcggcatgggtaagaccgcagttttcgttctggctaccctacaacaactggaacctgtgactggccaggtctgtttttgtgactcccattttcctcgtggcgataacgaggagctccaccttccgtatgtgtctgtgtacttcttgccgaaagtgtcagtactggtgatgtgccatacccgggaactcgccttccagatctccaaagaatatgaacggttttctaaatacatgcctaacgtgaaagtcgctgtcttctttgggggcttaagcataaaaaaggacgaggaagttttgaaaaagaattgtccacatatcgtgtag

SEQ ID NO: 113997 - DNA, 594 bp, synthetic construct
  misc_feature 1..594: note = Description of Artificial Sequence: Synthetic coding sequence
  source 1..594: mol_type = other DNA
atggcagaaaatgatgttgataacgagctcctcgactacgaagatgacgaagtcgagaccgccgctggcggcgatggcgccgaagcgccagctaaaaaagacgtcaagggctcctatgtcagcattcactcatccgggttccgggatttcctgttgaagcctgaactgttgcgtgctatcgtcgattgcgggtttgagcatccatccgaggtgcagcatgagtgtatcccccaagctattttaggaatggacgtcctatgccaagcgaaaagcggcatggggaagactgcagtgtttgttctggctactctgcaacagctggaacctgttaccggacaagtctgtttctgcgactcccactttcccagaggcgataacgaagagctgcatctcccctatgttagtgtttactttcttcctaaagtcagcgtgctcgtcatgtgccacactcgggaactggccttccaaatttctaaagaatacgagagattcagcaagtacatgcctaacgtgaaagtcgcagtcttcttcggaggcctgtccataaagaaagacgaagaagtcttgaagaagaattgtccacatatagtctag

SEQ ID NO: 113998 - DNA, 411 bp, synthetic construct
  misc_feature 1..411: note = Description of Artificial Sequence: Synthetic coding sequence
  source 1..411: mol_type = other DNA
atgggagggggtcgccgaccttacgacgtgtttttctctaaggtcatggccgagaacgatgtggacaacgaactgctagattatgaggatgatgaagtggaaaccgccgcaggtggagacggcgcggaagccccagcaaaaaaggacgtgaaaggaagttacgtgagtatccattcttcaggtttccgagattttctgctcaaaccagagctgcttcgggcaatcgttgattgcggctttgagcacccctccgaagtccagcacgagtgtatcccccaggcaatccttgggatggacgttctttgccaggctaaaagcggcatgggcaagactgcagtcttcgtgctcgcgaccctgcagcagctcgagcctgtgacgggtcaggttagtgtgctggtgatgtgccactag

SEQ ID NO: 113999 - DNA, 1278 bp, synthetic construct
  misc_feature 1..1278: note = Description of Artificial Sequence: Synthetic coding sequence
  source 1..1278: mol_type = other DNA
atggcagagaacgatgtggataacgagctgctggactacgaggacgatgaagtagagacagccgcaggcggcgatggggcggaggctcctgctaaaaaggatgttaaaggctcctacgtgagtatacattctagcgggtttagagatttcctcctgaaacccgaattattgcgcgccattgttgattgcgggttcgagcacccgtccgaggttcagcatgaatgcataccacaggccattcttggcatggacgtgctgtgtcaggctaagtctggaatggggaagacagcggtgttcgtgttagccacactacaacaattagagccagtgacaggccaagttagcgtccttgtgatgtgtcacactcgggaactggccttccagatcagcaaggagtacgagcggtttagcaagtacatgcccaatgttaaggttgccgtgttctttggaggcctaagcatcaagaaggacgaagaagtgctcaagaaaaactgcccccatattgtggtggggaccccaggcagaatcctcgccctggcacggaataagtctctgaacctgaaacacataaaacacttcatactcgatgaatgcgataagatgcttgaacagcttgatatgcggagggatgtgcaggagattttcagaatgaccccacatgaaaaacaggtgatgatgttctccgccacgctgtcgaaggagattagacctgtctgcaggaagttcatgcaagatcccatggaaatcttcgtcgacgatgaaacgaaacttaccctgcatggcctgcagcaatattacgtcaaactgaaagataatgagaagaatagaaagctgttcgatttactcgacgtcctcgaatttaatcaggtggtgatcttcgtcaaaagcgtgcagcggtgcatcgcgttggctcagcttcttgttgagcaaaattttcccgccatcgcaatacatcggggaatgccccaggaagaacgcctgtcccgctatcagcagttcaaggatttccagaggaggatcctggtggccaccaatctgtttggcagggggatggatattgagagggtcaacattgcatttaactatgatatgcccgaggattctgacacgtatcttcatcgatgctatccactcagcccatccagatggcccgaacaggcagggctcgcgcctcgcgcatggctctcccacctctgtccgatgcggatgatgccgcgaagcagcatgatgtgtcgcattgccctgcggtccatcctagtgtcttgcctgatgaggtag

SEQ ID NO: 114000 - DNA, 1287 bp, synthetic construct
  misc_feature 1..1287: note = Description of Artificial Sequence: Synthetic coding sequence
  source 1..1287: mol_type = other DNA
atggctgagaatgacgtggacaacgagctgcttgactacgaagacgatgaagtggagactgccgcaggaggagatggggccgaggctccagctaaaaaagacgtgaaaggcagctatgtctcaatccactccagcgggtttagagacttcctcctgaaacccgagctgcttcgtgcaatcgtggattgtgggtttgaacatcccagcgaagtgcagcacgagtgtataccacaagcgattctcgggatggacgtgctgtgccaggccaagtcaggaatggggaagactgccgtgttcgtgctggctaccttacagcaactggagccagttaccggtcaggtcagcgtcctagtgatgtgtcacaccagggagttggccttccagattagcaaagagtatgaacgattcagcaaatacatgccaaacgtcaaggtcgcagtttttttcggagggctgtccatcaagaaagatgaggaggtacttaaaaaaaattgcccacacatagtcgtcggcaccccaggacgtattcttgccctggccaggaacaaatctttgaatttaaagcacatcaagcactttattttagatgaatgtgacaaaatgcttgaacaactcgatatgaggagagacgttcaggagatctttcggatgacaccccatgagaaacaggtaatgatgttctctgcgacgttatccaaagagattcgcccggtgtgtagaaaatttatgcaggaccctatggagattttcgtcgacgacgaaacaaagctgactctacacggtttgcagcagtactatgtgaagcttaaggacaacgagaagaatcgcaagctgttcgatctcttagacgttctcgaatttaatcaagtggtcatctttgtgaagtcagtgcagcgttgcatcgcccttgcacagctcctagtggagcagaattttcccgctatagccattcaccgaggcatgccacaggaggaaagactgtcacgatatcagcagttcaaggattttcaacgaagaatacttgtcgccactaatctctttggcagggggatggacatcgagcgagtgaacattgccttcaactacgacatgccagaagacagtgatacatacctgcatagagtggcccgagctggtcgcttcggcacaaagggtttggccataacttttgtttctgatgaaaatgacgcgaagatcctaaatgatgtgcaagaccgctttgaggtcaacatttcagaactgcctgatgaaatcgacatctcttcctatatagagcagacccggtag

SEQ ID NO: 114001 - DNA, 1287 bp, synthetic construct
  misc_feature 1..1287: note = Description of Artificial Sequence: Synthetic coding sequence
  source 1..1287: mol_type = other DNA
atggctgagaacgacgtggataacgaactgcttgattatgaagatgacgaggtggagaccgccgcagggggtgatggagctgaggcccccgctaagaaagacgtcaaagggagctatgtgtctatccacagctctggctttcgtgacttcctgctgaaaccagagcttctgcgggctatcgtcgactgcggcttcgagcatcccagcgaggtccaacacgagtgtatcccccaggcaatcctggggatggacgtgctgtgtcaggctaaaagtggcatgggtaagacagcagtgttcgtgctggccacactccagcagctggaaccagtgaccggtcaggtatccgtcttggtcatgtgccatacgcgcgagttggcattccagatctccaaagaatatgaacgctttagtaagtatatgcccaatgtaaaagtagctgttttctttgggggactttctattaagaaagatgaggaagtcttgaagaaaaactgtcctcacattgtggtgggtacacccggccgcattttagcccttgcacgaaataaatctctgaacttgaagcacataaaacactttatcctagacgagtgcgataagatgctggagcagcttgacatgaggagggacgtccaggagatattcaggatgactccccatgagaagcaggtaatgatgttctctgctaccctttcaaaagagattagaccggtttgcagaaaattcatgcaggaccctatggagatcttcgtagatgatgagaccaagttgacactgcacggattgcagcagtattatgtgaagctcaaagataacgaaaaaaatcggaagctgtttgatctgctggacgtgctagagttcaaccaggtggtgatcttcgtgaagtccgtgcaaaggtgcattgccctagcccaacttttggttgaacagaatttcccagcaatagcaatccatagaggtatgccccaagaggagagattgtcacgctatcagcagtttaaggactttcagcgccggattttggtcgccaccaacttgtttggaagagggatggacatagagcgggttaacatcgcctttaactatgacatgccagaagactccgatacctacctgcaccgcgtggctcgcgccggaagattcgggaccaagggacttgctattaccttcgtgtccgacgagaacgatgccaagatccttaatgacgtgcaggataggtttgaagtgaacattagcgagctgccagacgagatcgatatcagctcctatatcgaacagactcggtag

SEQ ID NO: 114002 - DNA, 738 bp, synthetic construct
  misc_feature 1..738: note = Description of Artificial Sequence: Synthetic coding sequence
  source 1..738: mol_type = other DNA
atgtggaccatgagcagttggaccatgaagatgatgaggtggagacagcagctaggggagatggggcttcgccccttacccagacgaatgtcacgggctcccatgtcgccctccactgctctggcctttgttacatcctgctctagtcagagctgttctggcccattatcaacagtcgctctgagtataaggcagaaagtggctgtgttcttcggcgggctctcgataaagaaagacgaggaggtcctcaagaaaaactgcccccatatcgtcgttgggacccctgggagaattctggcactcgcccggaacaagtccctgaatcttaagcacatcaaacacttcattctggatgaatgcgacaagatgttagagcagctggacatgcgccgtgacgtgcaggaaattttcagaatgacaccccatgagaaacaagtaatgatgttcagcgccacgctgtcaaaagagatccgccctgtatgccgtaaattcatgcaagaccctatggagatcttcgtggatgacgaaacaaagctaacactgcatggtctccagcagtattatgtgaaacttaaggacaacgagaaaaaccgcaagctgttcgaccttcttgacgtgttggaatttaaccaagtggtcatattcgtgaagagcgtacagcggtgtatagccctggcccaacttctcgtggaacaaaatttcccagcaattgccatccacaggggaatgccccaatag

SEQ ID NO: 114003 - DNA, 696 bp, synthetic construct
  misc_feature 1..696: note = Description of Artificial Sequence: Synthetic coding sequence
  source 1..696: mol_type = other DNA
atggccgagaacgatgttgataatgagttactggactacgaagatgatgaggtggagacagcagcaggcggggacggcgcggaggccccagccaagaaggacgtcaagggtagctatgtgagcattcattcttctgggttccgggacttcctgctgaagcccgagttgctgcgcgccatagtggactgcgggtttgaacacccatcagaagtccagcatgagtgcattccccaagcaatcttgggcatggacgtgctgtgtcaggcaaaatcaggaatgggcaaaacagccgtttttgtactggctactctccaacaactcgagcccgtgaccgggcaagtttctgtcttagtgatgtgtcacacacgggagctggctttccaaatcagtaaggagtacgagaggttcagcaagtacatgccaaacgttaaggttgccgtattcttcggtgggctgtctatcaagaaagacgaggaagtcctaaaaaagaattgccctcacatcgtagttggcaccccgggaagaatcctggcgctggcccggaacaagtctttaaacttaaaacatatcaagcattttatattggacgaatgtgataaaatgctggaacagttagacatgaggagggacgtgcaggaaatcttccgaatgacaccacacgaaaaacaagtcatgatgttctcggccacactctag

SEQ ID NO: 114004 - DNA, 594 bp, synthetic construct
  misc_feature 1..594: note = Description of Artificial Sequence: Synthetic coding sequence
  source 1..594: mol_type = other DNA
atggccgagaacgacgtggataatgaactactggactacgaagatgacgaggtggagacagcagcaggcggtgacggggccgaggcgccagcgaagaaagatgtaaaggggtcttacgtgtccatccattccagtggatttagagattttctcctgaagcccgaattgctcagagcgattgtagattgcggattcgagcacccctccgaagtgcagcacgagtgcatcccacaggccatccttggaatggatgttctgtgccaggctaaatcagggatgggaaaaactgcggtcttcgtgctcgccacccttcaacagctagagcccgtcacaggccaggtgtgtttctgcgattctcacttcccacggggcgataatgaagaactccacctgccttacgttagtgtgtacttcctgcccaaggtgtcggtgctggtgatgtgccacactagagagctggccttccagatctctaaggaatacgagagatttagtaaatacatgccaaacgtaaaggtggctgtgtttttcggtggcctgtccatcaagaaggatgaggaagtgctgaagaaaaactgtccacatatcgtctag

SEQ ID NO: 114005 - DNA, 594 bp, synthetic construct
  misc_feature 1..594: note = Description of Artificial Sequence: Synthetic coding sequence
  source 1..594: mol_type = other DNA
atggctgaaaacgatgtagataacgaactgttggactatgaggacgacgaagtggagacagccgctggcggggacggggccgaggccccggcgaaaaaagacgttaaaggctcctatgtgtctatccactcatctggatttcgagactttctgttaaagccagagttgctgcgagcaattgtggactgtggctttgagcacccctctgaagtgcaacacgagtgcatacctcaggcaattctgggcatggatgtactctgccaggctaagagcgggatgggcaagaccgctgtttttgtgctcgccacccttcaacagctggaacctgtgaccggtcaagtctgtttttgtgactcgcattttcccagaggcgacaatgaggagctccacctaccgtacgtgagtgtgtatttcctgcccaaggtttcagtcctagtgatgtgtcatactcgggagttagcctttcagatatctaaagaatacgaacgattctcaaagtacatgcccaacgtgaaagtcgctgttttcttcgggggtctctccattaaaaaggacgaggaagtccttaagaagaattgccctcatatcgtgtag

SEQ ID NO: 114006 - DNA, 540 bp, synthetic construct
  misc_feature 1..540: note = Description of Artificial Sequence: Synthetic coding sequence
  source 1..540: mol_type = other DNA
gtggcggtgtttttcggtggtctgtctataaagaaggatgaggaggtactgaagaagaactgcccacatatcgtagtcggcacccccggccggatactggctctcgcacgcaacaagtccttaaatcttaagcatataaaacattttatcctcgacgagtgtgacaagatgctagagcaattggatatgagacgtgatgtgcaagaaatctttagaatgactccacacgagaagcaggtgatgatgttctccgctacactcagcaaggagatccgccctgtgtgtagaaaattcatgcaagatcctatggagattttcgttgacgatgaaacgaaacttacactccacggcctacagcagtactacgtcaagctgaaggacaatgaaaagaatagaaagttgtttgacctcttggatgtcttggaattcaaccaagtggtgatctttgtgaagagcgtacaacggtgcatagccctggcacaactactggtagagcagaacttccccgcaatcgccatccatcggggcatgccccagtag

SEQ ID NO: 114007 - DNA, 594 bp, synthetic construct
  misc_feature 1..594: note = Description of Artificial Sequence: Synthetic coding sequence
  source 1..594: mol_type = other DNA
atggccgagaacgatgtcgacaacgagctcttggattatgaagacgatgaggtggaaactgctgcggggggagatggggctgaggccccggcaaaaaaagacgtgaaagggagctacgtttctattcactcatctggtttcagagactttctcctgaagcctgagctgctccgcgccattgtagattgtggtttcgagcatccttctgaggttcaacacgaatgcatcccccaggcaattctgggcatggatgtattatgccaggccaagtcagggatggggaaaactgccgtctttgtcctggccacactgcagcagctggagccggtgacgggtcaagtctgtttttgtgatagccatttcccaaggggcgataacgaagaactacatctaccttacgtgtctgtatatttcctccctaaggtgtctgtgctggtgatgtgccacacccgggagttggccttccagattagcaaagagtatgaacgatttagcaaatatatgccaaacgtcaaggtggccgtttttttcgggggactgtctataaaaaaagacgaggaggtgctaaagaaaaactgcccccatatagtttag

SEQ ID NO: 114008 - DNA, 564 bp, synthetic construct
  misc_feature 1..564: note = Description of Artificial Sequence: Synthetic coding sequence
  source 1..564: mol_type = other DNA
tgatctgaggagagagacataggaaaacccatggagatcttcgtggacgatgaaacaaaactaacactacacggtctgcagcagtactacgtcaagctgaaggataacgaaaagaaccgaaagttgtttgacctgttggacgtgctggaattcaatcaagtcgtgatattcgtgaagtcagttcagaggtgcattgcgttagcccaactccttgttgagcaaaattttcctgctatagccatccatcgcgggatgccccaggaggagagactgtccagataccagcagttcaaagattttcaacgccgaatcctcgtggccacgaatctgtttggacgcgggatggatattgagcgagtgaatattgcttttaactacgacatgcccgaagactccgatacttacttacacagagtcgcacgggccggacgttttgggaccaaaggattagccatcacctttgtgtccgatgaaaatgatgcgaagattcttaacgacgtgcaagatcgatttgaagtgaatatttctgagttgccagatgagatcgatatcagcagctattag

SEQ ID NO: 114009 - DNA, 195 bp, synthetic construct
  misc_feature 1..195: note = Description of Artificial Sequence: Synthetic coding sequence
  source 1..195: mol_type = other DNA
taggccacccttcagcagcttgaacctgtcacaggacaggtgagcgtcctcgtgatgtgccacacacgtgagcttgctttccagatatccaaggagtacgaaagattctcgaaatacatgcccaatgtgaaggttgccgtgttttttggtggtctgagtatcaagaaagatgaggaggtgttgaagaaaaactag

SEQ ID NO: 114010 - DNA, 78 bp, synthetic construct
  misc_feature 1..78: note = Description of Artificial Sequence: Synthetic coding sequence
  source 1..78: mol_type = other DNA
tgagcaactcttcaacaactggaacctgtgaccggccaggtttcagtattggtgatgtgtcacaccagggagctatag

SEQ ID NO: 114011 - DNA, 66 bp, synthetic construct
  misc_feature 1..66: note = Description of Artificial Sequence: Synthetic coding sequence
  source 1..66: mol_type = other DNA
tgagctactctgcaacagctggagccggttacaggccaggttagtgtgttagtcatgtgtcactag

SEQ ID NO: 114012 - DNA, 870 bp, synthetic construct
  misc_feature 1..870: note = Description of Artificial Sequence: Synthetic coding sequence
  source 1..870: mol_type = other DNA
atggccgagaacgatgtggataacgaactgctagattatgaggacgacgaggtcgagaccgccgccggcggggatggcgctgaggcccctgccaagaaggacgtcaagggaagctatgtgagtatccacagtagcgggttccgcgacttcttgctgaaacctgaactcctgagggcaatcgttgactgcgggtttgaacacccctctgaggtgcagcatgaatgcatccctcaagcaatattgggaatggacgtcttatgccaggcaaaatctggaatggggaaaactgctgtatttgtgcttgctaccctgcagcagcttgaacccgtgacagggcaagtctctgtgctcgtgatgtgccacacacgcgagttggcctttcagatatccaaagaatacgagcggtttagtaagtacatgcccaatgtcaaggtcgcagtcttcttcgggggactgtctatcaagaaggatgaggaggttctgaaaaagaactgtcctcacatagtggttgggacccctggacgcatactggcacttgctcgcaacaagtccttgaacctcaaacacattaagcatttcatattagatgaatgcgacaaaatgctggagcagctggacatgaggagagatgttcaggagattttccgaatgacaccgcatgaaaagcaagtcatgatgttcagcgcgactctaagtaaggagattagacccgtctgccggaaatttatgcaagacccgatggaaatcttcgtagacgacgaaactaagcttactcttcacgggctgcagcagtactatgtcaagctcaaagataatgagaaaaaccggaagttattcgacctgcttgatgtcctcgaatttaatcagtag

SEQ ID NO: 114013 - DNA, 711 bp, synthetic construct
  misc_feature 1..711: note = Description of Artificial Sequence: Synthetic coding sequence
  source 1..711: mol_type = other DNA
atggctgagaacgacgttgacaatgagttgctggactacgaggacgacgaggtagaaaccgctgccgggggagacggagccgaggcgcctgctaaaaaagacgtcaaaggcagctacgtatccatccactccagcggattccgcgatttcttgctcaagcccgaactgctccgagccattgttgattgcggttttgaacacccgagcgaagtacaacacgagtgcattccacaggcaatattagggatggatgtgctgtgccaggctaaaagcggtatgggcaagactgcagttttcgtgctggcaacactgcagcagttggaacccgtgaccggacaagtctcagtgctagtaatgtgccatacaagggagttagccttccagattagtaaagaatacgaacgcttctctaagtacatgccaaatgtcaaggtggccgttttttttggggggctatccattaaaaaagatgaagaggtgcttaagaagaactgcccacacatcgtcgtcggtacccccggccgaatcctggccctggccaggaacaaatccttgaatctgaaacatatcaaacattttatattggacgagtgcgacaagatgttggagcagctagacatgcgaagggacgtgcaggagattttcaggatgacaccacatgagaagcaggtcatgatgttctcagccacattatcaaaagagatccggtag

SEQ ID NO: 114014 - DNA, 711 bp, synthetic construct
  misc_feature 1..711: note = Description of Artificial Sequence: Synthetic coding sequence
  source 1..711: mol_type = other DNA
atggctgaaaacgacgtggacaatgaactcctcgactatgaggacgacgaggtcgagacagcagccgggggagatggggcagaagcaccagccaagaaggacgtcaagggatcatatgtatcgatccactcctccggcttcagagacttcttgctgaagccggagttactgagagccatcgtggattgtggtttcgagcatccaagtgaggtgcagcacgagtgtattccacaagcgatcttgggcatggatgtactctgccaagccaagagcggtatgggcaagaccgccgtctttgtgctcgccactttgcagcaactggagccggtcacaggtcaggtgtccgtcctggtgatgtgtcacaccagggagctggcgttccaaattagcaaagagtacgagaggttcagtaaatatatgcccaatgtgaaagtagcggtattttttggtgggctctcaatcaaaaaagatgaagaggtgctgaagaagaattgcccccatattgtggtaggcacccccggtcggatactcgcactggcgcggaacaagtcgcttaacctcaagcatattaagcattttatcctggatgagtgtgataagatgttggaacagcttgacatgaggcgggacgttcaggagatctttcggatgaccccgcacgagaagcaggtgatgatgtttagcgctacgctctccaaggagatccggtag

SEQ ID NO: 114015 - DNA, 978 bp, synthetic construct
  misc_feature 1..978: note = Description of Artificial Sequence: Synthetic coding sequence
  source 1..978: mol_type = other DNA
taggctaccctgcagcagctggagccagtcacaggtcaggtgtcagtcctggtcatgtgtcatactcgcgagcttgcatttcagatctccaaggagtacgagcggttctctaaatatatgccaaacgtcaaggtggctgtctttttcggaggcctgtctataaagaaggatgaggaagtcctaaagaagaattgcccccatatagttgtgggcacaccaggacgtatattggccctggctcgaaacaaaagtttaaacttgaagcacattaaacacttcatcttagatgaatgcgataaaatgctggagcagctggatatgcgaagggacgtgcaggaaatcttcaggatgaccccacacgagaagcaagtgatgatgtttagcgctacactctcgaaagagatcaggccggtgtgcagaaagtttatgcaggatcccatggagatttttgtagatgatgagacaaaactgacgctacacgggctccagcagtactatgtgaagctgaaggacaacgagaaaaacagaaaattatttgacttgctcgatgtcctggaatttaaccaggttgtgatctttgttaaatctgtccagcggtgtattgcattggcgcaattgctggtggaacagaatttcccggcaatcgcaattcacagaggaatgccccaggaggagcggctgtcccgatatcagcagtttaaggacttccagcgccgcatactggtggcaacaaacttgttcgggcggggaatggacatcgaacgcgttaatattgcttttaattacgatatgcctgaggacagtgacacatacctacatagatgttaccccctctcacccagcaggtggccggagcaggccgggctggccccccgcgcttggctgtctcacctctgtccgatgcgaatgatgcctcgtagctccatgatgtgtcgcatcgctttacgatctatactggtttcatgtctgatgcggtag

SEQ ID NO: 114016 - DNA, 717 bp, synthetic construct
  misc_feature 1..717: note = Description of Artificial Sequence: Synthetic coding sequence
  source 1..717: mol_type = other DNA
atggcagagaatgacgttgacaacgagctcttagactatgaggatgacgaggtcgaaacagccgctggcggggacggcgccgaggccccagcaaaaaaggacgtgaagggcagttacgtgtcaatacattcgagcgggtttcgtgactttctcctgaaacccgagcttcttcgggccatcgtagattgcgggttcgaacaccctagtgaagttcaacacgaatgcattccacaggccattctgggcatggatgtcctgtgccaggccaagagcggaatggggaagacggccgtgtttgtactggctacactacagcagcttgagcccgtcactggccaggtgtcggtcctggtgatgtgtcacactcgagagctcgcgttccagatatctaaggagtatgagcgattttcaaagtacatgccaaatgtcaaggtggccgtattctttgggggactgagtataaagaaggatgaagaggttctgaaaaagaattgcccacacatcgtcgtaggcacaccgggccggattttggctcttgccagaaacaaaagtctgaacctgaaacatatcaaacattttattctggacgagtgcgacaaaatgctggagcagttggacatgagaagggacgttcaggagattttccggatgacgcctcatgaaaagcaagtcatgatgttttctgccacgctcagcaaagagatccggcccgtgtag

SEQ ID NO: 114017 - DNA, 717 bp, synthetic construct
  misc_feature 1..717: note = Description of Artificial Sequence: Synthetic coding sequence
  source 1..717: mol_type = other DNA
atggccgaaaacgatgtcgacaatgaactgttagattatgaagatgatgaagttgagactgctgcaggtggcgatggtgcagaggcacccgcaaagaaagacgtaaagggatcctacgtatccatccactccagtggatttcgagacttcctcctcaagccagaactgttacgcgcaatcgtcgattgcggtttcgagcacccttcggaggttcagcatgaatgcatcccacaggcaatactggggatggacgtgctgtgccaagctaaaagcgggatgggcaagacagctgtttttgtcctggcaactctgcaacagctcgaacccgtgacaggacaggtgagcgtcctggtcatgtgccatacccgagagttggccttccaaatcagtaaagaatacgaacggttttcaaagtacatgcctaacgtgaaggtggccgtgtttttcggtggattgtcaattaagaaggacgaggaggtcctgaaaaaaaactgtccacatattgtcgtaggtaccccaggacgtatactcgctctggctaggaacaaatctctgaacctaaaacacattaagcatttcattctagacgaatgtgacaaaatgctcgagcaactcgacatgcgacgcgatgtccaggaaatcttccggatgacaccccacgagaaacaggtgatgatgttctcagccacgttgtcaaaggagatcaggccagtgtag

SEQ ID NO: 114018 - DNA, 870 bp, synthetic construct
  misc_feature 1..870: note = Description of Artificial Sequence: Synthetic coding sequence
  source 1..870: mol_type = other DNA
atggccgagaatgatgtcgataacgagctcctagactatgaagatgatgaagtcgagaccgccgctggaggagatggcgctgaagctcctgctaagaaggatgtcaagggctcatacgtcagcatccatagcagtgggtttagggattttcttctgaagcctgagctcctgcgcgctatcgtggattgtggattcgagcatccgtccgaagtacaacacgaatgcattcctcaagctatactgggcatggatgtcctgtgtcaagcaaagagtggaatgggtaaaactgcggttttcgtgcttgctactcttcagcaattagagccagtgaccggacaggtgtccgtcctggtgatgtgccatacacgagagttggcctttcagatatctaaggagtatgagcggttttccaaatatatgcccaacgtcaaggtggctgtatttttcggcggcttgagcatcaagaaggacgaagaagtgctcaaaaaaaactgcccacatatcgttgtcggcacccctggccggattctggccttggcaagaaacaagagcttaaacctgaagcacatcaaacactttatacttgacgagtgcgacaagatgttggagcagttggacatgcgtcgggatgttcaggagattttccggatgacaccacatgaaaagcaagtcatgatgttctcagcgaccctctcaaaggaaatacggccagtctgccgcaagtttatgcaggacccaatggaaatattcgtggatgacgagacaaaactgacattgcacggtcttcagcagtactacgtgaagttgaaagacaatgagaaaaaccgaaagctgttcgacctgcttgacgtcctggaatttaatcagtag

SEQ ID NO: 114019 - DNA, 1278 bp, synthetic construct
  misc_feature 1..1278: note = Description of Artificial Sequence: Synthetic coding sequence
  source 1..1278: mol_type = other DNA
atggccgagaatgacgtagataacgagctcctggattatgaagacgacgaagtggaaaccgccgccggcggggacggcgccgaggcgccagctaagaaggacgtgaagggttcctacgtcagtatccattccagtggattccgcgactttctcttgaaacccgaactcctgagagcaatcgtcgactgcgggtttgagcatcctagtgaagtgcagcacgaatgcatcccccaagctattctcgggatggatgtgctttgtcaagcgaagtctggaatgggcaagactgcagtgtttgtgctggcgactctccagcagctggagcctgtgaccggccaggtttccgttctggtcatgtgtcacacacgggagctagcctttcagatcagtaaggagtatgaaaggtttagtaagtatatgcccaacgtaaaggtagccgtgttttttggcggcctgtccattaaaaaggatgaggaagtgcttaagaaaaattgcccacacatcgtggtgggtaccccggggcgtattcttgcattggccagaaacaaaagcctcaatttgaaacacattaagcactttatcctcgatgagtgtgataaaatgctagagcagctggacatgagacgagatgtgcaagaaattttcagaatgactccacacgagaaacaggttatgatgttctccgccactctgtccaaagagataagacccgtttgtagaaagttcatgcaggatcctatggaaattttcgtggacgacgagaccaagcttaccctccacggattgcagcagtactacgtgaagctgaaggataatgagaagaacagaaaactgtttgatctgctcgatgtgctagagttcaaccaggtagtcatctttgtcaagtcagttcagcgctgcattgccctggcgcagttgctggttgagcagaattttcctgctattgcaatacatcggggaatgccccaagaagaacgactttctcgctaccagcaattcaaggacttccagcgacggatccttgtggccaccaacctcttcggacgtggtatggacatcgagcgagtgaacatcgcgtttaattatgacatgcctgaggatagtgacacctatctgcataggtgttacccactgtctccatccaggtggccggaacaagcaggcctggcccctagggcctggctctctcacctgtgtccaatgaggatgatgccccggtcctcgatgatgtgcagaattgcattaaggagcatcctggtgtcatgcctcatgcgttag

SEQ ID NO: 114020 - DNA, 411 bp, synthetic construct
  misc_feature 1..411: note = Description of Artificial Sequence: Synthetic coding sequence
  source 1..411: mol_type = other DNA
atgggggggggcaggaggccgtacgatgtgttctttagcaaagtaatggcggaaaatgacgtggataacgaattgcttgattacgaggacgacgaggtcgagaccgccgccggcggcgatggggcggaagcacccgcaaaaaaagacgtgaaaggaagctatgtgagcatacactctagtggtttccgggactttttgctgaagcctgaactgcttcgggccatcgtcgactgtggattcgaacatcccagcgaggttcagcacgagtgtatcccccaagccatcctcggcatggacgtactgtgccaggcaaagtcaggaatgggtaagaccgcagtctttgtgctggcaaccctacagcaactggaacctgtgaccggacaagtcagcgtgcttgtcatgtgtcattag

SEQ ID NO: 114021 - DNA, 564 bp, synthetic construct
  misc_feature 1..564: note = Description of Artificial Sequence: Synthetic coding sequence
  source 1..564: mol_type = other DNA
atgggatcatctcatattggcggactgtcgattaatgagcgtcggtgctccgctagtctgggactggtgatggccgagaatgacgtggacaacgaattgctggactatgaggacgacgaagtggaaacagcagccgggggggatggcgcagaggcaccagctaagaaagacgtcaaaggcagttacgtgtccattcactcttccgggttcagagacttcttgctaaaaccggaattgctgcgagctattgttgattgcggcttcgaacacccatccgaagtacagcatgaatgcatcccacaggcaatcctgggaatggatgttctttgtcaagctaaatcaggcatgggcaagaccgcagtgttcgtgctggccacacttcagcagctcgagcctgtcacaggacaggtgagtgtgctggtgatgtgtcacacaagagaattagccttccagatcagcaaggagtatgagagattctcaaagtacatgcccaacgtgaaagtcgcagtctttttcgggggactatcaataaaaaaggacgaggaggtgttaaaaaaaaactag

SEQ ID NO: 114022 - DNA, 399 bp, synthetic construct
  misc_feature 1..399: note = Description of Artificial Sequence: Synthetic coding sequence
  source 1..399: mol_type = other DNA
atggcggagaatgacgttgataatgagcttctggattacgaagacgacgaagtggaaacagctgctggcggcgacggagcagaggctcctgccaagaaagatgtcaagggctcatacgtctctattcactcctcaggatttcgcgatttcctactgaaacccgaactcttgagagccatcgttgattgcggattcgaacatccatctgaggtgcagcacgaatgtattccacaggcgatattggggatggatgtgctctgtcaagccaaaagcgggatgggaaagacagctgtgtttgtccttgccacactgcaacaacttgagccagtcaccggccaggtatgtttttgtgatagccactttcctcgcggggataatgaggagctacaccttccttag

SEQ ID NO: 114023 - DNA, 870 bp, synthetic construct
  misc_feature 1..870: note = Description of Artificial Sequence: Synthetic coding sequence
  source 1..870: mol_type = other DNA
atggccgagaacgacgtggacaatgagctgttagattatgaagatgatgaggtagagacggctgccgggggcgatggggcagaggcgcccgcaaagaaggacgtgaaaggcagttatgtgagcatccactcttcggggtttagggattttcttctgaagccggagctgctgcgtgctatcgtcgattgtggctttgagcatccctctgaagtgcaacacgaatgtatcccacaagcaatactggggatggatgtgctctgtcaagctaaatcagggatggggaagactgccgtgtttgtcctcgccactctgcagcagttagagcctgtcacaggccaagtgtcagtccttgttatgtgtcatacaagagaactggcatttcagatcagcaaggaatatgagaggttctccaagtatatgcccaacgtgaaggtggccgttttcttcggcggcctcagcataaaaaaagatgaagaagtcttgaagaagaactgtccacacatcgttgtgggaacaccagggcgcatcctggcgctggctcggaataagtctctgaatctgaaacacatcaaacattttatcctggatgaatgtgacaaaatgctcgagcagctggacatgagaagagacgttcaggaaatattcaggatgactccgcatgagaagcaggtgatgatgttttccgccaccctgtctaaagagatccggccagtctgtcgcaagtttatgcaggatcccatggagatctttgttgacgacgagaccaagcttactctccacggtctccagcagtactatgttaaactgaaggacaatgaaaaaaacagaaaactgttcgatctattagatgtgcttgaattcaaccagtag

SEQ ID NO: 114024 - DNA, 1287 bp, synthetic construct
  misc_feature 1..1287: note = Description of Artificial Sequence: Synthetic coding sequence
  source 1..1287: mol_type = other DNA
atggcagagaacgacgtcgataacgagctgctcgactacgaggatgacgaggtcgaaactgcagctgggggcgatggtgctgaggccccagccaagaaggatgtgaaagggagctatgtatcaattcattctagcggtttcagagacttccttctgaaacccgagcttctccgggcaattgtggactgtggatttgagcacccctccgaagttcagcacgagtgtataccacaggccatattaggtatggatgtcctttgtcaggctaaatccgggatgggaaagacagctgtgttcgtgctggccacgctgcagcagctcgagcccgtgacaggacaggtcagtgttcttgtaatgtgtcacactcgggaactagcgtttcagattagtaaagaatatgagcgcttctcaaagtacatgcctaacgtcaaagttgcagtgtttttcggcggactctcaattaaaaaagacgaagaggtgttgaagaagaattgtccacatatagtcgtgggtactccagggagaattctggcccttgctcggaataagtccctcaatcttaaacatatcaaacatttcatcttggacgagtgtgacaagatgctcgagcagcttgatatgcggcgagacgtacaggagatcttcaggatgacgccacacgagaaacaggtaatgatgttctccgctactttaagtaaggagatacgacctgtttgcagaaagtttatgcaggatcctatggagatttttgtcgacgatgaaaccaaacttacactgcacggactacagcaatactacgtaaaattgaaagataatgaaaagaaccggaaacttttcgacttgctcgatgttctggagttcaaccaggtggttattttcgtgaaatcggtgcagcgctgcatcgccctggcccagctgttggtggagcagaattttccggccattgccatacaccgtgggatgccccaagaggaacggttaagccggtaccagcagttcaaggattttcagaggcggattctggtagccaccaacctgtttggtcgcggaatggacatcgagcgggtaaatatcgcctttaactatgatatgccagaggactccgacacctacttacatagagtggcccgagctggcagatttggcaccaaagggctcgctattaccttcgtaagtgatgaaaacgacgctaaaatcctcaacgacgttcaggatcggtttgaggtcaatatcagcgaactgccagacgaaattgacatatctagttacattgaacagacaaggtag

SEQ ID NO: 114025 - DNA, 564 bp, synthetic construct
  misc_feature 1..564: note = Description of Artificial Sequence: Synthetic coding sequence
  source 1..564: mol_type = other DNA
atgggcagctcccacataggcggcctaagtatcaacgagcgtaggtgtagcgcctcgctgggtctggtgatggcggaaaacgacgtggacaacgaattgctggactacgaggacgatgaggttgagactgctgccggcggggacggggcagaggcacctgcaaagaaagacgttaagggctcttacgtctcaatccactcatccggtttcagagacttcttgttaaagcccgagctcttaagagccatagtggattgcggctttgagcaccccagcgaagtgcaacatgaatgcatccctcaagccattctagggatggatgtcttatgccaagccaagtcgggaatgggtaaaacagccgtctttgttctggcaaccctccagcagctggaacccgttaccggacaggtatccgtgttggtcatgtgtcacactagggagctggccttccaaatctcaaaggagtatgaacggtttagcaagtatatgccaaatgtgaaggttgccgtattttttggcggactgtcgattaagaaagatgaagaggtgcttaaaaagaactag

SEQ ID NO: 114026 - DNA, 291 bp, synthetic construct
  misc_feature 1..291: note = Description of Artificial Sequence: Synthetic coding sequence
  source 1..291: mol_type = other DNA
atggctgaaaatgacgtcgataatgaactgttggattacgaagacgacgaagtggaaacagcagccgggggcgacggtgcagaggcacctgcaaagaaagacgttaaaggatcttatgtcagtattcacagcagcgggtttcgcgatttcctgctcaaaccagaactactacgcgccatcgtcgactgcggcttcgagcacccttcagaagtacagcatgagtgtattccgcaagcaatcctggggatggacgtgctgtgccaggcaaagagcggcatgggcaagacatag

SEQ ID NO: 114027 - DNA, 564 bp, synthetic construct
  misc_feature 1..564: note = Description of Artificial Sequence: Synthetic coding sequence
  source 1..564: mol_type = other DNA
atgggctcatcccatatcgggggcctgtcaataaatgagaggcgctgttctgcctccttggggcttgtcatggccgagaatgatgtggacaatgagttgcttgattacgaagacgatgaggtggaaacggcagctggtggtgacggcgcggaggcgcctgccaagaaggatgtaaaaggctcttacgtctccatacattcaagcggattccgggacttcctcttgaagcccgaactactccgggccatcgtcgactgtggctttgaacatccaagcgaagtgcagcacgagtgcatccctcaggccatcctcggaatggacgtcctgtgccaggcgaagagtggcatggggaaaaccgccgtgtttgtgctagcaaccttgcaacaacttgaaccagtaacaggccaggtgtcagtgctggtgatgtgccatacacgtgagttggcatttcaaattagtaaagagtacgagcggttcagtaaatacatgcccaacgtcaaggttgcagtcttttttggcgggctgagcattaagaaagacgaggaggtactaaagaaaaattag

SEQ ID NO: 114028 - DNA, 594 bp, synthetic construct
  misc_feature 1..594: note = Description of Artificial Sequence: Synthetic coding sequence
  source 1..594: mol_type = other DNA
atggccgagaatgacgtggataatgagctgctagactatgaggacgacgaggttgagactgccgccggaggtgacggcgctgaggcgcctgccaaaaaggacgtgaaagggtcatatgtgtccattcactcctctgggtttagagacttcctgttgaagccagagctgctccgcgcaatagttgattgtggctttgagcatccttcggaagtccaacacgagtgcatcccacaagccatcttagggatggatgtgctgtgtcaagctaaatccggtatgggtaagaccgccgtttttgtccttgccaccctgcagcagctggagccagtcactggccaggtgtgtttctgtgattcccatttccctagaggggacaacgaggagctgcatttgccgtacgtatcggtttatttcctccctaaagtgagcgttctcgtcatgtgtcatacacgcgaattagcatttcagatcagtaaggagtatgagcgcttctccaaatatatgcccaatgttaaggtagcagttttcttcggcgggctcagcatcaaaaaagatgaagaggtcctgaaaaaaaactgtcctcatatcgtgtag

SEQ ID NO: 114029 - DNA, 291 bp, synthetic construct
  misc_feature 1..291: note = Description of Artificial Sequence: Synthetic coding sequence
  source 1..291: mol_type = other DNA
atggctgaaaatgacgtcgacaacgaactgctggattatgaagacgatgaggtcgagaccgcagctggcggcgatggggcagaggcccctgcaaaaaaggacgttaagggcagctatgtcagcatccactcgagcggcttcagggacttcctgctgaagccggaactgctgagggctatcgtcgactgcggtttcgaacatccgagtgaggttcagcatgagtgcatccctcaggctattctcgggatggacgtactgtgtcaagccaaatctggtatggggaaaacctag

SEQ ID NO: 114030 - DNA, 696 bp, synthetic construct
  misc_feature 1..696: note = Description of Artificial Sequence: Synthetic coding sequence
  source 1..696: mol_type = other DNA
atggctgagaatgatgtggataatgagctccttgactatgaggacgacgaagtggagaccgcggcaggcggggacggggctgaggcccccgctaaaaaagacgtcaaaggatcttacgtaagtattcatagttcaggcttccgcgattttctgctaaagcctgaactactgagggctatcgtggactgcgggtttgagcatcccagcgaagtgcaacatgagtgcataccccaggcgattctgggcatggacgtcctgtgtcaagccaaatccggcatgggcaagaccgctgtgttcgtgctcgccaccctccaacagttagagcctgtaactggtcaagtgagcgtcctggtcatgtgccatacacgggagctcgcatttcagatctctaaggagtacgaacgatttagcaagtatatgcctaacgtgaaagtcgccgtttttttcggaggtctgtccattaagaaggacgaggaagtgctcaagaaaaattgcccgcacatcgtagtggggacgccgggacgcatcctggcactcgctcgtaacaaatcactgaacttaaaacatattaagcactttatactggatgaatgtgacaagatgctggaacagctggacatgaggagagacgtgcaggaaattttcagaatgacaccccacgagaaacaggttatgatgttctcagcaacactatag

SEQ ID NO: 114031 - DNA, 696 bp, synthetic construct
  misc_feature 1..696: note = Description of Artificial Sequence: Synthetic coding sequence
  source 1..696: mol_type = other DNA
atggcagaaaacgacgtggacaacgagctcctggactatgaagatgacgaagtcgaaactgccgccggtggggatggcgcagaggcacctgctaagaaggacgtaaagggtagctacgtgtctatccattcatccggctttcgggacttcctactgaagccagaattactgcgggcgattgttgattgtggcttcgaacatccaagtgaagtgcaacacgaatgcatcccacaagccattcttgggatggatgtgctgtgtcaagctaaaagcggaatgggtaagactgcagtcttcgttctggctacactgcaacagctagaacccgtgacagggcaggttagcgtgctcgttatgtgccacacgagggagttggcatttcagattagcaaagagtacgagaggttcagcaaatacatgcctaatgtgaaggttgcagttttcttcggagggctgagtattaaaaaggacgaggaggtactgaagaagaactgcccccacatcgtggtgggcactcctggccggattctcgctcttgcaaggaataaatcactcaatctgaagcacatcaagcacttcatccttgacgaatgtgacaagatgctcgaacagcttgacatgcgcagagatgttcaggagatctttcgcatgaccccccacgaaaaacaggtaatgatgtttagcgcaacactctag

SEQ ID NO: 114032 - DNA, 717 bp, synthetic construct
  misc_feature 1..717: note = Description of Artificial Sequence: Synthetic coding sequence
  source 1..717: mol_type = other DNA
atggctgagaatgacgttgacaatgagttgttggactacgaggacgacgaggtagaaaccgcagctggcggggatggagccgaagccccggctaaaaaagacgttaaaggttcttacgtgtccatccattcatcgggttttcgagacttcctgctgaaaccggagctattgcgtgcgattgtcgattgcggattcgaacacccgtccgaagttcagcacgaatgtatccctcaggcgatactgggtatggacgtgttgtgtcaggctaagtctgggatgggcaagaccgccgtattcgtgcttgccaccttacagcagctggaaccggtaaccggacaagtgtcagtgctggtcatgtgccacacacgggaattggccttccaaatttccaaggagtatgaaaggttttcaaaatacatgcctaacgtgaaagttgccgtcttttttggcgggctgtctattaaaaaagatgaggaagtgctgaagaagaactgcccgcatattgtggtgggtactccaggacgaatcctggccctggccaggaataaaagcctgaatttgaagcacatcaagcacttcatactggatgagtgtgacaagatgttagaacagctggatatgcggagagacgtacaggagatattcagaatgactcctcacgagaagcaggtgatgatgttttctgccaccctgtcaaaggagatcaggcctgtgtag

SEQ ID NO: 114033 - DNA, 1287 bp, synthetic construct
  misc_feature 1..1287: note = Description of Artificial Sequence: Synthetic coding sequence
  source 1..1287: mol_type = other DNA
atggccgaaaacgatgtcgataacgaactcctggactacgaagatgacgaggtggagactgccgcgggcggggacggagccgaggctccggccaaaaaagacgtgaaggggtcttacgtttcaatccatagcagtggttttagggactttctgcttaagcccgagttgctaagagccatcgtggactgcggtttcgaacacccatctgaagtccaacacgaatgcatcccgcaggcgatcctgggaatggacgtcttatgtcaggctaaaagcggcatggggaagaccgctgtgttcgtgctcgcgactctgcagcaactggaacccgtaaccgggcaggtgtccgtgctggtcatgtgtcacactagggaattggcctttcagatttccaaagagtacgagaggttcagcaaatacatgccgaacgttaaagtggcagtttttttcggcgggttaagtatcaagaaggatgaagaggtgctaaagaagaactgtcctcatatcgtcgtcggaactcccggccggattctcgctctggcgaggaataagagcctgaacttgaagcatatcaaacacttcatcctggacgagtgcgataagatgctggaacaactagacatgaggagggatgtacaggagatcttcagaatgactcctcatgagaaacaggtcatgatgttcagtgccacgcttagtaaggagattcgcccagtctgcagaaagttcatgcaagatcccatggagatatttgtggatgatgagacgaagcttacactgcacggactacagcagtattatgtgaagctaaaggacaacgagaagaacagaaagctgttcgacctgttggatgtgctcgaattcaaccaggtcgtgatcttcgtcaagtcagtgcaacgctgtatcgccctggctcagcttctggtggaacagaacttcccagctattgcaatccaccgtggcatgccacaagaagagcgccttagtcgctaccagcagtttaaagacttccagagaagaatcctagtagcgaccaatctgttcggtcggggaatggacattgagcgagttaatatcgcgtttaactatgatatgcccgaggacagcgacacttatctgcaccgggtcgcccgagccgggcgatttggaaccaagggtctggcaatcactttcgtaagtgacgaaaacgatgccaagattttgaatgacgtgcaagatcggtttgaagtaaatattagcgaactgcccgacgagatagacattagcagctatatagagcaaacacgctag

SEQ ID NO: 114034 - DNA, 564 bp, synthetic construct
  misc_feature 1..564: note = Description of Artificial Sequence: Synthetic coding sequence
  source 1..564: mol_type = other DNA
tgaagtgaagaacgggacattgggaagcccatggagatcttcgtcgacgacgagacaaaactgacgttacacgggctgcagcagtattatgtcaaattaaaagacaacgaaaaaaataggaagcttttcgaccttctggatgttctcgagttcaaccaagtcgtgattttcgtgaagagcgtacagagatgcatagctctagcccagctcctggtcgagcagaattttcccgcgatcgccatccaccgggggatgccccaggaggagcggctgagccggtaccagcagtttaaagacttccagcgcagaatcctggtagctacgaacctgtttggaagaggaatggacattgagagggttaatatcgctttcaactacgacatgccggaagattcagacacttacctgcatagagtcgcacgcgccggacggtttggcactaagggattagccattacctttgtgtcagatgagaatgatgccaagatcctgaatgatgtgcaagatcggttcgaggtcaatatttccgagttgccggatgaaattgacatttcttcgtattag

SEQ ID NO: 114035 - DNA, 564 bp, synthetic construct
  misc_feature 1..564: note = Description of Artificial Sequence: Synthetic coding sequence
  source 1..564: mol_type = other DNA
atgggcagtagccacatcggaggcctatcgatcaacgagcgccgatgttctgcctcgcttggtctcgtcatggctgaaaatgacgtcgacaatgaactcctagactacgaggacgacgaggtggagaccgccgccgggggtgacggcgcagaggccccggccaagaaggatgtgaaaggctcctacgtctcaattcattcttcgggctttcgggacttcctgttgaagccagagctgctgcgcgctatcgtggattgcgggtttgagcacccttccgaggttcagcacgaatgcattcctcaggcgattctgggtatggacgtgctttgccaagcaaaatccgggatgggtaaaaccgccgtgttcgtgctggcaacactgcaacagctcgagcctgttaccggacaagtgagcgtattagttatgtgccacacacgggaattagcattccagattagcaaggagtatgagcgttttagcaaatacatgcctaacgtaaaagtggccgtgtttttcggaggcctgagtattaagaaggacgaagaggttctgaaaaagaactag

SEQ ID NO: 114036 - DNA, 717 bp, synthetic construct
  misc_feature 1..717: note = Description of Artificial Sequence: Synthetic coding sequence
  source 1..717: mol_type = other DNA
atggcagaaaacgacgttgataatgagctgcttgattatgaagatgacgaagtggaaacagctgccggcggcgatggcgccgaggcaccggccaaaaaggacgtgaaggggtcatacgtgtcaatacattcaagcgggtttcgcgatttcctgctgaaacccgaattgttacgcgcgattgttgactgtggattcgagcatccctccgaggttcaacatgagtgcattcctcaagctatcctgggtatggatgtcctgtgccaggctaagtccggcatgggcaaaacagccgtttttgtgttggcaaccctccagcagctcgagcctgtcacaggtcaggtctccgttctggtgatgtgccataccagggagctggcttttcagatctccaaggagtatgaacgattttccaaatacatgcccaacgtaaaagtcgcagtattcttcggtggacttagcatcaaaaaagatgaagaagtcttaaaaaagaattgtccacacattgttgtggggacccctggcagaatcctggctctagctaggaataagagcctgaatctcaaacatattaagcacttcatcttggacgagtgtgataagatgctggaacagttggatatgcggcgcgacgtgcaggagatcttcaggatgacaccacacgagaagcaagtcatgatgttctctgcaactttgtcgaaggaaatccgccccgtgtag

SEQ ID NO: 114037 - DNA, 738 bp, synthetic construct
  misc_feature 1..738: note = Description of Artificial Sequence: Synthetic coding sequence
  source 1..738: mol_type = other DNA
atgtggaccatgagctcctggaccatgaaaatgatgcgctggcggcagcaactaggtgagatgggcctcaggcccttaccgagacgtatgtctagggcacccatgagcccctctacagcacttgcatttgtcacatcctgcagcagccagtcatgttcagggcccctgagcacagttgctctgagtatcaggcagaaggtcgcagttttctttggggggttaagcataaagaaagacgaggaagttctcaagaagaactgtccccacattgtcgttggaacccctgggagaattctcgccctggcgagaaacaagagcctgaatctgaagcacatcaaacacttcattctagacgaatgtgacaaaatgttggaacagttagacatgaggcgcgatgttcaggagatcttccgcatgacgccacatgagaagcaggtgatgatgttctccgcaacattgagcaaagagattagaccagtgtgccgcaaatttatgcaggacccaatggagatttttgtggacgacgaaacaaagcttaccctgcacggcctgcagcagtattacgtgaagctgaaagataacgagaaaaataggaaactcttcgacctcttggacgtgctggagttcaaccaggtggttatcttcgttaagtccgtgcagaggtgtattgccttagcccagctcctggttgagcagaattttcctgcaatcgctatacaccgcggcatgccccagtag

SEQ ID NO: 114038 - DNA, 1278 bp, synthetic construct
  misc_feature 1..1278: note = Description of Artificial Sequence: Synthetic coding sequence
  source 1..1278: mol_type = other DNA
atggccgaaaacgatgttgataacgagctgttggactatgaggacgatgaggtcgaaacggccgctggaggtgatggcgcggaggcccctgcaaagaaagacgtaaaaggtagttatgtatccatacactctagcgggtttagagactttctgcttaaaccagagctcctaagagctattgtggactgtgggtttgaacaccccagcgaggtgcagcacgaatgtattccccaggcaatcttgggcatggacgtgctctgtcaggctaagagtggaatgggtaagactgccgtcttcgtcctcgctaccctacagcagttggagcctgtcactggtcaggtatccgtcctagtgatgtgccacacccgagaattagcatttcagatatcaaaagaatatgagcggtttagcaagtacatgcctaatgtgaaagtcgccgtgttcttcggcggactgagcatcaagaaggatgaggaagttctgaagaaaaattgcccccatatcgtggtgggtacacctgggagaatactagcgcttgcgaggaataagtctctcaacctgaaacatataaaacattttatcctagacgaatgtgacaaaatgcttgaacagctggacatgagaagagacgtccaggagatttttcgcatgactccgcatgagaagcaggtgatgatgttttcggcaaccttaagcaaggagatcaggccagtctgtcggaagttcatgcaggaccctatggaaatctttgttgatgatgagaccaaactgaccttacatggcctacaacagtattatgttaaactgaaggacaatgagaagaaccggaaactgttcgacctgctcgatgtgcttgaatttaaccaggtggtgatcttcgtcaagtctgtgcagaggtgcattgccttggcccagctccttgtggaacagaactttcccgccatagctatccaccggggtatgcctcaggaagagcgcctgtcccggtatcaacagttcaaagactttcagcgccgtattctagtagcaaccaatctgttcggcagggggatggacattgagcgggtgaacatagccttcaactatgatatgccggaggatagcgatacttacctccatagatgttatccccttagtccttcaagatggcccgagcaggccggtctggctccccgggcctggctcagtcatctgtgtcctatgagaatgatgccccgcagcagcatgatgtgcagaatcgctcttcggagtatcttagtgagctgcctcatgcgttag

SEQ ID NO: 114039 - DNA, 711 bp, synthetic construct
  misc_feature 1..711: note = Description of Artificial Sequence: Synthetic coding sequence
  source 1..711: mol_type = other DNA
atggcggaaaatgacgtagataacgaactgctggactatgaagacgacgaagtcgagacagccgccggcggagacggagccgaagctccggccaagaaggacgtgaagggctcttatgtgagcattcattccagcggtttcagggatttcctgctcaagccagagctgctgagagccatagttgactgtgggttcgagcatcccagcgaggtgcagcatgagtgcatcccacaggctatcctggggatggatgttctctgtcaggctaaatctggaatgggaaaaacagctgtatttgttctggcgaccctgcaacagctggagccggttacggggcaggtgagcgttttggttatgtgccacacccgcgagctggcctttcagatcagtaaagaatatgagcggttttcaaaatatatgccaaatgtgaaggttgccgtcttctttgggggcctgagcataaagaaggacgaggaggtgttaaaaaaaaattgtcctcatatcgtggtgggaaccccaggccgcatactggcacttgcacgcaacaagagcttgaatttaaaacatattaagcattttatactggatgagtgcgataagatgctggaacagcttgatatgcgcagggatgtccaagagatattccgaatgaccccacacgaaaagcaggtgatgatgtttagtgccacattgtctaaagagatccggtag

SEQ ID NO: 114040 - DNA, 738 bp, synthetic construct
  misc_feature 1..738: note = Description of Artificial Sequence: Synthetic coding sequence
  source 1..738: mol_type = other DNA
atgtggactatgtcttcctggacaatgaagatgatgagatggcgacagcagcttggagaaatgggactgcggcctctgccaagacgcatgagccgcgccccaatgagtccttcaacagctctggccttcgtgacctcatgctcctcacagagctgcagcggtcccctgagcacggtcgctctttccattaggcagaaggtggccgtctttttcggagggctgagcatcaagaaggatgaagaggtgttgaagaagaattgtccccacattgtggtgggcacaccaggtagaatccttgccctcgcaaggaacaagtccctgaatttaaagcatatcaaacatttcatcctcgatgagtgcgataagatgttagagcagctggacatgagacgcgatgtgcaggagatattcaggatgaccccgcacgagaaacaggttatgatgttcagtgcaaccctctcaaaagagattagacctgtatgtcgtaaattcatgcaagatccaatggaaattttcgtggatgatgaaacgaagctgacactccatggcctgcaacaatactatgtgaaactaaaggacaacgagaaaaacaggaaactgttcgacctattagatgtgctggagtttaaccaggtggtgatcttcgtcaagtcagtgcagagatgtattgctcttgcccagctactcgtagaacagaactttcccgccattgctatccatcgtggcatgcctcagtag

SEQ ID NO: 114041 - DNA, 1287 bp, synthetic construct
  misc_feature 1..1287: note = Description of Artificial Sequence: Synthetic coding sequence
  source 1..1287: mol_type = other DNA
atggccgaaaatgacgtagacaacgaactcttggattacgaggatgatgaggtggaaactgccgccggtggtgacggagcagaagccccagccaaaaaagatgttaaaggaagctatgtgagcatacattcttccggttttagggatttcttattgaagccagagctgctccgggctattgtagactgcggcttcgagcacccttcggaggtgcagcatgaatgtatccctcaggccatactcggaatggatgtcctgtgccaggccaagagcggtatgggcaagactgctgtcttcgtgcttgccactctgcagcagctggagcccgtgaccggccaagtgagcgtgctcgtgatgtgtcatacgagggaactggccttccagatctccaaagagtacgagcgctttagcaaatatatgcccaatgttaaggtcgctgtgttctttggcggcctgtcaatcaagaaggacgaagaagtgcttaaaaaaaattgcccccacattgtggtgggaacccctggtcgcatcctcgcgctggctcggaataagagtctgaacttaaaacatattaagcattttatcttggacgagtgcgataaaatgctcgaacagctggacatgcgtcgagacgtgcaagaaatctttaggatgactccccacgagaaacaggtgatgatgttcagcgcgacacttagtaaggaaattcggcccgtatgcagaaaattcatgcaagacccaatggaaatttttgtggacgacgagacaaaactcaccttgcacggactccagcagtactacgtgaaactgaaagataatgagaaaaatcgaaagctgttcgatctgttagatgttctggaatttaaccaggtcgtcatcttcgtcaagagtgtacagaggtgcattgcgctggcacagcttctggtcgagcagaactttcccgccattgccattcatagggggatgccacaggaagaacggcttagccgctatcagcagtttaaggactttcagagacgaattcttgtcgccacaaatctgtttggacgcggtatggacattgaacgcgtgaacatcgcttttaactacgatatgccagaagattccgacacttatttacaccgggttgcccgggccgggcgattcggaacaaaaggcttggcaattacattcgtgagcgacgaaaacgacgccaagattttgaacgacgttcaggacaggtttgaagtgaatatttcagaacttccagacgaaattgacattagcagctacatcgaacagactaggtag

SEQ ID NO: 114042 - DNA, 411 bp, synthetic construct
  misc_feature 1..411: note = Description of Artificial Sequence: Synthetic coding sequence
  source 1..411: mol_type = other DNA
atggggggaggccggaggccttacgacgtttttttcagcaaagtcatggccgaaaacgacgtcgataacgagttactcgactacgaagacgacgaggtggagacggcagccggaggtgacggcgctgaggctcctgccaaaaaggatgtcaaaggttcctatgtgagcattcatagctccgggtttcgggatttcctgctgaagcccgaactcttacgcgccatcgtggactgcgggttcgagcatccatccgaagttcagcacgagtgtataccccaggctatcctcggaatggatgtgctctgtcaggccaaatccgggatggggaagacggccgtctttgtgcttgccactctgcagcagctggagccggttacaggacaggtgtccgtgctggtgatgtgccactag

SEQ ID NO: 114043 - DNA, 987 bp, synthetic construct
  misc_feature 1..987: note = Description of Artificial Sequence: Synthetic coding sequence
  source 1..987: mol_type = other DNA
tgagccacgttgcagcagctcgagccagtgaccggtcaggtgtcagtacttgtgatgtgtcatacacgcgaactcgcctttcagatatccaaagaatatgaacgtttcagtaagtatatgcccaacgtgaaagtcgccgtgtttttcggcggattaagcatcaagaaggatgaggaagtgctcaagaagaactgtccacacatagtagttggcactccaggccggattctcgccctggcaagaaacaaatctttaaacctgaagcatatcaaacactttatcctagatgagtgcgacaagatgctggaacagctggatatgaggagagatgttcaggagatattcagaatgaccccccacgaaaagcaagtgatgatgttttccgctaccctgtctaaagagatccgcccagtgtgtaggaagtttatgcaggatccaatggagattttcgttgacgacgaaacaaagctaacactccacggcctgcagcagtattatgtcaaactgaaagacaatgaaaaaaatcgtaagctcttcgacctgctggacgttcttgagtttaaccaagtggtgatatttgtcaagtcagtgcaacggtgcatcgctttggcccaactcctcgtcgaacagaacttcccagcaattgcaatccacagaggaatgccacaggaagagcgtctatctagatatcagcagttcaaggattttcagcgaaggatcctggtggcaactaacctttttggcaggggaatggacattgaacgagttaatatcgccttcaattatgatatgccagaggatagtgacacctacttacaccgcgtggctagagcagggcgcttcggtaccaaaggtctggccatcacttttgttagtgatgaaaacgacgccaaaattttgaatgatgtccaggacagattcgaggtgaatatcagcgaactgcctgacgaaattgatattagttcatatattgagcagacccggtag

SEQ ID NO: 114044 - DNA, 399 bp, synthetic construct
  misc_feature 1..399: note = Description of Artificial Sequence: Synthetic coding sequence
  source 1..399: mol_type = other DNA
atggctgagaacgacgtggataacgaactgcttgactacgaagatgacgaggtcgagacagcagcaggcggagacggcgccgaagcccctgccaagaaggacgttaagggctcctatgtgtccatacatagctctggcttcagagatttcttattaaaacccgaacttctcagggcaattgtcgactgcggctttgaacatcctagcgaggtacagcatgagtgcatcccccaggccatacttgggatggatgtgctctgtcaagcaaagtccggtatgggcaagacggccgtcttcgtgttggcaaccctgcagcagttggagcccgtgactggccaggtgtgtttttgcgacagtcactttccgcgaggtgacaacgaagagctgcacctcccttag

SEQ ID NO: 114045 - DNA, 420 bp, synthetic construct
  misc_feature 1..420: note = Description of Artificial Sequence: Synthetic coding sequence
  source 1..420: mol_type = other DNA
atggcagaaaacgacgtcgataacgagctgctcgactacgaggacgacgaagtcgagaccgctgctggaggtgatggtgccgaggcacctgccaaaaaggatgtaaaaggctcgtatgtgagcattcatagctcaggcttcagagacttcttactgaagcctgaactgctaagggcgattgtggactgtggattcgagcacccctccgaggtgcaacacgaatgtatccctcaagccatcttaggaatggacgtcctgtgtcaggctaagagtggaatgggtaagacagcggtgttcgtgctcgccaccctgcaacagttggagcccgtaacaggtcagtcacatgagcacatgaccagtgtgacactcgataacctcaccgctgtgggagacgtgctgagccaagcctggggctcttag

SEQ ID NO: 114046 - DNA, 717 bp, synthetic construct
  misc_feature 1..717: note = Description of Artificial Sequence: Synthetic coding sequence
  source 1..717: mol_type = other DNA
atggctgagaacgacgtggataacgagctcctagattacgaggatgatgaggtggagacagccgccggcggggacggggccgaggcacccgccaagaaagacgtgaaaggatcctacgtatcgatacattcctctgggtttcgcgacttcctcctgaagccagagctcctcagagccattgtggattgcggctttgagcatccgtccgaggtccagcatgagtgcattccccaagccatcttgggcatggacgtactttgccaggccaagtctggtatgggaaaaacagcagtgtttgtccttgccacactgcagcagttagagcccgtgaccggtcaggttagcgtgctcgttatgtgccacactagggagctggcatttcagatttccaaggagtatgagcgattcagcaagtacatgcccaatgtgaaggtcgctgtgttcttcggaggactgagtattaaaaaggatgaggaggtgttgaagaaaaactgcccacacattgttgtgggcacccctggaagaatcctcgctctggcccggaacaagtctttaaatttgaaacacattaaacatttcatccttgacgaatgcgataagatgctggaacagctggacatgcgcagggacgtccaagagattttccggatgactcctcacgagaaacaggtcatgatgttctccgcaaccctgagtaaggaaatcagacctgtgtag

SEQ ID NO: 114047 - DNA, 564 bp, synthetic construct
  misc_feature 1..564: note = Description of Artificial Sequence: Synthetic coding sequence
  source 1..564: mol_type = other DNA
atgggatcctcgcacattggaggattaagcatcaacgagaggcgacgctccgccagcttaggcctagtgatggctgaaaatgatgtcgataacgaactgctggactatgaggacgacgaggtcgaaaccgcggctggcggggatggggcagaggctccagccaaaaaagatgttaaaggcagttatgtgtcaatccattcaagcgggttccgggactttttgctcaagccagagctgttacgggcaattgtggattgcgggtttgaacacccaagcgaagttcaacatgagtgcatcccacaagccatattgggaatggacgtgctgtgccaggcaaagtccggtatgggcaaaactgccgttttcgtgctagccactctgcagcagttggaaccggtgactggccaggtgagtgtcttggtgatgtgccacacacgggagctcgccttccaaattagcaaggagtatgaacgatttagtaaatatatgcctaacgtgaaggttgccgtcttttttggcgggctctcaattaagaaagacgaagaggtgctcaagaaaaactag

SEQ ID NO: 114048 - DNA, 711 bp, synthetic construct
  misc_feature 1..711: note = Description of Artificial Sequence: Synthetic coding sequence
  source 1..711: mol_type = other DNA
atggcagagaacgatgtggataacgagctgctggactacgaggacgatgaagttgagacagccgcaggcggggacggagccgaagccccagctaaaaaggatgttaaagggtcctacgtttctatccatagttctggattcagggatttcctgctcaaacccgagctcctacgtgccatcgtcgactgtgggtttgagcacccctctgaagtgcagcacgagtgcatcccccaagcgatcctcggaatggatgtcttatgtcaggctaagtcaggaatggggaaaacggccgtgtttgtcctggcaactctccagcagttagagcctgtcacaggacaagttagcgtcttggtcatgtgccatacaagggagctcgcatttcagatctcaaaagagtatgaacggttctctaagtacatgcccaacgtgaaagtcgctgtcttcttcggcggattgtccataaaaaaagacgaagaggtcttaaagaagaactgtcctcacattgttgtgggaacccccgggaggatactggcactggcgcgaaataagtccttgaacctcaagcatattaaacactttatcctagacgaatgtgataagatgcttgaacaacttgacatgcgcagggacgtacaggaaatcttccgaatgacgccccacgagaaacaggtcatgatgttctctgccacgctttcgaaggagattcgttag

SEQ ID NO: 114049 - DNA, 1278 bp, synthetic construct
  misc_feature 1..1278: note = Description of Artificial Sequence: Synthetic coding sequence
  source 1..1278: mol_type = other DNA
atggccgagaacgacgtggataacgaactgctggactacgaggacgacgaggtcgaaaccgctgccggcggggacggagcagaagcacccgctaagaaagacgtgaaaggaagctatgtgagcatacacagctccggctttcgcgattttctgttgaaacccgaactgttacgggcaattgtggattgtggcttcgagcacccctcggaagttcagcacgagtgtatccctcaggccatcttgggaatggacgtcctgtgccaagctaagtcgggcatgggaaagactgccgtatttgtattggccaccttacagcagctagaacccgtgaccggacaagtctcggttctggtgatgtgccatacaagagagcttgcatttcagattagcaaagaatatgagaggttcagcaagtatatgccaaacgttaaggtggccgtgttctttgggggcttgtcgatcaaaaaagatgaggaggtgctcaaaaaaaattgcccacatatagtggttggtacccctggaaggattctcgcattagctagaaacaagagcctcaatcttaagcatatcaaacacttcattctggacgaatgtgacaaaatgttggaacagctcgacatgcgccgagacgtccaagagatttttcggatgacaccacacgaaaagcaggtcatgatgttcagtgctacactctctaaggaaatcagacctgtgtgtaggaaattcatgcaggaccccatggagattttcgttgacgacgaaacaaaactaacactgcatgggttacagcagtactacgtgaaattaaaagacaatgaaaagaataggaagcttttcgatctcctagacgtccttgagttcaaccaggtagtgatctttgtgaagagcgtgcagcggtgcattgcacttgctcagctcctagtcgagcaaaatttcccagcgattgccattcatcgaggcatgccacaagaagagagactgagccgttatcagcagtttaaagactttcagcgccgcatcctggtcgccacaaacctgttcggccgaggaatggatatagaaagagtgaacattgcattcaactatgatatgccagaagactcggatacttaccttcaccggtgctatccactatctcctagtcggtggcctgaacaagcgggactggcgcccagggcatggctgagtcacctttgcccaatgcggatgatgccccgatccagcatgatgtgcagaatcgctctgcggagtatacttgtctcctgtctcatgcggtag

SEQ ID NO: 114050 - DNA, 696 bp, synthetic construct
  misc_feature 1..696: note = Description of Artificial Sequence: Synthetic coding sequence
  source 1..696: mol_type = other DNA
atggcggaaaacgatgttgataatgagctcctggactacgaggacgacgaagtggagaccgcagcagggggcgacggcgctgaagccccggcaaaaaaggacgtgaagggatcctacgtcagcattcatagttccggctttcgcgacttcctcctgaaaccagagcttctccgcgcaatcgttgactgcggtttcgaacaccccagcgaggtgcagcacgagtgtatccctcaggccatcctgggaatggacgtgctctgtcaagctaaatccggcatgggcaagacggccgtatttgtattagccactctccagcagctcgagcccgtcaccggacaagtgtcggtcctggtaatgtgtcatacacgcgaactcgcatttcagataagcaaggaatatgaacggtttagcaaatatatgcccaacgtaaaagtggctgtcttcttcggcggcttgtctatcaaaaaggacgaagaggtgctgaaaaagaactgccctcacatagtggtcggcacacccggaagaatactggccctggcgagaaataaatctttaaacctgaaacatatcaagcattttattttggatgaatgtgacaagatgctggagcagttggacatgcgcagggatgtacaggagatatttcggatgacccctcacgagaagcaggttatgatgttctcagccacactctag

SEQ ID NO: 114051 - DNA, 99 bp, synthetic construct
  misc_feature 1..99: note = Description of Artificial Sequence: Synthetic coding sequence
  source 1..99: mol_type = other DNA
taagcgaccctccagcagctggagccagttactgggcaggtttgtttctgtgattcccattttcctcggggtgataatgaggagctgcacttgccctag

SEQ ID NO: 114052 - DNA, 399 bp, synthetic construct
  misc_feature 1..399: note = Description of Artificial Sequence: Synthetic coding sequence
  source 1..399: mol_type = other DNA
atggcggagaacgacgtagataacgaattactcgactatgaagatgacgaggtcgagaccgctgccggcggcgacggagccgaggcacccgctaaaaaggatgtgaaagggagttacgtgagtatccactcatccgggttcagagatttcctgctgaagcccgaacttttgagggccatcgtggactgtggattcgagcacccaagcgaggtgcagcacgagtgtatcccccaggcaattctggggatggacgtcttatgccaggccaaaagcggaatggggaaaacggccgtcttcgtgctggccaccctgcagcaactagaaccagtgaccgggcaggtgtgcttttgcgactctcacttcccccggggggacaacgaagagcttcacctgccatag

SEQ ID NO: 114053 - DNA, 399 bp, synthetic construct
  misc_feature 1..399: note = Description of Artificial Sequence: Synthetic coding sequence
  source 1..399: mol_type = other DNA
atggcagaaaacgacgtagacaatgagttgctcgactacgaggatgatgaggtcgaaacagctgcaggaggcgatggagcggaagcacctgccaagaaggacgttaaaggctcatacgtgagcatccactccagcgggttcagggactttctgctaaaacctgagctgctgcgtgctattgtggattgtggctttgaacacccttctgaggtccagcacgagtgcatcccccaagccatcctgggtatggatgtcctctgtcaagcgaagtccggcatgggaaaaactgccgtgtttgtgctggccaccctgcagcagctggagcctgttaccgggcaagtatgtttttgcgattcacatttcccgcgaggcgataatgaggagctgcacttgccatag

SEQ ID NO: 114054 - DNA, 738 bp, synthetic construct
  misc_feature 1..738: note = Description of Artificial Sequence: Synthetic coding sequence
  source 1..738: mol_type = other DNA
atgtggaccatgtcctcgtggactatgaagatgatgaggtggaggcagcagttaggcgaaatgggcctccgacctctgcccagaagaatgagcagggctccaatgtcgcctagtaccgccttggcattcgtgacaagctgctcctcacagtcatgctctggacctctgtccactgtggctctgtctattcgccaaaaagtcgcggtcttcttcggggggttgtccattaagaaggacgaggaggtcctgaagaaaaactgccctcacattgtcgttggcaccccaggtagaattctggctctggcaagaaacaaaagtctgaacctgaagcatataaagcactttatcctggatgaatgcgacaagatgctcgagcaactggacatgcggagagatgttcaggaaattttcagaatgactcctcacgagaagcaggttatgatgttctccgcaaccctgagcaaagaaatccggcccgtatgccgcaaatttatgcaagatcccatggagatattcgtggatgatgagacgaagctgactctacacgggctccagcagtattacgtaaagctgaaggataatgagaaaaacaggaagctgttcgacctgcttgacgtgttggagttcaaccaggtggttatattcgtgaagtctgtgcaaaggtgtatcgcactcgcacagctgctggtggagcaaaacttccctgctatagccatccatcgggggatgccccaatag

SEQ ID NO: 114055 - DNA, 696 bp, synthetic construct
  misc_feature 1..696: note = Description of Artificial Sequence: Synthetic coding sequence
  source 1..696: mol_type = other DNA
atggcagagaatgacgtagataatgaacttctggattatgaagatgacgaggtggagaccgccgccgggggcgacggcgctgaggcccctgctaagaaagatgttaagggaagctacgtctctatccattcaagcggcttcagagactttcttctgaagcccgagctgttacgagccatagtggattgtgggttcgagcacccgtcagaggtgcaacatgagtgtatcccacaagcaattctgggcatggatgttctctgtcaagctaagtccggaatgggcaagaccgctgtgttcgtattggcgaccctgcaacagctcgagcctgtaaccggccaggtctccgtgttggtgatgtgccacacacgcgagctggcctttcaaataagcaaagagtatgaacggttcagtaagtacatgcctaacgttaaagtggccgtgttttttggaggactaagtatcaagaaggacgaagaggtcctgaagaagaactgcccacacattgtcgtgggtacccccggaaggatccttgcactggcgaggaataagtcattgaatctgaaacatataaagcactttatcctggacgaatgtgacaaaatgttggagcagctcgatatgcggagagacgtccaagaaatctttagaatgactcctcacgaaaaacaggtgatgatgttcagtgccaccctctag

SEQ ID NO: 114056 - DNA, 732 bp, synthetic construct
  misc_feature 1..732: note = Description of Artificial Sequence: Synthetic coding sequence
  source 1..732: mol_type = other DNA
atgtggaccatgagcagctggactatgaaaatgatgaggtggcgacagcagttgggagagatgggccttaggcctcttcccaggcgcatgagcagagccccaatgagcccgagcacagcactggccttcgtcacttcatgctctagccagagctgttccggccccctgagtaccgtggcattatcaattcggcaaaaagtctcagtcctggtaatgtgtcacacccgtgagctggcttttcagatctccaaagagtacgaaagattcagcaagtatatgcctaatgtaaaagtagccgtcttcttcgggggcttatccatcaagaaagacgaggaggtgttgaagaagaactgcccgcacattgtggtggggacccctggaagaattctggcactggctagaaacaagagcctcaacctgaaacacataaaacacttcattttggacgagtgcgacaaaatgttggaacagctagacatgagacgggacgtgcaggagatttttcggatgactcctcatgaaaaacaggtaatgatgttctcagccaccctgtctaaggaaattcgtccggtgtgtcgaaagttcatgcaggacgtcaacacactgctcccgagtctgccgccgctccccgcaaggtgcctgctgccattcctggcacttttccttagactgccatgtcattcatcagccaaaaaggctgcctgcgcccagctgggcgtgatgaccccttag

SEQ ID NO: 114057 - DNA, 1287 bp, synthetic construct
  misc_feature 1..1287: note = Description of Artificial Sequence: Synthetic coding sequence
  source 1..1287: mol_type = other DNA
atggcagagaatgacgtggataacgaactgctggactacgaggacgacgaggtagaaactgccgccggcggcgatggcgccgaggctccagcgaaaaaagacgttaaaggtagttatgtgagcattcattcctctggattccgcgattttctgctgaagcctgaactgctgagagcaatagttgattgcggattcgagcacccttcagaggtgcaacacgagtgtattcctcaggccatcctgggcatggatgtcctttgccaggcaaaatctggcatgggcaagaccgcagtgttcgtgctagcaacactgcagcagctggagcctgtgacagggcaggtgagtgtcctcgtcatgtgccacacaagggagctggccttccagatttccaaagagtatgaacggtttagtaaatatatgcccaacgtgaaggtggccgtgttcttcggggggctgtccattaagaaagacgaggaggtgctgaagaagaactgtcctcacatcgtagtgggaaccccaggacgcatcctggctctcgctcgaaataaaagtcttaatctaaagcatatcaagcatttcatcttggatgagtgcgacaaaatgcttgagcagttggatatgcgaagggatgtgcaagaaatcttccgtatgactccccacgagaagcaagtcatgatgttctccgccaccctgtccaaagagatacggcctgtgtgccgaaagttcatgcaggatccaatggaaatatttgttgatgatgagactaaactcaccctccatggtttgcagcagtactacgtaaaactgaaggataacgaaaaaaatcgcaaacttttcgacctgctggatgtgttagagtttaatcaagtggtgattttcgtgaagtctgtccagagatgtatagcacttgcccaactgcttgtagagcagaatttccccgctattgccattcatagaggaatgccccaggaggagcgcctatcccgttatcagcaatttaaagactttcagagaagaattctcgtagcgaccaatctgttcggacgcggtatggacattgagcgtgttaacatcgcctttaattacgatatgcctgaggactccgatacctatctgcaccgcgtcgcacgagccgggcggttcggcaccaaaggcttagccatcacgttcgtgtccgacgagaacgacgccaagatcctgaatgatgtacaggaccggtttgaggtaaatatcagcgaactgccggacgaaatcgatatcagcagctatatagagcaaacaaggtag

SEQ ID NO: 114058 - DNA, 1278 bp, synthetic construct
  misc_feature 1..1278: note = Description of Artificial Sequence: Synthetic coding sequence
  source 1..1278: mol_type = other DNA
atggctgagaacgacgtcgacaacgagctactggactatgaggacgacgaggttgaaacagccgcaggcggtgacggagccgaagctcccgctaagaaagatgtcaagggaagttacgtctctatacatagttctggatttcgcgacttcttgctcaaaccagagctactgagggccatcgtagactgcggattcgagcacccctcggaggtgcaacacgagtgcattccacaggccatactggggatggatgtgctgtgccaggccaagtctggaatgggcaaaacagcggtgtttgtgctggccaccttacagcagctagaaccggtgacaggccaggtatctgtgctcgtgatgtgccacacgagggaactcgcgtttcaaatttccaaggagtacgagagatttagcaaatacatgcctaacgttaaggtggccgtctttttcgggggactgtctatcaagaaagatgaggaagtactgaaaaaaaactgccctcacattgtggtcggcacgccaggtcgaatattggccctcgcccgtaataaaagtcttaatctcaaacacataaagcatttcattcttgacgaatgcgacaagatgctagagcaactggacatgagacgcgatgtgcaagaaatcttccggatgacccctcacgaaaaacaggttatgatgttttccgctacactctctaaggaaattcgaccagtgtgtagaaagtttatgcaagaccctatggagatcttcgtggacgacgaaactaagctgacactgcacggcttacagcagtactacgtaaagctgaaagacaatgagaagaatagaaagctgttcgacttactggacgttctggaattcaatcaggtcgtcatcttcgtgaagtcggtccagcgatgtatagcactggcccagctactggtggagcaaaattttccagccattgctatccatcgaggcatgcctcaggaagaacggctatcccgatatcagcaattcaaggacttccaaagaaggatcctcgtcgcaactaacctgttcgggcgggggatggatatcgagcgggtgaatattgcattcaactatgatatgccagaggatagtgatacttatttgcaccgctgttatcccctaagcccaagccgctggccagagcaggctggactggcccctagggcctggctgtcccacttatgccccatgcggatgatgccgaggtcctctatgatgtgccgcatcgccctacggtctatactggtgtcctgcttgatgcgctag

SEQ ID NO: 114059 - DNA, 291 bp, synthetic construct
  misc_feature 1..291: note = Description of Artificial Sequence: Synthetic coding sequence
  source 1..291: mol_type = other DNA
atggcagagaacgatgtggacaacgagctgctggattatgaggacgatgaggtggaaacagccgctggaggcgatggcgcagaagctcccgcgaaaaaagatgtgaaaggctcctacgtgtcgattcactctagtggatttcgcgactttctgctgaagcccgagttactgcgagccatcgtggattgcgggttcgaacaccccagtgaagtgcagcacgagtgtattccccaggcaatcttggggatggacgtgttatgtcaggctaagagcggtatggggaagacatag

SEQ ID NO: 114060 - DNA, 411 bp, synthetic construct
  misc_feature 1..411: note = Description of Artificial Sequence: Synthetic coding sequence
  source 1..411: mol_type = other DNA
atgggcggtggacgcagaccatacgatgtgttcttttccaaagttatggccgaaaatgacgttgataatgaactattggactacgaggatgacgaagttgagaccgcggcaggcggagacggggctgaggccccggctaaaaaggatgtgaagggatcctacgtgtctattcattcttcaggatttcgagactttcttctgaaaccagagctccttagggcaatcgtcgactgcgggttcgaacacccgtcagaagtccagcatgaatgcattcctcaggccattttggggatggacgttctgtgccaggccaaatctgggatgggtaaaacagcagtgtttgtcctggctactctgcaacagctggaaccagtgactggacaggtctcagtactggtgatgtgtcactag

SEQ ID NO: 114061 - DNA, 564 bp, synthetic construct
  misc_feature 1..564: note = Description of Artificial Sequence: Synthetic coding sequence
  source 1..564: mol_type = other DNA
tagtcagaagaaagggatatagggaagccaatggagatcttcgtggacgatgagacaaagttgacactgcatggactgcagcagtactatgtcaaactgaaggataacgagaaaaaccgtaaattatttgatctcctggatgtcctggagtttaatcaggttgtcattttcgttaaatccgtgcagagatgcattgctctggcccagcttctggttgagcagaactttccagctatagcaattcacagaggcatgccccaggaggaacgacttagcaggtatcaacagtttaaggactttcagagacggatcctggtggccaccaatctgttcggcagaggtatggacatcgagagagtcaatatcgcatttaactatgatatgcccgaggattctgacacatatctgcaccgggtcgcgcgggcaggccgctttggaaccaaagggctcgctatcacattcgtatctgatgagaatgacgcaaagattctgaacgatgtccaggaccgattcgaggtcaatatctctgagctccccgacgagatagacatttcctcttactag

SEQ ID NO: 114062 - DNA, 717 bp, synthetic construct
  misc_feature 1..717: note = Description of Artificial Sequence: Synthetic coding sequence
  source 1..717: mol_type = other DNA
atggcagagaacgacgtcgacaacgaactgttggactatgaggacgacgaagtagaaaccgccgccgggggggatggagctgaggctcctgctaagaaagacgtcaaggggagctacgtgtctatccactcttccgggtttagagatttccttctgaaacctgaactattgcgggctatcgtcgactgcggcttcgagcatccatctgaggtgcaacacgagtgcataccccaagccatcctgggaatggacgtgctctgtcaagccaaatcaggcatgggaaagaccgctgtttttgtccttgccactctgcagcaactggaaccagtcactggccaggtcagtgtccttgtgatgtgccatacaagagagctcgcgttccagatcagtaaggagtacgagcgattctcgaagtacatgcccaacgtgaaagtcgctgtgttcttcggcggcctgtccatcaaaaaagatgaagaggtactgaagaaaaactgcccgcacatcgtggtaggaacgccaggaaggattctggcgcttgcccgcaacaaaagcctgaatctcaaacatatcaagcatttcattcttgacgaatgtgataaaatgctcgaacagctcgacatgagacgcgatgtccaagaaatttttcgcatgactccacacgaaaaacaggttatgatgttcagtgccaccctttccaaggagatcagacccgtctag

SEQ ID NO: 114063 - DNA, 417 bp, synthetic construct
  misc_feature 1..417: note = Description of Artificial Sequence: Synthetic coding sequence
  source 1..417: mol_type = other DNA
tgagccaccttacaacagctcgagccagtgacaggacaggtgtccgtgctggtcatgtgtcacactcgagaactcgccttccagatctcgaaggagtatgaaaggttttctaaatacatgcccaacgtcaaagttgcagttttctttggcggcctgagcatcaaaaaagacgaggaggttctcaaaaagaactgccctcacatagtggtcggaacccctggccgcattctcgctctcgcaagaaacaagtccttgaacctgaagcatataaagcactttatcctggacgagtgcgataagatgctggagcagcttgacatgagaagggatgtccaggagatctttcgtatgactccacacgaaaagcaggtcatgatgttcagtgccacactgtccaaagagatccgacctgtttag

SEQ ID NO: 114064 - DNA, 870 bp, synthetic construct
  misc_feature 1..870: note = Description of Artificial Sequence: Synthetic coding sequence
  source 1..870: mol_type = other DNA
atggctgaaaatgacgtggataatgagttgttggattatgaggacgacgaagtcgagactgcagcaggcggagacggagcagaggctcctgctaaaaaagatgttaagggctcatacgtcagtatccactctagcggcttccgagacttcttactgaagcctgagctactcagggctatcgtggattgtgggtttgagcaccccagtgaagtccagcatgaatgcatacctcaggccatcctagggatggatgttctgtgccaggctaagagcggaatgggcaagactgctgtctttgtcttggctacattgcagcaactggaaccagtgactggacaggtttcggtgctggtaatgtgccacacacgagaactggctttccagatctcaaaggagtacgagaggttcagtaaatatatgccgaacgtgaaggtggctgtcttctttggcggactctctatcaaaaaagacgaagaagtactcaagaagaactgtcctcacatcgttgtgggcaccccgggtcgcatccttgcactggcccgaaataaatctctgaatctaaaacatattaaacatttcatcctggacgaatgcgataagatgctcgaacagctcgacatgagaagagacgtccaggaaatcttcagaatgacgccacacgagaaacaggtcatgatgttcagcgctacactgtcgaaagagatcaggcccgtgtgtagaaagtttatgcaggacccaatggagatcttcgtcgacgatgagacaaaactgacactccacggcctgcagcagtactatgtgaagcttaaagacaatgagaaaaaccgcaaattatttgatctgttggacgtccttgaatttaatcaatag

SEQ ID NO: 114065 - DNA, 1287 bp, synthetic construct
  misc_feature 1..1287: note = Description of Artificial Sequence: Synthetic coding sequence
  source 1..1287: mol_type = other DNA
atggcggaaaatgacgtagacaacgagctccttgattacgaagatgacgaggtggaaaccgcggccgggggtgacggcgcagaggcccccgccaagaaagacgtaaaaggtagttatgtcagcattcatagctctgggttcagggattttctgctgaaacccgagcttctgagggccatcgttgactgtggcttcgaacacccctcggaagtccagcacgagtgtatccctcaggctatcctgggcatggacgttctgtgccaagctaaatctggaatgggaaagaccgccgtgttcgtgctcgccaccctacagcagctggagcccgttacagggcaggtgagcgtgctggtcatgtgccacaccagagagctggccttccaaattagcaaagaatacgaaaggttttcaaagtacatgcccaacgtgaaggtagccgttttttttggagggctcagcataaagaaagatgaggaagtactcaagaaaaactgccctcatatcgtcgttggaacgccagggcgcatcctggccttggccagaaacaaatctcttaacttgaaacatatcaagcatttcatcctggacgagtgcgacaagatgctagagcaactggacatgcgaagagacgtgcaggagatttttaggatgaccccacacgagaagcaggtgatgatgttttcagccactttgagcaaagagattagacccgtgtgccggaaatttatgcaggacccaatggaaatcttcgttgacgatgagacaaagcttaccctccacggactgcagcaatattacgttaaattgaaagacaacgaaaaaaataggaaactctttgacctactcgatgttctggaatttaatcaggtggtgatcttcgtcaagagcgtccaacgctgcatcgcactcgcacaacttctcgttgagcagaactttcctgccatagccatccatcgcggaatgccacaggaagaaaggctcagcagataccagcagttcaaggacttccaacgacgcattctggtggcaacgaatctctttggacgcggaatggatattgagcgggttaatattgcttttaattacgacatgcccgaagacagcgacacctatttacatagagtggcccgtgccggtagattcggaaccaaaggtctggcgataacatttgtctccgatgaaaatgatgccaagatcttgaacgacgttcaagacagattcgaggtgaacataagtgagcttcctgacgaaattgatatctcctcctacatcgaacagacgcgttag

SEQ ID NO: 114066 - DNA, 696 bp, synthetic construct
  misc_feature 1..696: note = Description of Artificial Sequence: Synthetic coding sequence
  source 1..696: mol_type = other DNA
atggcagagaacgacgttgataatgaattgctggactacgaagatgacgaggttgaaaccgccgctggtggtgacggtgcagaggcacccgcaaagaaagatgtgaaaggctcctatgtctcaatccacagctccggcttccgagatttcctcctgaaacccgaacttctcagggccatcgtggattgcgggtttgaacatccatcagaagtgcaacacgagtgtattccacaggctatactcggtatggatgttttgtgtcaggctaagtctgggatgggaaaaactgcggtgttcgtactcgctaccctccagcaactcgagcctgtcacaggacaagtaagtgtcctcgtgatgtgtcacacgagagagctggcctttcagatctccaaagagtacgaaaggttcagtaaatacatgcccaacgttaaggtggccgtgtttttcggaggcctaagtatcaagaaggacgaagaagtcctgaagaagaactgtcctcatattgtagtagggacccctgggcgcattctggccctggcccgcaacaagtctcttaatctgaaacacataaagcacttcatcctggatgaatgtgataagatgttggaacaattggacatgcgaagagatgtacaggaaattttcaggatgactccacatgagaaacaagtcatgatgttcagtgccaccttgtag

SEQ ID NO: 114067 - DNA, 1287 bp, synthetic construct
  misc_feature 1..1287: note = Description of Artificial Sequence: Synthetic coding sequence
  source 1..1287: mol_type = other DNA
atggcggaaaatgacgttgacaatgagttgcttgattatgaggacgatgaagtggagactgccgccgggggggacggcgccgaagctcctgctaagaaggacgtcaaaggatcctatgtctccatacatagcagcggattccgcgatttcctgttgaagcctgaacttctacgcgcgatcgtggactgcggcttcgagcatccctctgaggtccagcacgaatgcataccgcaagctatccttggaatggacgttttatgccaggccaagtccggcatggggaaaaccgctgtctttgttctcgccactctacaacagctggaacctgtgactggccaagtgtctgtacttgtcatgtgtcatacacgggagctcgcttttcaaatctcaaaggaatacgagcgcttctcaaagtacatgcccaatgtaaaggtcgctgtttttttcgggggccttagcatcaagaaggacgaggaggtgttgaagaaaaactgccctcatatcgtagtcggcactccaggacgcatcttggctctggctaggaataaatctttgaatttgaagcacattaagcacttcattctggacgagtgcgacaaaatgctcgaacagttggacatgagacgggatgtgcaggaaattttccggatgaccccccacgaaaaacaggtgatgatgttcagtgctaccctgtccaaggagataaggcccgtgtgtcgaaaattcatgcaggatcccatggaaatcttcgtagatgacgagaccaaactgactttgcatggcttgcaacagtactacgttaagcttaaggataacgagaagaaccggaagctgttcgatttactggatgtgctcgagttcaatcaggttgtgatcttcgtgaagtccgtacagaggtgcatcgcactggcccagctgttagtcgagcagaactttcccgccatagccatacatcgggggatgccccaggaagagcggctttccaggtaccaacagtttaaggactttcaacgtaggatactggtggccacaaacttgttcggtagaggaatggacatcgagagggtgaatatcgcctttaattatgacatgcctgaggatagcgacacttacttgcacagagtggcgcgggccgggaggtttggaaccaaaggtctcgccattaccttcgtttccgatgagaacgatgctaagattttgaacgatgtgcaggataggtttgaggttaacatctcagagctgcctgatgaaatcgacatttcctcttacatagaacagactcggtag

SEQ ID NO: 114068 - DNA, 378 bp, synthetic construct
  misc_feature 1..378: note = Description of Artificial Sequence: Synthetic coding sequence
  source 1..378: mol_type = other DNA
atggctgaaaatgacgtcgataatgaactactggactatgaggatgacgaggtagagacggccgctggcggggacggggctgaagcccccgccaagaaggacgtgaagggcagttacgtgagcatccatagtagcggtttccgcgactttttactgaaaccggagttactgcgggctatcgttgactgtgggtttgaacacccctcagaagttcagcacgagtgtattccacaggcaattctggggatggacgtcttatgtcaggcgaaaagtggcatggggaagaccgctgtgtttgtcctagcaaccctccagcaactcgagcctgttaccgggcaagtatctgttctagtgatgtgccacacccgagaattatag

SEQ ID NO: 114069 - DNA, 294 bp, synthetic construct
  misc_feature 1..294: note = Description of Artificial Sequence: Synthetic coding sequence
  source 1..294: mol_type = other DNA
taggctaccctccagcagctggagccagttacgggacaggtgtgcttctgtgatagtcactttccccgcggcgataatgaagaactccatctcccatatgtgagtgtgtacttccttcccaaggtgagcgtgctggtcatgtgtcacacccgggagttggcatttcaaatatctaaagaatacgagcgttttagtaagtatatgcccaacgttaaggtggctgtgttctttggcggtttaagtataaagaaggacgaggaagtgttaaagaaaaattgccctcatatcgtctag

SEQ ID NO: 114070 - DNA, 291 bp, synthetic construct
  misc_feature 1..291: note = Description of Artificial Sequence: Synthetic coding sequence
  source 1..291: mol_type = other DNA
atggccgagaacgacgtagacaacgaactactggactacgaggacgatgaagtggagacggctgccggaggtgatggagctgaagccccagcaaagaaggacgtgaaagggtcttatgtatcaattcactcttctggtttccgcgattttctcctgaaaccagagctgctgagagccattgtggactgcggcttcgagcacccctccgaagtccaacatgagtgcatccctcaggcaatcttaggaatggatgtgctgtgccaggccaaaagtggaatggggaaaacctag

SEQ ID NO: 114071 - DNA, 291 bp, synthetic construct
  misc_feature 1..291: note = Description of Artificial Sequence: Synthetic coding sequence
  source 1..291: mol_type = other DNA
atggccgaaaacgacgtggacaatgaacttcttgattacgaggacgatgaggtggagacggcagccggcggagacggcgcagaggcccccgcaaagaaagacgtgaagggaagttatgtgtccatccactctagtggtttcagagattttctgctgaaaccagagctgttgcgtgccattgtcgattgcggcttcgagcaccccagcgaggtgcagcatgagtgcatccctcaggctatcctgggcatggatgttctatgccaggccaaatctgggatgggcaaaacctag

SEQ ID NO: 114072 - DNA, 1287 bp, synthetic construct
  misc_feature 1..1287: note = Description of Artificial Sequence: Synthetic coding sequence
  source 1..1287: mol_type = other DNA
atggccgaaaatgacgtcgacaatgaactcctcgactatgaagacgatgaggtagagaccgctgccggaggagacggcgccgaggctcctgcaaagaaggatgtcaagggcagctacgtttccatccattcaagcgggtttcgcgacttcttgctgaagccggagctgctgagggccattgtggactgtggttttgagcaccctagtgaagttcagcacgagtgcatcccccaagccattctgggcatggatgtgttgtgccaggctaaatcgggaatgggaaagactgcagtcttcgtgctggccacgctgcaacaacttgagcccgtcacaggccaggtatctgtcctggtgatgtgccacactagggagttagctttccagatctcaaaggagtacgaaaggtttagcaagtacatgccgaacgtgaaagtcgcagtgttcttcggcggactcagcattaagaaggacgaagaggtgctgaagaaaaattgcccccatatagtggtaggtacaccgggacggattcttgctctggcccggaacaagtcactcaacctgaagcatataaagcactttatcctcgacgaatgtgataagatgctggaacaactcgacatgcggcgggatgtgcaggagatcttccgcatgactccacatgagaagcaggtcatgatgtttagcgcgaccttgtctaaggagatccggccggtctgtagaaagttcatgcaggatcctatggagatttttgtggatgacgaaaccaaactaacactgcacgggctgcagcagtattacgtcaagctgaaagataacgagaagaatcggaagctgtttgatcttcttgatgtgctggagtttaatcaggtggtgatctttgtcaagagtgtgcaacgatgtattgcactggcccaacttttggtagagcaaaacttccctgccatagccatccatcggggtatgccacaggaagaacgactcagcagataccaacaattcaaagacttccagcgccgcatcctagtggcaaccaaccttttcggccgcggaatggatattgagcgggttaatatcgcatttaattacgacatgccagaggatagtgatacttatctccaccgagtggctcgagccggtcgatttggtaccaaaggcctcgccattacgtttgtatctgacgagaacgatgcaaagatcttaaacgatgttcaggacagattcgaggtcaatattagtgagctgcccgatgagatagacatttcctcctacatcgagcagacacgctag

SEQ ID NO: 114073 - DNA, 732 bp, synthetic construct
  misc_feature 1..732: note = Description of Artificial Sequence: Synthetic coding sequence
  source 1..732: mol_type = other DNA
atgtggactatgtccagctggaccatgaagatgatgagatggcgacagcaactgggagaaatgggtctgcgacctctgccgcgccggatgagcagagcacctatgtccccttccacagctctggccttcgtcacatcttgctccagtcagagctgttctgggccgctatcaaccgtggccctctcaatcagacagaaagtgagcgttctggttatgtgtcacactcgggaactggcttttcaaatatccaaggagtacgagaggtttagcaagtatatgccaaacgtcaaagtcgcggtgtttttcgggggcctatccatcaaaaaggacgaggaggttctgaagaaaaactgtccgcacatagtggtcggtactcctggaaggatccttgcacttgctagaaataaaagtctcaatctgaaacacattaagcatttcatcttggatgagtgcgataagatgcttgaacagcttgacatgaggcgcgacgtccaggagatattccggatgactccacacgagaaacaagtgatgatgttcagcgcaacactctccaaggagatcaggcctgtgtgccgtaagttcatgcaggacgtcaacacactcctgccgtccctcccaccactccccgcaaggtgtttactgccattcttggccctcttcctgcgcctcccctgccacagttctgccaagaaagccgcctgtgcccagctgggagtaatgaccccgtag

SEQ ID NO: 114074 - DNA, 972 bp, synthetic construct
  misc_feature 1..972: note = Description of Artificial Sequence: Synthetic coding sequence
  source 1..972: mol_type = other DNA
atggctgagaatgatgtggacaacgagcttctagactatgaggatgatgaagttgaaactgcagccgggggggacggggccgaggcgcctgctaagaaggatgtgaaaggaagctacgttagcattcactcaagcggttttcgggacttcctgctgaaacccgagctgctgagagctattgtagactgcggatttgaacatcccagtgaagtgcagcacgaatgtatcccccaggcaatcctcgggatggacgtactctgtcaagccaaatccgggatgggcaagaccgcagtattcgtactggccactttacagcaacttgagcctgttaccggacaagtcagcgtactggtcatgtgtcacacgcgcgagcttgctttccaaatttcaaaagagtatgagcggttctccaagtacatgcccaatgtgaaagtcgcagtctttttcggtgggctgagcataaagaaagatgaagaggtactgaaaaagaattgcccccacatagtcgtcggaacgcccgggcgcatattagcgctcgcaaggaataagagcctcaacctcaaacatatcaaacatttcatcctcgatgagtgcgacaaaatgctggaacagttagacatgagaagagatgtgcaagaaatctttagaatgactccacacgagaagcaagtcatgatgttttccgcgactctttccaaggaaataaggcccgtgtgtcgcaagtttatgcaggacccaatggaaatctttgtggatgacgagactaaacttacccttcatggcctgcagcaatattatgtcaagctgaaggacaacgagaaaaataggaagctctttgatttacttgacgtgctcgagttcaatcaagagatcacatgcaaatccgtccaacgtttttcaaccacaaattcctgcggatatcaacccatttggccacgtcacgggcaccgggctggggagcactgcttctag

SEQ ID NO: 114075 - DNA, 972 bp, synthetic construct
  misc_feature 1..972: note = Description of Artificial Sequence: Synthetic coding sequence
  source 1..972: mol_type = other DNA
atggcagagaacgacgtggataatgaactgctggactatgaggacgacgaggtggagacagctgcaggcggggatggagcagaagcccccgctaagaaggatgtcaagggcagctatgtgagtattcatagcagcggattccgtgattttctccttaaaccagagctgttgcgtgccatcgtagactgtgggtttgagcatccaagtgaggtccagcacgagtgcattccccaggccatcctcggcatggacgtgctctgtcaggctaagtccggcatgggcaagactgcagtgtttgttttggccacactccagcagcttgaacctgtgacaggtcaagtttccgtgttagtgatgtgccacacgcgcgaactggcgttccaaatcagcaaagagtacgaacgcttctcaaaatacatgcccaacgtgaaagtcgctgtctttttcggcggactgtcaataaagaaggacgaggaggtgctgaaaaagaattgtccccatatcgtggtcggcacgcccgggcgaatattggcactcgctcgaaacaaatctctcaacctcaagcatatcaagcacttcatcctcgacgagtgtgacaaaatgctcgagcagttggacatgagacgcgatgtgcaggaaatttttagaatgacaccacatgagaagcaggtgatgatgttctccgccaccctttccaaggagattcgcccagtgtgtcgtaagttcatgcaggaccctatggagattttcgttgatgatgagaccaagctgacgctccatggtctgcagcagtactacgtaaagctcaaggataacgaaaaaaaccgcaaacttttcgaccttctggacgtgctcgagtttaatcaggagatcacctgcaagtccgttcagaggttttcaaccaccaactcttgcggctatcaacccatctggcctcggcacggtcacagagcgggagagcactgtttttag

SEQ ID NO: 114076 - DNA, 1332 bp, synthetic construct
  misc_feature 1..1332: note = Description of Artificial Sequence: Synthetic coding sequence
  source 1..1332: mol_type = other DNA
atggcagagaatgacgtcgacaacgagttactcgactacgaagatgatgaagtagagaccgccgccggaggtgacggggcagaagcccctgccaaaaaagatgtgaaaggttcctacgtgagcatacacagttccgggttccgtgactttttactgaaaccagaattgctgcgggccatagtggattgtggatttgagcacccctctgaagtgcaacacgaatgtatccctcaggcaatattagggatggacgtgctttgtcaggcgaagtctggaatgggaaagacagccgtattcgtgctggcaaccctgcagcagttagaaccggttactggacaggtttatttaggtagagttctcggccgtggattttggtgcgtgtttgtgagtgttctcgttatgtgccacacacgcgaattggcttttcagattagtaaggaatatgaaaggttcagcaagtacatgccaaatgtcaaagtcgcggtgtttttcggggggttgtccattaagaaagacgaagaagtccttaagaagaactgcccacacatcgtggtgggcactccaggcagaatcctggccttggcccgtaacaagtccctgaacctgaagcacatcaaacatttcatactggatgaatgcgacaagatgctcgaacaactggatatgcgccgcgatgtccaggagatcttccgaatgacccctcatgaaaaacaggtgatgatgtttagcgccactctctctaaggaaattcggcccgtgtgtcggaagttcatgcaggacccgatggagattttcgtggacgacgagacaaaattgactctgcatggacttcagcagtactatgtgaaattgaaggacaacgagaaaaacaggaagctattcgacctcttagacgtcttggaatttaaccaggtcgttatttttgttaagtcagttcagagatgcatcgcattagctcagcttctcgtcgaacagaactttcctgccattgccatccaccgagggatgcctcaggaggagaggctctccagatatcaacaattcaaagacttccagcgccggattctggtggccacaaacctcttcggtcggggcatggacatagaacgggttaacatagctttcaactatgatatgccagaagatagcgacacctacttgcaccgcgtggcacgcgccggcaggttcggaaccaaagggctggctattaccttcgtgagtgacgaaaacgacgcaaagatcttgaatgacgtgcaggataggtttgaggtcaatatctcagaactccccgatgagattgatatttcctcatatatcgaacagaccaggtag

SEQ ID NO: 114077 - DNA, 732 bp, synthetic construct
  misc_feature 1..732: note = Description of Artificial Sequence: Synthetic coding sequence
  source 1..732: mol_type = other DNA
atgtggacaatgtcctcatggactatgaagatgatgcgttggcgccagcaactgggcgagatgggcctgagacccttgccaagaagaatgtctcgagctcctatgtctcctagcactgcgctggccttcgtgacgtcctgctcgtcgcagtcctgttccggtcctttgagtaccgtcgccctgagcattcgccaaaaagtctctgtcctcgtcatgtgccacaccagagaacttgcctttcagatttctaaggaatacgagcgattttccaaatacatgcccaatgtcaaggtcgcggttttcttcggcggcctctctatcaagaaggacgaggaggttttaaagaagaattgcccccatatcgttgttggcacccccgggagaattctagccctggctagaaacaagagcctgaatcttaagcatataaagcactttattcttgatgaatgcgacaagatgcttgagcaactggacatgcggcgcgacgtccaagagatctttagaatgaccccccatgagaaacaggttatgatgttctccgctacattgtcaaaagagataaggcccgtttgccgcaaattcatgcaggatgtgaacacactgctgccatccctgccacctctgcctgccaggtgtctcctgccctttctggccctattcctccgcctcccctgccacagtagtgctaagaaggcagcgtgtgcgcagctcggcgtgatgacaccgtag

SEQ ID NO: 114078 - DNA, 1332 bp, synthetic construct
  misc_feature 1..1332: note = Description of Artificial Sequence: Synthetic coding sequence
  source 1..1332: mol_type = other DNA
atggctgagaacgatgtcgacaacgagcttttagactacgaggatgacgaagtcgaaacagcagcgggtggggatggagcggaggcgccggcaaaaaaggatgtgaagggctcatatgtgagcatccacagctctgggttccgagactttctcctgaaacctgaactcttgcgggccatcgtggactgtggctttgaacatccttctgaagtccagcacgaatgtattccccaggccattctcgggatggacgtgctctgtcaggcaaaaagcgggatgggaaagactgctgtgttcgtgcttgccaccctccagcaactggaaccagtcaccggccaggtttacctgggaagggtgctcggcaggggcttctggtgcgtgtttgtgtccgtgctggttatgtgtcatacccgtgagttggccttccagatttccaaggagtacgagcgattttccaaatatatgccaaatgtgaaggtggccgtcttctttggagggctcagtatcaagaaggacgaagaagtcttgaaaaaaaactgccctcatatagttgtggggactccaggacggattctggcattggcccgcaataaatctctcaacctgaaacacatcaagcattttattttggacgagtgcgacaagatgctcgagcagttggacatgcggcgggacgtccaagaaatatttaggatgaccccccacgaaaaacaggtgatgatgttttctgccaccctgtctaaggaaatcagacccgtttgccgcaagttcatgcaggatcccatggaaattttcgtggatgacgagaccaagctgacccttcatggactgcagcaatattacgtaaaactgaaagacaacgaaaagaatcgcaagctttttgacttgcttgatgtgctggaatttaaccaagtagtcattttcgtgaagtctgtgcagagatgcattgcgctggcacagctactggtggagcagaactttcctgccattgccattcatcgaggaatgccacaagaagagaggctaagcaggtatcagcaattcaaagacttccaacggcgtatcctagtcgctactaacctgtttggccgcggcatggatattgagagagtgaacatcgccttcaattatgacatgcctgaagactccgatacatatcttcatcgtgttgctagagccggaaggttcggcacaaaaggtctggctatcacattcgtctccgacgagaatgacgcaaaaatcctgaacgatgttcaggacagatttgaggtaaatattagtgaattgcccgacgagatcgatattagctcttacatcgagcagaccaggtag

SEQ ID NO: 114079 - DNA, 420 bp, synthetic construct
  misc_feature 1..420: note = Description of Artificial Sequence: Synthetic coding sequence
  source 1..420: mol_type = other DNA
atggcagaaaatgatgtagataatgagctgctcgattatgaagatgacgaagtggagactgctgccggcggcgacggagcagaagcaccagccaagaaagatgtgaaaggctcctatgtgtctatccatagctccggattccgcgatttcctgttgaaacctgaactcctacgcgcgatagtggactgcgggttcgagcacccatccgaggtgcagcatgagtgcatcccccaagctatcctcgggatggatgtactgtgccaggccaagtccggcatgggcaagacagccgtgtttgtactcgcaaccctccagcagctagaacctgtgaccggccagtcccacgaacacatgacgagcgtaacacttgataacttgactgcggtgggagatgtgctttcacaggcttggggatcttag

SEQ ID NO: 114080 - DNA, 732 bp, synthetic construct
  misc_feature 1..732: note = Description of Artificial Sequence: Synthetic coding sequence
  source 1..732: mol_type = other DNA
atgtggacgatgagctcatggacaatgaaaatgatgcgctggagacagcaactgggggagatggggttacgacccttgcctagacgaatgtctagagctccaatgtccccatcaaccgcgctggccttcgtgacgtcttgcagtagccagagctgctccggtcccctgtctaccgtggccctctcaatccggcaaaaggtctccgtgcttgtcatgtgccatacccgcgaacttgcattccaaataagtaaggagtacgagcgcttttccaagtatatgcccaatgtcaaggtagccgtgttttttggggggttatccattaagaaggacgaagaggtcctcaaaaagaattgtcctcacatcgtggtcgggaccccagggcgaattctggccctcgcccggaacaaaagcctgaacttgaagcacattaagcactttattctggatgaatgcgacaagatgttggaacagctcgacatgagacgggatgtgcaggagattttccgaatgactcctcacgagaaacaggtgatgatgttctcagctacccttagcaaagaaatccggccggtgtgcagaaaattcatgcaggacgtgaacacgctcttgccatcacttcccccactgccagcccggtgcctgctgcctttccttgccctgtttttgcgactgccttgtcatagcagtgcaaaaaaagctgcctgcgcacaattgggcgtgatgactccatag

SEQ ID NO: 114081 - DNA, 732 bp, synthetic construct
  misc_feature 1..732: note = Description of Artificial Sequence: Synthetic coding sequence
  source 1..732: mol_type = other DNA
atgtggactatgtctagctggactatgaagatgatgagatggcgccagcagctgggagagatgggactccgccctctgccgagacgtatgtccagagccccaatgagccccagcacagcactcgctttcgtgacttcatgtagcagccagtcctgttccgggcccctatctactgtggctctgtccatccggcagaaggtgagcgtgcttgtgatgtgccacactcgcgaattagctttccagatatccaaggaatatgagcgctttagcaagtatatgcctaacgttaaggtggccgtcttctttggcggactttctataaagaaggacgaggaagtcttaaaaaagaactgcccacacattgtcgtcgggaccccagggcgcatccttgcactcgcgcggaacaaatccttgaaccttaaacatatcaagcatttcatcctggacgaatgtgacaaaatgctggaacagctcgatatgcgcagggacgttcaggaaatttttcggatgacccctcatgagaaacaggtgatgatgttctccgcaacccttagtaaggagattagaccagtttgccgaaagtttatgcaggacgtgaacaccctcctgccatcactgccacccctgcccgcccgttgcctcctgccattccttgccctgttcctcaggctgccatgccattcatcagccaagaaggccgcctgcgctcagctgggggtcatgacgccttag

SEQ ID NO: 114082 - DNA, 420 bp, synthetic construct
  misc_feature 1..420: note = Description of Artificial Sequence: Synthetic coding sequence
  source 1..420: mol_type = other DNA
atggcggagaatgatgtcgataacgagttgctcgattatgaagacgacgaggtggagacagcagcaggtggggatggagcagaggctcccgctaagaaggacgtgaaaggctcttatgtctctattcattcttcaggtttccgagatttcctcctcaagcccgagttgctgagagccatagtggattgcggcttcgaacatccctctgaagtgcaacacgagtgtatcccccaggcgatcctcggtatggacgtgctgtgtcaggccaaatccggaatgggaaagaccgcagtctttgtcctagccaccctgcagcagctggaaccagtgactgggcaatcacacgagcacatgacgtcagtaactcttgataatctgaccgcagtcggcgatgtcctctctcaggcctggggctcctag

SEQ ID NO: 114083 - DNA, 972 bp, synthetic construct
  misc_feature 1..972: note = Description of Artificial Sequence: Synthetic coding sequence
  source 1..972: mol_type = other DNA
atggccgaaaacgacgtggacaatgagcttctcgattatgaagacgacgaggtggaaacagcagctggaggcgacggggcagaggcacccgcaaaaaaggatgtgaaaggttcttacgtgtctatccattcaagtggattccgcgactttctcctgaaacccgagctgctgcgggcgatcgttgattgtggtttcgagcacccatctgaagttcaacatgagtgtatccctcaagcgatactgggaatggatgttctgtgtcaggctaaatctgggatgggaaagactgctgttttcgttctggcaacattgcagcagcttgaacctgtgacagggcaggtgagcgtgcttgtgatgtgtcacacgagggagctggcctttcaaataagcaaagagtatgaacggtttagcaagtacatgcctaatgtgaaagtggcagtctttttcgggggcctgtcaatcaaaaaggatgaagaggtccttaaaaagaattgtcctcacatcgttgtgggcacgcctgggcgaatcctcgccctggcccgaaataaatccctcaatttgaaacacatcaaacattttatcctcgatgagtgtgacaaaatgcttgagcagttggacatgcgacgggacgtacaagagatttttcgcatgacccctcacgaaaagcaggttatgatgttcagcgcgaccctgagcaaggaaattcgccctgtgtgtaggaagtttatgcaggaccctatggagatcttcgtagacgacgagacgaagttgaccttacacggcctccagcaatattatgtcaaactgaaagacaacgagaagaatagaaaattgttcgatcttttagacgttctcgagttcaaccaggagatcacatgcaagtccgtgcagcggttctctactacaaacagctgtggatatcagcccatttggccacgtcatggtcacagagctggcgaacactgtttctag

SEQ ID NO: 114084 - DNA, 1332 bp, synthetic construct
  misc_feature 1..1332: note = Description of Artificial Sequence: Synthetic coding sequence
  source 1..1332: mol_type = other DNA
atggccgagaacgatgttgacaacgaactgctcgattatgaagacgatgaggttgagaccgcggctggaggggacggggctgaggctccagctaaaaaagacgtgaaaggttcttacgtttcaattcacagctccggcttcagggatttccttttgaagccggaactgttaagagctattgtggactgtggctttgaacaccccagcgaggtgcaacacgaatgtattccacaggcaatcctgggcatggacgttttgtgccaggccaaaagcggcatgggaaagacagcagtattcgtgctcgcaactctgcagcagcttgaaccagtcaccggccaggtttatttagggcgagtccttgggagagggttttggtgcgtctttgtgagcgtgttggtcatgtgccacacacgcgaattagcgtttcagatttcgaaagagtacgagcgcttctcaaagtacatgccaaatgtaaaggttgcagtgttttttggtggtctttctatcaagaaggacgaagaagtgctgaagaaaaattgccctcacattgttgtggggacacctggaagaattttggccttggcacgaaataagagcctcaatctgaagcacatcaaacactttatcttagacgagtgcgataaaatgctggagcagctggacatgaggagagatgtccaagaaatctttcgaatgactcctcacgaaaagcaagtgatgatgttctccgcaacactgtctaaggagatacgccccgtctgtcgcaaattcatgcaggatccgatggaaatatttgtggacgacgaaaccaagcttaccctgcacggcctccagcaatattatgtgaagcttaaagacaacgaaaaaaaccggaagctttttgatcttcttgacgttctcgaatttaatcaggtcgtgatcttcgtgaagtccgtgcaaaggtgcatcgctctggctcagttactggtggaacagaacttccccgcgatcgccattcaccgaggcatgcctcaagaagagcgattatctcggtaccagcagtttaaggacttccagcgccgcattttggttgccaccaatttgtttggcaggggaatggacattgaaagggttaacattgccttcaattatgatatgcctgaggactctgatacctatctgcaccgcgttgcacgagccgggcggttcggcactaaaggactggcaatcaccttcgtgagtgatgaaaacgacgctaagattctgaacgatgtgcaagaccgctttgaggtgaatatatcagagctgcccgatgaaatagacatctccagctacattgagcaaacacggtag

SEQ ID NO: 114085 - DNA, 732 bp, synthetic construct
  misc_feature 1..732: note = Description of Artificial Sequence: Synthetic coding sequence
  source 1..732: mol_type = other DNA
atgtggacgatgtccagttggaccatgaaaatgatgaggtggcggcagcagcttggcgagatgggcttgagacccctaccccggagaatgtcccgcgctcccatgtcccctagtacagctctggcctttgtcacctcatgtagctcccagagctgctccgggcctttaagcacagtggcactgagtattcgccagaaggtttccgtcctcgttatgtgtcacaccagggagttggcctttcagattagtaaagagtacgagcgcttctccaagtatatgcctaatgtgaaagtggccgtgtttttcgggggtctgagtataaagaaagatgaggaggttctaaagaaaaactgcccacacattgtggttggcactcctgggagaatcctggcactggcaaggaataagagcttgaatttaaaacacatcaaacacttcatcctggatgaatgtgataaaatgctggagcagttagatatgagacgcgacgtgcaggaaatcttcagaatgacgcctcacgaaaaacaggtgatgatgttttccgccacactttcaaaagaaattagacctgtctgccggaaattcatgcaagatgttaacacactcctgccatccttgcctccgctacccgctaggtgcttactccccttcctcgctcttttcctaagattgccatgtcatagcagcgccaagaaggctgcatgtgcccagctcggcgtgatgaccccttag

SEQ ID NO: 114086 - DNA, 1053 bp, synthetic construct
  misc_feature 1..1053: note = Description of Artificial Sequence: Synthetic coding sequence
  source 1..1053: mol_type = other DNA
atgtggacaatgagctcctggacaatgaagatgatgcgatggcgtcagcagctgggtgaaatggggctgagaccactcccccgccgtatgtcccgcgcacccatgtcgccatccacagccctggccttcgtgacatcatgcagtagtcagtcatgttctggacctctttccaccgtggccctgagcatccgccagaaagtcgccgtgttttttggaggactaagcatcaagaaggacgaggaggtgcttaagaagaactgtcctcacattgtggtgggaacgccaggaaggattctcgctttagctagaaataagtcattgaatctgaaacacattaagcacttcattcttgatgagtgcgacaagatgctggaacagctggatatgaggcgagatgtgcaggagattttccgaatgacaccacacgagaaacaggttatgatgttttccgcaacactgtcaaaggaaattcgcccagtctgccggaagttcatgcaggatccaatggaaatcttcgtggatgatgagaccaagcttacactgcacgggttgcagcaatactacgtgaagctgaaagataacgaaaagaaccgaaaacttttcgatctgctggacgtactggaatttaaccaggtagttatcttcgtcaaaagcgtgcagaggtgtattgcacttgcccaattactggtagaacaaaacttcccagcaatcgctattcataggggaatgccccaggaggagcggttgtctaggtaccagcagtttaaagacttccagcgcaggatccttgtagcgactaacttgtttggcaggggaatggacatagaacgggtaaatattgcatttaattacgacatgccagaagattcagatacctacctgcacagagttgcacgagctggaaggttcggtaccaaaggcctcgccattactttcgtgagtgacgagaatgatgctaaaatactgaacgacgttcaggatcggtttgaagtcaacataagtgagctgccagacgaaatcgacatttccagctacatcgaacaaacgcgctag

SEQ ID NO: 114087 - DNA, 1332 bp, synthetic construct
  misc_feature 1..1332: note = Description of Artificial Sequence: Synthetic coding sequence
  source 1..1332: mol_type = other DNA
atggccgagaacgatgtggataacgagctgttagattacgaggatgatgaggtagagacagccgcaggcggcgacggtgctgaggcccctgctaagaaggacgtcaagggatcctatgtgagtattcattcctcaggctttcgggactttctgttaaaaccggagttactccgagctatagtcgattgtggcttcgaacatccttccgaggtacaacacgaatgcatcccccaggctatcttgggcatggacgtgttgtgtcaagccaaatctgggatggggaaaactgcggtgtttgtgctggcgacactgcagcagttggagcctgtgacaggccaggtgtaccttggaagggttctaggacgtggattttggtgcgtcttcgtatcggtgttagtcatgtgccatactagggagcttgcgttccaaatttcaaaggagtacgaacggttttctaaatacatgccgaacgtgaaagttgctgttttcttcgggggactgagcattaaaaaggacgaggaggtgctgaagaaaaattgtccgcatattgtcgtaggcacgccaggacgaattcttgctctggctcgtaacaagtccttaaacctgaagcatatcaaacattttatactggacgagtgtgataaaatgctcgagcaacttgatatgagacgcgacgtacaggaaatattccgaatgactcctcacgagaaacaagtcatgatgttctccgcaacactcagcaaggaaatccgccccgtgtgcaggaaatttatgcaagatccaatggaaatcttcgtagacgacgagactaaactgacactgcacgggttacagcagtattatgtcaagctgaaggataacgagaagaaccggaaactctttgatcttctagacgtgctcgagtttaatcaggtggtaatctttgtcaaatcagtacaaagatgcatcgccctggcgcaattattagtggaacagaattttccagctattgcaatccataggggcatgccccaagaagagaggctgagtcggtaccagcagtttaaagacttccaaagaagaattttggttgccactaacctattcggtcgggggatggacatcgaacgggtgaatattgcctttaattacgatatgccagaagactccgatacatatttgcatcgggtggctcgcgctggccggtttggcaccaagggtctggctatcacatttgtaagcgatgaaaatgacgccaagattctcaatgacgtccaggaccgattcgaggtgaacatctcagagctgcctgacgaaattgatatatcctcctacatcgagcaaactcgctag

SEQ ID NO: 114088 - DNA, 1053 bp, synthetic construct
  misc_feature 1..1053: note = Description of Artificial Sequence: Synthetic coding sequence
  source 1..1053: mol_type = other DNA
atgtggaccatgagttcctggacaatgaaaatgatgcgctggaggcagcaactaggggaaatggggcttcgtcctcttcctaggcgaatgagtcgggcccccatgtcgccaagcactgccttggccttcgtaacgtcttgctctagtcagagttgtagcggccctctttcaaccgtggccctctctataagacagaaggtcgcagtttttttcggtggtctctccattaagaaggacgaagaggtcctgaaaaagaactgtccacacatagtagtcggaactcctggccgaatcttggccctggcccggaacaagagtctcaatctcaaacacattaagcacttcatcctggacgaatgcgacaagatgctcgagcagcttgacatgaggagagatgtgcaggagatcttcaggatgacaccacatgagaaacaagtgatgatgttctccgcaaccttatcaaaagaaatcagaccagtgtgcaggaagttcatgcaggaccctatggaaattttcgtcgatgatgaaaccaagttaacccttcatggcttacaacaatactatgtcaagctcaaagacaacgagaagaatcggaaacttttcgacttgttagacgtcctggagttcaatcaagtggtgattttcgtcaaatccgtgcagcggtgtatcgccctggcccagttactggtggagcagaattttccagcaattgcgatccacaggggaatgccccaagaggaacggctgtcccgataccagcagttcaaagatttccaaaggcggatcctggtagccaccaatctgtttgggagggggatggacattgagagagtgaatattgcgtttaattatgatatgcccgaggactccgatacctacctgcatcgcgtcgcacgcgctgggcgctttggaactaagggcctggccatcacctttgtgagtgacgaaaacgacgctaagatactgaacgatgtacaggaccgctttgaggtgaacataagtgaactgcccgacgaaatcgacatcagtagttacatagaacagacaagatag

SEQ ID NO: 114089 - DNA, 732 bp, synthetic construct
  misc_feature 1..732: note = Description of Artificial Sequence: Synthetic coding sequence
  source 1..732: mol_type = other DNA
atgtggacgatgtcctcctggacaatgaaaatgatgagatggcggcagcaacttggtgagatggggcttaggcctctgccccggaggatgagtcgcgctcccatgagcccaagcacagcgctggcctttgttacgtcctgttccagccagtcttgctctggacccttgagtacagtggccctcagcatccggcagaaagtgtccgtgctcgtcatgtgtcacacgcgtgagctcgcgttccagatttcaaaggaatacgaacggttctcgaaatacatgccaaacgtgaaagtcgcagtgtttttcggcggcctcagtatcaagaaagacgaagaggtgttgaaaaagaattgccctcatattgtggtcggtactccaggacgcatattggcactggctcggaacaagtccctgaacctgaagcatatcaaacattttatcttggatgaatgtgacaaaatgctggagcagttagacatgagacgggacgttcaggagatatttagaatgactcctcacgagaaacaggtgatgatgttctccgctacactcagcaaggagataagacctgtatgtcgaaaatttatgcaggacgtgaatacactgttaccatccctgccacctctgccagcccggtgtttactaccatttctagcactgtttctccggctcccttgccacagctcggctaaaaaagccgcctgtgctcagctgggagtcatgacgccttag

SEQ ID NO: 114090 - DNA, 420 bp, synthetic construct
  misc_feature 1..420: note = Description of Artificial Sequence: Synthetic coding sequence
  source 1..420: mol_type = other DNA
atggccgaaaatgacgttgataatgagttgctggattacgaggacgacgaagtcgaaacagctgccggaggagatggcgctgaggcgcctgcaaagaaggatgtgaagggcagctatgtttccatccactcgtcagggttcagggattttctgcttaaacctgaactattgagggcaatcgtagactgtggattcgaacatccctccgaggtgcagcatgagtgcataccgcaagccattctggggatggacgtcctgtgccaagctaagtcaggtatggggaaaaccgccgtgtttgtgcttgctacccttcagcagttggagccagtgaccgggcaaagccacgagcacatgacaagcgtgactcttgacaatctgacagcagtgggtgacgtcctctctcaagcatggggatcctag

SEQ ID NO: 114091 - DNA, 1053 bp, synthetic construct
  misc_feature 1..1053: note = Description of Artificial Sequence: Synthetic coding sequence
  source 1..1053: mol_type = other DNA
atgtggactatgagcagttggactatgaagatgatgcgctggcggcagcaactaggtgagatgggtctgcggcctttgcccaggagaatgtcccgggcacccatgtcaccctcaacagcactggcgtttgtcacgtcctgcagctcccagtcatgttccggccccttgagcactgtggccttaagcatcaggcagaaggttgctgtgtttttcgggggcctcagcattaaaaaagacgaggaggtcctgaaaaaaaattgcccgcacatagtggttggcacaccaggccggattctggctttggccaggaataaatcattaaacttgaagcacattaagcacttcatcctcgatgagtgtgacaaaatgctggaacagttagatatgcggcgggacgtgcaggagatcttccggatgactccacatgagaaacaggttatgatgttctcagccacgctctctaaagagatacgtccggtgtgcagaaaattcatgcaggatcccatggagattttcgtcgacgatgaaactaagctgacgctgcatggcctgcagcagtactacgtgaaactcaaggataatgagaagaacagaaaattgtttgatctgctggatgttctcgaatttaaccaagtcgttatctttgttaagtccgtccagcggtgtatcgcactggctcagttgctggtagaacaaaattttcctgccatcgcaattcaccgcgggatgccccaggaggagcggctcagcaggtaccaacaatttaaggacttccaaagacggatcctcgtggccactaacctgttcggtcggggaatggacatagagcgggtgaacattgcctttaactatgacatgccggaagacagcgatacttacctgcatagggtggccagggccggacggtttggcacaaagggcctcgctatcacatttgtgtcagatgagaacgacgccaagattctgaacgacgtccaagatcggtttgaggtcaacatctcagagctaccagacgaaatcgatatcagctcctatatcgagcaaacaaggtag

SEQ ID NO: 114092 - DNA, 972 bp, synthetic construct
  misc_feature 1..972: note = Description of Artificial Sequence: Synthetic coding sequence
  source 1..972: mol_type = other DNA
atggcagaaaacgatgtcgataatgaattactggactatgaggatgatgaagttgagacggcggcagggggagatggtgcagaggcaccagctaagaaagacgtgaagggatcgtatgtgagcatacatagctccgggtttcgcgactttctgttaaagccagagctcttgagagctatcgtcgactgcggctttgaacacccaagcgaagttcaacacgagtgcatcccccaagcaattctgggcatggatgttctgtgccaggctaaaagcggcatgggcaagactgcagtttttgtgctcgctactcttcaacagcttgagcctgttacaggacaagtgagtgtgctggtgatgtgtcacacccgggaactggcctttcaaatttcaaaggagtatgaacggttcagtaaatacatgcctaacgttaaggtggcagttttcttcggaggcctgagtattaaaaaggatgaagaggtgctgaaaaagaattgcccccatatcgtcgtaggtactccgggccgcatcctggcactcgcaagaaataagtcactcaaccttaagcacatcaaacattttatattagatgagtgcgataaaatgctggagcagctcgatatgcgaagagatgtgcaagaaatcttcaggatgactccccacgagaaacaagtgatgatgttttcggctactctgagcaaggagatacgtcctgtgtgcagaaaattcatgcaggatccaatggaaattttcgtagacgacgagacaaaattgactctacacggactgcagcaatattatgtcaagctgaaagacaatgagaaaaatcgaaagctcttcgatcttctggatgtgcttgaattcaaccaggaaattacttgcaagtctgtccaacgcttctccaccaccaactcctgtggataccaaccaatctggcccagacacgggcatagggccggcgaacactgtttttag

SEQ ID NO: 114093 - DNA, 1053 bp, synthetic construct
  misc_feature 1..1053: note = Description of Artificial Sequence: Synthetic coding sequence
  source 1..1053: mol_type = other DNA
atgtggacaatgtcctcttggacaatgaagatgatgcgctggaggcagcagctgggggagatgggcttgcgaccgcttcctaggcgtatgtcccgggccccaatgtccccaagtaccgcgctggcgttcgtgacctcttgcagtagccagtcttgcagtgggccgctgagtaccgttgccttaagcattcggcagaaagtggctgtgtttttcgggggtctgtccatcaagaaggacgaggaagtgctgaaaaaaaattgcccgcatatagtcgtcggcacacctggacgaatacttgctctggcccgcaataaatccctaaatttgaaacatataaaacatttcattctggacgagtgcgataaaatgcttgaacagctggatatgagacgcgacgtgcaagaaatttttcgcatgaccccccacgagaagcaggttatgatgttcagcgccactctatcaaaggagattaggcccgtgtgccgcaaattcatgcaggaccccatggagatctttgtagacgacgaaaccaagctgacactgcatggcctgcaacagtattacgttaagttgaaagataatgagaagaatcgaaagctattcgacctgctagatgtcctcgagtttaaccaagtcgtgatatttgtgaaatctgtacagagatgcatagcattggcgcagcttctggtggaacaaaacttccctgcaatcgcaatccatcgggggatgccccaagaggaacggcttagcagataccagcagtttaaagacttccagagaaggatcctggtggcaacaaacctgttcgggaggggcatggacatcgaacgcgttaatatagcctttaactatgacatgcctgaagattcagacacataccttcatcgtgtcgccagagccgggcgattcgggaccaagggtctggccatcacgttcgtgagcgatgaaaacgatgcgaagatcttgaacgacgtgcaggacaggtttgaggtcaacatcagcgaactgcctgacgagattgacattagctcttacattgagcaaactcgttag

SEQ ID NO: 114094 - DNA, 420 bp, synthetic construct
  misc_feature 1..420: note = Description of Artificial Sequence: Synthetic coding sequence
  source 1..420: mol_type = other DNA
atggctgagaacgatgtcgacaatgagctactggattacgaagacgatgaagtagagaccgccgccggtggcgatggggctgaggcacccgccaagaaagacgtcaaaggcagctacgtttctatccatagctccgggttcagggatttccttctgaaacccgaattacttagagccatcgtggattgcggcttcgagcaccctagcgaggtgcagcacgaatgtattccacaggccattcttgggatggatgtgctgtgccaggccaagagtggtatgggaaagacagccgtctttgtcttggccactctgcagcagctggaacccgtgacaggccaaagccatgaacatatgaccagtgtcactttagataacctaaccgccgtgggggatgttctttctcaggcttggggctcatag

SEQ ID NO: 114095 - DNA, 1332 bp, synthetic construct
  misc_feature 1..1332: note = Description of Artificial Sequence: Synthetic coding sequence
  source 1..1332: mol_type = other DNA
atggcagagaatgacgtcgataatgagttattagactacgaggatgatgaggtggagaccgccgctggaggcgatggagctgaagccccagccaaaaaagacgttaaggggtcttacgttagtatccatagctcaggattccgcgatttcctcctgaagccagagctgctgagagccattgtcgactgtgggtttgaacacccctccgaagttcaacacgagtgtataccacaggccattctagggatggatgtcctgtgccaggccaagagtgggatgggcaaaactgcagttttcgtactggcaaccttgcagcagctggagcccgtgactgggcaagtttacctcggcagagtgcttggccgcgggttctggtgtgtgtttgtgtcagttttggtcatgtgccacactcgggagcttgcgttccagatcagtaaagagtacgaacgcttcagtaaatacatgcccaatgtaaaggtggcagtcttttttgggggtctgtcgattaagaaggacgaggaggttttgaagaagaactgcccccacattgtggtgggaactcccggacgaattctcgccctggccaggaacaaatcacttaacctcaaacatatcaagcactttatcctggacgaatgtgataaaatgcttgagcagttagatatgcgcagagacgtgcaggaaattttcaggatgaccccgcatgaaaaacaggtgatgatgtttagtgctaccctgagcaaagaaatacgacccgtgtgtcgcaagttcatgcaggaccctatggagatcttcgtggacgatgaaacaaagttaaccctgcacggcctgcagcaatattacgttaagctgaaggataacgagaagaacaggaagctctttgacttgctcgacgtcctcgaatttaaccaagtggtgatcttcgtgaaatccgtccagcggtgtatcgccctggctcagcttcttgtcgagcagaacttccccgctatcgctattcaccgaggaatgcctcaggaggagagactgagccggtaccagcagttcaaggatttccagcgtcggatactcgtagccacaaatttattcggcagagggatggatatcgagagagtaaacatcgctttcaactacgacatgcctgaagatagtgatacgtaccttcatagggtggccagggctggcaggttcgggaccaagggccttgcaatcacttttgtgtcggatgagaatgatgccaagatacttaatgatgttcaggataggttcgaggtgaatatctcagagctgcctgatgagatcgatatatcctcttacatagagcagacacgatag

SEQ ID NO: 114096 - DNA, 972 bp, synthetic construct
  misc_feature 1..972: note = Description of Artificial Sequence: Synthetic coding sequence
  source 1..972: mol_type = other DNA
atggctgagaacgatgtggacaacgaactgttggattatgaagacgacgaagtggagaccgccgctggcggagacggtgccgaggctccggccaaaaaagacgtaaaaggcagttatgtctcaatccacagctctggttttcgagacttcttgcttaagccggagctgctgagagctatcgtcgactgcggctttgagcacccctccgaagtgcagcacgagtgcatcccccaggctattttagggatggacgtgctgtgccaggccaagtcggggatgggtaaaacagctgtttttgttctggcgaccctccaacagctagaaccagtaacaggacaggtctctgttcttgttatgtgccataccagagaattagcattccaaattagcaaggagtacgagcgcttctccaaatatatgcccaatgttaaagtggctgttttctttggtggtctctcaattaaaaaagacgaggaagtgcttaaaaagaactgtccccacattgtggtgggtaccccaggcaggatcctggcactggctaggaataagtctcttaatttgaaacacattaaacattttatcctggacgagtgcgacaagatgctagagcagctggatatgagaagggatgtccaggaaatctttcggatgacgcctcatgaaaagcaggtgatgatgttcagtgcaaccttgagtaaagaaatcaggccagtctgcagaaaatttatgcaggatcctatggaaatcttcgtggatgatgaaactaaactgacattgcacgggctgcaacagtactacgtgaaactcaaagacaatgaaaagaaccgcaagctttttgacctgctggacgtgttagaattcaatcaggagataacctgcaagtccgtgcagcgcttctccaccactaacagctgtggctaccagccaatctggccacggcacgggcatcgcgccggtgaacactgtttctag

SEQ ID NO: 114097 - DNA, 972 bp, synthetic construct
  misc_feature 1..972: note = Description of Artificial Sequence: Synthetic coding sequence
  source 1..972: mol_type = other DNA
atggccgagaacgacgtagacaatgaactgctagactacgaagatgacgaagtggagaccgccgctggtggcgacggcgcagaggcaccagctaagaaggatgtcaaaggatcatacgttagtatacattcgagcggctttagggacttcctccttaaacctgagctgctcagagcgatagtggattgcgggttcgaacacccctcagaagttcagcacgagtgtatccctcaggccattttaggtatggatgtcctgtgccaggccaagtcaggtatgggcaaaaccgcagtgttcgtgcttgctacactgcagcagctggaaccagttaccgggcaggtttcggttttagtaatgtgccacaccagagagctcgcgttccaaatctcaaaggagtacgaaagattttcgaagtacatgccaaatgtgaaagtggctgtattcttcggcgggcttagtataaaaaaggacgaggaggttttgaaaaagaattgcccacacatcgttgtgggtacccctggaaggatactcgcactggctcggaacaagagcctgaaccttaaacacatcaagcacttcatcctggatgagtgcgataaaatgttggagcagctggacatgagaagggatgttcaggaaatctttcgtatgacccctcatgaaaaacaggtaatgatgttttcggcaactctgtccaaggagatccgacctgtgtgcaggaaattcatgcaggaccccatggagatcttcgttgatgacgaaactaagctgacgttgcacggccttcaacagtactacgtgaaactcaaagataacgaaaaaaatagaaagttgttcgacctgttggacgtgcttgagttcaaccaggagatcacatgtaagtcagttcagcgattcagtaccactaatagctgtggatatcagcccatctggcctcgtcacggacatcgggctggcgagcattgtttttag

SEQ ID NO: 114098 - DNA, 1053 bp, synthetic construct
  misc_feature 1..1053: note = Description of Artificial Sequence: Synthetic coding sequence
  source 1..1053: mol_type = other DNA
atgtggaccatgtcctcatggacaatgaaaatgatgagatggcgacaacaactgggagaaatgggcctgagacccctgcccaggcgcatgagccgcgcacctatgagcccctctactgccctggctttcgtgactagctgttcaagccaatcatgcagcggacctcttagcaccgtggccctgagcatcaggcagaaggtggcagtattctttggcggcctctctattaagaaggacgaggaagttctgaagaaaaactgtccccatattgttgtgggaacccctggtaggatcctggccctagccagaaacaagagtctgaacctcaagcacattaagcacttcatcctggatgaatgcgacaagatgctagaacaactggatatgcgtcgcgacgtgcaggaaatttttcgcatgactcctcacgaaaagcaagtgatgatgtttagtgccactctttcaaaagagataagacctgtctgtaggaaattcatgcaggaccctatggagattttcgtcgatgacgaaaccaaactgacactgcacgggcttcaacagtattatgtgaagctgaaagacaacgagaaaaatcggaagttgtttgacctgctggatgttctggagtttaatcaagtggttatctttgtgaaatccgtgcagcggtgtatcgcgctcgcccagcttctggtggagcagaactttcctgccatcgctatccaccgagggatgcctcaggaagaacgcctgtcgaggtatcagcagttcaaagacttccaaagaagaattctagtcgccaccaatttgttcggccgagggatggacatcgagagggtgaatattgcctttaactatgatatgccagaggattccgacacatatcttcatagggtggcccgggctgggagattcgggaccaaaggcctggctatcacgtttgtatcagacgaaaatgacgctaagatacttaatgatgtgcaggacaggtttgaagtgaatatttccgagctacccgacgaaatcgacatttcgtcctacatcgaacaaaccaggtag

SEQ ID NO: 114099 - DNA, 420 bp, synthetic construct
  misc_feature 1..420: note = Description of Artificial Sequence: Synthetic coding sequence
  source 1..420: mol_type = other DNA
atggcagagaatgacgttgacaacgagctcctggattacgaagacgatgaagtcgagacggccgccgggggcgatggcgcagaggcccccgcgaagaaggatgtgaagggatcttatgtatccattcacagttctgggtttagggacttcctccttaagccggagctgcttagggccatcgttgattgcggattcgagcatccaagcgaagtccagcatgagtgcatcccccaagccatcctcgggatggatgtgctgtgtcaggcgaagagtggaatgggcaagactgctgttttcgtgcttgcaacactccagcaactggagccagtcaccggtcagagccacgagcacatgactagcgtgacgctggacaacctgaccgccgtgggggatgttctcagccaggcttggggaagctag

SEQ ID NO: 114100 - DNA, 1053 bp, synthetic construct
  misc_feature 1..1053: note = Description of Artificial Sequence: Synthetic coding sequence
  source 1..1053: mol_type = other DNA
atgtggacaatgtctagttggacgatgaagatgatgcgatggaggcaacagctcggcgagatgggactgcgtccgcttccacggcggatgtcacgtgctcctatgtccccctctactgctctggcctttgttacatcctgtagttcacagagctgtagcggcccattatctaccgtcgcactgtccattagacaaaaggtggcggtcttcttcggtgggctgtccataaagaaggacgaagaagtgttgaaaaagaattgtccgcatatcgtcgttggtacccctggacggattctggccctagctcgtaataaaagtttaaaccttaagcatataaaacacttcatcctggacgagtgtgataaaatgctggagcagctggacatgcgtcgggacgttcaagaaatattccgtatgacacctcacgagaagcaggtgatgatgttttcagccacactctcgaaggaaattcgcccggtctgtcggaagttcatgcaggacccaatggagatttttgtggatgatgaaactaagctcacccttcacgggctgcagcagtactacgtcaagctgaaagataacgagaagaatagaaagctgtttgacttactcgatgtgctggagtttaatcaggtggttatctttgtcaaatcggtgcagcgctgcatcgctttagcccagttactggtggaacagaacttcccagcgatcgcgatccatagaggcatgccacaggaagagcggcttagccgttaccagcagttcaaagatttccagaggcgcattttggtggcgaccaatctcttcggccggggaatggacattgagagggtgaatatcgctttcaactacgacatgcccgaagacagcgatacctatttgcacagagtggcacgggctggacgcttcggtaccaaaggactcgccatcacattcgtctccgacgagaacgacgccaaaatacttaatgacgtgcaggatcgcttcgaggtgaatatctccgagctgcctgacgaaatcgacatatcatcatatattgaacagaccaggtag

SEQ ID NO: 114101 - DNA, 420 bp, synthetic construct
  misc_feature 1..420: note = Description of Artificial Sequence: Synthetic coding sequence
  source 1..420: mol_type = other DNA
atggccgagaatgatgtcgacaatgagttgttggattatgaggatgatgaagtggagacggctgctggaggagacggtgctgaggccccagctaagaaagacgttaaaggctcttatgtgtcaatccattcttctgggtttcgtgactttctactaaaaccagaactgcttcgcgctattgtggattgcggctttgagcacccttctgaagtgcagcacgagtgtattcctcaagctatccttggtatggacgtactttgccaggccaagtctggaatggggaaaactgcagtcttcgtgctggccacactacagcagctagaacccgtgacgggacagagccacgagcacatgacatctgtaacactggacaatctgactgccgtaggagatgttctatcccaggcctggggctcttag

SEQ ID NO: 114102 - DNA, 1332 bp, synthetic construct
  misc_feature 1..1332: note = Description of Artificial Sequence: Synthetic coding sequence
  source 1..1332: mol_type = other DNA
atggccgagaacgacgtggacaatgagcttctagattacgaggacgatgaggttgaaactgccgcgggcggcgacggggcagaggccccagcgaagaaagacgtgaagggctcttatgtaagtatccacagctccggtttccgcgactttctgctgaagcctgagctccttcgcgccatcgttgattgtgggtttgagcatccctccgaagtgcagcacgagtgcatcccccaggctatccttggaatggacgttctgtgtcaagctaagtccggcatgggtaagacagctgtgttcgtcctggccaccctgcagcagctcgagccagtgaccgggcaggtgtaccttggccgggtactgggtcggggcttctggtgcgtgttcgttagtgtgctggtgatgtgccacacaagagagttggcgttccagattagcaaagagtacgagcgcttctcaaagtacatgccgaatgtgaaagttgctgtgtttttcggaggattatcaatcaagaaagatgaggaggtcctaaagaaaaattgtccgcatattgtggtgggaacgccaggccgcattctggccctagcccggaataaatccttgaacctgaagcatattaagcatttcattctcgacgaatgcgataagatgttagaacagttggacatgcggcgggatgtgcaggaaattttccgcatgaccccccatgaaaagcaggttatgatgttcagcgctactcttagcaaagaaatccgccccgtctgtcgaaaatttatgcaagaccccatggagatcttcgtcgatgacgaaacaaaacttaccctccatggattacagcagtattacgtcaagttgaaagataacgagaaaaataggaagctgttcgatctgctagatgtcctggagtttaaccaggtggtgatctttgtcaaaagtgtccaacggtgcatcgctcttgcgcagctgttagtggaacaaaatttccccgctattgccatccatcgtggaatgccacaagaagagcgattgagcaggtatcaacaatttaaggactttcagaggaggatcctagtagctactaacctattcggccgcggcatggatatcgaaagggtgaatattgcgttcaactatgatatgcctgaagactcagatacatacctgcatagggtggctagggccggtcgatttggaacaaaagggctggcgattacctttgtatccgacgaaaatgacgctaagatcctcaacgacgtgcaggacagatttgaggtgaacatatcggaactacccgacgaaattgacatttcaagttatatcgaacaaacaagatag

SEQ ID NO: 114103 - DNA, 552 bp, synthetic construct
  misc_feature 1..552: note = Description of Artificial Sequence: Synthetic coding sequence
  source 1..552: mol_type = other DNA
atggaaatctttgtggacgacgagactaaactgactttgcatggtctacagcagtactatgtcaagctcaaggataacgaaaagaataggaaactcttcgacctgctggatgtgctcgagttcaatcaggttgtgatttttgtgaagagcgttcagcgctgtatcgctttagcgcagctacttgtggaacagaattttcccgctatcgctatccaccgtggcatgccacaggaggagaggtggctgtctcggtatcagcagttcaaggattttcagaggaggatccttgtagccacaaatctgtttggaagagggatggatatcgagcgggtcaacattgcatttaattatgatatgcctgaagactccgacacttacctccatcgggtcgcacgggccggacggttcggcactaagggattggccataacctttgtaagcgatgaaaacgatgccaagatcttaaatgatgtgcaagacagatttgaggtaaacatctccgaactgccagatgagatcgacatctcctcatatatcgagcagacccggtag

SEQ ID NO: 114104 - DNA, 2073 bp, synthetic construct
  misc_feature 1..2073: note = Description of Artificial Sequence: Synthetic coding sequence
  source 1..2073: mol_type = other DNA
atgggggatgaggactgggaggccgagatcaatcctcatatgtcttcatacgtacctatttttgagaaagatagatacagcggcgagaacggcgacaattttaacaggacccccgcatcttcttcagagatggatgatggcccctctaggcgagatcactttatgaagtctggcttcgccagcggcagaaattttggcaatagggacgccggagagtgtaacaagcgggacaatacatcaaccatgggtggcttcggagtcgggaaatcattcggcaatcgcggattctcaaattctcgttttgaggatggcgacagctctggattttggcgagaaagctcgaacgattgcgaagataatcccacccgcaacagaggtttttccaaaagaggcgacaacgatctggacccagatgagtgtatgcagagaaccggaggcctctttggttcaagaaggcccgtgctgtccgggaccggcaacggggatacgtcacaatctaggtctggctcgggaagtgagcggggagggtacaaaggcctaaatgaggaggtgatcactggttcaggcaaaaatagctggaagagcgaagcggaaggaggtgagtcatccgatacccagggtcctaaagtgacttacattccacccccaccaccagaagacgaggacagtatttttgcacactatcagaccggtattaatttcgataagtacgacacaattctggtcgaagtgagtggtcacgacgcacctcccgccattctgacctttgaagaggcaaatttatgccagactctgaacaacaacatagccaaagccggttacaccaaactgaccccagttcagaaatactcaatacccattatcctcgccggaagagatctcatggcctgcgctcagacgggttccggcaagactgccgcctttttgctaccgatcctggcccacatgatgcacgacgggatcacagcatccagattcaaagaactgcaggaaccagagtgtatcattgttgcacctacgagggaattagtgaatcagatttatcttgaggcacggaagttttcattcggaacgtgcgtccgcgcagtggtgatttacggagggacacagctgggtcactccattagacagattgtgcagggatgcaacattctttgtgctacgcccggtcgcctgatggatatcatcggaaaagagaagattggtctgaaacaaattaaatatctcgtcctggacgaagcagataggatgttggacatgggattcggccccgaaatgaaaaagcttatctcatgccccgggatgccctccaaagagcagaggcagactcttatgttctcggccaccttcccggaggagatccagagactggcagccgagttcctgaaatctaactatctttttgtcgctgtcggacaggtgggaggtgcttgtcgcgacgtgcagcagactgtgctccaggtggggcaatttagtaagagggaaaaactggtggaaattctgcgaaatattggagatgagagaacaatggtgttcgtcgaaacaaaaaaaaaggccgacttcattgcgaccttcctttgccaagagaagataagtacaaccagtatccacggcgacagagaacagagagagcgcgagcaggccctcggtgatttccggtttggaaaatgtccagtgcttgtagccacatccgtggctgcaaggggcctagacattgaaaacgttcagcatgtcataaattttgacctgccatccacgatagacgaatacgttcaccggattggacggaccggaagatgcgggaacaccgggcgagctattagcttctttgacctcgagtctgataatcatttggctcagcctctggttaaagtactcactgatgcacagcaggatgttcccgcttggctggaggagatcgctttttcaacctatatcccgggattttccggctccacaaggggcaacgtctttgccagcgttgatacgcgtaagggcaaaagcaccctgaacaccgccggcttcagcagctcccaggcccctaatcccgtagacgatgagtcatgggattag

SEQ ID NO: 114105 - DNA, 2073 bp, synthetic construct
  misc_feature 1..2073: note = Description of Artificial Sequence: Synthetic coding sequence
  source 1..2073: mol_type = other DNA
atgggagatgaggattgggaagccgaaataaacccccatatgtctagttatgtccccatattcgaaaaggacaggtactccggcgagaatggggataactttaaccgcaccccggcatcctcctccgaaatggatgacggaccatcccggagggaccactttatgaaaagcgggttcgcttcgggacggaatttcggtaacagagatgctggtgaatgcaacaagcgagataacacatcaaccatggggggattcggagtaggcaagtcctttgggaacagagggttcagcaactctaggttcgaagatggtgacagttccggcttctggcgtgaatccagcaacgactgcgaggataaccctaccagaaaccgggggttttctaaaaggggcgacaacgacctggacccagacgagtgtatgcaaaggacagggggactttttggttctagaagacccgtgctgtcagggaccggcaacggggacaccagccagtcgaggtctggatccggatccgaacggggcgggtataaaggcctgaacgaggaggtcatcaccgggtcaggcaaaaattcttggaaatctgaggcagagggaggcgaatcctctgatacacagggccccaaggtcacttatatacccccccctcctcccgaggatgaggatagtatttttgcccattatcagacaggcatcaacttcgacaaatacgacaccatactcgtggaagttagtggtcatgacgccccacccgccatcctgacattcgaggaagcaaacctatgccagacactgaataacaacattgctaaggccggatacaccaagttaacccccgtgcagaagtatagcatcccaattatcttggctggccgggatctgatggcttgtgctcagaccggatctggaaagactgctgcctttctgcttcccattctggctcatatgatgcacgacggcataaccgccagcaggttcaaggagctgcaggagcctgaatgtatcattgttgccccaactagggaattggtgaaccagatctacctggaggcccgaaagttcagctttggcacgtgtgttagggccgtcgttatatatggcggtacacaattgggacatagcatcaggcagatcgtccagggctgcaacatcctgtgcgccaccccaggacggctgatggacattatcggcaaggaaaaaattggattaaaacagatcaagtacttagtactggacgaggccgatcgcatgctcgacatgggctttggcccagaaatgaagaagctcatttcgtgccccggcatgccatctaaggaacagcgtcagaccctgatgttctccgctacctttcctgaggagattcagagactggccgcggagttcctgaagtccaactatctgtttgtggcggtcggccaggtcggtggcgcctgccgagacgtgcaacagacagtactacaggtgggccagttctcgaagcgcgaaaagttggtggaaatcctgcggaacatcggcgatgaacgcactatggtcttcgtggaaactaaaaaaaaagccgactttatcgccacctttctgtgccaagaaaaaatatcaaccacgtccatacacggagaccgcgagcagcgtgagcgagagcaagctctaggagacttcaggtttgggaagtgccccgtccttgtggccacatctgtggccgcaaggggcctggacatcgaaaatgtgcagcatgtcattaactttgacctgccttccacaatcgatgagtatgtgcatcggattggaagaactggccgctgcgggaacactggaagggcaatttcatttttcgatctcgaaagcgataaccatctggctcagcctctggttaaagttctgaccgatgctcagcaggacgtgccagcttggcttgaagagatagctttctccacttatatcccaggattcagcgggtctacaaggggcaatgtgttcgcatcggtcgacaccagaaaaggcaagtccacattgaacacggcagggttttccagttcccaagctccaaatcctgtggatgatgagtcatgggattag

SEQ ID NO: 114106 - DNA, 2175 bp, synthetic construct
  misc_feature 1..2175: note = Description of Artificial Sequence: Synthetic coding sequence
  source 1..2175: mol_type = other DNA
atgggagatgaggattgggaagcagagataaatccgcatatgagcagctatgtacctatttttgagaaagacagatatagcggagagaacggcgacaattttaatcgcacccccgcctcgtcttccgagatggatgacggtccatcccgcagagatcactttatgaaatctgggttcgccagtggccggaactttggcaaccgagacgccggcgaatgcaataaacgggacaacacctcaactatgggtggcttcggtgttggtaagagtttcggcaacaggggtttctcaaacagccgcttcgaagacggggattcctcaggattctggcgcgagagttccaatgactgtgaggataatccgactagaaaccgcggattctctaaacggggcggctaccgagacggtaataacagcgaggcctctggcccctaccgcaggggtggccggggctcatttcgcggatgccggggagggttcgggttaggctctccaaataatgacctggacccagacgagtgcatgcaacgtaccggcgggctgtttgggagcaggcggcccgtgttatctggcaccgggaacggagatacaagtcagtctaggtctgggtctggctcagaaaggggtggctacaaagggctgaacgaggaggtcataacagggtccggtaaaaatagctggaaaagtgaggcagaaggaggagaatctagtgacacacagggccccaaggtgacctacattcccccaccaccaccagaagacgaagattctatctttgcccactatcagaccgggattaactttgataagtatgacaccattctagtcgaggtgtccgggcatgacgcccctcctgccatcctaaccttcgaagaggcgaatctctgccagaccctgaacaacaacatcgcaaaagcgggctatactaagcttacccctgttcagaagtattcaatccccattatcctggccggcagggacctaatggcctgcgcccagactgggtctggaaagactgccgcgttccttctgcctattctcgctcatatgatgcacgatggcatcaccgcttcccgttttaaagagctccaggaaccggaatgcattatcgtcgcaccgacccgcgagctcgttaaccagatctatctggaggcacggaagtttagcttcggcacctgcgtcagagctgtcgttatttatggaggcactcaactggggcattcaatccgccaaatagtacaagggtgtaacatcctgtgtgcgacacctggccgtctgatggatatcataggcaaagaaaaaattggcctaaaacaaattaaatatctggttcttgatgaggccgaccgcatgctagatatggggttcggccctgaaatgaaaaaactgatttcctgccctggtatgcccagcaaggaacaacggcagaccctgatgtttagcgcaaccttccccgaggagatccagcgcctagctgccgaattcctgaagtcaaactatttgttcgttgccgtgggccaggtcggcggggcctgtcgggacgtgcaacagaccgttttacaggtgggacagttctcaaaacgtgagaaactggttgagatattgcggaacatcggcgatgaaaggacgatggtttttgtggaaacaaagaaaaaagccgattttattgccactttcctgtgccaggaaaagatctctacaacgtccattcatggagacagagagcagagagagagagagcaggccttgggcgacttcagattcggcaaatgcccagtgctcgtcgccacaagcgttgctgcgcgcggtctggatatcgagaatgtacaacacgtgatcaacttcgacctaccctcaacaatagacgagtacgtgcacaggatcggccgtactggtagatgtgggaacacagggagagccattagtttctttgatctggaaagcgacaatcatctcgcacagccccttgttaaagtgttgaccgatgcacagcaagacgtgcctgcgtggctggaggagattgcatttagtacctacattcccggttttagcggatctacccgcgggaacgtgtttgctagcgtcgacacccggaagggaaagtccacattaaataccgccggtttcagcagcagtcaggctcctaaccccgtcgacgatgagagctgggactag

SEQ ID NO: 114107 - DNA, 318 bp, synthetic construct
  misc_feature 1..318: note = Description of Artificial Sequence: Synthetic coding sequence
  source 1..318: mol_type = other DNA
atgggcgacgaggactgggaggctgagattaatcctcacatgtcatcttatgtccctattttcgaaaaggataggtactccggagaaaacggggataacttcaaccgaactcccgcgtcctcctcggaaatggacgacgggccatcacgccgcgaccattttatgaaaagcgggtttgcatccggcaggaatttcgggaacagggatgcgggcgaatgcaataaacgggataatacatctaccatgggaggattcggcgttggtaagagtttcggaaatcgggggttctccaactcacggtttgaggacggagattag

SEQ ID NO: 114108 - DNA, 2115 bp, synthetic construct
  misc_feature 1..2115: note = Description of Artificial Sequence: Synthetic coding sequence
  source 1..2115: mol_type = other DNA
atgggcgacgaagactgggaagccgaaatcaatccccatatgagctcctacgtccctatcttcgagaaagaccggtacagtggagaaaacggcgacaattttaacagaaccccagcttcttctagcgaaatggatgacgggccatcccgccgggaccactttatgaaaagtgggtttgccagcggccggaattttggcaatcgagacgctggtgaatgtaacaaacgggacaatacgtcgactatggggggcttcggtgtgggcaagagcttcggtaatcgaggttttagcaattcacgtttcgaggacggagatagtagtggattctggcggggataccgcgatgggaataactccgaagcaagtggaccttataggcggggaggccggggcagttttcgaggctgtaggggagggtttggacttgggagccctaacaatgacctggacccggatgagtgtatgcagaggacggggggcctgttcgggtctcgaaggcccgtgctgtcaggcaccggcaatggtgatacaagccaatcacggtccggcagtggaagcgagaggggcggttacaaagggctgaacgaagaagtaattactggctccggaaaaaatagttggaagtccgaggctgaaggtggggaatcgtctgatacccaaggtccaaaagtcacatacattcctcctccgccgcctgaggacgaagactcgatttttgctcattatcaaaccggaatcaattttgacaaatacgataccatcctggtagaggtgtccggacacgatgctcccccagctattttgacatttgaggaagcaaatctgtgccagaccctgaacaacaatattgcaaaggccggctacactaaattaacccccgtgcaaaaatactctatccccattatcctggccggcagggacctcatggcctgtgcccaaacaggctccggcaagacagcagcctttcttctgcccatactggctcatatgatgcatgacggtattactgcgtctaggtttaaggaactgcaggaaccagaatgtattatcgtcgccccaacacgagaattggtgaatcagatttatttagaagcccgtaagttcagcttcggcacctgcgtgcgcgctgtggtcatttacggcggcactcagctcggtcattcaattcgtcaaattgtgcaggggtgtaatatcttgtgtgctactcccggccggctcatggatatcatcggaaaagaaaagattggcctgaaacagataaagtacctggttctcgatgaggctgatcggatgttggacatgggattcgggccagagatgaaaaagctgatctcctgccccggcatgccctctaaggagcagcgtcagaccttaatgttctcagccactttcccggaagaaatccagcgcttggcagcagagtttctgaagagcaactatctattcgtagccgtcgggcaggtgggcggggcgtgtcgagatgtgcaacagaccgtcctgcaggttggccaattttcaaagcgagaaaagctggtcgaaatcctgaggaacatcggggacgagaggaccatggttttcgtcgaaactaagaagaaggccgactttattgccacctttttgtgccaagagaagatttctacaacttctattcacggtgatcgggaacagagggaacgggaacaagccctcggcgatttcaggttcggtaaatgtccagttcttgtggccacgagcgtcgctgcaaggggactggacattgagaacgtccagcatgttataaattttgatctgcctagcaccatcgatgagtacgtccatcgaattggtagaactggcaggtgtggaaacacagggcgtgccattagtttcttcgacctcgagtccgacaatcatctggctcagccacttgtgaaggtgctgacggacgcccaacaggatgtgccagcctggctcgaagagatcgctttttccacttacatccctggtttctcgggttcaactcgaggcaacgtcttcgccagtgttgatacacgtaaagggaagagcactctgaataccgctggcttcagttcatcgcaggccccaaaccctgtagacgacgagtcctgggattag

SEQ ID NO: 114109 - DNA, 480 bp, synthetic construct
  misc_feature 1..480: note = Description of Artificial Sequence: Synthetic coding sequence
  source 1..480: mol_type = other DNA
atgggcgacgaagattgggaggctgagattaacccccatatgtccagctatgttcctatattcgagaaggaccggtattccggggagaacggtgacaattttaacaggacaccggcctcttcttctgagatggatgacggaccatccaggagagatcacttcatgaaatctggatttgctagcggccgcaacttcggcaacagagacgcaggcgagtgtaacaaacgagataatacgtccacgatgggtggttttggcgtgggcaagagcttcggtaaccgaggctttagtaactcaagatttgaggacggcgattccagtggtttctggagagaatctagtaacgactgcgaggataaccccactagaaatcgcggctttagcaagagaggcggttaccgtgacgggaataattcggaagcttcggggccataccggcggggcggccggggcagtttcagaggttgtcgggggggctag

SEQ ID NO: 114110 - DNA, 1728 bp, synthetic construct
  misc_feature 1..1728: note = Description of Artificial Sequence: Synthetic coding sequence
  source 1..1728: mol_type = other DNA
atggggagtagaaacctcttcctgacaaattctcccgaatccagcaacgactgtgaagacaacccaacccgcaatcgcggatttagcaagcgcggggataatgatctcgatcctgatgagtgtatgcagcgcaccggtggcctgtttgggtcacgcagaccagtgctctccggaactggcaatggagatacaagccagtcccgttctggctcaggtagcgaaagagattcatggaaaagcgaggcagaagggggtgagagcagtgacacacagggacctaaagtgacctacataccacctccaccccccgaagacgaagactcaatctttgcccactatcagacgggcatcaattttgataaatatgacacaattctcgtggaagtatcaggacacgacgctccccctgctattttgacattcgaggaggccaatttgtgccaaaccctcaataataatattgccaaggcaggttatactaaactgacaccagtgcagaagtactcaatacccatcattctagccgggcgggatctcatggcctgtgcccaaaccggctctggcaagacggctgccttccttctgccaatcctcgcccacatgatgcacgacggcattacagcatctaggttcaaagagctgcaggagccagaatgcataattgttgcgcctacaagggaattagtgaatcagatctatctagaggcccgcaagttttccttcggtacgtgcgttagagcggtcgtgatctatggcgggactcagctgggacactccatcaggcaaatcgtccagggttgtaacattttgtgtgcaacacctggtcggctcatggacattatcggcaaggaaaaaatcggcctaaagcagattaagtacctcgtgctcgacgaagctgaccggatgctggacatgggctttggccctgaaatgaaaaagttgatctcatgtccgggcatgccaagtaaggagcagcggcagactctgatgtttagcgccacctttcccgaggagatccagagactggctgctgagtttctgaaaagcaactatctcttcgtggccgtggggcaggtgggcggggcctgtcgagacgttcagcagacggtcttgcaggtaggtcaatttagcaagcgtgaaaaacttgtggagatcctgcgcaatatcggcgacgagagaacaatggtgttcgtagagacgaagaagaaagccgactttatcgcaacattcctctgtcaggaaaaaattagcacaacgagcattcacggagatcgtgaacagagggaacgggaacaggcgctgggagatttccgttttggcaaatgtccggtgttagtggccaccagtgtagcagcgcgagggctcgacatcgagaatgtgcagcatgtgattaacttcgatcttccaagtaccattgatgagtacgtccataggatcggccgcactggaagatgtgggaatactggaagggccatctcattctttgatttggaatccgataaccatttggcacagccactggtgaaagtgctgacagacgcccagcaggacgtgcccgcttggctagaggagatcgcgttttctacttatataccaggcttcagtggttctaccaggggcaatgttttcgctagtgttgacaccaggaaaggcaagagtactctgaacaccgctgggttcagttccagccaggcaccgaaccccgtggatgatgaaagttgggattag

SEQ ID NO: 114111 - DNA, 1869 bp, synthetic construct
  misc_feature 1..1869: note = Description of Artificial Sequence: Synthetic coding sequence
  source 1..1869: mol_type = other DNA
atggaagaatccgagcccgaaaggaaacgtgctaggacagacgaagtgccggctggcggttcaaggtcggaggcggaagatgaggacgacgaggattatgtgccatatgtgccactgcgacagcgtcgccagcttctactacaaaagttacttcagcgccgacggaaaggcgctgctgaagaggagcaacaggactcgggcagtgagccccggggcgatgaggatgatataccacttggacctcagtcaaatgtatctctcctggaccaacaccagcacctgaaggaaaaagccgaggccagaaaagaaagcgctaaagagaagcaattgaaggaagaagagaagattctggagagcgtggctgaagggagggccctgatgtcggtcaaggaaatggcaaagggcatcacgtatgacgaccccattaaaacatcatggactcctcctagatacgtgctctctatgagcgaggaaagacatgaacgggtgcgaaagaagtaccacattctggtagagggcgacggcattccaccccctatcaaatcctttaaagaaatgaaattccctgcggccattctcagggggcttaagaaaaaaggcatccaccatccgactcctattcagatacagggcatccccacaatcctgagtggccgcgacatgatcggcatcgcattcaccgggagcggaaaaacgctggtgttcacgctaccagtcatcatgttttgcctggagcaggagaaacgactccccttttctaaaagggagggcccatatggcttgattatttgcccaagtcgggagcttgcccggcaaacacatggcatccttgaatactactgtcggctcttgcaggaggattccagtcccctgttgagatgcgcactgtgcatcggcggtatgagtgtgaaggagcaaatggagacgatcagacatggggtccacatgatggtcgccactccagggaggctgatggacctcctacagaaaaagatggtctcactagatatctgtcgctacctggcactggatgaggccgataggatgattgatatggggttcgagggcgacataaggacaatctttagctactttaagggtcagcggcagactcttttattttccgccaccatgccgaaaaagattcaaaatttcgccaaatcagctctggttaagccagtgacaataaacgtcggacgggccggggcagcatctctggacgtaattcaggaagtagagtatgtcaaggaagaagcaaaaatggtatacctgctggaatgtttacagaaaacacctcctccagtcctgatctttgctgagaaaaaagcagatgtggacgcaatacatgagtatttgttgttgaaaggcgtggaggctgtcgccattcatggcggtaaagaccaggaggagcggactaaagccattgaggcctttcgagagggcaagaaggatgtgcttgtagctaccgacgtggcgtctaaaggtttggatttcccggcaattcagcacgtgatcaactacgatatgccggaggagatcgagaactacgtacaccggattggacgcacaggaaggagcggaaatactggcattgcgacgacatttataaacaaggcgtgtgacgaaagcgtcttgatggatttgaaagcccttctgctcgaggcaaagcagaaggtgccaccagtattgcaggttttgcattgtggggatgaaagtatgctggatatcgggggcgagagggggtgtgccttttgtggcggtcttggacacagaatcacggattgtcccaagctggaagctatgcagacaaagcaggtgtcaaacatcgggagaaaggactacttggcccattcctctatggacttctag

SEQ ID NO: 114112 - DNA, 1881 bp, synthetic construct
  misc_feature 1..1881: note = Description of Artificial Sequence: Synthetic coding sequence
  source 1..1881: mol_type = other DNA
atgcatcaaatcagaaagagtgagtatacccaacccactcctattcagtgtcagggagttccagtggccctgtcgggtagagatatgataggaatagccaaaaccgggagcgggaagactgcagcttttatttggcccatgctcattcacatcatggatcagaaggaattggaaccaggagatggccccatcgcggttatcgtctgtcctacacgcgaactgtgtcagcagattcatgcagaatgcaagaggttcggaaaagcatacaacctacgctcagtggccgtgtacggcgggggtagtatgtgggagcaggctaaggctctgcaggaaggggccgaaatcgtggtatgtacccctggcaggttgatcgaccatgtgaaaaagaaagcaaccaacctgcagagggtgagctaccttgttttcgatgaagcagacagaatgttcgacatggggtttgaataccaggtgcgttccattgcctctcacgttaggcctgaccggcaaaccctgctgtttagtgcgacctttcgcaaaaagatcgagaagttggctcgtgatatactgattgacccaatcagagtagtacagggagatattggggaagccaacgaggacgtaactcagatagttgagattctccactcgggaccttcaaagtggaactggctgacccggcgcttggtcgagttcacctcatcgggttcagtcctgctctttgtcacgaaaaaagcgaacgctgaagagttagcaaacaatctcaaacaagagggtcacaacctggggctgcttcatggagacatggatcagagcgagaggaacaaggtgatttcagattttaagaaaaaggatatacctgttctcgttgccactgatgttgccgcccgcgggctggacatcccgtccatcaagacggtgatcaattatgatgtcgctcgggatatcgacactctcctgacgcctaaggatagcaattttgcaggcgacctggtgcggaatctggagggggctaaccaacacgtgtctaaggaactgctggatctggccatgcagaacgcctggttccgcaagtcacgtttcaagggcggcaagggcaagaagctcaacattggggggggcggattagggtacagggagcggcctgggctgggctctgagaatatggatagaggtaataacaatgtcatgagtaattatgaagcctacaaacccagcacaggagccatgggcgatagactgaccgcaatgaaagccgcttttcagtcccagtataaaagccacttcgtggcagcatctctgagtaatcagaaagctggctcttccgcggccggcgcaagtggatggacctctgccgggagcctgaattcagtgcctacaaactctgcccaacaggggcacaattctcccgactcacctgtcacttcagccgccaaggggatacccggctttggcaacaccggcaatatttcaggagctccagtaacgtacccaagtgcaggtgcacagggcgtaaacaatacagccagcggcaataattctcgcgaaggcacgggaggcagtaacggaaagcgcgagcgctataccgaaaaccgaggatcctcccgccattcgcacggcgagacaggaaaccggcattcagattcgcctcggcacggcgacggggggagacacggcgacgggtacagacatccagaatcgagcagtcgacatacagatggccatcgacatggagagaaccgtcacggcggtagtgctggacgtcatggcgaaaatcggggcgcaaacgacggtcgaaatggagagtctagaaaagaagccttcaaccgcgaatccaagatggaaccaccgcccaaacggaaaaagagccggtgggatagctag

SEQ ID NO: 114113 - DNA, 2817 bp, synthetic construct
  misc_feature 1..2817: note = Description of Artificial Sequence: Synthetic coding sequence
  source 1..2817: mol_type = other DNA
atgaattggaacaaaggcggccccggtactaaaagggggttcggcttcggcgggtttgctatctctgccggcaaaaaggaagaacctaaactgccccagcagagccactccgcatttggcgctacgagcagctcaagcggattcggaaagtcggctcccccacagctcccttctttctataagatcggttccaagcgcgctaattttgacgaggaaaacgcctacttcgaagacgaggaagaggactctagcaatgtggatctgccgtatatcccagcagaaaatagccctacccggcagcagttccacagtaagccagtagattccgattccgatgatgacccccttgaggcctttatggcagaggtggaggatcaggccgcccgcgatatgaaaagactcgaggagaaagacaaagaacggaagaacgtaaaggggatcagagatgacattgaggaagaggatgatcaggaggcatattttcggtatatggctgagaatccaaccgcgggggtggtacaggaagaggaagaggacaatttagagtacgacagtgatggcaatcctatcgctcctacaaagaagattatcgaccccctgcccccaatcgatcattccgagatcgattacccacctttcgaaaagaatttctacaatgagcatgaagagataaccaatctgaccccacagcagttaatcgacctacgccataagctcaatctgcgggtctctggcgcggcccccccccgccctggatcatccttcgcgcacttcggattcgatgagcagttaatgcatcagattaggaagtccgaatacactcaaccaacccccattcagtgtcagggcgtaccagtcgccctcagcggccgggacatgatagggatcgctaaaaccggctcaggtaaaaccgcagcgttcatctggccaatgctcatacacataatggatcagaaggagctggagccgggagacggccctattgcagtaattgtgtgtccaactcgggagctgtgccagcaaattcacgcagagtgtaagcgcttcggcaaggcttataatctccggagtgtcgctgtgtatggcggtgggtcaatgtgggaacaggcgaaggccttgcaggagggggcagagatcgtggtctgcacacccggacgcctgatagaccacgtaaaaaaaaaggcaactaatctgcagagagtctcatacttggtttttgatgaagcagatcggatgtttgatatgggctttgaatatcaagtccgttcaatagcaagccacgtaaggccagacagacagacactcctatttagtgcaacattcaggaaaaagatcgaaaagctggcacgggatatcctaatcgacccaattcgcgttgtccagggcgacattggggaggcgaacgaggatgttacccagatagtggagatacttcacagtggtcctagcaagtggaattggcttacccgccgtctggtggaatttacaagctccgggtcagtattgctgtttgtcacaaaaaaagcgaatgccgaggagctcgccaacaacctaaagcaagagggccataaccttgggttgttacatggagatatggaccaatctgagcgcaacaaagtcatctctgacttcaagaaaaaagacattccggtgctggtggctactgacgtggctgcccggggtctcgacatccccagtatcaagactgttatcaactacgacgtggcgagagatatcgacacacatacccatcgaatcggccgcactggtcgcgcaggcgagaagggggtggcttacacacttttgactcccaaagacagcaacttcgcaggagacctggtgcggaatctcgagggagctaatcagcatgtttcaaaggagctgctcgacctggccatgcagaacgcgtggttcaggaaaagccgttttaaaggcggcaagggcaaaaaactcaatatcgggggtggaggactggggtatagagaacgtcctggactcgggtccgagaacatggataggggtaataataacgttatgtcaaactacgaagcctacaagccctcgaccggagccatgggggacaggttaaccgctatgaaggcagctttccaaagccaatacaagagccatttcgtggctgcaagcctctcaaatcagaaggccgggtccagcgctgccggtgcatcagggtggacttctgccggtagcctgaattccgtgcccaccaattctgctcagcaaggacataattctccggacagccccgtaacgagcgccgccaagggaattcctggcttcgggaacacaggtaatatctctggtgctcccgtcacatatccaagcgccggagctcagggtgtgaacaacacagccagcggcaacaattcccgcgagggcaccggcggtagcaacggcaagcgggagagatatacagagaatcgtggcagctctaggcatagccatggcgagactggcaatcggcatagcgacagcccaaggcatggggatggtggcaggcatggagatgggtataggcatcccgagagcagctcgagacacaccgacggccatcggcatggagaaaatcggcacgggggcagtgctgggcgccacggcgagaacagaggggcaaatgatggacgcaacggtgaatccagaaaggaggccttcaacagggaatccaaaatggaaccgaaaatggagccaaaggtggattctagcaaaatggataaagttgacagtaaaacagataagacggcggacggattcgccgtgcccgaaccgcccaagaggaagaagtctcggtgggactcatag

SEQ ID NO: 114114 - DNA, 2817 bp, synthetic construct
  misc_feature 1..2817: note = Description of Artificial Sequence: Synthetic coding sequence
  source 1..2817: mol_type = other DNA
atgaattggaacaaggggggacccggtaccaagcggggcttcggatttgggggattcgccattagcgcaggaaagaaggaggaacctaaactcccccagcagtcacactccgcatttggcgcgaccagtagctccagcggcttcggcaagtctgcccctccacagttgccctccttctacaaaatcgggtccaaacgcgccaactttgatgaggaaaatgcttactttgaggacgaagaagaggactcaagcaacgtggacctgccttatattcctgccgaaaatagcccgaccaggcaacaattccatagtaaacctgttgactcagacagtgatgatgatccgttagaggcgttcatggccgaggtcgaagatcaggcagccagggacatgaaacggctcgaggagaaggacaaggagcggaagaacgtcaaagggatccgagacgatattgaagaggaggatgatcaagaggcttactttcggtacatggctgaaaatcctactgctggtgttgtgcaggaggaagaggaagacaatctggagtacgactccgatggcaaccccatagctccaacaaagaagataatcgaccccctccccccaatcgaccactccgagatcgactaccccccctttgagaaaaatttctataacgaacatgaggagatcacaaatttgaccccacagcagctaatcgacctgcggcacaaactgaacttgagagtgtccggtgccgctccaccaaggcctgggtcctcgttcgcccactttgggttcgatgagcagctgatgcaccagattaggaagagtgagtacactcagcctacacccatacagtgccagggagttcccgtcgctttatccggtagggatatgattggcattgcaaaaacaggaagcggtaaaactgccgcattcatctggccgatgttaatccacatcatggaccagaaggagctcgagcccggggatggcccaatcgccgtaatcgtgtgtccgacacgggagctttgccagcagatccatgcggagtgtaaaagattcgggaaggcttacaatctgcgaagtgtggcagtgtacgggggcggaagtatgtgggagcaagccaaagccctgcaggagggcgccgaaatcgtagtttgcacccctggcagattaatcgatcatgttaagaagaaggcgaccaatctgcagagagtctcctacctggtgttcgacgaggccgacaggatgttcgatatgggtttcgagtaccaagtgcgatcgattgcgtctcacgtgcggccagaccgtcaaaccctgctgttctcagctaccttccggaagaagattgaaaagctggcaagagacatcctcatcgacccaatccgggtcgtgcagggagacatcggagaggccaacgaggatgtgacccagattgttgaaatcctccatagcggtcccagcaagtggaactggctcaccagacggctggtcgagttcactagctccgggtctgttctgctgttcgtgaccaagaaggcgaacgcagaggagcttgctaacaacttaaaacaagagggacacaatctgggcctgttacacggagatatggaccagtccgagagaaacaaagtgatcagcgattttaagaaaaaagacatccccgtactagtggcaacggatgttgcagctagaggcctggacattccatctatcaaaactgtgattaactacgatgtagcccgggatatcgatacacacactcatcgaattgggcggaccggtcgtgcgggcgagaaaggtgttgcctatacacttctcaccccgaaagattcaaacttcgccggagacttggtacgtaatctggaaggtgccaaccagcacgtgagtaaagagctgttggacttggctatgcagaacgcttggtttcggaagagtaggttcaaaggggggaagggcaagaagctgaatattggcggcgggggcctgggctaccgtgaaaggcccggactgggttccgaaaacatggatagagggaataataacgtgatgagtaactacgaagcttataagccttccaccggagcgatgggggatagactcaccgccatgaaagccgcgttccaatcccaatataaatctcatttcgtggcagcttctctaagcaaccagaaggccgggagtagtgctgccggtgccagcggttggacttctgccggctccctgaattcagtccctacgaactcagctcagcaaggacacaattcccccgattcacccgttacgagcgctgccaaaggcatccccggcttcggtaacactggtaacatttctggcgccccagtaacctacccctcagcaggggctcagggggtaaacaacacagcaagcggaaataattctcgcgaggggaccggggggtctaacggcaaaagggagcgctacactgaaaaccgcggatcctccaggcactctcacggcgagacagggaatcggcatagcgactcccccagacatggcgatggcggacgacacggagatggatatcgccaccccgaatctagtagccgacacacggatgggcaccgccacggcgagaaccgccatgggggcagcgcgggcaggcacggtgagaaccggggtgccaacgacggtaggaacggcgagtccagaaaggaggcattcaacagagaatccaagatggagcctaagatggagccaaaggtggactcgtcaaagatggacaaggtagattcaaagactgataaaacagcagacggattcgccgttcctgaaccccctaagcggaaaaagtcgaggtgggattcttag

SEQ ID NO: 114115 - DNA, 2817 bp, synthetic construct
  misc_feature 1..2817: note = Description of Artificial Sequence: Synthetic coding sequence
  source 1..2817: mol_type = other DNA
atgaactggaataaaggcggacctggcacaaaaagaggcttcggattcggaggcttcgctatcagtgcaggtaagaaagaagaacctaaactcccccagcaatcgcattccgcttttggggctacctcatcaagtagtggcttcggtaaatccgcccccccacaactgccctcattttataaaatcggctccaaacgtgcaaattttgatgaggagaatgcgtatttcgaggatgaagaggaagatagcagtaatgtcgatctgccttacatacctgcagaaaattcccctacgagacaacagtttcatagcaagcccgtcgacagtgattccgacgacgatcctctggaggcattcatggcagaagtcgaggatcaggccgctcgggacatgaagagattggaggagaaggacaaggaacgcaaaaacgtgaagggcatacgagatgatattgaagaggaagatgatcaggaggcttatttcaggtatatggcagagaatcccaccgccggtgtggtgcaggaggaggaggaagataacctggagtatgatagcgatggaaaccctattgcccccactaagaaaatcatcgatccgttaccgcctatagaccacagcgagatcgactaccctccctttgagaaaaatttttataacgagcacgaggaaatcaccaatctgacaccccagcagctgatcgacttacgacacaagctgaatctaagagtaagcggggcagccccccctcggcccggcagcagtttcgcacactttggatttgatgagcagctcatgcatcagattcgcaaaagcgaatatactcaacctacccctattcagtgccaaggggttccggtggccttgtcaggccgcgacatgatcggtatcgcaaagacagggtcagggaaaaccgctgctttcatctggcctatgttaatccacataatggaccaaaaggaactcgaaccaggggatgggcctattgctgtgatcgtctgccccacgagggagctgtgccagcagatccatgcagagtgtaagaggtttggaaaagcctacaacctgaggtccgtggctgtgtatggaggaggcagcatgtgggaacaggcaaaagccctccaggaaggagccgagatcgtagtctgtacccccggccgcctcatcgaccacgtcaaaaagaaggccaccaacctgcaaagagtgagttaccttgtcttcgatgaggcagatagaatgtttgatatgggcttcgaatatcaggtgagaagcattgcctcccatgttcgaccagatcgacagactctgctcttttcagccaccttcaggaagaagatagagaaactggcccgcgacatcctcattgatcctattagggtggtgcagggtgacataggggaggctaacgaggatgtcacccagatcgtcgagattttgcacagtgggcctagcaagtggaactggttgactcggcggctcgttgagttcaccagtagtgggtcagttctgctgttcgtcactaaaaaggccaacgccgaggagctggccaacaatttgaagcaggagggccacaaccttgggttgctgcacggagatatggaccagtctgagcgaaacaaagtgatctcagactttaagaagaaagacatccctgtgctcgtggcaaccgatgtcgctgcaagggggctcgacatcccctctattaagacagtcatcaactacgacgtggctcgggatatagatacacatactcatcgcataggacgcacaggacgggctggggagaaaggggtcgcctacacactgctgactccaaaagactccaatttcgccggagatcttgtgcgcaatctggaaggcgctaatcagcacgttagtaaagagttactggacttggccatgcagaacgcctggttccgcaaatcaaggttcaaggggggaaagggcaagaagttgaacattggcggaggcgggctcgggtatagagaaagacccggattggggtctgagaacatggaccgcgggaacaataacgtgatgtctaactacgaagcatacaagccttctaccggtgcaatgggcgaccgtcttactgcaatgaaagccgccttccagtcccagtacaaaagccactttgtggccgcaagtctgagcaatcagaaagccggcagcagcgctgcaggcgccagcggctggaccagcgcaggatccctgaatagtgtccccacaaattccgcgcagcagggacacaactccccagatagccctgtgactagtgctgcgaaaggcatccctgggttcggcaatactggcaatatatctggggcaccagttacctacccctcagccggcgcccagggtgtcaacaataccgcaagtggcaataatagccgtgaaggcacgggtggatcaaacggcaagcgggaacgctatacagaaaatcgggggagctccaggcattctcatggggaaacaggcaatcggcatagcgattcccctcgtcacggggatggtggccgtcacggagatggatatcgccatccagagagctcctcccgccacacagacggccaccggcatggtgagaatcgacacggcggatctgccggtcggcacggcgagaaccggggcgccaatgacggaaggaatggtgagtcaagaaaggaggcgttcaacagagagtccaaaatggagcccaagatggaacctaaagtcgacagttcaaaaatggataaagtggacagcaagaccgacaagacagctgacgggtttgctgtacctgagcctccgaaacgcaagaagtcacgatgggactcttag

SEQ ID NO: 114116 - DNA, 2817 bp, synthetic construct
  misc_feature 1..2817: note = Description of Artificial Sequence: Synthetic coding sequence
  source 1..2817: mol_type = other DNA
atgaactggaataaggggggaccgggaacaaaacgaggttttggttttggaggattcgctatctccgcaggtaagaaggaagagcctaagttgcctcagcagtcacattcagcttttggcgctacatcttcctccagtggcttcggcaagtctgcaccgccccaactccccagcttttacaagatcgggagtaagcgggctaacttcgatgaggaaaacgcatactttgaagatgaagaggaggactcatctaacgtagatcttccgtatatccctgccgagaacagcccaaccagacaacagtttcacagtaagcctgttgactctgattccgacgacgatccactggaggccttcatggcagaggttgaggaccaagcagcaagggatatgaagcgcctcgaggaaaaggataaagaacggaaaaatgtgaaggggatcagagatgatatcgaggaagaggacgatcaggaagcctattttcgctatatggcagagaatcccaccgcgggggtagtccaggaggaggaagaagacaacttagaatacgattcagacggtaacccgattgcacccacaaaaaaaattattgatcctttgcccccaatcgaccactccgagatcgattacccacctttcgagaagaatttctataatgaacatgaggagataaccaacttaaccccccagcagctgatagatcttaggcataaactgaacctgcgggtgtcaggggctgccccacccagacccggctctagctttgcccatttcggattcgacgaacagctcatgcaccagatccggaaatccgaatatacccaacccactcccatacagtgtcagggtgtacccgtcgcgctcagtggcagggacatgattggaattgccaaaacaggtagcggcaagaccgccgcttttatctggcccatgctgattcatatcatggaccagaaggagctcgaacctggggatggcccaatcgccgtgatagtctgccctaccagggaactatgccagcagatacacgctgaatgcaaacgattcggcaaagcatacaacctacgtagtgtggccgtgtacggagggggatctatgtgggagcaggccaaagctttgcaagagggggccgaaattgtggtctgtacgcccgggaggctgattgatcacgtaaagaagaaggcaactaacctccagcgagtgtcatatctggtttttgatgaggcggacaggatgttcgatatggggttcgagtatcaggtgaggtcgatcgcatctcatgtgcgtccggacagacagaccctgctgtttagcgctacctttcgcaagaagatcgagaagctagctagggacattctgatcgaccccatccgtgtcgttcagggagacattggcgaggccaatgaggacgtcacccagatagttgaaatcttgcactccggaccctccaagtggaactggttgacaaggcggctcgtggaattcactagcagcgggagtgtcctgctgttcgtgacgaagaaagctaacgctgaggagctcgcgaataatctgaaacaggaaggtcacaatttgggcctcctccacggtgatatggatcagagcgagcgcaacaaagtgatttccgactttaaaaagaaggacattcccgtgctcgtggctacagacgtggctgcccgcggcctggacatcccatccattaagacggttattaactatgacgtcgctagggatatcgatacccacacccatcgcattggcagaacgggtcgggcgggggaaaagggtgttgcctatactctcctgactcccaaggattccaacttcgcgggggaccttgttagaaatctcgagggggctaaccagcacgtgtcgaaggagctgctggatctagccatgcagaatgcctggtttcgaaagtccagattcaagggcggcaagggcaagaagctcaacatcggcgggggggggctgggctaccgtgagaggccgggcttgggaagcgagaatatggaccggggcaacaataacgtgatgtctaattacgaagcttataagccctccacgggagccatgggtgataggctaacagccatgaaagctgcgttccagtcccagtataaatctcactttgtcgccgcctcgctctctaaccagaaagccggatcctccgccgcaggagcatctggttggacatcagccggctcattaaatagcgtgcctacgaactccgctcagcagggtcacaattctcctgattcccccgttacatctgccgctaaggggatcccaggcttcgggaatacagggaacatatcaggagcccccgtcacctaccctagcgctggcgcccaaggcgttaataataccgcctccggtaacaattctagagagggtaccggagggtctaatgggaaaagggaaagatacactgagaacagaggaagtagccgacattcccacggcgagaccgggaatcggcactcagactcccctcggcacggtgatggtggaagacacggagacggttatcgacacccagagtctagctcccggcatactgatggacaccgccatggggaaaaccgccatggtggttctgctggcagacacggggaaaaccgcggcgccaacgatggtcggaatggagaatcacggaaggaggcttttaatcgggagagtaagatggagccaaagatggagccgaaagtcgacagcagtaaaatggacaaagtcgattcgaagaccgataagaccgctgacggattcgctgtgcccgaaccccccaagagaaagaagagcaggtgggactcttag

SEQ ID NO: 114117 - DNA, 1947 bp, synthetic construct
  misc_feature 1..1947: note = Description of Artificial Sequence: Synthetic coding sequence
  source 1..1947: mol_type = other DNA
atgtcgcatcatgggggagcgcccaaggccagtacttgggtagtggccagcagacggagtagcaccgtgtctcgggcacccgagcggagaccagccgaagaactgaatcgaactggacctgagggttattccgtgggaagaggcggcaggtggagaggaacgtccaggccacctgaagctgtggctgccggacacgaagagctcccactgtgcttcgcacttaagtcccactttgtgggtgccgtcatcggaaggggcggaagtaagatcaagaacattcagagtacgacaaataccaccattcagatcattcaggaacagcctgaatctttggttaaaattttcggctctaaagcaatgcagaccaaagcgaaggcggtcatcgacaactttgtgaagaagttagaggaaaactataattccgaatgtggaattgacacagcttttcagcccagcgtcggtaaagacgggtcaaccgacaacaacgtagtggccggagaccggccactcattgactgggatcaaatccgggaggaaggcttgaaatggcagaagaccaaatgggccgatcttccacccatcaaaaagaacttttacaaagaaagcacagccacgagcgccatgtctaaggtggaggctgactcctggagaaaggaaaactttaatatcacttgggatgatctgaaggacggggagaaaagacctataccaaacccaacctgcacatttgacgatgccttccagtgctacccagaagtgatggagaacattaagaaggcaggattccagaaacctactcccatccagtcccaggcatggcctattgtgctgcagggcatcgatctgattggcgttgcccagaccgggacaggaaaaactctgtgctatctgatgcctggcttcatccacctcgttctgcagccttcgctcaagggtcagcgcaatcgacccggcatgctggttctgacgccaactagggagctggctctgcaggtggagggggagtgctgtaaatacagttacaagggcctgaggtccgtgtgtgtatatggcggcggaaatcgagacgaacagattgaagagctcaaaaagggtgttgacatcattatcgctactccgggccgcctgaacgacctgcagatgtctaacttcgtgaatcttaaaaatataacatacctagtgctggatgaggccgacaagatgctggacatgggctttgagccccaaattatgaaaattctccttgatgtgcgcccagaccgccagacagtgatgacctcggccacctggccccactctgttcatcggctggcacagtcttatctaaaggagcccatgatcgtatatgttggaaccctggacttagtggctgtcagttcagtaaagcagaatatcatagtcaccactgaagaagagaaatggtcacacatgcaaacattcctgcagagtatgtccagcacagataaggttattgttttcgtcagcagaaaggccgttgccgatcatctatcaagcgacctcatcttgggcaatatctccgtcgagagtcttcacggggaccgcgagcaaagggaccgagagaaggctctagaaaactttaagactggaaaggtgaggatcttgatcgcaactgaccttgcatcaagaggacttgatgtccacgatgtcactcacgtgtataatttcgattttccgcggaatatcgaggagtacgtgcacagaattggacggaccggtagggcagggcgaacaggagtgtctatcactacactgactagaaatgattggcgggtggcatcagagcttatcaatatccttgaaagagctaaccagtctatacccgaggaactcgtgtcaatggcggaaagattcaaggctcatcagcagaagagggaaatggagcgcaagatggaaaggccccaaggccgtcctaagaagtttcattag

SEQ ID NO: 114118 - DNA, 588 bp, synthetic construct
  misc_feature 1..588: note = Description of Artificial Sequence: Synthetic coding sequence
  source 1..588: mol_type = other DNA
atgtcccaccacggcggggccccaaaagcgtccacgtgggtagttgcttctcggcggtcatctactgtgagccgcgctccagaaagaagacccgctgaggagctgaatagaacagggcctgagggatactcggtcggccgaggtggtcggtggagaggtacttctaggccccccgaggcagtggccgccggccatgaagaactgcctctgtgtttcgcccttaaatcacactttgtaggagccgtcattggccggggtgggtctaagatcaagaacattcagtccaccactaacacaacaatccagatcatccaggaacagcctgagagccttgtaaagatctttggcagcaaggccatgcagactaaggcaaaggcagtgatcgacaactttgttaagaaactggaagagaactataattctgagtgcggtattgacactgccttccaaccctcggtagggaaagatggctccaccgacaataatgttgtcgccggggatcgaccactgatagattgggaccagataagggaggagggactaaaatggcagaaaacaaaatgggccggaaaaaagatcctgatttag

SEQ ID NO: 114119 - DNA, 675 bp, synthetic construct
  misc_feature 1..675: note = Description of Artificial Sequence: Synthetic coding sequence
  source 1..675: mol_type = other DNA
atggagagcggtgcatacggagctgcgaaagcagggggatcctttgacttgcgtagattcctgactcagccgcaggtggttgctagagccgtttgcttagttttcgcattgatagttttcagctgcatctacggcgaggggtactctaacgctcacgaatccaaacagatgtattgcgtcttcaacaggaacgaggacgcctgtaggtatgggtccgctattggcgtacttgcctttctggcgtcagctttttttttagttgtcgatgcctatttccctcagattagcaatgccacggatagaaagtacctggtgatcggcgatctactgttcagtgcactgtggacatttttatggtttgtcgggttttgcttccttacgaaccagtgggccgtgacaaaccccaaggatgtcctcgtgggcgccgatagcgtgcgcgctgcaatcacattttcatttttttcaatcttctcgtggggggtccttgcctccttagcctatcagaggtacaaggcaggagtggatgatttcattcagaattacgttgatccgacgcctgatccaaatactgcttacgcctcataccctggtgcgtctgttgacaactaccagcagcctccctttacgcagaatgcagaaactaccgaaggatatcagccacccccggtgtattag

SEQ ID NO: 114120 - DNA, 1635 bp, synthetic construct
  misc_feature 1..1635: note = Description of Artificial Sequence: Synthetic coding sequence
  source 1..1635: mol_type = other DNA
atgagcggatatagctccgaccgggaccggggccgggaccgcggtttcggcgcccctagattcggcggctcgcgcgccggccctctatccggcaaaaaattcggcaatcccggcgaaaagctggtgaaaaaaaaatggaacctggatgagctccccaaattcgaaaagaacttctatcaagaacatccagacctggctcgcaggacagcccaggaggtggagacttaccggtatttacttccagctattgtccatataaaccaccagcccttcctcgagcgcggggatggccccatctgcttggtgttagcgccaacaagggagctggcccaacaggttcaacaagtggcggctgaatattgccgggcctgtcgtctgaagtctacctgcatttacggtggggcgcccaaaggaccccagattcgtgatttagagaggggtgtggaaatctgcatcgccaccccagggcgccttattgacttccttgaatgtggcaaaacaaatctcagacgaaccacctacttagtgttggacgaagcagaccgcatgttggacatgggcttcgagccccagattcgtaagattgtagaccaaatccgccccgaccgtcagacacttatgtggagcgccacttggccaaaggaggtgaggcaactcgctgaagatttcttgaaagattacatccacattaatataggcgctcttgagctctcagcaaaccacaacatattgcaaatagtggatgtgtgtcacgacgtggaaaaggacgaaaagcttattagactgatggaggaaatcatgtctgaaaaagaaaacaagaccattgtgtttgtcgagactaagaggagatgtgacgaattgactcggaagatgagacgggatgggtggccagctatggggattcacggcgataagagtcagcaggaacgcgattgggtcttgaacgaatttaaacatgggaaggcccctattctgattgcaaccgacgtggcaagtcgaggcctggatgtagaggatgtgaaatttgtgatcaattatgattatcctaactcatctgaagattacatccatcgtatcggacggacagcacggagcactaagactgggacggcctacaccttttttacccccaataacattaagcaagtctccgatcttatctccgtgttgagagaggccaaccaggccatcaaccctaagttgctccagctggtagaggatagaggatcaggtcgctctcgcggcagaggcgggatgaaggacgatcgccgagaccggtattccgctggaaaacggggcgggttcaacacatttagggatagagagaattacgaccggggttattcatcacttctcaagcgggattttggagctaagacacagaacggtgtatatagcgcagccaactatacaaacgggagcttcggaagcaattttgtgtccgcaggcatccagacttcatttcgaaccggcaacccgactggcacatatcagaacggatacgactcgacacaacaatacgggtcaaatgttccgaacatgcacaacggcatgaaccagcaagcctacgcctatccagctacggccgccgccccgatgatcggatatcctatgcccacgggatactcccagtag

SEQ ID NO: 114121 - DNA, 1845 bp, synthetic construct
  misc_feature 1..1845: note = Description of Artificial Sequence: Synthetic coding sequence
  source 1..1845: mol_type = other DNA
atgagtggctactcttcagaccgagatcggggcagagatcggggctttggcgccccacgctttggaggctctcgtgctggccctctttctggtaaaaagttcgggaatccaggcgagaagctcgtcaaaaaaaaatggaaccttgacgaactgcctaaatttgaaaagaatttttaccaagagcatccggatctggctaggcggaccgcccaggaagtcgaaacatacagacgcagcaaggaaatcacggtgcgtggccacaattgtcccaagcccgttctgaatttctacgaagcaaatttcccagccaacgtgatggacgtcatcgcacgccaaaactttaccgaacccaccgcaatccaggcccagggctggcctgtggcactctctggcttggatatggtcggcgtggcccagacaggctccggaaagactctgtcctaccttctgcccgccatcgtgcatattaatcaccaaccgttccttgagaggggagatggacctatatgtttggtgttggctccaaccagagagctggcccagcaggtccagcaagtggcagccgaatattgccgggcatgtcgactgaaatcaacttgcatctacggcggggccccaaaggggcctcagatccgtgatttggagagaggtgttgagatttgtatcgccacccccggacgtctgattgatttcctcgaatgcggtaagactaaccttcgcagaaccacataccttgtactggacgaagctgatcggatgctggatatgggtttcgaaccacagatccgcaagatagttgatcagatcaggcccgaccggcaaacccttatgtggtcagccacctggcctaaagaggtgaggcagcttgccgaagactttcttaaagattatatccacataaacatcggggctctggagctgagcgccaatcacaacatcttacagatcgtcgatgtatgccatgatgtagagaaagacgagaagcttattagacttatggaggaaattatgtctgagaaagagaataagaccatcgtattcgtcgagacgaagcggaggtgcgatgaactgactcgcaaaatgaggcgcgacggatggccagcaatgggcattcacggcgataagagccagcaggaaagggattgggtcctgaacgaatttaaacatggtaaagccccgattcttattgcaactgatgtcgcaagccgaggattggatgtggaggacgtgaaattcgtcataaattacgactatcctaacagcagcgaagactatattcacaggatcggccgaactgcaagatcgacgaaaaccgggacagcatacacattctttacacctaacaatatcaaacaggtctccgacctcattagcgtgctccgggaagccaatcaagccattaatcccaagcttctgcaacttgtggaggatcgcggatcaggcagaagcagggggagggggggcatgaaggatgaccgccgggaccgctattccgctggcaagagaggcgggttcaacacattccgggacagagagaattatgacagaggctattcctctctgctcaagcgggactttggcgccaagacgcagaacggagtgtattctgctgcaaattatactaacggctcttttggatctaactttgtctctgccggaatccaaactagtttcagaactgggaatcctaccgggacttaccaaaatggatacgactcaacacagcagtatggcagtaacgtgccaaatatgcataatggtatgaatcagcaagcctacgcctatcccgccacagcagccgcgccaatgatcggctatccaatgcctactggctactcccagtag

SEQ ID NO: 114122 - DNA, 1800 bp, synthetic construct
  misc_feature 1..1800: note = Description of Artificial Sequence: Synthetic coding sequence
  source 1..1800: mol_type = other DNA
atggatgttcatgaccttttccgccgcctgggcgccggagccaaattcgatacaagacgtttttctgccgacgcagccagatttcagattggtaagaggaaatatgacttcgacagctcagaggtgctgcaggggcttgatttcttcggaaataagaaatcagtgcctggcgtgtgcggagcttctcagacacaccagaaaccacagaatggtgaaaaaaaggaagagtctctcaccgaacggaagagagagcagagcaaaaaaaaaagaaagaccatgacatccgagatagcatcccaggaagaaggtgccactatccagtggatgtcttctgtggaggcaaaaattgaggacaagaaggttcagagggagagcaagctgacaagcggaaagctcgagaacctgagaaaggaaaaaattaatttcctgcggaataagcataagatacatgtccagggtacggatctcccggatcctattgccacttttcaacagctggaccaggagtacaaaatcaactctagactgcttcagaatattctcgatgctggcttccaaatgccaacacctattcaaatgcaggcgatccctgtaatgctccatgggcgagagctgctagcctcagcacccactggttccgggaagacactggctttttccattccaatcctgatgcaactcaagcaacctgctaacaagggatttagggctttgataatatcccccacacgggagctggcaagtcagatccacagggagctcataaagatttctgaaggtacggggttccgtatccacatgattcacaaggcagcagtcgccgcgaaaaagtttggcccgaagtcttcgaagaagttcgacatcttagtgaccacaccaaataggctgatctaccttcttaaacaagatccgcccggcattgacttagcaagtgtcgaatggctggtggtcgatgaatcggataagctctttgaggatggtaagaccgggtttagggatcaactggcctctatttttctggcatgcactagtcacaaggtccgaagggcaatgttctccgcaacattcgcctacgatgttgagcagtggtgtaagctgaaccttgataatgtgataagtgtatcaattggcgcccgcaacagcgctgtggagacggttgaacaggagctcctgttcgttggctctgaaactggcaagctgcttgctatgcgagaacttgtcaagaagggattcaaccctccggtcttggtgttcgtacagtcaattgagcgggccaaggagctgttccatgaactgatctacgaaggtatcaacgtggatgtaattcatgccgagaggactcagcagcaaagagataatacagtacactcgttcagagccggcaaaatctgggtgttaatctgcaccgcactcttagccagaggaatcgactttaaaggggtcaacctggtgattaattacgacttcccgacctcaagcgtggaatacatccaccggattgggaggactggtagagccggaaacaagggaaaagcaatcactttctttaccgaggatgacaagcccctgctgaggagcgtagcgaacgtgattcagcaggccggatgtcctgtgcctgaatacattaaagggtttcagaaattgctcagcaaacagaagaagaagatgatcaaaaagcccttagaacgggaatctatctccactaccccgaagtgctttttagagaaagctaaggacaagcaaaagaaagtaacagggcagaatagcaagaaaaaggtcgctttagaagacaagtcctag

SEQ ID NO: 114123 - DNA, 1476 bp, synthetic construct
  misc_feature 1..1476: note = Description of Artificial Sequence: Synthetic coding sequence
  source 1..1476: mol_type = other DNA
atgtcaagcgttgaagctaaaatcgaagataagaaagtgcagcgtgagtcaaaacttacttcgggaaagttggagaacctgaggaaagagaagattaactttctgagaaataaacacaagatccacgtccaggggaccgacctaccagaccccatcgcaacgttccagcagctcgaccaggaatataaaattaattcacggctgctacagaatatactggacgctggatttcagatgcctacacccattcagatgcaggccattcccgttatgttgcatgggcgtgaattgctagcgtcagctcccactgggagtgggaagacacttgctttcagcatcccaattcttatgcaactgaaacaacctgctaataaaggattccgcgcactgatcatttcgcccaccagggaactggcgagccagatccaccgggagctaatcaaaatctccgaggggaccggttttcgtattcacatgattcataaagcagctgtggccgccaaaaagttcggacccaagtcctcgaagaaattcgatatactggtgaccactcctaaccggctcatctacctcctgaagcaggatccgccgggaattgacctagccagcgtggaatggttggtggtggatgagtcggataaactcttcgaggacggcaagactggctttagagaccagttggcatccatatttctcgcatgtactagccataaagtaaggcgggcgatgtttagcgcgaccttcgcctatgacgttgagcagtggtgtaagcttaatctggacaatgtcatttccgtcagcatcggtgccaggaatagcgcagtggaaaccgtagaacaagaactcctttttgtcggatctgagactgggaagcttctcgcgatgcgagagctcgtgaagaagggcttcaaccctccggttttggtttttgtgcaatctattgagagggcaaaggaactcttccacgaacttatctatgagggaatcaacgtagacgttatccatgctgaaaggacgcaacagcagagggacaatacggtgcactcttttcgtgccggaaagatctgggtcctgatctgcacagccttattggcccgggggatcgatttcaaaggtgtcaatctggtgatcaactacgacttccctacatcatctgttgaatatatacatcgtataggaagaacagggagagccgggaataagggaaaagccattacattttttacagaagacgataagcctctcctgaggtccgtggccaatgttatccagcaagccggctgtccggttccagagtatatcaaggggttccagaaactgctcagcaaacagaagaagaagatgatcaagaagcctttggagagggaatccatctctacaacccccaaatgttttctcgagaaggctaaagacaagcagaaaaaagtgacggggcagaactcaaagaaaaaagtcgcactggaggataagtcttag

SEQ ID NO: 114124 - DNA, 2646 bp, synthetic construct
  misc_feature 1..2646: note = Description of Artificial Sequence: Synthetic coding sequence
  source 1..2646: mol_type = other DNA
atggccgcagataaggggccggccgccggccctagatcgagggccgccatggctcagtggagaaagaaaaaagggctgcgaaagaggcggggcgctgccagtcaggcccgcggaagcgactcggaggatggcgaattcgaaattcaggctgaggatgacgcacgcgcacgtaagctcggacctggcaggccgctgccaacatttcctacctccgagtgcactagcgatgtggaacccgacactagggagatggtgagggcccaaaacaagaaaaaaaagaagagcgggggctttcagagcatggggctgagctacccagtttttaaaggaattatgaaaaaaggctacaaggtccccacaccaatccagaggaagactatacctgtgatccttgatggcaaggatgtagttgcgatggcacgcacgggaagcgggaaaaccgcatgtttcctgctccccatgttcgagcgtcttaagactcactccgctcagacgggagcgagggcgctcatacttagccctacgcgagaacttgcgctgcagaccttaaagttcactaaggagcttggaaagtttacaggccttaagacggcacttatccttgggggagataggatggaggaccaattcgcagctctacatgaaaatcccgacattattattgccactccagggcgtctggtccatgtggccgtggaaatgtctctgaagcttcagtcggtggaatatgtcgtatttgatgaagccgaccggctttttgagatggggttcgcagagcaactccaggaaattatcgcccgattgcctggcggccatcagacagtgttattctcagccactctgccaaagcttcttgtagaattcgccagggctggattgactgagcccgttctcattcggctcgacgtcgatacgaagctcaatgagcaactgaagacatcattcttcctggtgcgtgaagacacaaaggccgctgttctcctgcatcttctgcataacgtggtacgtccccaggatcagacagttgtgttcgtggccactaagcatcacgccgagtacctgaccgagctcctgactactcagagagtctcttgcgcccatatctattctgccctcgatcccacggctcggaagataaatctggcaaaattcactctgggaaaatgttcgactttgatagtgacagacctggccgctcgggggctcgatatcccgctcctggacaacgtgatcaactatagctttcctgccaagggcaaattatttctgcatcgggtgggccgagtggccagagccggtcgtagcggaactgcctatagcctcgtcgcaccagacgagatcccctatctcctggatctccatctgttcttaggccgcagtctgacgctggctcgcccactaaaggagcctagcggggtggcgggggtggatggtatgctcggcagggtgccacaatccgttgttgacgaagaggacagtggcttgcagtcgactcttgaagccagtctcgaactgagaggtctggcaagggtcgctgacaatgctcagcagcagtatgtccgctccaggccggcccccagtcccgaatccataaagcgcgccaaggagatggatctggtgggtctgggccttcaccctttattctcatcaaggttcgaggaagaggaactccagcgtttaagactcgtggactctataaaaaattatcgtagtcgcgccaccatcttcgaaatcaacgcaagctctagagacctatgctcacaggtgatgagagccaagcgccagaaagaccgcaaagctattgcacgatttcaacagggacagcagggccgacaggagcaacaggaagggccagtgggcccagctccctctcgacccgccctacaagagaaacagcccgaaaaggaggaggaggaggaggctggggaaagcgtcgaagacattttctctgaagtggttggacgcaagcgccagcgctccggaccaaatcggggagccaagcggcgtagagaggaggcccgccagagggatcaagagttttacatcccataccgccccaaggattttgactctgagagaggcctgtctatctccggagaaggtggtgctttcgagcaacaggctgccggcgctgtgctggacctgatgggtgacgaggcccaaaacctgacccgcggacggcagcagttgaaatgggatcggaagaagaagcgtttcgtcggccagtcagggcaggaggataagaagaaaatcaagacagaaagcggccgatacatttcctcctcttacaagcgtgacctgtaccagaaatggaagcagaagcaaaaaatcgacgatcgcgattccgacgaggagggggcttcagatcgtcggggccctgagcgaagaggcggaaagagggacagagggcagggcgccagcaggccacatgctcccggaaccccagcgggtagagttaggccagagctcaaaacaaagcagcagattctgaagcaacgcagacgggcacagaagttgcactttctccagcgcgggggcctcaaacagctgtccgcccgcaatcgcaggcgtgtacaggagctccagcagggcgcttttggcaggggggcgagaagcaaaaaaggtaagatgcgcaagcgtatgtag

SEQ ID NO: 114125 - DNA, 2649 bp, synthetic construct
  misc_feature 1..2649: note = Description of Artificial Sequence: Synthetic coding sequence
  source 1..2649: mol_type = other DNA
atggccgccgataagggccccgctgctggtcctaggagcagggccgctatggctcagtggcgcaagaaaaagggtctcaggaagaggagaggcgcagcttcccaggcacgaggaagcgattcagaggacggcgagtttgaaatccaggcagaggatgatgcacgggccagaaagttaggtccagggcggcccctcccgaccttccctacgagcgagtgtactagtgacgtggagccagacacacgtgaaatggtcagggcgcagaacaagaagaagaagaaaagcggtggttttcaatccatgggactctcctatccagtgttcaaaggaataatgaagaagggttataaggtccccactccaattcagcggaaaactatccctgtgatactcgacgggaaagacgtagtagcaatggcaaggaccggctctggcaagacagcatgtttcttactgcccatgtttgagaggctcaagactcatagcgcccaaaccggagcacgagctctgatcctgtccccgacccgggagctggccctgcagaccctgaagttcactaaagaactgggcaaatttaccggcttaaaaaccgcccttatcctgggaggcgatcgcatggaagatcagtttgccgctctccatgaaaatccagacattattatcgcgacccctggccgactcgttcatgtcgcagttgaaatgagcctaaagctccagagcgtagagtacgttgtttttgacgaggctgaccgcttattcgaaatgggcttcgccgaacagttacaagagattatagccaggctgccaggaggacatcagactgtgcttttcagcgccacactgccaaagctgctcgttgagttcgcgcgcgcaggcctcacggaaccagtcctgattcgtctggatgtagacaccaaactgaacgaacagttaaagacgtcttttttcctcgtgagggaggacactaaagcagctgttctactacatctgctgcacaatgtggttaggcctcaggaccagaccgtagttttcgttgccactaaacaccatgctgagtacctgactgaacttttaactacccagcgcgtgtcttgcgcccatatttactctgcccttgatcccacagcccgcaagatcaacctcgccaaatttacactggggaaatgctctacgctcatcgtgacggacctcgctgcacggggattggatattccactattagataacgtgataaactattcctttccagcgaagggtaaactctttctccaccgggtagggcgggtcgcccgtgcaggacgctctgggactgcttacagccttgtggcacctgacgaaatcccatacctactcgacctgcatctgtttctggggcgtagcctgacactggcaaggcctctcaaggagccttccggggtggcaggagtcgatggtatgcttggccgggttccccaatcggtcgtagatgaagaagacagtggactgcagtctacactggaagcttctttagaactgagaggcctggcgagggtcgctgacaacgctcagcaacagtatgtgcgctctcggccagccccaagcccagagtccataaagagagccaaagagatggatctggtggggctagggctccaccccctgttcagctctcggtttgaagaggaagagctacagcggctgagactggtcgattccattaagaactatcggagtagggcaaccatattcgagattaatgcctcgagcagggacctgtgctctcaagttatgagggcaaagcggcaaaaggaccggaaggcaatcgcccgattccaacaggggcagcaagggcgccaggagcagcaagagggtccggtgggccccgcgccatcacgcccagctctacaggaaaagcagcccgagaaagaagaagaggaggaggccggcgagagcgtcgaggatatcttcagtgaggtcgtcgggaggaaaaggcagcgaagtggccccaatcgaggcgccaagcggcgccgcgaggaagcccgtcaacgagatcaggaattctacatcccataccgtccgaaggacttcgactcagagcgcggactcagtatctcgggcgaaggaggtgcttttgagcagcaggccgccggggccgtgctggatctgatgggcgacgaggcccagaacctgaccagaggccgacaacaactgaagtgggatcgaaagaaaaagaggtttgttgggcaatcaggccaggaggacaaaaagaagattaagaccgagagcggccggtacattagctcttcttacaaacgagacctctaccagaagtggaagcaaaaacagaaaatcgacgatcgagactcagacgaagagggggcctcagatcgccggggcccggaaaggagaggaggaaaacgcgatcgcgggcaggcgggagcaagtcggcctcacgcccctggaactcccgctgggcgcgtgagacccgaactaaagacaaagcagcagattttaaagcagcgtcgtcgcgcacagaaacttcacttcttacagagagggggcctgaagcagctgtctgcccgcaaccgtcgacgcgtgcaggaactgcaacagggcgccttcgggagaggggccagatccaaaaaaggtaaaatgagaaagcgcatgtag

SEQ ID NO: 114126 - DNA, 1452 bp, synthetic construct
  misc_feature 1..1452: note = Description of Artificial Sequence: Synthetic coding sequence
  source 1..1452: mol_type = other DNA
atgtccactgctaggacggaaaaccctgtgataatgggcctgtctagccagaatggccagcttcggggaccggtgaagcccactggcggacccgggggcggaggcacccaaactcaacagcaaatgaatcaactgaagaatactaacacaattaataacggaacccaacaacaggcccaatcaatgacaacaacaattaaacctggggatgattggaaaaagacactcaagctccctcctaaggacctgagaattaagacaagcgatgttacgtccacaaagggcaacgaatttgaggactactgcctgaagagggagctgttaatggggatctttgagatgggatgggagaaaccatcccccatccaggaagagtctattcccatcgccttgtctggtcgcgatattctggcccgggcgaagaacggcaccggcaaatctggcgcttatctgatccccctccttgagagactggatctcaaaaaggacaacatccaagccatggtcatcgtgccaaccagggagctagcactccaagtgtcacagatatgtatccaggtgtcgaaacacatgggtggggcaaaggtcatggctaccactggcgggactaaccttcgcgacgacatcatgcgacttgatgacacagtccacgtggtcatcgccactccagggcgaatcttggatctcataaagaagggagtagcaaaagttgaccacgtccagatgattgtgctggacgaggcagataagctgctttcccaggacttcgtccagatcatggaagatatcatcctcacattgccgaaaaaccgccagatcttactgtattccgccacctttcctttgagtgtgcaaaaatttatgaattctcacttgcagaagccctacgagataaacctaatggaagagcttacactgaagggggtgactcagtattacgcctatgttactgaacggcaaaaagtgcattgcctgaataccctgttctctagattgcagatcaatcagagcatcattttctgtaatagtagtcagagggttgaactgctggccaaaaagatttcgcaactgggatactcttgtttctatatacacgctaagatgagacaagagcacagaaatagagtgtttcacgactttcgtaatggcctctgcaggaacctggtgtgcaccgacctcttcaccaggggcattgatatccaggcggtgaacgtagtcattaattttgacttccccaagctcgcggagacctatctccacaggataggaagatccggtcggtttgggcatctcggccttgccataaatctgattacatatgacgacagattcaacctgaagagtattgaggaacagctgggcaccgagattaagcccataccatccaacatcgacaaatccctgtatgtcgctgagtaccacagcgagcctgtggaggatgaaaaaccctag

SEQ ID NO: 114127 - DNA, 1452 bp, synthetic construct
  misc_feature 1..1452: note = Description of Artificial Sequence: Synthetic coding sequence
  source 1..1452: mol_type = other DNA
atgagtactgccaggacggagaatcctgtgatcatgggcctgtctagtcagaatgggcagctcagagggccggtgaagcctaccggcggccccggcggtgggggaactcagacacaacagcagatgaatcagttgaagaacacgaacaccataaataacggaacacagcaacaggcccaaagtatgacgactactatcaagccaggggacgactggaagaaaacgcttaaactacctccaaaagacttacggattaaaacatccgatgttacctcgaccaagggcaatgaattcgaggactattgtctgaaaagagagctgcttatgggaattttcgagatgggctgggagaagccgagtcctattcaggaagagtctatccccatagccctcagtggccgcgacatactcgcccgggctaagaacgggacaggaaaaagcggagcatacctcatccctctgctggagcggctggatctgaagaaggacaacatccaggccatggtgattgtgccaacccgagaacttgcgctgcaggttagccagatctgtatccaggtctctaagcacatgggcggagcaaaggtcatggcaactaccggcgggaccaacttacgagacgatataatgcgactcgatgacaccgtgcatgttgtgattgccacccccggcagaatcctggatttaatcaagaaaggtgtagccaaagtggatcatgtccagatgatcgtccttgatgaggcggacaaattgctaagtcaggatttcgtgcagatcatggaagatattatactgacgctgcccaaaaatagacagatcctgctatatagtgctacctttccattgtctgtgcagaaattcatgaattctcacctacaaaaaccctacgagattaacctcatggaggaactcactctgaaaggagtcacccaatattacgcctatgtgaccgagagacaaaaagtgcattgcctgaacacactgttttcgcggttacagatcaaccaatctattatcttctgcaacagctcccagcgcgtggagctcctggccaagaaaatctctcagctcggttattcctgtttttacatccacgcaaagatgagacaagagcatcgaaatagagtgttccacgacttccggaacgggctttgcagaaacctcgtttgcactgacctttttacaaggggaatcgacattcaggcagtgaacgtggtcatcaatttcgattttcctaagcttgctgagacctatctccaccggattggcagaagcggccgcttcggtcacctcggtttagccatcaacctcatcacgtatgatgatcgtttcaatttaaagagcattgaagagcagttggggacagaaattaaacccatcccgtccaacatcgacaaaagtttatacgtggcggaataccattctgagcccgtggaggacgagaagccctag

SEQ ID NO: 114128 - DNA, 1452 bp, synthetic construct
  misc_feature 1..1452: note = Description of Artificial Sequence: Synthetic coding sequence
  source 1..1452: mol_type = other DNA
atgagcactgccagaaccgaaaatcccgtcattatgggcttgagcagccaaaatggacaattgcgcgggccggtcaaaccaacaggcggaccaggcggcggcggcacacaaacacagcagcagatgaatcagctcaaaaacacaaacacaattaacaatggaacccagcagcaggctcagtcaatgacgacaacaatcaaacccggggatgactggaaaaagaccttaaaactgcccccgaaggacctccgaattaagactagtgacgttacaagtaccaagggaaacgagtttgaggattattgcctcaaacgtgaacttctaatgggcattttcgagatggggtgggaaaaaccatctcccatacaagaggaatctattcccatagcactgtccggccgcgatatcctggctcgagcaaaaaatggcaccgggaaatcgggcgcctacttgatcccgcttctggaacgactagacctgaagaaggacaacatccaggcaatggtaattgtccctaccagagaattggcgctccaagtttcccagatatgtattcaggtatcaaagcatatgggaggtgccaaggtgatggctacgaccggcggtactaacctgcgggatgatatcatgcgtttggatgataccgttcatgtggtgatcgccacccctggccgcattctggatcttatcaagaagggggtcgctaaggtggatcatgtacaaatgatcgtgctcgacgaggcagataagctcctgtctcaggacttcgtccagatcatggaagatattattctgaccctacccaaaaacaggcagatcttgctctacagcgccaccttcccactatcagttcagaaattcatgaactctcatctgcagaagccctacgaaatcaacctcatggaggagttgaccttgaagggggtgacccagtactacgcatacgttaccgagaggcaaaaagtccattgcctaaatacactgttcagccgcttgcaaattaaccagagcatcatcttctgcaactccagtcagcgagtggagctgctcgccaaaaagatctcacaattgggctattcgtgcttctatattcacgcgaagatgcgccaggagcataggaacagggtgttccacgacttccggaacggactgtgtagaaatttagtttgtacagacctctttaccagaggcatcgacatccaggctgtgaacgtggtgatcaacttcgacttccccaagcttgcagagacatatctgcaccggatcggtcggtcagggaggttcggtcacctggggctggccatcaatctgattacctacgacgatcggttcaacttgaagtcgatcgaggagcagctggggactgagatcaagccaatcccctccaatattgacaagtccctctatgtggctgagtaccatagcgagccagtggaggacgagaagccttag

SEQ ID NO: 114129 - DNA, 564 bp, synthetic construct
  misc_feature 1..564: note = Description of Artificial Sequence: Synthetic coding sequence
  source 1..564: mol_type = other DNA
atgagtacagctcgtactgagaacccagttatcatgggccttagtagccagaacggccagcttcgagggcccgtgaagcctaccgggggcccaggaggaggaggtacgcagacacagcagcagatgaaccagctcaaaaatactaacactattaacaatggcacccagcaacaggcacaatcgatgaccacaactatcaagccaggcgacgattggaagaaaacccttaaactcccccccaaagacctgcgcattaagacatcagatgtcaccagcaccaaaggcaacgagttcgaagattactgtcttaaacgagagttattaatgggcatattcgagatgggatgggagaaaccctcccctattcaggaggagtcaatccctattgccttgtctggtcgcgacatcctggcccgagcaaaaaacggcaccggaaaaagcggggcctatctgatcccactactggagcggctagacttaaagaaggataatatccaagccatggttatagtgcctaccagggagttagcactccaggtctctcagatctgcactgtgtgttag

SEQ ID NO: 114130 - DNA, 5139 bp, synthetic construct
  misc_feature 1..5139: note = Description of Artificial Sequence: Synthetic coding sequence
  source 1..5139: mol_type = other DNA
atggagagaaatgttcttacaacattctcacaagagatgtctcagctaattcttaatgagatgcccaaggctgaatatagctctctgttcaacgacttcgtcgaaagtgagtttttcttgatagacggggattccctcctcattacttgtatctgtgaaatctcttttaagccaggacagaacttgcatttcttctatttggtcgaacgctatttagtagacctcattagcaagggggggcagttcaccattgtctttttcaaggacgccgaatacgcgtacttcaatttccctgagttgctgtcattaaggacagcactcattcttcacctgcagaaaaacacgacgatagatgttagaacaacctttagtcgttgcctcagcaaggagtgggggtctttccttgaagagtcttacccttacttcctgatcgtcgccgacgaagggctgaacgatttgcagacacagcttttcaatttcttgataatccacagttgggctcgtaaagtcaatgtggtcttaagtagcggccaagaatcggatgttctctgcttgtacgcctatctcctgccgagcatgtatcggcaccagatcttctcctggaagaataagcagaacattaaggacgcatatacaacgctcctcaatcagctggagagatttaaactaagcgcactggcgcctctgtttgggagcctgaaatggaataatataacggaagaggcccataaaaccgtaagccttctgacccaggtctggcccgaggggagtgatatccgtcgggttttttgcgtcaccagctgtagtctgagcctccggatgtatcatcgatttctggggaatagagagccctcctcagggcaggaaacagagattcaacaggtcaattcaaattgtctaactctgcaggagatggaggatctgtgcaagttacactgtctaactgtagtattcctgctccacctcccactcagtcagcgagcctgtgcgcgggtgatcacatcacactgggccgaagatatgaagccactgttgcaaatgaagaagtggtgcgaatatttcatactgagaaatatccatacttttgaattctggaatcttaatttgatccacctctccgatctgaatgacgagcttttattgaagaatatcgcgttctattacgaaaacgaaaacgtgaagggtctgcacttgaaccttggggatacaatcatgaaggactacgagtacctgtggaacaccgttagtaaattggtgagagattttgaagttggacagcccttcccattgagaactactaaggtgtgtttcttagagaagaagccaagtcctatcaaggactcctccaacgaaatggtgccaaacctcgggttcatcccaaccagctcattcgtggtggataagtttgcaggggatatactgaaagacctgccttttttgaagagcgacgatcccatcgtaacgtccctggtgaagcagaaagagttcgacgagctggtccactggcacagccacaagcccctgtccgatgactacgaccgtagccggtgccagttcgatgaaaagtcgcgggacccacgcgtgctgagatccgtgcagaaataccatgtctttcagcgcttctatggtaatagcctggaaaccgtcagctccaaaatcattgttactcagacaatcaaaagcaagaaagatttctccgggcctaagagcaaaaaggctcacgagacaaaagctgagattatcgcacgggagaacaaaaagaggctgtttgcccgggaggagcaaaaggaagaacaaaaatggaacgcactgtctttcagcattgaggaacaattgaaggagaatctccactctgggattaaatccctggaagatttccttaaatcatgcaaaagcagctgcgtgaagctccaggtagaaatggtcggacttacagcatgcctgaaggcctggaaagaacactgtcgctcagaggaaggtaagaccactaaggacctatccattgcagtccaggtgatgaaacggatccactctttgatggagaagtatagcgaactactccaagaggacgacaggcagctcatagccagatgcctgaagtatttgggttttgacgagctagcttcaagccttcatcctgcccaggatgctgagaacgacgtgaaggtaaagaaacgaaacaagtacagcgttggtattggtcccgcaagattccaactccagtacatggggcattatctgatcagagatgaacggaaggatcctgacccacgagttcaagacttcatcccagatacgtggcagagagaactattagacgtcgttgacaaaaacgagtccgctgtaatcgtggccccaacgagcagcggtaagacgtatgcaagctattattgcatggagaaggtactgaaggaatccgacgatggggtggtggtttacgttgccccgactaaggctctagtgaatcaggttgccgcaacagtgcaaaatcggtttaccaagaatctgccaagcggcgaagtgctgtgcggcgtctttacgcgcgaatatcggcacgacgccctgaattgtcaggtgcttattaccgtgcccgcctgtttcgagattctgctgcttgccccccatagacaaaattgggtgaagaagattcgttacgttatttttgatgaggttcattgtcttggaggcgaaattggagctgagatctgggaacatctcctggtcatgatcaggtgtccttttctagctctctcggcaacaatctctaatcccgagcatctcacggaatggttacagtcagttaagtggtactggaagcaggaggataaaattatcgagaataatacggcttccaaacgacacgtcggaaggcaggctggcttccctaaggactatcttcaggtcaagcagtcctacaaagtacgcctggtgctgtacggggaacgctataacgacctggaaaagcacgtttgcagtattaaacatggagacattcacttcgaccatttccatccatgtgcagcactcactacagatcatattgagcgatacggatttccacccgatctgaccctcagcccaagggaaagcattcaattatacgatgccatgttccagatctggaagagctggccgcgagcccaggaattgtgtccggagaactttatccactttaacaacaaactggtcataaagaaaatggatgcacggaagtatgaggaatccctgaaggcggagttgacatcgtggattaaaaatggcaatgtggagcaggcacggatggtgctacagaacctctctcccgaagccgatctttctcccgagaacatgatcaccatgtttcctttgctggtcgagaagctccgtaagatggagaagctcccggctctgttcttcctcttcaagttgggagctgtggagaatgccgcagaaagcgttagcacctttttgaagaaaaagcaggagacaaaaaggcctccaaaagccgacaaggaggcccatgttatggcaaacaagctgagaaaggtgaagaaaagcattgagaagcagaaaattattgatgaaaaaagccaaaaaaagacaaggaacgtcgaccagagcctgattcacgaggctgagcatgacaacttggtgaaatgcctcgagaagaacctcgagatcccgcaggactgcacgtatgccgatcagaaagctgtggacacagaaacactccagaaagtctttggccgggtgaagttcgagcgaaagggtgaggagcttaaggctcttgcagagaggggcataggttaccaccactccgcaatgtcttttaaagagaagcagttggttgaaatcctgttcagaaaggggtacctgcgcgtggtaacggccactgggactctggcactcggagtgaacatgccatgcaagagcgttgttttcgcacaaaactcagtatatctcgacgctttgaactaccggcagatgtctggccgggctggccgaagaggtcaggatctgatgggcgacgtgtactttttcgacatcccatttccgaaaatcggaaagttgatcaagtcaaatgtgccagaattacgtggccatttcccactcagtatcacgctggtactcagacttatgcttctggcctctaagggggacgatcccgaagatgctaaggcaaaggtgctttccgtgcttaagcactccctgttgtcctttaagcaaccaagggtaatggacatgcttaaactgtatttcttattctccctgcagtttcttgtgaaggagggctacttagatcaggagggcaatcctatgggctttgctggactcgtctctcatctgcattaccatgagcctagcaacctggtgtttgtgtccttcctcgtgaacggcctgttccacgacctgtgtcagcccacacgcaaaggatcaaagcacttctcccaggacgtaatggaaaagcttgtgttggtcttagcacatctattcggccgcagatacttccctccgaagtttcaggatgctcatttcgaattttaccagagtaaggtctttctggatgacctacccgaagacttttctgatgccctcgatgagtacaatatgaagattatggaagatttcacgacctttcttcggatagtaagcaagctggcagatatgaatcaagagtaccagctgccactctcgaaaatcaagtttactgggaaagaatgcgaggattctcagctagtgtcacacctcatgagctgtaaggaaggaagggttgccatttcgccgttcgtgtgtctcagcggcaattttgatgacgacctgctgcggttggagactccgaatcatgttaccctcggaaccatcggcgtgaaccgctcccaggctcctgtgctgctatctcagaaatttgataaccgcgggcggaaaatgtctctgaacgcctatgctcttgatttttataagcatgggtcccttatcggacttgttcaggacaatcgcatgaatgagggtgacgcctactatctgttaaaagactttgcgcttacgattaaaagcatcagcgtctcattaagggagttatgcgagaacgaagatgacaacgtcgtcttggcattcgaacagctgagcactaccttctgggagaagctaaataaggtgtag

SEQ ID NO: 114131 - DNA, 363 bp, synthetic construct
  misc_feature 1..363: note = Description of Artificial Sequence: Synthetic coding sequence
  source 1..363: mol_type = other DNA
atggaacgcaacgtgctcactacttttagtcaggagatgtcccaactgatcctgaacgaaatgccaaaagctgagtatagttcactgtttaacgattttgtcgagtctgagttcttcttaatcgacggcgacagcctgctgattacgtgtatttgtgaaatttcatttaaaccaggccagaacctgcacttcttttacttggtcgaacgctatttagtcgatctcataagtaaagggggacagtttaccatcgtgttctttaaggacgctgagtacgcctactttaatttccccgagctcctatctctccgcaccgcactgatcctgcatctccaaaagaatactaccatcgatgtgagatag

SEQ ID NO: 114132 - DNA, 885 bp, synthetic construct
  misc_feature 1..885: note = Description of Artificial Sequence: Synthetic coding sequence
  source 1..885: mol_type = other DNA
atgatccgctgtcctttcctcgcactgagcgccaccatcagcaaccctgaacatttgacggaatggctccagtccgtcaaatggtactggaaacaagaggacaaaattatcgagaacaacacagcctctaaaagacacgtgggaaggcaggccggctttcccaaggactatcttcaggtgaagcagtcttacaaggtccgcctggtgctgtatggcgagagatacaacgatctggagaagcacgtttgttctatcaagcacggcgacattcattttgatcacttccatccctgtgccgccctgacaactgaccatatagaaagatacggtttccctcctgacctaacactcagcccacgcgaatctatccaactgtatgacgctatgttccagatatggaaaagttggccgcgagctcaagaactgtgtccggagaactttatccacttcaataataaattagtgattaagaaaatggacgccaggaagtacgaggaatcactaaaggcagagctcacctcctggatcaagaatggcaacgtggagcaagccaggatggtgcttcagaacctgtcacccgaagcagacctttcgccagagaacatgattacaatgtttcccttgcttgtggagaaactcaggaagatggagaagctgcctgcactatttttcctgtttaagctgggagcagtggaaaatgctgcggagtctgtgagtacgtttctgaagaagaagcaggagacaaagaggccacccaaagctgacaaagaggcccatgtcatggccaacaagttgaggaaggttaagaaatccattgaaaagcagaaaatcattgacgagaagtcgcaaaagaaccaaaaatgtggttctaagcccaacacatag

SEQ ID NO: 114133 - DNA, 1062 bp, synthetic construct
  misc_feature 1..1062: note = Description of Artificial Sequence: Synthetic coding sequence
  source 1..1062: mol_type = other DNA
atgcagtccaaaagggattgcgagctttggtgtgaaagagtgaatcccgaaaataaggccgccttggaggcgtgggtgagggagaccggtattcgactggtccaagtgaacgggcagcgcaagtatggtggacctccccccggctgggtcggatcccctccgcctgctgggagcgaggtcttcatcgggcgtctaccccaagatgtctatgagcaccagctaatcccattgtttcagagagtagggcgcctgtatgaatttcgcctgatgatgacattttctggactgaataggggattcgcttacgcgagatatagcagccggagaggcgcccaggcagccatagccactcttcataaccaccccctcaggccttcgtgtccacttctggtctgccgttcaactgaaaagtgtgaactgagtgtggacgggttacctcccaatctcaccaggagtgctctccttctcgcactccagcccttaggtccaggactgcaagaagcccgcctgctaccctcccctggaccagcaccgggtcaaattgctctgctgaagttttcgagtcatagggctgcagccatggccaagaaagccctggtggaagggcaaagtcacctgtgcggagagcaggtggcggtcgaatggctcaagcccgatctgaagcaacggctgcggcaacagctagttggacctttcttaaggagccctcagcccgaagggtcccagctggctctggcccgtgataaactgggatttcaaggtgccagggccaccctgcaattactgtgtcagcgcatgaagctgggctcaccggtctttttgactaagtgcctggggattggacctgccggctggcacaggttctggtatcaggtggtaattcccggccacccggtgcctttttctggactcatttgggtcgtgctcactctagacggtcgagacggacatgaagtggctaaagatgccgtatcagtcagactgcttcaggcactgtctgagtcaggcgccaatctgctgtggagcgccggagctgaggccgggactatggtgaaacagtag

SEQ ID NO: 114134 - DNA, 1491 bp, synthetic construct
  misc_feature 1..1491: note = Description of Artificial Sequence: Synthetic coding sequence
  source 1..1491: mol_type = other DNA
atgtttgcgaaagcaacccggaatttcctacgagaggtagacgccgacggagacctgatcgcagtatcaaatctgaatgattccgataaactccagctgctctcactggttactaagaaaaagcgtttctggtgctggcagaggccaaaatatcagttcctgtcactgacactgggggacgtgttgatagaggaccagttcccctcccccgtcgttgtggagagcgattttgtgaaatacgaaggaaagttcgccaaccacgtttcaggaacccttgaaacagcactgggtaaggtgaaacttaatctcgggggatcttcacgcgttgagtcacaatcctcctttggtaccctgcgaaaacaggaggtggatttgcagcaactgatcagggactccgccgaacggacaataaacctgcgcaatcctgttttacagcaggtgctggaggggcgcaatgaggtattatgcgttcttacccagaagattactacaatgcagaagtgcgtcatcagtgagcacatgcaggtggaggagaagtgcgggggcatcgtggggatccaaaccaagaccgttcaggtgtccgctacagaggatgggaatgttacaaaagactctaatgtggtcttggaaatcccagctgctacaactatcgcctatggagtaatagagctgtatgtgaagctggatggccagtttgagttttgtctgctgaggggaaagcagggcggtttcgagaacaaaaagcgtatcgacagcgtctatcttgaccccctggtgttccgggaattcgcatttatcgacatgccggacgccgctcatggtatttcgagccaagacgggcctttgagtgtattgaagcaggcaacactcctgctggagcgtaactttcacccattcgccgagctgcctgagccccaacagacggccctgtcagatatattccaggccgtgctgttcgatgatgagttgctaatggtcctggagcccgtctgtgacgatctggtcagcggcctgtctcctactgtggctgtcttaggcgagctgaaacctagacagcaacaggatctcgtcgcttttctgcagctggttggttgttccctccagggtggctgtccaggccccgaggacgccggctccaagcagctgttcatgaccgcttacttcttggtttccgccctagcagagatgcccgactcagctgccgccctgctcggcacctgctgcaagctccaaatcatccctacattatgccacctgttacgggcgctgtccgacgatggagtgagtgacctggaggaccccacacttacaccactcaaggataccgagcggttcggcatcgtccaaagactgttcgccagtgccgacataagtctggaaaggctgaagtcaagcgtgaaagcggtcatcctaaaagactccaaagtattcccattactgctgtgcatcaccctaaatggactatgcgctctgggaagagagcactcttag

SEQ ID NO: 114135 - DNA, 1491 bp, synthetic construct
  misc_feature 1..1491: note = Description of Artificial Sequence: Synthetic coding sequence
  source 1..1491: mol_type = other DNA
atgttcgcaaaggcaacacgcaacttcctacgagaggtggatgcagacggcgacctgatagcagtgtccaatttaaacgacagcgataagcttcaactgctatccttagtgacaaagaagaaacgattttggtgctggcaacggcctaaatatcagtttctttccctcacactcggggacgtcctgatcgaagaccagtttccttctcctgtagtggtggaaagtgacttcgtgaagtacgaaggtaagttcgccaaccatgtaagtggcactctggaaacagcccttggcaaggttaaactgaacctcggtggttcgtcacgggtagagtcgcagtcgtccttcggaacattacgcaaacaggaggtggacctccagcagctgatcagagactcggccgaacgaacaatcaatctgagaaatcctgtgctacaacaggtgctggaaggacgcaatgaagtgctttgcgtcctgactcagaagataactactatgcaaaagtgcgtgatctctgagcacatgcaggtagaagagaagtgcggcggcattgtcggaattcagactaaaactgtacaggtgagcgccacggaggatggtaacgttacaaaagacagcaacgtcgttctggagatacccgcagccacgacaatagcctatggcgtaattgaactctatgtcaagctggacggacagtttgaattctgccttctcaggggcaagcaggggggcttcgaaaataagaaaagaatagattccgtctacctagatcctctcgtgtttagggaatttgcgttcattgatatgccagatgccgcccacgggatatcttctcaggacggccctctgagtgtgctgaaacaggcaactttgctgttggagcggaatttccatccgttcgccgaactgcctgagcctcagcagacggctctgtccgatatatttcaggccgttctctttgacgatgagcttttaatggtcctggaaccggtgtgcgacgacctcgtcagcggtctgtcccctaccgttgccgtgctcggggagttgaagccccggcagcaacaggatttggtggcattcctgcagctggtgggctgttcactgcaggggggctgtcccgggccagaagacgcagggtctaaacagctgttcatgactgcctattttcttgtcagtgctctagcggaaatgccagattcagccgccgccctgctggggacatgctgcaaattacagattatccctaccctgtgtcatctgctccgggccctttctgacgacggagtatctgatttggaagaccccaccttgactcctcttaaagacactgagcggtttgggatcgtgcaacgcctattcgctagcgctgatatcagcctagagagactcaagtcgagtgtcaaggcagtgattctgaaagactctaaagtcttcccccttcttctgtgcattaccctcaacggattgtgcgcgttgggccgggagcacagctag

SEQ ID NO: 114136 - DNA, 999 bp, synthetic construct
  misc_feature 1..999: note = Description of Artificial Sequence: Synthetic coding sequence
  source 1..999: mol_type = other DNA
atgcagaaatgtgttattagtgagcacatgcaggtggaggagaaatgcggaggcattgttggtatccaaacaaagactgtccaggtgagcgcaacggaggatggaaacgtgacgaaggactccaatgtagtgcttgaaattcccgcggccaccaccattgcatatggcgtgatcgagctctacgttaaattagacggccaattcgaattttgtctgctcagaggcaagcaggggggctttgagaacaagaagcgcatcgatagtgtatatttggatcccctcgtgttcagagaattcgcgtttatcgatatgcccgacgccgctcacggaatctcctctcaggacggccccctctccgtgctgaaacaagctactctcctgctcgaaaggaactttcacccattcgccgagcttcctgaaccacaacaaaccgcactgtctgacattttccaggctgtcctattcgacgatgagctgctgatggtgctcgagcccgtttgcgacgacctggtgtcagggctctcgcccacagtggctgttttgggggagctgaagccaaggcagcagcaggacctcgtggcctttctgcagcttgttgggtgctctctgcagggagggtgcccaggaccagaagatgccggcagcaagcaactcttcatgacagcatacttcctggtatccgctttagccgagatgccagacagcgcggccgcattgctaggaacgtgctgcaaactgcagataattcccaccctgtgtcacttgctaagagctctctcagatgacggggtaagtgacctggaggacccaacgcttacccccctcaaagatacagagcggttcggtattgtccagcggctgttcgcatccgccgacattagcctggagcgtctgaagtcaagtgttaaggcagtgattctgaaggacagtaaagttttcccactgctgctgtgtataacgcttaatggcttatgtgccctggggcgcgaacattcctag

SEQ ID NO: 114137 - DNA, 999 bp, synthetic construct
  misc_feature 1..999: note = Description of Artificial Sequence: Synthetic coding sequence
  source 1..999: mol_type = other DNA
atgcagaagtgcgtgatctctgagcacatgcaagtggaagagaaatgcggcggtattgttggcatccaaaccaaaaccgttcaagtgagcgccacagaggatgggaatgtgacaaaggattcgaatgtcgttctggaaattcccgctgccactacaatcgcttacggggtcatagagctgtatgtaaagctcgacggacagttcgagttttgtctgctccgggggaagcaaggcgggttcgagaacaagaaacggatcgattccgtctatttggatcctctggtcttcagagaatttgcatttatcgatatgccagatgccgcccatggcataagtagtcaggatggacccctgagtgtgctcaagcaagcaacactgttgctggagcgcaacttccaccccttcgctgagctacctgagccacaacagaccgctctctccgacatcttccaggccgtactttttgacgacgagcttctaatggtcctggaaccagtctgtgatgatctggtgagcggcctgtccccaacagtggcggtccttggtgagctcaagccgcgccagcagcaggatctggttgccttcttacagctggtcggctgtagcctccaggggggctgtccaggcccagaggacgctggttctaaacaactctttatgacggcctactttctcgtgagtgcactggccgagatgcctgatagtgctgctgcgctgcttggtacttgctgcaagctgcaaataatacctacactgtgccatttacttcgcgccctgtcagacgatggagtcagtgacctggaagaccccaccctaacaccactcaaggacacggagagatttggcattgtccagagactcttcgcctccgcagacatctctctagagcgattgaagagttccgtgaaagctgtgattttgaaggatagcaaggtgtttcccctcctgctttgcattaccttgaatgggctctgtgccttaggccgagagcattcgtag

SEQ ID NO: 114138 - DNA, 1575 bp, synthetic construct
  misc_feature 1..1575: note = Description of Artificial Sequence: Synthetic coding sequence
  source 1..1575: mol_type = other DNA
atggcaaattcggctgggttcctgggagacctaactaccgaagggataaacaaaccaggcttctataagggacctgctggttcgcaagtcaccttaagctccctgggtaaccagaccagggtcctgttggaagaacaggcgcgccacctgcttaacgaacaagagcatgctactatggcttattatctggatgagtacaggggaggctccgtgtcagtggaagccttagtcatggcactgttcaagttactaaacacacatgccaagtttagcttactctcagaagtgcgtggaacaatttcaccacaagacctcgagaggtttgatcacctcgtgttgcgccgcgaaatcgagtccatgaaggctagacagccccctggccccggcgccggcgatacatattctatggtgagctactccgacacaggatcatcgaccgggagtcatggcacaagcactactgtgtcgtccgcgcgaaacaccctggatcttgaagagacaggggaggccgtccagggcaacatcaacgctctgccagacgtgtctgtggacgacgtgcgatccacgtcccagggcctgtcctcttttaagccgctccctagacctccaccccttgcccaggggaatgatcttcctttgggacagccacgcaaacttgggcgagaagatctccagcccccatcctcaatgcctagttgtagcggtactgtatttagcgctccccagaaccggtcccccccagctgggacagccccaacccccgggaccagttccgcacaagatctgcctagtagccccatctatgcatcagttagccccgccaatccgagcagcaaacgccccctcgatgctcatctcgcactggtgaatcaacaccccatcggcccttttccgcgggttcagagccccccccatttgaagtcaccttccgccgaggccactgtggcagggggatgtctgctgcctccgtcccccagcggacaccctgaccagaccggaacgaaccagcatttcgtcatggttgaggttcaccggccagactctgagcccgacgtgaatgaagtgagggcattaccccagactcgaaccgcttcaacgctgtcgcacttgagcgactcagggcagaccctctcagaagacagtggcgtcgacgccggcgaagcggaagccagtgctcctggcagaggtaggcaatcggtatccaccaaatcacgcagcagcaaagagttgccacggaatgagcggcctacagacggtgccaataagccgcccggcctgctggagccaacatcaacacttgtgcgtgtgaagaaatccgccgccaccctcggtatagccatcgagggcggggccaatactcggcaaccacttcctcgtatcgtcacgatccagagagggggctccgctcacaactgcggacagttaaaggttggccacgtaatcttagaggtgaatggcctgacccttaggggcaaggagcacagagaagcggctcgtattatcgccgaggctttcaaaactaaggatagagattacattgatttcctggtgaccgaattcaacgtcatgctgtag

SEQ ID NO: 114139 - DNA, 2724 bp, synthetic construct
  misc_feature 1..2724: note = Description of Artificial Sequence: Synthetic coding sequence
  source 1..2724: mol_type = other DNA
atgaatgctcctctggacggattgtccgtcagtagtagcagcactggctccctcgggtcagcagctggtgccggaggcggtggcggggctggacttcgcttgctgagcgcaaacgtgcgccaactccatcaagccctgacagcacttctgtccgaggccgagagggaacagtttacccattgcctcaacgcataccacgccagacggaatgtttttgacttggtgcgaactctccgagtactgttagattcgcctgtcaagaggcggctgctgccaatgctgcgactggtcattcccaggtcggatcagctgctcttcgatcagtacactgccgagggcctctacctccccgctacaacgccatataggcaacctgcttggggcgggcccgatagtgctggacccggcgaagttagactggtgtctctcaggcgggcaaaagcccatgagggcctcggattctctatccgcgggggcagcgaacatggggtagggatctatgtgtccttggtggagcccgggagcctggctgaaaaagaaggtctccgggtgggggaccagattctcagggtgaacgataaaagcttggcccgcgtgacccacgccgaagccgtcaaagcacttaaagggtccaagaaactggttctcagcgtgtattccgcaggccgaatccccggaggctacgtgactaaccatatctatacatgggtcgatccgcaaggcaggtctataagccctccctccggcctccctcagccacacgggggagcactgaggcagcaggagggggatagaaggtccacgcttcaccttctgcaggggggggacgaaaagaaggtgaatctggtgctaggtgatggacggtcgctggggctgactattcgcggtggagctgaatatgggcttggcatctacatcactggagttgatcccggatcagaagcagaaggttcaggcctcaaagtaggggaccagattttggaagtgaatgggcgctccttcctgaacattctccacgatgaggccgtccgtttgttgaaatcctcccgacacctgatcctgaccgtgaaggacgtgggacgcttgccacgcgcccggactaccgtcgacgagaccaaatggattgcctcatctagaattagggaaaccatggccaatagcgctggcttcctcggggatctcactactgaaggtatcaacaagccagggttctataagggtcctgcgggctctcaggttaccttgagtagtttaggtaaccaaacaagggttttgttggaggagcaagccagacacctactgaatgagcaggagcacgccacgatggcatactatctggacgagtaccgggggggaagcgttagcgtagaagctctggtgatggcccttttcaaattgttgaacacccacgctaaattctcactgctgtctgaagtgcgtggaaccatttccccacaggacctggagaggttcgatcatctcgtcttaagacgggaaattgagagcatgaaagcccggcagcctcccggaccaggcgcaggcgacacatatagcatggtgagctactcagacaccggttcatctaccgggtcgcatggaacctcgacaaccgtttcttcagcccggaacacattggacttggaagagaccggtgaggccgtgcaaggtaacataaacgctctacccgacgtttcagtggatgatgtgcggagcacttcccaaggtctctctagtttcaaaccactgccaagaccgcctcctctggcacagggcaatgatctgcctctaggccagcccaggaagctcggcagggaggatctccagccaccaagctcaatgccaagttgctccgggaccgtattttcggcgccccagaatcgatcacccccagctggcaccgccccgacacctggaacgagttccgctcaggacctcccctcttctcccatctatgccagcgtcagcccagccaacccttcgtccaagagacctttggatgcccatctggccttggtgaatcagcaccctatcgggcctttccctcgggtgcagtcgcctccacacctgaagtcaccaagcgctgaggccaccgtcgccggcggctgcctgctaccgccctcaccatctggccacccagaccaaacaggaactaatcaacacttcgtgatggttgaggttcaccgacctgattctgaacctgatgtgaatgaagttagagccttgccacagacaaggaccgcatcaaccctgtcacacctcagcgacagcggacagactctatcggaggattcaggagtagacgctggcgaggccgaggcctccgccccagggaggggccggcaatcggtgtccacaaagagcagatcatccaaagagctgccccgtaatgagcgcccaactgacggcgctaataaaccacctgggctcctagagcccacaagcacgttggtgcgagtgaaaaagagcgccgccaccctcggaattgccattgaagggggggcgaacactaggcagccactgccccgaattgtgacgattcagcggggaggaagcgcccacaattgcggccagctgaaagtcgggcatgtcatcttggaagtcaatggacttactcttcgtggcaaagagcatcgtgaggccgctagaattatcgctgaggcctttaagacgaaagaccgcgactacatagactttcttgtgaccgagtttaatgtgatgctctag

SEQ ID NO: 114140 - DNA, 1038 bp, synthetic construct
  misc_feature 1..1038: note = Description of Artificial Sequence: Synthetic coding sequence
  source 1..1038: mol_type = other DNA
atgaacgcgccattggatggtctgtccgtcagttcgtcaagtaccgggtccctgggttcggcagcaggcgcgggaggcggaggaggtgccggacttaggctgctgtctgcgaacgtcaggcagctgcaccaggcattgactgcgctcctgtcagaggcagagagagaacagtttacacattgcctcaatgcctaccacgctcggagaaacgtgttcgacctggtgcgaaccttgagagtgctactggactcacctgtgaagcgaaggcttttgcctatgctgagactcgtaattcctcgctcggaccagctgctgtttgaccagtatacggctgagggcctgtacctccctgctactaccccttaccgccagcccgcttgggggggtccagacagcgccgggcccggggaggtgagactggtctccctgcgacgcgctaaggcacatgaagggctcggattttccatccgtggtggcagtgaacatggggtgggcatctatgtaagtctggttgaacctggatcgcttgccgagaaagagggactgagggtcggtgaccagattctccgggtgaacgacaagagtctggccagagtcacccacgccgaggccgttaaggctttgaaggggagcaagaaacttgtgctgtccgtttactctgctggcaggataccaggcgggtatgtgacaaaccatatctatacatgggttgacccgcaaggtaggagcatctcaccacctagcggactgcctcagcctcacggcggcgcgttgaggcaacaagaaggcgaccgccgctccactctccatctcttgcagggtggagatgaaaagaaggtatcgggcgtggggaaggggggccagcccctgcgccaccggatactgccacccaatcccgagcagcagagctgtctcgaagctgcaaggcgggggtggttctgtccgggcagcgtcttcccacaggtgtgcaccgaagggtggtgtttcttcttcgctttcttatttgatctgtgctctgtatgctataacactggctag

SEQ ID NO: 114141 - DNA, 1671 bp, synthetic construct
  misc_feature 1..1671: note = Description of Artificial Sequence: Synthetic coding sequence
  source 1..1671: mol_type = other DNA
atgcacgggagcctggaagccctcttgttcttaccccaggtgacactgtcacttgcacatgcgcacttgatttgttccaatgcccagctggagatgtgtgtgttcccgcaccggttcctgggagatttaacgactgaggggataaacaaacccgggttctataagggcccagcaggaagccaggtgactctgagcagccttggcaaccagacacgggtgttactggaagagcaggcacgccacctccttaatgagcaggagcacgccaccatggcatactatctcgatgaatatcggggcggctcagtgtccgtggaggccttagtaatggccctgtttaagctgctgaacactcacgctaagttttcactgctcagcgaagtgaggggcactatttcacctcaggacttagaaagatttgatcatttggtccttcgacgggagatcgaatctatgaaagcacgacagccacctggcccaggggctggtgacacatattctatggtgtcctatagcgatactggcagcagcaccgggtcacacggcacctccacaacggtttcgtcagcacgcaatactctggaccttgaagaaaccggggaggcggtacaagggaacatcaatgctcttcctgacgtgtctgtggacgatgtacggtcgacatcccagggtttgagcagcttcaagcctctgccccgcccccccccactggcccagggaaatgacctgcccttgggacagcctagaaaacttggcagagaagatcttcagcctcccagctcaatgccatcttgttctgggacagtgttttccgctccccagaaccgctctccccccgcggggaccgcccccactcccggcaccagctcagcccaggatcttcccagctctcccatatatgcatcagttagccccgctaacccgagctccaagcgtcccctggacgcccacctcgcactcgttaaccaacaccccattggtccatttcctagagttcagtcacctcctcatcttaagtccccttccgcggaagcaacggttgctggcggctgcctcctgccaccctcaccatcaggccatccagaccagaccggcaccaaccaacattttgttatggtcgaagtgcacagacctgattcggagcctgacgttaacgaagtgcgggccctgccgcagacgcgaaccgccagtacactgtcacacctgagtgacagtgggcagacactgagcgaagactctggcgtagacgcgggagaggccgaagcctccgcccccggcagagggcgccaaagcgtctccactaagtccaggtcatctaaggagctcccgcggaacgagcggccaactgacggagctaataagccacccggactgctggaaccaacgtctaccctcgttcgcgtcaagaaatctgcagcaaccctgggaatagctatcgaggggggagctaatacaaggcagccccttccaaggatcgtgactatacagcgcggcggcagtgctcacaattgcgggcagctgaaggtgggccatgtgatcctcgaggtcaacggactcacgttaagggggaaggagcatagagaggcagccagaatcattgctgaggcctttaaaaccaaggaccgcgactatatcgattttctggtgactgagtttaatgtgatgctctag

SEQ ID NO: 114142 - DNA, 1059 bp, synthetic construct
  misc_feature 1..1059: note = Description of Artificial Sequence: Synthetic coding sequence
  source 1..1059: mol_type = other DNA
atgtttgcagcagccacgaagagcttcgtgaaacaagtgggagacggtgggagactagtcccagttccctctctgagcgaagctgacaaataccaacctctatcactcgtggtgaaaaagaagcgttgctttctgtttcccaggtacaaatttacctcaactccatttacactgaaggacatcctgctgggcgacagagagattagcgccggcatcagtagttatcagttgctgaactacgaggacgaatcagatgtgtcactgtatggacggcgtggtaaccacattgtgaacgacgtcgggattaacgttgctggttcagatagcatcgctgtcaaggcctcctttgggatcgtgaccaagcacgaggtggaagtctcaaccctcctgaaggaaatcaccacccgaaagattaatttcgatcattccttgattagacagtcacgttcaagtcggaaagcagtgttgtgcgtggtaatggagagtattcgtaccacgcgccagtgttcactgagtgtgcacgcaggaatccgcggcgaagcaatgcgctttcattttatggacgagcagaatccaaaaggccgcgacaaggctatcgtgttcccggcccacacaaccatcgcgttctctgtcttcgaacttttcatttatcttgatggagccttcgatttatgcgtcaccagtgtgagcaaaggcggttttgaaagagaggagacagccacattcgccctactgtacaggctccggaacatcctatttgagagaaaccgaagagttatggacgtgatcagtaggagccagttatacctcgatgaccttttcagcgactattacgacaagcctcttagcatgacagatattagcttaaaagaaggcacccacattagggtcaacttgctcaatcacaacatccctaagggtccatgcattctgtgcggtatggggaatttcaaaagagaaactgtgtacggttgctttcagtgctcagtggacggacagaagtacgtacgtttgcatgcggtgccttgttttgacatctggcacaagcgtatgaaatag

SEQ ID NO: 114143 - DNA, 1059 bp, synthetic construct
  misc_feature 1..1059: note = Description of Artificial Sequence: Synthetic coding sequence
  source 1..1059: mol_type = other DNA
atgttcgccgccgcaaccaagtcctttgtgaagcaggtcggggatggaggaagacttgtccctgttcctagtctctccgaagcagacaagtatcagccactgagtctggtggttaagaagaagagatgcttcctcttcccccggtataagtttacctccacccccttcaccttgaaggacatcctcctgggagatagagaaatctctgcaggtatttcctcttatcagctcctgaactacgaggacgagagcgacgtttcactttatggccgtcggggtaatcatatcgttaatgacgtggggatcaacgttgccggctcggacagcattgcagtcaaggcctcttttggaattgtcaccaagcacgaggttgaggtttccacactcctcaaggagattacaactaggaagattaatttcgaccacagtttaattcgccagtctcgctccagcaggaaggccgttctgtgtgtggtgatggaatctatcaggactactaggcagtgctcactgagcgtgcacgctggaattcgcggggaggccatgagatttcacttcatggatgaacagaaccccaagggcagggataaggcgatcgtgtttcccgcccacactactatcgctttttctgtattcgagctgttcatctatctagacggagccttcgacctttgtgtgacaagtgtatctaaaggaggattcgagagggaggaaaccgctacgttcgctctcctgtatcgcctccgtaacattctgtttgaaagaaatcgtcgtgttatggacgtgatttcccgcagccagctctacctagatgatctattttccgattactatgataagcccctgagcatgaccgacataagtctcaaagaaggtacgcatatcagagttaacctgctgaatcacaacattccaaaggggccatgcatcctgtgtggcatgggaaactttaaaagggagactgtgtatggatgctttcaatgctccgtcgacggccagaaatatgtacggctgcatgctgtgccgtgtttcgacatctggcataaacggatgaaatag

SEQ ID NO: 114144 - DNA, 2388 bp, synthetic construct
  misc_feature 1..2388: note = Description of Artificial Sequence: Synthetic coding sequence
  source 1..2388: mol_type = other DNA
atgtccaagagacaccggcttgaccttggagaggattacccgtcaggcaagaaaagggcgggaaccgacggcaaagaccgggacagggaccgcgatcgagaagaccgatcaaaggaccgtgatcgggagcgagaccggggggatagggagagagaacgggaaaaagaaaaagaaaaggaactgcgagccagcactaacgccatgctcatttccgcaggcctgccacctcttaaagccagtcacagtgcccacagcacccattccgcgcatagcacacattccacccatagcgcccactctactcacgcgggccatgcgggccacacctcgttacctcagtgcatcaatccgttcactaacctgccccatacacccaggtattacgatatactcaagaagaggctgcaactgcctgtttgggaatataaagaccggtttaccgatattttggtgcgccaccagtcgtttgttcttgtgggggaaacaggatccggtaaaactacccagatacctcagtggtgcgtggaatatatgagatcattgcccggccccaaaagaggcgtcgcctgcacccagcctcgcagggtagcagcaatgtctgtggcccagcgggtggcggacgagatggacgtcatgctcggccaggaggttgggtactctatacgctttgaggactgcagcagtgcgaaaacgatcctgaaatatatgactgatggaatgctgctgcgtgaagccatgaatgatcccttgctggaaaggtacggcgtgatcattctggatgaggcgcatgagaggaccctggccaccgacatactgatgggcgtgctcaaggaagtggtccgccagaggtcagacctgaaggtcatagtgatgtctgccaccttagatgcaggaaaattccaaatttattttgacaactgcccgctgctcactattccaggccgcacccaccctgtggaaattttttatacacctgaaccagaacgcgactaccttgaagccgctattcgcactgtgatacagatacatatgtgtgaagaagaagagggtgacctcctcttgttcctcacaggtcaagaagaaattgatgaggcatgcaaacggattaagagggaagtagacgatctcggccccgaggtcggggatatcaagatcatcccactctacagtaccctgcccccccagcagcaacagcgcatcttcgagccacctccccccaagaagcagaacggggccatcggcagaaaagtggtggtgtctaccaatatagcggaaaccagtttaacgatcgacggagtcgttttcgtcatcgaccccggctttgccaaacagaaggtgtataatccccggatccgagtggaatcactgcttgtgaccgcaatctctaaggcctctgcccagcagagggccggacgggccgggagaactagaccaggcaagtgttttagactctatacagagaaggcctataagactgagatgcaggataacacatacccagagatcctgagatctaacctgggtagtgttgtgctgcagctgaaaaaactgggaattgacgacctcgtgcactttgatttcatggaccccccggcaccggaaactctaatgcgtgcattggagttactcaactacctcgccgccctgaacgacgatggggacctgactgagctagggagcatgatggctgagtttcccctggatcctcagctagctaagatggtgattgcatcttgcgactacaactgctcaaacgaggtgctgtcaatcacagccatgctgagtgtgcctcagtgcttcgttagaccaacggaagccaaaaaggctgccgacgaagctaagatgagatttgctcatattgacggggatcacctgacacttctcaatgtgtaccatgcctttaagcagaaccacgagtccgtgcagtggtgctacgataattttattaattacagatcattgatgagcgccgataatgtccggcagcagctttcacgaatcatggaccgcttcaacctgcccaggcgctccacggacttcaccagtcgcgattactacatcaacattcgaaaggcgctggtcacgggctacttcatgcaggtagcccacctggaacgcacgggtcactatctgactgtaaaggataatcaggttgtacagcttcacccctccaccgtgctcgaccacaagccagagtgggtcctatacaacgaattcgtccttaccaccaaaaattatatcaggacctgtaccgatataaagcctgaatggttggtgaagattgctccccagtactacgacatgagcaacttcccgcaatgtgaagcaaagcgccaactggataggatcattgccaagttgcagtctaaggagtattcacagtattag

SEQ ID NO: 114145 - DNA, 2355 bp, synthetic construct
  misc_feature 1..2355: note = Description of Artificial Sequence: Synthetic coding sequence
  source 1..2355: mol_type = other DNA
atgagcaaacgacaccggttggacctcggcgaagactatccctcaggtaagaagagagcaggaacagacgggaaagatagggaccgggatcgggaaagagataggggagatagggagcgggagagagagaaagaaaaggagaaagagctgcgggcctctaccaacgccatgctcataagtgcaggtctgcctcccctgaaggccagtcatagtgcccattccacgcacagtgcccactccactcacagcacacatagtgcccactcaacacatgccgggcacgccggacatacaagtctgccacagtgcataaatccatttactaacttgccgcatactcctcgctattacgacattctgaagaaaaggctgcagctcccagtgtgggagtacaaggacagatttacagatatactggtgcgccatcaatcattcgtgctggtgggcgaaaccggatcaggaaagacaactcagatcccccagtggtgcgtagagtatatgcgatccctccccggacctaagagaggtgtggcatgtactcagcccagaagggttgcggctatgtccgttgcccaacgcgtagctgatgagatggatgttatgctggggcaagaagtgggctatagcattcggttcgaggactgctctagcgctaaaaccatcctcaagtatatgacagacggaatgctgcttcgagaggccatgaacgatcctctgcttgagcgctacggcgttatcattttggatgaagcacacgagagaacattggcgacagacattttaatgggagtgctgaaggaggtcgttcggcagcgtagcgacctgaaggttattgtgatgtcggctactctcgacgctggaaaatttcagatttactttgacaattgccccttgctaacaatcccagggaggacacatcctgtggaaatcttctacaccccagagccagagcgggactatctcgaggcagcaatacggaccgtaattcagatacatatgtgtgaggaggaggagggcgacctgctcctcttccttacaggtcaagaggagattgatgaggcctgcaagcgcatcaaacgcgaagtcgacgatttgggtcctgaagttggagacatcaagattatccccctctacagtactcttccgcctcagcagcaacagcggatattcgagcctcccccccccaaaaaacaaaacggcgccattggccgaaaagttgtggtatcaaccaacattgctgagacgagcttaaccatcgacggcgtggtctttgtcatcgaccccggcttcgctaaacagaaggtctacaatccccggatcagggtcgagtcattactggtgaccgccatctctaaagcttcagctcaacagagggcaggccgggcaggccgcacgcgccctggaaaatgttttagactgtacaccgagaaggcctataagacggagatgcaggataacacatatccagagatcttaaggagtaatttggggtctgtggtgctgcagctcaaaaagctcggaattgacgatttagttcattttgatttcatggaccctcctgcacctgaaaccttgatgagagctcttgagctgctgaactacctggccgcattgaacgatgacggagatctcaccgaactggggtctatgatggccgagttcccccttgacccgcagctggctaagatggtgatcgcttcatgcgactacaactgttctaacgaggtactatccattactgccatgctctctgtcccacaatgcttcgtccgtccaaccgaggcaaaaaaagccgccgatgaggctaagatgaggttcgctcacatcgacggcgaccacttgacactgcttaacgtttaccacgctttcaaacagaatcatgaatcagtccagtggtgttacgacaatttcatcaattaccgatccttgatgagtgccgacaatgtgcgtcaacaactctctcggatcatggaccgtttcaacctgcctaggcgatccaccgacttcacctcacgcgattactacattaatattagaaaagccctcgtgaccggctactttatgcaggtggcacatctcgaacgcactggccattatctgactgtcaaggataaccaagtggtgcagttacacccaagcacagtgctggatcacaaaccagagtgggtcctttataatgaattcgtattgacgacgaagaattacattcgtacgtgtaccgacatcaaaccggagtggctcgtgaaaatagccccacagtactatgacatgagtaactttccccagtgcgaagccaagcgacagctggatcggataatcgctaagctgcagtccaaggaatatagtcagtattag

SEQ ID NO: 114146 - DNA, 1683 bp, synthetic construct
  misc_feature 1..1683: note = Description of Artificial Sequence: Synthetic coding sequence
  source 1..1683: mol_type = other DNA
atggaatcccaaccagcgcaggaatgtttgatgcagatgttcctgcctattgaacccgcgtgtttcgtcgagtggcttggaacctctccctcccaactgggagtcgtgatggtagatgaagcacatgagcgtacactgcacacagatatccttttcggcttaatcaaggacgtcgctcggtttcgccccgagttgaaagttctcgtagcaagtgcaaccatggatactgccaggttcagcacattcttcgatgacgcaccagtgttccggataccgggtcgtcggttccccgtggatatcttttatacgaaggccccagaggctgactatctggaggcatgcgtcgtgagtgttttgcaaatccacgtaacccaaccccccggggatatcctggtgtttcttacaggacaagaggagatcgaggcagcctgcgagatgctgcaggaccgttgcaggcgactgggctccaagattcgggaactcctggtgctgcctatctacgctaacctcccttctgacatgcaggctcgtatttttcagccaacccccccgggcgccaggaaggtcgtggtggccaccaatatcgctgagacgagcctcaccattgaggggattatttacgtgctcgaccccggcttttgcaaacagaaatcctataatccccgcactggcatggagtcactcacagtcaccccatgttctaaggcctcagcaaaccaacgggccggccgcgccggacgcgttgccgcaggcaagtgcttcaggctctacacggcctgggcctaccagcacgagctggaggaaacaacagtaccggaaatccaacgcacctcactcggaaacgttgtactcctgttaaagagcctggggatacacgacttgatgcactttgattttttggatccacccccatacgagacactcctattggctcttgagcagctctatgccctgggggccctgaaccacctgggcgagttgactacttctggccgcaaaatggctgagctacctgtcgaccccatgctctcgaagatgatcctggcgagcgaaaaatacagctgcagcgaagagatcctgaccgtggccgccatgttgtccgtgaataattctatcttctacaggcctaaggacaaagtcgtacacgcggacaacgctcgcgtcaatttcttcttacccgggggggatcacctggtgctgttaaacgtatatacacagtgggcagaaagtggatactcctcacagtggtgttatgaaaactttgtccagttcagatccatgcgtagggcccgggacgttcgagaacagctggagggcttactcgagcgcgtcgaggtggggctgagctcctgccaaggcgattatattagagtgagaaaagccattacagccggttatttctaccacactgctcggctgacaaggtccggttataggacggtgaagcaacaacaaacagtgttcatccatccgaattcttctttgttcgaacaacagcctcgatggttattgtaccatgagctggtgcttaccaccaaagaatttatgagacaggtgctggagatcgagtcctcttggctgctcgaagttgctccacactattacaaggccaaggaactcgaggacccccatgctaagaaaatgcctaagaagataggcaaaacccgggaggaactgggctag

SEQ ID NO: 114147 - DNA, 3126 bp, synthetic construct
  misc_feature 1..3126: note = Description of Artificial Sequence: Synthetic coding sequence
  source 1..3126: mol_type = other DNA
atggcaaccccagctgggttggagcgctgggtccaagatgaactgcacagtgtcttaggactgtccgaacgccacgtggcccagtttctgatagggacagcccagcggtgtacctcagcggaggaatttgtgcagcggctgagggatacggataccctcgatctgtctggcccggcacgggattttgcacttcgcctatggaacaaagtgcctaggaaggccgtggtggagaagccggcaagagccgccgagcgcgaagctagggcacttctcgagaaaaacagaagttatcgtctgttggaggactctgaggaatcaagcgaggaaaccgtcagccgggctggcagctctctgcaaaagaagcggaagaaaagaaagcatctgcggaaaaagcgggaggaagaggaagaggaggaagcctcagagaagggcaagaaaaagaccggggggtccaagcaacagacagagaagccagaaagtgaggacgagtgggagcgaactgaacgagagagactccaggaccttgaggagagggatgcatttgctgaaagggtacgtcagcgcgacaaagatagaacccgtaatgtgctggaacgatcggataaaaaagcctacgaggaagcgcagaagcgattaaaaatggccgaggaagatcggaaagctatggtcccagagcttcgtaagaaatccaggcgtgaatacctcgccaagcgcgagcgggaaaaactggaggacctggaagcagagctggcagacgaggagtttctgtttggcgatgtcgagctgtccaggcatgaaagacaggagcttaaatacaaaagacgcgttagagatcttgcccgagagtacagagctgccggcgagcaggagaagttagaagcaaccaatcgctatcacatgcccaaggaaacgcgggggcagcccgctcgagccgtcgacttggtagaagaagagtccggcgcccccggcgaagagcagagaaggtgggaggaggctcggctgggggcagcttcacttaagtttggcgctcgcgacgccgccagccaagaacccaaataccagctagtgctcgaagaggaggaaacaattgagtttgtgagggctacacagctgcagggcgacgaagaacccagtgcaccacccacatcaacccaggcccagcaaaaagaatcaattcaggcagtgcgtcgttccctgccggtttttcctttccgcgaagagttgctggctgccatcgccaaccaccaggtcctaattattgagggcgagaccggatcaggcaaaacaacccagatccctcagtacctgttcgaggaaggctataccaataagggaatgaaaatcgcatgtacccaaccccggagagtggcagccatgtcagtggccgctagggtggcccgggagatgggagttaagctgggtaatgaagttggctattcaatcaggttcgaggattgcacatccgaaaggacggttttaaggtatatgacagatggaatgcttctgagggaatttctgagtgaaccagatctagcttcctactccgtagtgatggtggacgaggcccatgaacgaactctacatactgacatactgttcggcctcataaaagacgtggcccgcttccgacctgagttgaaggttctggttgcatcagccacgatggacacagcccggttcagtacttttttcgacgacgcaccagtgtttagaatccctggcaggagatttccagtcgatattttttatacgaaagcacctgaagctgactatctcgaggcttgtgtggtgtcagtcttacaaattcacgtcacccaaccaccaggagacatcctcgtgttcctgaccggacaggaggaaatcgaggcagcctgtgaaatgctccaggatagatgtagacgcctcggcagtaagatacgggaacttttggttctgcccatctacgctaacctcccaagcgatatgcaagctaggatcttccagccaacacctcccggcgctagaaaggttgtggtcgctaccaatattgccgagactagtctaaccatcgagggtattatctacgtgctggaccctggcttttgtaaacaaaagtcttataaccctcggaccgggatggaatcattgaccgtgaccccctgttcgaaagccagtgcaaatcagagagccggcagagccgggagagtagccgccggtaagtgttttagactgtataccgcgtgggcataccaacacgagctggaggagacaaccgtacccgaaatccagcgcactagtctgggcaatgtagtgctcctcctgaagtctttagggatccatgaccttatgcatttcgatttcctggatcccccgccctatgagaccctccttctggcactcgaacagttgtacgcacttggcgcgctgaatcatctcggtgagctcactactagcggtcgaaagatggccgaattacctgtagacccaatgctgtctaaaatgatcctggccagcgagaagtacagttgttcagaggaaattctcaccgttgccgccatgttaagcgtgaacaactctatcttctaccggcctaaggacaaggtggtacacgccgacaacgcgagggttaactttttcctcccgggaggggatcacctggtgctgctcaacgtgtacacacaatgggcagaatctggctactccagtcagtggtgttacgaaaattttgttcagtttagatctatgcgcagagcacgcgatgtgagggagcagcttgagggactattggagagagtcgaagtggggctgtcctcgtgccagggggactatatcagagtcagaaaggccatcaccgccggatatttctaccacactgctcggctgacacggtccggttatcggacagtgaagcagcagcagaccgttttcattcacccaaattccagcctgtttgagcaacagccccgctggctcctgtaccacgagctggtgcttacgactaaagaatttatgaggcaggtgcttgagattgaatcctcctggttattggaagtggcaccacactactataaggccaaggaactcgaagatccgcacgccaagaagatgcccaagaaaattggcaaaacccgcgaggagctgggatag

SEQ ID NO: 114148 - DNA, 1683 bp, synthetic construct
  misc_feature 1..1683: note = Description of Artificial Sequence: Synthetic coding sequence
  source 1..1683: mol_type = other DNA
atggaatcgcagcccgcccaggagtgtttgatgcagatgtttttgcccatcgagccagcctgcttcgtcgaatggctggggacctccccaagccagctgggtgtcgtcatggtggacgaagcccacgaacggacactgcatacagacatcctgttcgggctgattaaagacgtcgctcggttcaggccagaattgaaagtgcttgtggccagcgctacaatggacaccgccaggttttctaccttctttgacggcgctccagttttcaggatcccgggccggagatttcctgttgatatattctacactaaggcccccgaggcagactatcttgaagcatgtgtcgttagtgtgctgcagattcacgtcactcagccccctggagatatcctggtgtttctaactggtcaagaggagatcgaagctgcgtgcgaaatgctgcaggacaggtgcagaagactggggtcgaaaattagagaactgctggtgttgcctatctatgctaaccttcccagcgatatgcaggcacgcatcttccagcccaccccaccaggggctaggaaggtcgtggtcgcaactaatatcgccgagacctcccttacaatagaaggtattatctacgtgctcgatccggggttctgcaagcagaaatcctacaaccccagaacgggaatggaaagcctcacagtgaccccctgctccaaggcgagcgctaatcagagagccggacgcgcgggacgtgtggcggccggtaagtgcttccgactttacaccgcatgggcttaccaacatgagttggaggagactaccgtccccgagatacagaggacaagtcttgggaatgtggtgctcctgctgaagtctcttgggatccatgacctgatgcattttgacttcctggatcctccaccatacgaaaccttgctgctggccctcgaacaactgtacgccctcggcgccctgaatcacttgggcgagctgacgaccagcgggagaaagatggccgagctgccagtggaccctatgctgagtaagatgatcctggcctctgagaagtacagctgcagtgaagagatcctgaccgtggcggccatgttatcagttaataattccatcttttacagacctaaggacaaggtggtgcacgctgataatgcgcgggtgaatttctttctgcccggtggtgatcacctcgttttgctgaatgtgtacacccaatgggccgaatctggctacagcagtcagtggtgttacgaaaacttcgtgcagtttcgttcaatgcggagagcgagggatgttcgagaacagctcgaagggttgctcgaaagggtagaggtggggctgagctcctgccaaggcgactacatcagggtgcgaaaggccatcacagccggctatttctatcataccgcccgcttgacccgcagtggttacagaacagtgaagcagcagcagaccgtgttcatccaccctaattcttcactgttcgagcaacagcctcgctggctgctttaccatgaattagtccttacaactaaggaatttatgagacaggttcttgagatcgaaagtagttggctcctggaggtggcaccccattactataaagcaaaagaactggaggatccacacgcgaaaaaaatgccgaagaaaatcggaaaaactagagaggaactcggatag

SEQ ID NO: 114149 - DNA, 3126 bp, synthetic construct
  misc_feature 1..3126: note = Description of Artificial Sequence: Synthetic coding sequence
  source 1..3126: mol_type = other DNA
atggcgacccctgctggactggaaaggtgggtgcaagatgaactccactcagtactgggtctcagcgaaagacacgtggcacagtttttgatcgggaccgcccagaggtgtacatctgcagaagagtttgtgcagcggctgagggacacagatactctggatctctctggccccgctagagacttcgcactgcggctgtggaataaggtgcctcgcaaagccgtggtggagaaacccgcacgcgcagctgagagggaagccagggccctacttgagaaaaatagatcatatagactccttgaagattcggaggagtcctccgaagaaactgtgtctcgggccgggtcatccctgcaaaagaagagaaagaaacgaaaacatctgagaaagaaacgagaagaggaggaggaagaggaggcctctgagaaaggtaagaagaagaccggcgggtccaaacagcagactgaaaaaccggagtctgaagatgagtgggaacgtaccgagagggagcgcctccaggacctggaagaacgagatgcctttgccgagagagtccgacaacgggacaaggaccgcactcgcaatgtgctggagcgctcagacaagaaggcatacgaagaggcccagaaacggttaaagatggcagaagaggacagaaaagccatggtccccgagcttcggaagaagagccgaagggaataccttgctaagagggagcgggagaagctggaggatctagaagccgaactcgctgatgaggaatttctctttggagatgtcgagctctcccgccatgaaagacaggagcttaagtataaaagaagagtgcgggacctcgctcgggagtatcgcgcggccggcgagcaagagaaactcgaggctaccaaccgatatcacatgcccaaagagacaaggggccaaccagcacgagcggtggacctggttgaggaagaaagtggcgctcccggtgaagaacagagacgttgggaggaggctaggttaggcgctgcgagcttgaagtttggggcacgcgacgccgcttcccaggagcccaagtatcaacttgtgctagaggaagaggagactatcgaattcgtgagggctactcagcttcagggcgatgaggaacccagcgccccaccaacttccacacaagcccagcagaaggagagtatccaggctgttcggcggtcactccccgtgttcccattccgcgaagagcttttggccgccattgccaaccatcaggtcctgatcattgagggggaaactggtagtggcaagaccacccaaatcccgcagtatctgttcgaagaaggctacacaaacaaagggatgaaaattgcatgcacccagcccagacgggtcgcagctatgtccgtggccgcacgggtcgccagggaaatgggcgtgaaactcggaaacgaagtcggatatagcatcaggttcgaggattgcacctctgagaggacagtgctgcggtatatgacggacggaatgctgcttcgggaattcttgtctgagcctgatttagcgagttactctgtggtcatggttgatgaagcacacgaaagaaccttacacacggatatattgttcggcttgattaaagacgtggctagatttagaccagaactgaaggtgctggtggcatccgcaacgatggacaccgcccgattcagcacgttcttcgatggtgcccccgtttttaggatccctgggcgccgatttcccgtcgacattttttatacgaaagcacccgaagccgattacctggaggcctgcgtggtgtccgtgctgcagatccacgtcactcaaccccccggcgacatcctggtcttcctcacaggccaggaggagattgaggccgcatgcgaaatgctgcaggaccgctgcaggaggttagggagtaagatccgcgagctgctagtactgcctatatacgcgaatctccccagtgacatgcaggcccgaatattccaacccactcccccaggagctcggaaagtagttgtcgccacaaatattgctgagacaagtctgactattgaagggatcatttatgtgctcgacccaggtttctgtaagcagaaaagctacaacccccgaactggaatggagtccctgacagtcacgccgtgctctaaggcctctgcaaaccagcgggctggccgcgccggacgcgtcgctgccggcaagtgcttcaggttgtatactgcgtgggcttatcagcatgaactggaagagaccacggtacccgagatacagaggacaagcctaggaaacgtagttcttctgctgaagtccttgggtattcacgacttaatgcacttcgatttcctcgaccctcccccttacgagactctgttgctggcgcttgagcagctctatgccctgggagcgctgaaccacctcggcgaactgacaactagcggtagaaagatggccgagctccccgtcgatccgatgctgtccaagatgattctggcgtcagaaaagtactcttgttccgaggagattcttacagtcgctgccatgttgtcggttaataattcaatattctataggcctaaggataaggtcgtacacgcagataacgcgcgggtgaactttttcttgcccgggggggaccaccttgttctgttaaatgtctacacacaatgggcagagtcaggctatagtagtcagtggtgttacgagaacttcgttcaattccgctctatgcggagggcacgggacgtacgggagcagcttgagggtctcttagagcgagtcgaagttggcctctcgtcctgtcagggggactatatacgagttcggaaggctatcactgccggctacttttaccatacggctcggcttactcgctccggctatcggactgtgaagcagcagcaaactgtgttcatacaccctaacagttctctattcgaacagcagccccgatggctgctctatcacgaacttgtactcacaaccaaggagtttatgagacaagtactcgagatcgagtcaagctggttgcttgaggtcgcaccccattactataaagccaaagagctagaagatccacacgcaaagaagatgcccaaaaagataggcaaaacccgcgaggagctagggtag

SEQ ID NO: 114150 - DNA, 1683 bp, synthetic construct
  misc_feature 1..1683: note = Description of Artificial Sequence: Synthetic coding sequence
  source 1..1683: mol_type = other DNA
atggagtctcaacccgcccaggagtgcctcatgcagatgttcctgcccatcgaacccgcctgctttgtcgaatggctgggcacttccccctcacagctgggtgtcgtcatggtggacgaggcccatgaaaggacgctgcacactgatatcctttttggtctgattaaagatgtggcacgctttaggccagaactcaaagtcctggtagcctccgcaaccatggacaccgctagattcagcacctttttcgatgatgcccctgtgttccgaatcccggggcgacgttttccagtggacattttctataccaaggccccagaagcggactatttagaggcctgcgtagtgagtgtcctgcagatccatgtgacgcagccccccggagacattttagtcttcctgacggggcaagaggaaatagaggccgcttgcgagatgctacaagatcgctgcaggcgtctagggagcaaaatcagagagcttttggtgttgcctatctatgcaaacctaccgagtgacatgcaggcaagaatcttccaacccacaccaccaggggcaaggaaggtggttgtggctacgaatatagctgagacaagtcttaccattgagggaatcatttacgtgttggatcctggcttctgtaaacagaagtcttacaatccccgcaccgggatggagtcccttactgttacaccgtgctccaaagcctctgccaatcagcgcgctgggcgggccggacgcgtggcagccgggaaatgcttcagactttacactgcatgggcttaccaacacgaactggaagagactacggtccccgagattcaaagaacctcattagggaacgtcgttcttcttcttaaaagtctcggtattcatgatctgatgcactttgactttctcgatccccctccttatgagaccctcctactggcactggagcaactctatgcactgggcgctctgaaccatctcggggaattgacgacctcaggacggaagatggcagagctgcccgtggacccgatgctttcaaagatgattcttgccagtgagaagtacagctgtagtgaggagattctgaccgtcgcagctatgctgtccgtgaacaattccatcttctaccgacccaaagataaggtggttcacgcggacaatgcccgggtgaactttttcttgccaggtggagaccacctggtgctgctcaacgtctatacccagtgggcagaaagcggctactcttcccagtggtgttatgagaacttcgtacagtttagaagtatgcgccgggctcgcgatgtacgagagcaactggaaggactcctggagagggtcgaggtgggccttagttcttgccaaggtgactacatcagggtgaggaaggcgatcaccgcagggtacttttaccacaccgcaagactcacaaggagcggataccgcacggtgaagcagcagcagacagtgttcattcacccgaacagttcactgtttgagcagcaacctagatggcttttgtatcacgaacttgttctgaccaccaaggagttcatgcgtcaggtcctggaaattgaaagctcctggctcctagaagtggctcctcattactacaaggcaaaagaactagaagatcctcacgcaaaaaaaatgccaaagaagattggcaagacccgggaggaactaggctag

SEQ ID NO: 114151 - DNA, 888 bp, synthetic construct
  misc_feature 1..888: note = Description of Artificial Sequence: Synthetic coding sequence
  source 1..888: mol_type = other DNA
atgtccgaagaccccagaggtcctaaagtgcctagaaaggcagtggtcgagaagcctgctagggccgctgaacgagaagcccgcgcactgttggagaaaaaccgaagttataggctgctggaggatagtgaggagtcatccgaagagaccgtcagccgggcgggatccagcctgcagaaaaagcggaagaaacgcaaacacctgagaaagaaaagggaggaagaggaagaggaagaggcaagcgagaagggaaagaagaagacagggggtagcaaacaacaaacggagaaacctgaatctgaggatgagtgggaacgcactgagagggaacgtctgcaggacctggaggagcgcgacgcctttgccgagcgagtgaggcagagggacaaggaccggacgcgaaacgtgttggaaagaagtgataagaaggcatatgaggaggcccagaagcggcttaagatggcagaggaggaccgaaaagccatggtgccagagctgagaaaaaagtccaggagggagtatctggccaagcgagagcgggagaaactcgaggatcttgaagcagagcttgcggatgaggagtttctcttcggcgacgtggagctttcccggcatgagcggcaggagttaaagtataaacgccgcgtgcgggatttggcacgcgagtaccgcgccgccggggagcaggagaagctggaggcaacaaatagatatcatatgcctaaggaaacaaggggacagccggcacgcgcagtggacctggttgaagaggagtctggagcccctggcgaagagcagaggcggtgggaagaagcacgtctcggcgcagcatcactaaagttcggggcgagagacgccgcaagtcaggagccgaaataccagctgtag

SEQ ID NO: 114152 - DNA, 3126 bp, synthetic construct
  misc_feature 1..3126: note = Description of Artificial Sequence: Synthetic coding sequence
  source 1..3126: mol_type = other DNA
atggctactccagctggcctggaacgctgggttcaagacgagcttcattctgtcctgggcttatcagagcgccatgttgcacagttccttataggaaccgcccagaggtgcacttcggctgaagaattcgtacaaaggctcagagacacagacactttggatctgtctgggcccgctagagactttgccctgaggctgtggaataaagttccacgcaaggctgtggttgaaaagcctgcccgggccgctgagagagaggcgcgtgcactgctcgaaaaaaacaggtcataccgcttactagaagactctgaggaatcttcagaagaaactgtcagtcgggcggggtctagtctccaaaaaaagagaaagaaacgaaagcacctgcgcaaaaagcgggaggaagaggaggaggaggaagcttccgagaaagggaagaagaagacaggtgggagcaaacagcagactgagaaaccggagagcgaggatgagtgggagcggacggagagagagagattgcaggacttagaagagcgggatgccttcgccgagagagtgcgccaaagggataaggaccggacgcgcaacgtgcttgagagatctgataaaaaagcttacgaagaggcccagaaacgccttaagatggctgaggaggaccgcaaggccatggtcccagagctacgaaagaaatcgcggcgggagtatctcgccaagcgggagcgcgaaaagttggaagacctggaagccgaactggcagacgaagaattcctgtttggcgatgttgaactgtctcgccacgagcgtcaagaattgaaatacaagagacgagttcgcgaccttgcccgagaatacagggccgcgggcgagcaggagaaactcgaagctacgaatcgttatcatatgccaaaggaaacccggggtcagcccgcacgagcggtcgacctggttgaggaggagagcggggcccccggcgaagagcagcggcggtgggaagaagcccgcctaggagctgctagccttaaattcggcgccagggacgccgcctcccaggagccgaagtaccagctcgtgctcgaggaagaagagactatcgagtttgtgagagccacgcagctgcagggagacgaagaaccatctgcaccccccacatccacccaggcccagcagaaagaaagtattcaggccgtgaggcgcagcctgccagtattcccctttagggaggagctcctggccgctattgcaaatcatcaagtgctgattattgagggcgaaacgggcagtggaaaaaccacccaaataccacagtatttatttgaggaagggtataccaacaaggggatgaagatcgcctgtactcagcccaggagggtggccgctatgtccgtcgccgctagagtcgctcgtgagatgggagtgaagctgggcaatgaggtggggtacagtatccggtttgaagattgtacatctgaacggactgtgctgaggtacatgactgacggtatgctgctgcgggagtttctctccgagcccgatctcgctagctactccgttgttatggtcgatgaggcccatgagcgcacgctgcatacagatatcctattcggacttattaaggacgtagctcgattccgacctgagttgaaagttttagtggcatcagctaccatggacacagctcgcttcagcaccttctttgatgacgcccctgtgttccggattcctggccggcgcttccctgtggatatcttttatacaaaagccccagaggcagattacctggaggcttgtgtggtgtccgtcctgcaaatacacgtcactcagcctccaggagacatcctggttttcctgactggccaggaagaaattgaggcagcgtgtgagatgctgcaggaccgctgtcgcagattagggagcaaaattcgggagctcttagtgctgccaatttacgctaatctcccaagtgacatgcaggcacgcatctttcagcctactccaccaggtgctcggaaggtggtcgtggctactaacattgctgaaacaagcctaaccatcgagggaattatttacgtcctggacccaggattctgcaagcagaagtcatacaacccacgtactggaatggagtctttgactgtaacaccatgctcaaaggccagcgctaatcagcgagctggacgggccgggagagtcgcagcaggcaaatgttttcgtctgtatacagcttgggcataccagcatgaactggaagaaaccactgtccccgaaatccagagaaccagtcttggcaatgtggtactacttcttaaaagcctgggcattcatgatctcatgcacttcgacttccttgacccccctccttacgagaccctgctgctggcactcgagcagctgtatgcgctgggggcgttgaaccacctcggagagttgaccacatctggccgaaagatggcagaactccctgtcgaccccatgctttccaaaatgatactcgcgagcgaaaagtactcctgctccgaagagatcctgaccgtcgctgctatgctgtctgtaaacaattccatcttctataggccaaaagacaaggtagtgcacgccgataacgctagggttaatttcttcctccccgggggcgatcatttggtgctgctgaacgtgtacacacaatgggcagagtcaggctactcatcacagtggtgttatgagaatttcgtccagttcagatccatgcggcgggcgagagacgtgcgcgagcaactcgaaggcctgctggaacgtgtggaggttggattatctagctgtcagggagactacataagagtgagaaaggcaattacagctggttacttctaccacactgcaagacttaccaggtcagggtatcggactgtgaaacaacagcagaccgtatttattcaccctaacagcagtctcttcgagcagcagccacgatggcttctgtaccacgagctcgtgctcaccacgaaagagttcatgcgccaggtgcttgagattgaaagctcgtggctgctagaggtcgcacctcattattacaaagcaaaagaattggaagacccacacgccaagaagatgcccaagaaaatcgggaagacacgtgaagagttggggtag

SEQ ID NO: 114153 - DNA, 3126 bp, synthetic construct
  misc_feature 1..3126: note = Description of Artificial Sequence: Synthetic coding sequence
  source 1..3126: mol_type = other DNA
atggcgacacccgctggactggagaggtgggtgcaggacgagcttcacagcgtgctgggacttagcgaaagacacgtggcacagttcctgatcggcacagcccagcggtgcacttcagccgaggagtttgtgcaaaggctgagagacactgataccctcgatctctccggacctgcccgagactttgctctccggctgtggaataaagtaccccgaaaagctgtggtggagaaacccgctagggccgccgaacgcgaagcacgcgccctgctggagaagaatcgatcatatagactcttggaggattccgaggaatcctcagaggagacggtatcacgcgccgggtcatctcttcagaaaaaaaggaaaaagcgcaaacatctgcgcaagaaacgggaagaggaagaggaagaggaggcctccgagaaggggaagaagaaaacaggcggaagcaagcagcagactgaaaagcccgaatcagaagacgagtgggagaggacagaaagggaacgtctgcaggacctggaggagcgcgatgccttcgcagagcgcgtgcgccagcgcgacaaagatcggacgagaaacgtcctggaacgaagcgataaaaaagcttacgaagaggcccaaaaaagactcaagatggccgaggaagaccgaaaggccatggtgcctgagttgcggaaaaagtcccgccgagagtacctggccaaacgcgagcgggagaagttagaggacctggaagcggaattggccgacgaagaatttctgtttggggacgtagagcttagtagacatgagcggcaggagctgaaatataaacggcgggtacgtgacctagctcgggaatatcgggccgctggggaacaggaaaaattggaggccactaacagatatcacatgcccaaagagacaagggggcagcccgcgagggctgtggaccttgtcgaggaggaaagcggcgctccaggcgaggagcagcggaggtgggaagaggcgcgactgggagctgcatctctcaagtttggcgctcgtgatgcggcatcacaggaacccaagtatcagcttgtgctagaggaggaggagactatcgagttcgttcgggctactcagctccagggtgacgaggaaccaagtgcaccaccaacgtcaacgcaagcccagcaaaaagagtccattcaggctgtgcgcaggtcactcccggtgtttcccttcagagaggagctgctcgccgcaatcgcaaaccatcaggtactgattatcgagggcgaaacaggaagcggaaagactacccaaattcctcaatatttgttcgaggaaggttataccaacaagggaatgaagattgcatgtacgcagccccgaagagtcgcagccatgtccgttgccgcccgagtggcgagagaaatgggcgtgaaattaggtaacgaggttggctacagcataagattcgaagattgtacctccgaacgcactgtcctgaggtacatgaccgatggcatgctgctcagggagtttctttccgagcctgacctcgcttcttacagcgtcgtgatggtagacgaggcacacgaaagaacacttcacactgatattttgttcggcctgattaaggatgtcgcccgcttcagaccggaactgaaagtgctggtggccagcgccacaatggacacagcccggtttagtacattcttcgacgacgcgccggtcttcagaattcctgggcggcggtttccggtggatatcttttatactaaggccccagaggccgactacctggaggcttgcgtagtgagtgtactgcagatccatgtgacgcaaccccccggcgacattctggttttcttaaccgggcaggaggagatcgaggccgcatgtgagatgctccaggataggtgcaggaggctgggctctaagattagggagctcctggtgctgccaatctatgctaacctgccttcagacatgcaggctaggattttccagccgacaccacccggagcacggaaagtggtggttgcaacaaacatcgcagaaacctcattgaccatcgaggggattatttacgtccttgatcctggcttttgcaagcagaaatcatataatccacgtaccggaatggagagcctcacggtcactccttgttccaaagcctcagccaatcaaagagccgggagagcaggaagagtggcagccggaaaatgttttaggctgtacaccgcctgggcataccaacacgagctggaggagacaacagtccccgagatacagcgcacttcgctgggaaatgtggtcctacttctgaagtctctgggcattcacgatctgatgcacttcgatttcttggacccgccaccttacgaaactctcctgctggccctggagcagctgtacgcgctaggggctctgaatcacctgggcgagctgactacatccggccgaaagatggctgaactgccggtggacccaatgctctctaagatgatactcgcatctgaaaaatattcatgcagtgaggaaatcctaaccgtggccgctatgctgagtgttaacaacagcattttttacagacccaaggacaaggtcgtacacgcggataatgcacgcgtcaatttttttctgccaggcggggaccacctggttctgctgaatgtgtatacacagtgggccgagtccggctactcatctcagtggtgctacgaaaattttgtccagttccgcagcatgagaagggcaagggacgtgcgcgagcaattggaaggcttactcgagagggtcgaggtcggcctctctagctgccagggagactacatccgggttcgaaaagctataaccgccggctacttctaccatacagccagactgacaaggtccggttataggactgttaagcagcagcagactgtctttattcaccccaactcttctttatttgagcagcagcccagatggcttctgtatcacgagctggtgctgacaacgaaagaattcatgcggcaagtcttggagatcgagtcttcctggcttcttgaggttgcgcctcattactacaaagccaaggagctggaggatccacacgccaaaaaaatgcctaagaagattgggaaaacacgggaggaactgggatag

SEQ ID NO: 114154 - DNA, 3126 bp, synthetic construct
  misc_feature 1..3126: note = Description of Artificial Sequence: Synthetic coding sequence
  source 1..3126: mol_type = other DNA
atggccacacctgccggactggagcgatgggtgcaagacgagctacactccgtgctaggactgtccgaaaggcacgtggctcaatttctcattggtaccgcacagaggtgcacatcggccgaggaattcgtgcagcggctccgtgacaccgataccctcgacctttctgggcctgctcgagatttcgccctgcgcttgtggaacaaagtgccaaggaaagccgtggttgaaaagcctgctagagccgctgagcgggaggcaagggcccttttggagaaaaatcggagctatcggttattggaggactctgaagagagtagtgaagagaccgttagtcgggcggggtcgtccttgcagaagaagcgaaaaaaaaggaagcacctgcggaagaagcgcgaggaagaagaggaagaagaggctagcgagaagggcaaaaagaaaactgggggctccaagcagcagacagaaaaacctgaatccgaagacgaatgggaaagaaccgagcgcgaaagacttcaggatttggaggagagagacgctttcgcagaaagagtgcggcagcgcgacaaggataggacccgaaacgtgctggaacggtctgacaaaaaggcctacgaggaagcccagaagcgactcaagatggcggaggaggacagaaaagccatggtgcccgagctccgtaagaaaagtcgcagggagtacctggccaaaagagagagggaaaagctggaggatcttgaggcggagttagcggacgaggagttcttgttcggagacgtcgagttgtctcgccacgagagacaagagctgaagtacaagagacgggtacgcgatctggcgcgcgagtaccgtgccgccggtgagcaggagaagctggaagccaccaacagataccacatgccgaaggagacccggggccaaccggctagagcagtggatctggtggaggaggagagcggcgcccccggagaagagcagcgcagatgggaggaggcccggctcggggccgcaagcctgaagttcggtgccagagatgcagcatcccaagaaccgaaatatcagctggtgttagaagaggaggaaactattgaatttgtacgcgcaacacagctgcaaggagacgaggaaccttcagctcctccaacatccacacaagctcagcagaaagagtcaattcaggccgtcaggcgctcactgcccgtgttcccatttcgggaagagctcctagctgcgatagcaaatcaccaggttcttatcatcgagggcgagacaggctccggaaagacaacccagatcccccagtatttgtttgaggaaggctacactaacaaggggatgaaaatcgcgtgcactcagcctaggagggtcgccgctatgagcgtggccgcccgtgttgcccgtgagatgggggtcaagctgggaaacgaggtcggatacagtattcggttcgaggattgtacatcggaaagaaccgtgctgcgctacatgaccgacgggatgttactccgtgagttcctgagtgaacccgaccttgcatcctactcagtcgtgatggtggacgaagcacacgagcgaaccttgcacacggacattctgttcggtctcattaaggacgtcgctagatttcgacccgaactgaaggtgctggtcgcatcagccactatggacacagcccggttttcaacattcttcgacgatgctcctgtgtttcgcatccctgggaggagattccccgttgatatcttttacacaaaagcacccgaggctgactaccttgaggcttgtgtcgtgtctgtcttacaaattcatgtgactcaacccccaggcgacatcctagtgttcttgacaggccaggaagaaatcgaagctgcatgcgagatgctccaggatagatgtagacggttagggtccaaaatcagggagttgctagtgctgcctatctacgccaatttgccctccgacatgcaggcccggatctttcagccaacgcctcctggggcaagaaaggtcgtggtcgcgaccaacatagctgaaacatcccttactatcgaaggtattatatacgtactggaccccggcttttgtaagcagaagtcctacaaccccagaaccgggatggagtccctgacagtgactccctgcagcaaggctagcgcgaaccagcgggcaggccgcgcaggccgggtggccgccggtaaatgcttccgcctgtatacagcatgggcctaccagcatgagttggaggaaactacagtgcctgaaatccagagaaccagtctggggaacgtcgttctgctgctgaagagcctgggcattcacgatcttatgcattttgacttcttagatcctcccccgtacgaaaccttgctgctggcgcttgagcagctctatgctcttggggcactgaatcatctgggggagctgactacctccgggagaaagatggccgaattgcccgtggatccgatgctttccaagatgatcctggcatccgaaaaatattcttgttctgaagaaatattgactgttgccgccatgttgagtgtgaacaacagtattttttaccgccctaaagataaggtggtccacgccgataacgcccgcgttaacttttttctccctggtggagaccatctggtgctcctgaacgtttatacccagtgggcggaatccgggtactcaagccagtggtgctacgagaacttcgttcaatttagatcaatgcgacgggccagggacgtccgtgagcaacttgaagggctgctggagcgagtggaggtggggctttcaagttgtcagggcgattacatacgagtacgcaaggccattaccgctggctatttttatcatacggctcgtttgacacggtctggttaccggaccgtcaagcagcagcagacggtgtttatccacccaaactcttcgctgtttgaacaacagcccaggtggttgctgtatcatgagcttgtgttaaccaccaaggagtttatgcgacaagtgctggaaattgaatcttcttggctgctagaggtggcgccccactattataaagctaaagagttagaagatccccacgcgaagaagatgcccaagaagatcgggaaaactcgcgaagagctggggtag

SEQ ID NO: 114155 - DNA, 888 bp, synthetic construct
  misc_feature 1..888: note = Description of Artificial Sequence: Synthetic coding sequence
  source 1..888: mol_type = other DNA
atgtcagaggatccccgggggcccaaggttccaaggaaggctgtggtggaaaaacccgctcgcgcagcagaacgagaggccagagctctcttagaaaaaaacaggagctaccgcttgcttgaggatagcgaggaatcctccgaggaaacagtctcccgggccggtagcagcctgcagaagaagcgcaagaaacgcaaacacctgcggaagaaacgggaggaagaggaagaggaagaagcctctgagaagggcaaaaagaaaaccggtgggtccaagcagcagactgagaaacccgagtccgaggacgagtgggagcgaacagagcgcgagcgactccaggaccttgaggagcgagatgctttcgctgagagagtgcggcagcgcgataaagacagaactaggaacgtgctggagagaagtgacaaaaaagcatacgaggaggcgcaaaagcggctgaaaatggcagaggaagacaggaaggcaatggtccctgaactgaggaaaaaatcccgcagggagtacttggctaagcgggagcgggagaagctggaggatctggaggccgagctggctgacgaggaattcctgttcggcgacgtggaactttcgcgccatgagcgacaggaattaaagtataaacgcagagtccgcgatctcgcgagagaatatcgcgccgcaggtgaacaggagaaactagaggcaactaacagataccacatgcctaaagagacacggggacaacctgccagagccgtcgatctggttgaggaggaaagtggggcccccggtgaggagcaacgccgctgggaagaagcccggttaggtgccgcatcactcaaattcggcgcacgtgacgccgcctcacaggagcccaaatatcagctgtag

SEQ ID NO: 114156 - DNA, 888 bp, synthetic construct
  misc_feature 1..888: note = Description of Artificial Sequence: Synthetic coding sequence
  source 1..888: mol_type = other DNA
atgagcgaagaccctcgcggccccaaggtcccccggaaagcggtggtagagaagcccgctcgggccgcagagagagaggctcgggccttgctagaaaagaaccggtcctatagacttctagaggattccgaggaatcatctgaggagactgtttcccgtgccggctcatccctgcaaaagaagcgtaaaaaaagaaagcacctgaggaagaaacgagaggaagaagaggaagaagaagcctccgagaagggtaagaagaaaaccggcggctcgaagcagcagaccgagaaaccggaaagcgaggacgagtgggaacggacagaaagagaaaggttacaggatctggaggagcgggatgcattcgctgaacgggtgcgacagagagacaaggacaggacgagaaacgtgctggaaagatccgacaaaaaagcatacgaggaggcccagaagaggctaaaaatggcagaggaagaccggaaagccatggtccctgagctgagaaaaaaatctaggagagaatatctggctaaacgagaaagagaaaagcttgaagatctggaagccgaactggccgacgaggagtttctcttcggagatgtggagctctccaggcacgaacggcaagagctgaagtataaacgacgggtacgggatctggcgcgggagtatcgggccgccggagagcaagagaagctagaggccactaacaggtaccacatgcccaaagaaaccaggggccagccagcacgggccgttgacctagttgaagaggagtccggcgcccctggagaggagcagcgacggtgggaggaagctagattaggagccgctagcctcaagttcggagcgcgggacgccgcttctcaagagccaaagtaccagctttag

SEQ ID NO: 114157 - DNA, 1683 bp, synthetic construct
  misc_feature 1..1683: note = Description of Artificial Sequence: Synthetic coding sequence
  source 1..1683: mol_type = other DNA
atggagtcccagccagcccaggaatgtcttatgcagatgttcctgcccatcgaaccggcgtgttttgtcgagtggttgggaacttcaccttcccagctgggggtagtgatggtcgacgaagcacacgagcggactctgcacaccgatatcttgtttgggctgataaaggacgtggcccgtttcaggcctgaactaaaagtgctcgtcgcatccgctaccatggacacggctaggttctccactttctttgacgacgccccagtctttaggatccctggacggcgatttcctgtagacatattctacacaaaggcaccggaggcggattatctcgaggcatgcgtcgtgagtgttttgcagatacacgtaactcaacctcccggggacatcttggtgtttctgacgggccaggaagagatcgaagctgcatgcgaaatgttgcaggaccgttgcaggcgtcttggaagtaagattagggagctgcttgtgctgccgatttacgctaatctgccaagcgacatgcaggcacgtatattccagcctacgcctccaggcgcccgaaaggtggtcgttgctactaacatcgctgagacgtcactcactatcgagggcatcatctatgtgctggacccaggtttctgcaagcaaaagtcttacaatcccaggacagggatggaaagcttgacagttaccccatgctccaaagcatccgccaaccagcgtgccggaagggcgggccgggtggcagcgggtaaatgcttcaggttgtacactgcatgggcttaccagcacgagctggaagaaaccacggtgcctgaaattcaacgcacatcactgggaaatgtggtgctgttgctgaaatcgcttggaattcacgacctgatgcactttgactttttagacccccctccatacgaaactctgctactggccttagaacagctttatgctcttggcgctctgaaccaccttggcgaactgaccacctctgggcgtaaaatggcagagctcccagtggatccaatgctgtctaagatgattctcgcctcagaaaaatacagttgttcggaagaaattctgactgtcgccgccatgttatctgttaataactctattttttacaggcccaaggataaagtagttcatgccgataacgctagagtgaatttcttccttcctgggggtgaccacctggttctgctgaatgtgtacacccagtgggctgaaagcggctatagttcacagtggtgctacgaaaattttgtgcagtttagatccatgaggcgcgcgagagatgtgcgagagcaacttgaagggctcctggagcgagttgaggtgggtctatctagctgccagggagactacattcgcgtgaggaaagctataactgcaggatacttctatcatactgcaaggctgacccgcagtggctacaggaccgtcaagcagcaacagaccgtgtttatccaccctaattcaagcctgttcgagcagcaacctcgttggcttctttaccacgaattagtactgacaactaaggagtttatgcgtcaggtgttagagatcgaatcctcctggcttctagaggtagccccgcactattataaggcaaaggagttggaagatccccatgcaaagaaaatgcccaagaagattggaaagaccagggaggagctgggctag

SEQ ID NO: 114158 - DNA, 888 bp, synthetic construct
  misc_feature 1..888: note = Description of Artificial Sequence: Synthetic coding sequence
  source 1..888: mol_type = other DNA
atgagtgaagacccccgcgggcctaaggttccccgcaaggccgttgtcgagaagccagcccgcgcggcagagcgagaagcccgggccttactggagaagaaccggtcctatcgtttactggaggattccgaagagtcaagcgaggagaccgtgtccagagcgggctcatccctacagaagaaaaggaagaaaagaaagcacttaaggaaaaagcgcgaggaggaggaagaggaagaagcgtcggagaagggcaagaaaaagaccggaggatcaaaacagcagaccgagaaacccgagagcgaggatgaatgggagagaacagagagagagcggttgcaggatttagaggagcgcgacgcctttgccgaaagagtgagacagagggacaaggatcgcactcggaatgtcttggagcggtctgacaagaaagcttatgaggaagcgcagaagcgcctaaaaatggccgaggaagaccggaaagcgatggtgcccgagctaagaaaaaagtccaggcgcgagtatttggcaaaaagggaaagggagaaattggaagacctggaggccgagctggccgacgaagagttcctgttcggagacgtggaactgtctcggcacgaaagacaggagttgaagtacaaaaggcgggtacgtgatctggcaagagagtaccgcgcagctggcgagcaagaaaagctggaagcaacaaatcggtatcacatgcccaaggagacccgtggccaacccgccagggccgtcgacctcgtcgaagaggagtctggcgcccctggtgaagagcagaggcggtgggaggaggccaggctgggcgcagcgagcctcaagttcggcgctagagatgccgcaagtcaggaaccaaagtaccagctgtag

SEQ ID NO: 114159 - DNA, 888 bp, synthetic construct
  misc_feature 1..888: note = Description of Artificial Sequence: Synthetic coding sequence
  source 1..888: mol_type = other DNA
atgtctgaggacccacgcgggccaaaggtaccgaggaaggccgttgtcgagaaaccagctcgcgccgccgagcgagaagcccgggctctacttgagaaaaaccggtcttacagactcctcgaagattcagaagagtcgtctgaagaaaccgtgtccagggccggctcaagcttacaaaagaagagaaaaaaacggaaacacctgcgaaagaagcgtgaggaggaagaggaagaggaggcttcggaaaagggaaaaaagaagaccggcggttcaaagcaacagactgagaagcctgagtccgaggatgaatgggaaaggaccgagcgggagagattgcaggatttagaggaaagggacgcgttcgccgaacgagtccggcagagggacaaggatcggactagaaacgtgctggaacgtagcgataagaaggcgtacgaggaggcccagaaacggcttaaaatggccgaagaggatcgaaaagccatggtcccagagctcagaaagaaaagtcggagggagtatctggccaagcgagaacgcgagaaactggaagatctcgaggcggagctcgcagacgaggagttcctattcggtgatgtagaactgtcccggcatgaacgccaggaacttaagtacaagcgaagggtgagagatctggctcgtgagtatagggcagccggcgagcaggagaagctcgaggctactaatcggtaccatatgcctaaggaaaccagaggccagcctgccagagccgtagacttagtggaggaggagtctggtgcacccggcgaggaacaaaggcggtgggaagaagcacggctgggagctgccagtcttaagttcggggcacgagatgccgccagtcaggaacccaagtaccaactgtag

SEQ ID NO: 114160 - DNA, 888 bp, synthetic construct
  misc_feature 1..888: note = Description of Artificial Sequence: Synthetic coding sequence
  source 1..888: mol_type = other DNA
atgagcgaggatccccgagggcccaaggtaccaagaaaggcggtggtagagaagccggcccgggcagccgaacgggaagctcgcgcactgctagaaaaaaaccgcagctatcggctcctggaggactcagaagagtccagcgaggagactgtgtcaagagccggcagtagtcttcaaaaaaagcgcaagaaacggaagcacctccgcaaaaagagggaggaggaggaagaggaggaggcatcagagaagggaaagaaaaagacggggggaagcaaacagcagacagagaaacctgagtcagaagacgaatgggagaggacagagcgcgagcggcttcaagatctcgaagagcgggatgcgttcgcagagcgcgtcaggcagagggacaaggacaggacacgcaatgtgctggagaggtccgataagaaggcttatgaagaggcacagaagaggttgaagatggctgaagaggatcggaaggctatggtaccagagttacgcaaaaaatcgagacgagagtatctcgccaagcgcgaacgcgaaaaactggaggatctcgaagcggaactagccgacgaagagttcctcttcggcgacgttgaactctctcggcatgaaagacaggaactgaagtacaagagacgggtaagggaccttgctagggagtatcgcgctgctggtgaacaggagaaactggaggctactaaccggtaccacatgcccaaggagacccgcggtcaaccagcccgggccgtcgacctggtggaggaagagagcggtgcccccggagaggaacaacgcagatgggaggaagcgaggctgggagctgcgtccctcaagtttggggctagggacgccgcaagtcaggagcctaagtatcagctgtag

SEQ ID NO: 114161 - DNA, 888 bp, synthetic construct
  misc_feature 1..888: note = Description of Artificial Sequence: Synthetic coding sequence
  source 1..888: mol_type = other DNA
atgtcagaggacccaagaggtccgaaagttcctagaaaggccgtcgtcgaaaagcccgctcgcgcagccgaaagagaggccagagccttgttggagaaaaacaggagttatcgccttttagaggatagcgaggaaagctctgaggagactgtatcccgagcaggctcaagtctgcagaaaaagaggaagaaaaggaagcacctgaggaagaaacgcgaggaagaagaggaggaagaagcttcagaaaagggaaaaaaaaaaaccggagggagcaagcagcagaccgaaaaacctgagtcggaggatgaatgggaacggaccgagagggaacgtctccaggacttagaagagcgcgatgccttcgccgagcgagtgagacagcgggataaggaccggacgagaaacgtgctcgagaggtcagataagaaggcctatgaagaagcgcagaagaggctgaaaatggccgaggaagacagaaaggcaatggtccctgagttgagaaagaaaagccggcgggagtacctggctaagcgggagcgcgagaaattggaggacctcgaggctgagctggctgacgaagagtttttatttggcgatgtcgagttatcacgacatgagcggcaggagcttaagtataaacggcgtgtgagagatctggcccgagagtacagagccgccggcgagcaggaaaaactggaagccaccaaccggtatcatatgccaaaggaaactaggggtcaacccgctagagccgtggatctcgtagaggaggagagcggtgctcctggagaggaacaacggaggtgggaagaagcaagacttggggcggcaagtctcaagttcggtgcacgcgacgccgcttctcaggagcctaagtaccagttgtag

SEQ ID NO: 114162 - DNA, 1683 bp, synthetic construct
  misc_feature 1..1683: note = Description of Artificial Sequence: Synthetic coding sequence
  source 1..1683: mol_type = other DNA
atggaatcccagccagctcaggagtgcttgatgcagatgtttctgccgattgagccagcatgtttcgtggagtggctggggacatccccgtcgcagctcggggtcgttatggtcgatgaggcccacgagcggactctccacaccgacattctgttcggcctcatcaaagacgttgctcggtttcgccctgaattaaaggtgctagtggcatctgctaccatggacacggctcgattcagcaccttctttgatgatgccccagtatttcggattccaggcagaagatttcccgtcgacatattttacaccaaagctcccgaggcggattacctggaagcctgcgtcgttagcgtactgcagattcatgtgacacaacctcccggggacatcctggtgtttctgaccggacaggaggagattgaagccgcctgtgaaatgcttcaggacagatgccggcgattgggcagtaagataagggaactgcttgtgctccccatatatgctaatctgccaagtgatatgcaagctcgcatatttcagccaacccctcctggagcgcgcaaagtggtggtggcaacgaatatcgccgagacaagtctcacgatcgaggggatcatatacgtattggatccgggattttgcaagcaaaagagctacaatccgcggacaggaatggaatctttaaccgtaactccctgcagtaaggcttcagcgaatcaacgggccggccgcgccgggagagtcgcagctggcaagtgttttaggctgtacactgcctgggcatatcagcatgagttagaggagacgaccgtaccagagatccagagaacctccctgggcaatgtggtgctgttgctcaagagtttagggatccatgatctgatgcacttcgacttcctagaccctccgccttatgagaccttactgcttgctctcgagcaattatatgctcttggcgccctgaaccatctgggtgagcttacgacctcagggaggaaaatggcggagctccccgtggaccctatgctaagcaaaatgatcttggcctctgagaaatattcctgttccgaagagatcctgacggtcgctgcgatgctgtcagtgaataatagcatcttctatcggcccaaagataaggtggtccatgctgacaacgctagagttaattttttcctaccgggtggtgaccacttggtcctcctcaatgtctatactcaatgggcagaatccgggtactcgtcccaatggtgttacgaaaattttgtccagttcaggtcgatgcggcgtgcacgcgacgttcgcgaacagctcgagggcctgctggaaagggtggaagtcggcctgtcaagctgccagggggattacatcagggttaggaaggcaatcaccgccggctacttttatcacaccgcccgactgacaaggagtggataccggacagtcaagcaacaacaaactgtcttcatccaccctaacagcagcttgttcgaacagcagcctaggtggctcctctatcatgagttggtactcaccaccaaagaatttatgaggcaggttctggagatagaatcttcatggttgttggaggtggcaccgcattattataaagcgaaggaactggaggatcctcacgctaaaaagatgccaaaaaaaatcggcaagactcgtgaagaactcgggtag

SEQ ID NO: 114163 - DNA, 888 bp, synthetic construct
  misc_feature 1..888: note = Description of Artificial Sequence: Synthetic coding sequence
  source 1..888: mol_type = other DNA
atgtcggaggaccctaggggacccaaggtcccacgcaaggccgtagtggagaagcctgcccgcgcggctgaacgagaggcccgcgcactcctggagaagaatcggtcctatcgccttttggaagatagcgaggaaagttccgaagagaccgtatctcgggccgggagtagtctgcagaaaaaaagaaagaaacgaaaacatcttcgcaagaagcgtgaagaggaagaggaagaggaggccagcgagaagggtaaaaagaagactggaggttcaaaacaacagacagaaaagccagagtctgaggacgagtgggagaggaccgaaagggaacggttgcaggacttggaggaacgggacgctttcgccgaaagagtcagacaaagagataaggaccgcactcggaatgtgctcgagcgatccgacaaaaaggcatatgaggaagcccagaagaggctcaagatggccgaggaagatcgtaaggccatggtgcctgaactccggaagaagtctcgccgcgaatatctggcaaagcgggagcgcgaaaaactggaagacctggaggcagaattggccgatgaggaattcttatttggcgatgttgaactgtctagacatgagcggcaagaattgaagtacaagaggcgggtgcgcgatttggcacgagaatatagggcagctggcgagcaagaaaaactggaggctaccaataggtaccatatgcctaaggagacccgtgggcagcccgctcgggcagtggatctcgtggaggaggaatccggggccccaggggaagaacaacgccgctgggaggaggcccgtctgggcgctgctagcttgaagtttggggccagggacgctgctagccaggaacccaagtaccagctctag

SEQ ID NO: 114164 - DNA, 2010 bp, synthetic construct
  misc_feature 1..2010: note = Description of Artificial Sequence: Synthetic coding sequence
  source 1..2010: mol_type = other DNA
atggccacgcccgcgggtcttgagagatgggtgcaggacgagctacacagtgtcctagggctgtctgagaggcatgtggctcagttcctgatcggtaccgcgcaaagatgcacaagtgccgaagagtttgtgcaacggctgagagatacggatacgctggatttgagtggcccggcccgcgacttcgccctcaggctctggaataaggttccaagaaaggcggtagtggagaaacctgcgcgggcggcagagagagaggctagagccctgctcgagaagaataggagttaccgtcttctggaagattcagaggagtcctcggaggagacagttagcagggctggctcttccttacagaagaaacgaaagaagagaaaacacttgcggaagaagagagaggaggaagaggaagaagaggcaagtgaaaagggaaagaaaaaaacaggtggttctaagcagcaaacggaaaagcccgagagcgaggacgaatgggagaggacggaacgggagcggctgcaggatctggaagagcgcgatgcgttcgcagagcgggtgagacagagggacaaagataggacaagaaacgtgctcgaaagatccgacaagaaggcatacgaggaagctcagaaacggcttaagatggccgaagaggacaggaaagccatggttcccgaacttcggaaaaaatccagacgagaatatctggccaaaagagagcgtgaaaagctagaggacctggaggctgaactagcagacgaggagttcctgttcggggatgtggaactcagccggcacgaaaggcaggagctcaaatataaacgcagggtgagagacctggccagagagtacagagctgctggagagcaagaaaaacttgaagctaccaaccgctaccatatgcccaaagagactagaggacagcccgccagagcagtcgacctagtggaggaggagagcggcgctcccggtgaagaacaacgtagatgggaagaggcaagactgggggccgcctctctgaaatttggagccagggacgccgccagccaggagccgaagtatcagctggtgctggaggaagaagagacaatcgagtttgtccgggccactcagttgcagggggatgaagaaccttctgcaccacctacctcaacacaagcccaacagaaggaaagtatccaggccgttaggcggagtctgccggttttcccctttcgtgaagaactgctcgctgccatcgctaatcatcaggtgctcattatcgaaggtgagacaggtagcgggaagacaacccagataccccagtatctgtttgaggagggatatactaataaaggcatgaaaatagcttgtacacagcctagacgagtcgccgcaatgagcgttgcagcccgtgtggctcgggagatgggtgtgaagttggggaatgaagtgggttatagcatacggtttgaagattgtacgtcagaacgcacagtgctgagatatatgaccgacggaatgctgcttcgggagtttctgagcgaaccggatctcgccagttattcggtcgtgatggtcgacgaggcccacgaacgcacacttcacaccgatatcttgtttggcctcatcaaggatgtcgccagattccgtcctgagttaaaagtattggtggcaagcgctaccatggataccgcacggttcagcaccttctttgacgacgcacccgtatttcggatacccggaaggaggtttccagtcgatatattctacacaaaggctcctgaagccgattacctggaggcttgcgtcgtcagcgtgctgcagattcacgttacccagccaccaggtgacattctagtgttccttacaggacaagaggagattgaagccgcctgtgagatgttgcaggatcgttgtcgccgtctgggctccaagattcgggaactactagtacttcctatctacgctaatttaccctcagatatgcaggcgcggatctttcagcccactcctcctggtgcccgcaaatag

SEQ ID NO: 114165 - DNA, 3126 bp, synthetic construct
  misc_feature 1..3126: note = Description of Artificial Sequence: Synthetic coding sequence
  source 1..3126: mol_type = other DNA
atggctactcctgctggactagaacgctgggtacaggacgagctgcacagtgtgctcgggctgagcgagagacatgtcgcccaattcctcattggcaccgctcaacggtgcacctctgcagaagagtttgtgcagagattacgcgacacagatacgctggatttgtcgggccccgcaagagactttgcgctgaggttatggaacaaggtgcccagaaaggcagtggtggaaaagcctgcacgggccgcggagcgcgaagcccgtgcccttcttgaaaagaacagaagctaccgcttgctcgaggacagtgaggaatcttcagaagagactgtgagcagggctgggagttctttgcagaaaaagaggaaaaaacgtaaacacttacgcaagaaaagggaggaggaggaggaggaagaggcttccgagaagggaaaaaagaaaacaggcgggtcaaagcagcagaccgagaagccagagtctgaagacgagtgggagagaacagagcgggaacggttgcaggatcttgaagagcgggacgctttcgctgagcgggtgcgccagagagacaaggacaggaccaggaacgtcctagaaagatcagataagaaggcatacgaggaggcccagaaacgtctcaagatggctgaggaggacaggaaagccatggtcccagaactgaggaaaaaaagccggcgggagtaccttgctaaacgtgaacgcgaaaagctcgaagatctggaagcagaactcgctgacgaggagtttttgttcggggacgtggagctttctcgtcacgagcgccaggaacttaaatataagcggcgggtacgcgatctggcacgggaatatcgggccgcgggcgagcaagagaagctggaagcaacaaacagataccatatgcctaaggaaacccggggccagcccgctcgggccgtcgacctggtcgaggaagaaagcggtgctcccggcgaagaacaaagacggtgggaagaagcgcgcctcggcgctgcaagtcttaagttcggcgcaagagacgctgcatctcaggagcccaagtatcagttggttctggaggaagaggagactatcgaatttgtgcgggctacccagttacagggggatgaagagcctagcgcacctccaaccagcacccaagcacagcagaaggagtccattcaggctgtgcgacggtcattacctgtcttcccctttagggaggagctgttagctgccattgcaaaccaccaggtactcataatcgagggagagacgggaagcgggaagactacgcagataccacagtacctgttcgaggaaggctacaccaacaaagggatgaaaatagcgtgtactcagcctagacgcgtggccgccatgtcagtcgctgcccgggttgcccgcgaaatgggtgtaaagcttggaaacgaggtgggttactcaatacggttcgaggactgtaccagcgagcgtaccgttttacgctatatgaccgatgggatgctcttgcgcgaattcctttccgaacccgacctcgccagctacagcgtggtgatggttgacgaagcccatgagaggaccctccacaccgacatcctgttcgggttgatcaaagacgtggctcgattccggccagagttaaaagtgttggttgcgtctgcaaccatggacacagccagattcagtactttttttgatgatgcccccgtgttcagaatccccgggagaagattccctgtggatattttttatacaaaggcccctgaggccgactacctggaagcttgtgtcgtgagtgtgctgcagatacacgtgacccagccaccgggcgatatcctggttttcttaaccggtcaggaggagatcgaggcagcgtgtgagatgctgcaggatcgatgtcgccggctggggagtaaaattcgcgaactccttgtcctgcctatttacgctaacttaccttcggacatgcaagcccggatattccagcctacccctcctggggctaggaaagtcgtggtagctacgaacattgccgaaacgagcctcacaatcgaaggaattatctacgtgcttgacccagggttttgtaaacaaaagtcctataatcctcggactggtatggaaagtctgaccgtgacaccctgttctaaggctagtgcaaaccagcgagcaggaagggccgggagagtggctgccggcaagtgtttccgcctgtatacagcttgggcttaccagcatgagctggaggagaccaccgtgcccgagattcaaagaacaagcttgggcaatgtcgttcttctgctaaagtcactggggattcacgatctcatgcactttgattttcttgacccaccaccctatgaaaccctgctgttggccttagaacagctgtacgctctgggggctcttaatcacttaggtgagctgacgaccagtggccgcaaaatggccgaattgccagtcgaccccatgctgagtaaaatgatcctggcatcagaaaagtactcctgcagtgaggagatccttacagtggcagccatgctgtctgtcaataactctatattttaccggccgaaagataaggtggttcatgctgacaacgctagagttaacttttttctgccaggcggcgaccatctggtcttactcaatgtatatacccaatgggctgagtctggatactcctcccaatggtgctacgagaactttgtgcagttccggtcaatgcgtcgggctagagacgtgagggagcagctggaagggcttctagaacgggtggaagtaggattgtcaagctgtcagggagattatatcagagtgaggaaggctataacggccgggtacttctatcatacggctaggctaacgaggagtggttatcgcaccgtgaaacagcaacagacagttttcattcaccctaattcatcccttttcgagcagcagcctagatggctcttatatcacgagctggtgcttaccacgaaggagttcatgcgccaggttctcgagatcgaatctagttggttgctggaggtggctccccattattacaaggccaaggaactcgaagacccgcatgctaagaaaatgcccaaaaaaatcggaaagacccgggaggagctgggctag

SEQ ID NO: 114166 - DNA, 1683 bp, synthetic construct
  misc_feature 1..1683: note = Description of Artificial Sequence: Synthetic coding sequence
  source 1..1683: mol_type = other DNA
atggagtcccagccagcccaggaatgtctgatgcaaatgtttttgccaattgagcccgcttgctttgtcgaatggttggggacttcaccatcacagttaggggtagtgatggtagatgaggctcacgaaaggacactccacacagacatcttgttcgggttgatcaaagacgtagcgagatttagacccgagctcaaggtgcttgtggcttctgccacgatggataccgccagattctccaccttcttcgatgatgcacctgtcttcagaattccgggtcgccgctttcctgttgatattttctataccaaggctcccgaggcagattacctcgaagcttgcgtggttagcgtgctccagatccacgttactcagccacccggcgatattttggttttcctgactggccaggaagaaattgaggccgcctgcgaaatgctccaggatagatgtaggaggctgggatcaaaaattcgggaactactggtgctacctatttatgccaatcttccatctgacatgcaagcccgaatctttcagccgacaccacccggcgcccgcaaagtggtcgtcgcaacaaatattgccgagacaagcctgaccattgaaggtataatttacgtgctggaccccggcttctgtaagcagaagtcttacaacccccgcactggcatggaatcccttaccgtgacaccctgcagtaaagcctccgcaaaccaaagagccgggcgagctggtagagttgccgccgggaaatgctttagattatatacagcctgggcctatcagcacgagcttgaagagacgacggtgccggaaatccagcgaacaagccttggaaacgtagtcctgctgctgaaaagcctgggcatccatgatctgatgcatttcgactttcttgatcccccaccttatgagactttgcttctcgccctggaacaactgtacgcgctcggggccctcaatcaccttggcgagctgaccacaagcggtagaaagatggctgagctccctgtcgatccaatgctcagcaagatgatactggcgtcagagaaatacagctgttccgaagagatcctcaccgtggccgctatgctgtcagtgaataactctattttttaccggcctaaggataaggttgtccacgccgacaatgctcgagtgaacttcttcctgccaggcggagatcacctggtccttctgaacgtgtacactcagtgggccgagagcgggtactcatcccagtggtgttatgaaaattttgtacagttccggagtatgcgcagggcccgggacgttagggaacagctagagggacttctcgagagggttgaggtggggctcagcagttgtcaaggcgactacatccgggtgagaaaggctatcactgccggttatttttaccacacggcaagactgactcggtccggatatcgcacagtaaaacaacagcagacagtgtttatccatccaaattcctctctgtttgaacaacagccacgctggctgctgtaccatgaattagtcttgactactaaggagttcatgaggcaggtccttgaaattgagagctcatggcttctggaggtagcaccccactattataaggccaaggaactggaagacccacacgccaaaaagatgccaaagaaaataggcaaaaccagggaggagctcggttag

SEQ ID NO: 114167 - DNA, 1683 bp, synthetic construct
  misc_feature 1..1683: note = Description of Artificial Sequence: Synthetic coding sequence
  source 1..1683: mol_type = other DNA
atggaatcacagcccgctcaggagtgcctgatgcagatgttcctcccaattgaacctgcgtgtttcgtagaatggctgggaacgtccccgtcccagctcggcgtggtcatggtggacgaagcgcacgaaagaactctccatacagatatactcttcggactgatcaaagatgtggccaggtttagaccagagctgaaggtcctcgtggccagcgccacgatggacaccgccaggttttctacttttttcgacgacgcacctgtatttcgcattcctggacgacggttccccgtagatatcttttacaccaaggctcccgaggccgattacctggaggcttgcgtggtatcagtcttacaaatccacgtgacacagcccccaggagatatcctggtgtttctgactggacaggaggagatagaagcggcctgcgaaatgctacaagaccgatgcaggcgcttggggtcaaagatccgggaactcctggttttacccatatacgctaacttgcccagcgacatgcaggcccggatattccagccgactccccccggcgccaggaaagtcgtggtggcgactaatatagccgagacttcactgactatcgaaggaattatctacgttctggatcccgggttctgtaagcaaaaatcttataatccccgcactggtatggagtcgcttactgtcaccccctgctcaaaggcatcagcaaaccagcgagccggtcgagctggtcgggttgccgctgggaagtgttttaggctttatacagcatgggcctaccaacatgagttggaggagaccaccgtgcctgaaattcagaggacttcactggggaacgtggttttgctgctaaaatccctgggcatccatgacctcatgcactttgattttcttgatccaccaccctacgagacattgctgctagctctggaacagctttacgctctgggagccctcaatcatttaggcgagctgacgacaagtggtaggaagatggccgagctgcccgtggacccgatgctgtcaaaaatgatcctcgcatccgaaaaatactcatgtagcgaagaaatactaactgtggcggccatgctgagtgttaataatagcatcttttatcggcctaaagacaaagttgtgcacgctgataatgctagggtcaattttttcctgccaggcggagatcaccttgtactgctgaacgtatatactcagtgggccgagtcaggctacagttctcagtggtgttacgagaatttcgtgcaatttcgaagtatgaggcgcgcccgcgatgttcgggagcagctcgaaggcctcctcgaacgggtcgaagtggggctgtcctcatgccagggcgattatattcgcgtccgaaaagcgatcacagccggatacttctaccacaccgcccgcttgactcgtagtggataccggactgttaagcaacaacagaccgtatttatacacccaaacagctcgttgtttgaacaacagcccaggtggcttctctatcacgagctggttctgaccacaaaagagtttatgcgccaggtgcttgaaatcgagtccagctggctgttggaggtcgccccccactactacaaggccaaggagctggaggatccgcacgctaagaagatgccaaagaaaattgggaagacacgcgaggagttgggctag

SEQ ID NO: 114168 - DNA, 567 bp, synthetic construct
  misc_feature 1..567: note = Description of Artificial Sequence: Synthetic coding sequence
  source 1..567: mol_type = other DNA
atggaaagccagcccgcccaggaatgtctgatgcagatgttcctgccaatcgaacccgcctgcttcgtcgaatggctgggaacgtcccccagccagctgggggtggttatggtcgatgaggcacacgagagaactttgcacacagacatcctctttggactgatcaaggacgtcgcaaggtttcgccccgagcttaaagttctcgtcgcgtcagctactatggatactgccagattctctactttttttgatgacgctcctgtcttcagaatcccaggcaggagatttcccgttgacatcttttacaccaaggctcctgaagccgattacttggaagcttgcgtagtcagcgttctccagatccacgtgacccaaccccctggagacattctggttttcctaaccggacaggaggagatagaagcagcctgtgaaatgctgcaggatcgctgtaggagattgggctccaaaattagggagttactggtgctgcccatctatgcgaacttgccttccgatatgcaggctcgaatattccaaccaacccctccaggagctagaaaatag

SEQ ID NO: 114169 - DNA, 3126 bp, synthetic construct
  misc_feature 1..3126: note = Description of Artificial Sequence: Synthetic coding sequence
  source 1..3126: mol_type = other DNA
atggctacccccgctggtctagagagatgggttcaggacgagctgcattccgtgttagggttaagtgagcgacacgtggcacagttcctcatcggcaccgcacagagatgtacatctgctgaagaattcgtgcagcgcttgcgtgatacagacacactagacctgagtggacctgccagagattttgctttaagactgtggaacaaagtcccccgcaaggccgtcgtggagaagcccgcacgtgcggcagagcgggaggccagagctctgctcgaaaaaaatagatcgtataggctcctggaggattcagaagagtctagtgaggagaccgtgtcacgagccggctcttctctgcaaaagaaaagaaagaaacgaaagcacttgagaaaaaagcgagaagaagaggaggaggaagaagcatcagaaaagggaaaaaagaagaccggaggatccaagcagcagactgaaaagcctgaatcagaagatgagtgggaacgtacggagcgcgagcggctccaggatttagaagagagggacgcattcgcagagagggtaaggcagagggataaagacagaacgaggaatgtccttgagcgcagtgacaaaaaggcttacgaggaagcacagaagcggctcaagatggccgaggaggatcggaaggccatggttcctgagctccgaaagaaatctcgcagggaatatctggccaagcgtgagagggaaaagcttgaggatctggaagcggagttagctgacgaagagttcctgtttggcgacgttgaattgagtcggcatgaaagacaggaattgaagtataagcggcgtgtccgtgacctggcaagagagtacagagccgccggcgagcaggagaaactcgaggccaccaaccgttaccacatgcctaaggagacccgtgggcagccagctagagctgtagacctagtggaggaggagtccggagctcccggggaggaacaacggcgatgggaagaggcacggctcggcgctgcaagtctgaaatttggcgctcgcgatgctgcctcccaagagcccaaataccaattggttctcgaagaggaggaaactattgaatttgtgagagctacccagttgcagggagacgaggaaccaagcgcaccccctactagtactcaggcccagcagaaagaatctattcaagcagttaggagatcgttgccagtcttcccgtttagagaggagcttctcgccgccattgctaatcaccaggtactgattatcgagggggagaccgggagcggcaagactactcagataccgcaatacctcttcgaagagggatataccaacaaagggatgaagatcgcctgcactcagccacgtcgagtcgccgccatgtcagtggccgcaagggtcgcgcgagaaatgggggtgaaattaggaaatgaggtgggctatagcattagattcgaggattgcacatcagagaggacagtgttgaggtacatgacagacggaatgctattaagggaatttctgtcggagcctgacctggcatcatactctgtggttatggttgacgaagcccacgagagaacactccacacagacattctgttcggactgatcaaagacgtggcccggtttagacccgagttgaaagttttggtagcctccgccaccatggacacagctcggtttagcacatttttcgacgatgccccagtgttcaggatccccggccggcggtttccagtggatatcttctacactaaagctcctgaagctgattacctagaagcttgcgttgtcagcgtgctccagattcacgtaacccagcctcccggggatattctggtgttcttgaccggtcaggaggagatagaagcggcctgcgaaatgcttcaggaccgctgtagacgcctgggcagcaagatccgggaactgttagtgttgccaatttatgctaacctgccctccgacatgcaggctcggatttttcaaccaactccaccaggggccagaaaagtggtggtggcaacaaacattgcagagacttccttgacaattgagggaatcatctacgttctggacccaggcttctgcaaacagaagtcttacaacccgagaaccggaatggaatctctgaccgtgaccccgtgctcaaaggcatccgccaaccagcgagccggccgggcaggccgggtggcagctggcaagtgttttcgattgtacacagcatgggcctaccagcatgagttggaggaaactaccgttccagagatccaacgaacctcattggggaatgttgtactgctcctgaaatccttaggcatccatgacctcatgcacttcgactttttggacccccctccctacgagacactccttctggcccttgagcagctctacgcattgggggctcttaatcatttaggcgagctcacaacttcgggacgaaagatggcagagttacctgtggacccaatgttgtccaaaatgatcttagccagcgagaagtactcctgttccgaagaaattttgactgtggcagcaatgctgagcgtcaacaatagtatcttttacagacccaaggacaaagtagtccacgccgataatgcccgggtcaacttcttcctgccaggtggtgatcacttagtgctgctcaacgtatatacccaatgggccgaaagtggatattcaagccagtggtgctatgagaattttgttcaattccggagtatgagaagagctcgcgacgttagggagcaactcgaggggctactcgaacgcgtggaggttggactgtctagttgtcagggagattatatcagagtgcggaaggctataacggccggatatttttatcatacagcgcggctaacaagaagcggttatcggaccgtgaaacagcagcaaaccgtcttcattcaccctaatagcagcctcttcgagcaacagccacgatggttgctctaccatgaactggtcttgactaccaaagaatttatgcgccaagtgctagaaatcgagtccagctggctgctcgaggtggcaccgcattactacaaggccaaggagctcgaagatccccacgctaaaaagatgcctaaaaagatcggaaagacccgcgaagagctcggatag

SEQ ID NO: 114170 - DNA, 444 bp, synthetic construct
  misc_feature 1..444: note = Description of Artificial Sequence: Synthetic coding sequence
  source 1..444: mol_type = other DNA
atggcaactccagcgggactcgagagatgggtgcaggacgagttgcactctgtgttgggtctttcagagcggcatgtcgcacaattcctaattggcactgcacagcgttgtacctctgctgaagagttcgtacagagactccgggacaccgatacactagacctgtcaggccccgcccgggatttcgccttaagactgtggaataaagtgccccggaaagcagtcgtcgaaaaacccgcccgagctgccgagagggaggctcgcgctttactggaaaaaaacagaagctacagactgctggaagactctgaagagagttcagaagagactgtgagtcgcgctggaagcagcctgcagaagaaaagaaaaaagcgcaaacacctgaggaaaaagcgggaggaagaagaagaagaagaagcttccgagaaaggcaagaagaaatag

SEQ ID NO: 114171 - DNA, 4110 bp, synthetic construct
  misc_feature 1..4110: note = Description of Artificial Sequence: Synthetic coding sequence
  source 1..4110: mol_type = other DNA
atgggagggaaaaataaaaagcacaaggcgcctgctgctgccgtcgtgcgtgctgccgtgagtgccagccgggccaagagcgcagaggccggtattgctggcgaggcgcagtccaaaaaaccagtttcccgccctgcaactgcagctgctgctgcagctggctcgcgcgagccgagagtgaaacagggccctaaaatatatagctttaattccactaatgacagttcaggaccagccaatcttgacaaatccatccttaaggtggttatcaacaacaagctggagcagaggatcattggagtgattaatgagcataagaagcagaataatgacaagggaatgatatccggtcgcttaacagccaagaaactgcaggatctttatatggccctgcaagccttcagctttaagacgaaggacatagaagacgccatgacaaacaccttactgtacggtggggacctgcactccgccctggactggttgtgtctcaatctaagcgacgatgcgttgccggagggctttagtcaggaattcgaggaacaacagcctaaatccagaccaaagtttcagtcaccacaaattcaagccacaatcagccctcctctgcagcccaaaacaaagacctatgaggaggaccccaagtcaaagcctaagaaggaagagaaaaacatggaggttaatatgaaagaatggatcctgcggtacgccgagcagcaaaacgaagaagaaaaaaacgagaactcgaaatcccttgaagaggaagagaagttcgaccctaacgagagatatctgcatctagctgccaagttactggacgcaaaagagcaggccgcaacgttcaaactggagaaaaataagcaggggcagaaagaagctcaagagaaaattcggaaattccaacgagagatggagactctggaggaccaccccgtctttaaccctgcgatgaagatctctcatcagcaaaatgagaggaagaaaccccctgtggccacagaaggagagagtgctctcaactttaacttatttgaaaagagcgctgccgcgaccgaggaggaaaaggacaagaaaaaagaacctcatgatgtcaggaactttgactacaccgcccgttcgtggactggcaagtcacctaaacagtttctgattgactgggtaaggaaaaatctgcccaaatctcctaacccgagttttgagaaagttccggtcggccggtactggaaatgccgtgtgagagtgattaaaagcgaagatgatgtgctagtggtctgccccactatccttactgaggacggcatgcaagcccaacaccttggcgcgaccctggctctgtaccgcctggtgaagggccagagcgttcaccagttgctgccgccgacctacagggatgtttggttagaatggtctgacgccgagaagaagcgtgaagaactgaacaaaatggagacaaacaagcctagagacctcttcatcgcaaaactgctcaataaactgaaacagcagcagcagcaacagcaacagcactctgagaacaagagggagaacagcgaggatcccgaggagtcctgggagaatctggtgtcagacgaggatttcagcgctttgagcttagagagcgccaatgtcgaagacctggaaccagtccgtaatttatttcggaaactgcaatcaacacctaagtaccagaagttgctgaaggaacgccagcagctgcctgtgtttaaacaccgggatagcatagtcgagaccctgaaacgccatcgggtggtggtggttgctggggagacaggatcaggtaagagtacacaggtcccccattttcttctggaggatttactcctcaacgaatgggaggcttccaagtgcaacatagtgtgcacgcagccaaggcgaatatccgcagtatccctggccaaccgcgtttgcgatgagctgggatgcgaaaatggacccgggggtaggaactccctatgcggttaccagatcaggatggagagcagagcctgtgagtcaacccggctgctctactgcactaccggtgttcttctgcgaaagctgcaggaggacggactgttgtcaaatgtctcccatgtgattgtagacgaggtgcatgagcggagcgtgcagagtgacttcctcctgattatcttgaaagagattctgcaaaagcgaagcgacctccacttgatcctaatgtctgctactgtcgactctgaaaaattttctacttactttacccactgtcccatcctccggatcagcggaaggtcatatcctgtggaggtgttccacctagaggacatcattgaagaaaccggctttgtgcttgagaaagacagcgaatactgccagaagttcctcgaagaggaagaggaagtgactattaatgtaacaagcaaggccgggggtataaagaagtatcaagagtacatccccgtccaaaccggagcccacgccgacttgaaccccttctaccaaaaatattcttcccggacccagcacgcgatcctgtatatgaacccccacaaaatcaacttggatctcattcttgaactgttagcctaccttgataagtccccacagtttcggaacatagaaggagccgtgctgatctttctcccgggtcttgcccacattcagcagctgtatgatctgctgtccaacgaccggcgattctactctgaacgatataaagttattgctctgcattccattctgagcactcaggaccaggccgcagctttcacactccctccccctggcgtgcgcaagatcgtcctggctaccaatattgctgaaaccggtattaccatcccagatgttgtgttcgttattgatacaggcagaacgaaagaaaataaataccatgaaagtagtcagatgagctcgttggttgagacattcgtgtccaaagcgtccgcacttcaacgccagggaagggccgggagggtacgggatgggttttgctttaggatgtatacgcgcgaacgttttgagggcttcatggattactcagtccccgagatcttgcgcgtgcctttagaggagctttgcttgcatatcatgaagtgcaatctgggaagtccagaggacttcctttcaaaggctctggacccccctcaactgcaagtgatcagcaacgctatgaacctccttcggaagattggagcatgtgagctgaacgaacctaaactcacaccgctgggacagcatctggccgcactcccagtaaacgtcaaaattggtaagatgctcatatttggtgcaatcttcggctgtctggaccctgtagccaccctggctgctgtgatgactgaaaaaagtcctttcaccactcccatcgggagaaaagatgaggcggatctcgccaaaagtgcattagcgatggctgattctgatcatctgaccatctataacgcttacttgggctggaaaaaagccaggcaggaaggcggttataggtcagagatcacctactgccggaggaacttcctgaaccgcacaagccttctcacactggaggacgtcaaacaggagctcatcaagctggtgaaggctgctggctttagtagcagcacaactagtaccagctgggaaggtaaccgggcaagccagacattgagctttcaagaaatcgcactgttgaaggctgtactggtggccggcctttatgacaatgttggcaagattatatatacaaaatctgtcgatgttactgaaaagctcgcttgcattgttgagacggcccagggaaaggcacaagtgcacccttcctccgttaatagggacctgcaaactcatgggtggctcctgtaccaggaaaagatccggtacgcccgtgtttacctaagagaaaccacgcttattactccttttcccgtgcttttatttggaggtgacatcgaagtccagcatagggaacggttactctccattgacggttggatctattttcaggcaccagtgaagattgcggttattttcaagcaactccgcgtgctgattgacagcgtgctgcgaaaaaaactggagaaccctaaaatgtccttggagaacgataaaatcctgcagatcatcactgagctcataaagaccgagaataattag

SEQ ID NO: 114172 - DNA, 1989 bp, synthetic construct
  misc_feature 1..1989: note = Description of Artificial Sequence: Synthetic coding sequence
  source 1..1989: mol_type = other DNA
atggaggaggaaggtttggaatgtccaaatagcagctcggagaagcggtacttccctgagagcctcgactcgtctgacggcgatgaggaggaagttctggcctgcgaagatctcgagctgaacccttttgacggcctgccctatagctcgcgatattataaattactgaaagagcgagaggacctgcccatctggaaagagaaatatagcttcatggaaaatctgcttcaaaaccagattgtgatcgtctcgggggatgccaagtgtgggaaatctgcccaggtcccacagtggtgcgctgagtactgcttaagcatacactaccaacatggcggcgtgatttgcacccaggttcataagcaaacagttgtccagctcgccctcagggtggcggacgaaatggacgtgaatatcggtcatgaggtcggctacgtgatacctttcgaaaattgttgcactaatgaaacgatcctgaggtattgtacagacgatatgttacaacgcgagatgatgtccaatccattcttgggaagctacggcgttatcatactcgacgacatccacgagcgttctattgccaccgacgttctgctgggtctgcttaaggacgtgctactggcaagaccagagttgaaactcattattaactctagcccccatctgatttccaagctcaacagttactacggaaacgtgccagtgatcgaggtgaagaacaaacatcctgtcgaggtggtttacttgagcgaagcccagaaggacagctttgagtccattttgagacttattttcgaaattcaccacagcggggaaaagggggatatcgtagtctttctcgcatgtgagcaggtgtataatccgaggattcgtgccaactcattggtcatgcagccaatcagccagtcacaagctgaaatcagaaaacaaattctaggctcaagcagtagcggtaaatttttctgcctgtatactgaggagttcgcgtcgaaggatatgacaccactgaagccggctgaaatgcaggaggcaaacctcacaagcatggtactgtttatgaaaaggattgatatcgcaggccttggccactgcgattttatgaatcgacctgcccccgaaagcctaatgcaggcccttgaagatctggattacctagctgcactcgacaatgacggcaacctttccgaattcggaataatcatgtcagagttcccactcgaccctcagctgtcaaagtctattctcgcaagttgcgaattcgactgcgtggatgaggttcttacgatagcggccatggttacagcaccaaattgcttttcccacgtgccacatggggccgaggaggctgctctgacatgctggaagactttcctccacccagaaggggaccacttcacacttatcagtatctacaaagcctaccaggatacaacccttaatagcagctccgaatactgtgtggagaagtggtgcagagattattttttaaactgttccgccctgagaatggcggatgtgatacgcgccgagctgttggaaattatcaaacggatcgagctgccttacgcagaacccgcgtttgggtccaaggaaaacacccttaatatcaagaaggcattgctgagcggctactttatgcaaatcgcaagggacgtggacggctccgggaattatctgatgctgacacacaagcaggtcgcccagctgcacccccttagtggctactctattactaaaaaaatgccggaatgggttctgtttcataagttttctatctcggagaataactatatccggattacatctgaaataagtcccgaattgtttatgcagctggtcccacagtattattttagtaatctgcctcctagcgaatcaaaggacatactccagcaggttgtagatcatctcagccctgtgagcaccatgaacaaggaacagcagatgtgtgagacttgccccgagacggaacagagatgcacccttcaatag

SEQ ID NO: 114173 - DNA, 2232 bp, synthetic construct
  misc_feature 1..2232: note = Description of Artificial Sequence: Synthetic coding sequence
  source 1..2232: mol_type = other DNA
atggaagaagaaggcttagagtgtcccaactcaagtagtgagaagaggtactttccggagagtctcgactcctccgatggggatgaggaggaagtgctggcatgcgaagacctggagctcaacccgttcgacggtcttccttattctagtcggtactataagctcctcaaggagcgggaagatctccctatctggaaggaaaagtatagttttatggaaaatttactgcagaatcagatcgtgatagtttctggcgacgccaaatgtggcaagtctgcacaggttcctcaatggtgtgcagagtattgcctctctattcactaccagcacgggggtgtgatatgtacccaggtacacaaacagaccgtcgtgcaactcgcactacgagttgctgatgagatggatgtcaatatcgggcatgaagtcggttatgtgatccctttcgagaattgttgcacgaacgagactatcctgaggtactgcaccgacgacatgcttcaaagggagatgatgagtaaccctttcctcggctcatatggcgtgatcattctcgacgatatacatgaacggtcaattgccacagacgtcctgctggggctgctgaaggatgtcttactggcccgccctgaactcaaacttataatcaattcctctccacatctcatctcgaaactgaattcctattatgggaatgttcctgtgatcgaggtgaagaataagcacccagttgaagtggtctacctgagcgaggctcagaaggactcttttgagagtattcttaggttaatcttcgagattcaccactctggagaaaagggggacattgtggtattcctggcgtgtgagcaggatatcgaaaaagtatgtgagacagtttaccagggcagcaatctgaaccctgatcttggagagctggtcgtcgtacccctttatcccaaagaaaagtgtagcttgttcaaaccattggacgagactgaaaaacggtgtcaagtatatcagagaagagttgtgctgactacatcttcgggagagttcctcatctggagcaacagcgtccgtttcgttatcgatgtgggcgttgaaaggcgcaaggtctataatcctaggatcagggccaattccctggttatgcagccaattagccaaagtcaagcggagatcaggaaacagatattgggcagctcatcatcagggaagtttttctgtctgtatacagaggaattcgcgtccaaagatatgaccccacttaaacctgccgagatgcaagaagccaacctcacgtccatggtactctttatgaaacgcatcgatatcgcaggcttaggccattgcgatttcatgaatagacctgcgcctgagtcacttatgcaggctctagaagacctggactacctagccgcacttgataacgacggcaacctttccgagttcggaattatcatgtcagagttccctctggatccccaactgagtaaaagtattctggcctcatgtgaatttgactgtgttgatgaagtcttgaccatcgccgctatggtgacagcacccaattgttttagtcatgtgccacatggggcagaagaagccgccttgacgtgctggaaaactttcctacatcctgagggtgaccacttcacgctgatttccatttacaaagcttaccaggacacgacactcaatagcagtagtgaatattgtgttgagaaatggtgtcgcgattacttcttgaattgcagtgctctcagaatggccgatgtgattagagccgagctcctggaaatcattaagagaatcgaactgccgtacgcagaacctgccttcgggtctaaagaaaacaccttgaatattaaaaaggctttgctttcaggctactttatgcagatcgccagggacgtggatgggagcggaaactatctgatgcttacgcataagcaagttgcgcagttgcatccgctttccggttacagcattaccaagaagatgccggaatgggtgctttttcacaaattctcaattagcgaaaacaattacataaggatcacgtcagagatatcccccgaactgttcatgcagctggtccctcagtactacttctccaatctgcctccctcagagagtaaggacatcctgcagcaggtggtagaccacctctccccagtttctaccatgaataaggaacaacagatgtgcgagacttgtccggaaacagagcagcgctgcactctacagtag

SEQ ID NO: 114174 - DNA, 1104 bp, synthetic construct
  misc_feature 1..1104: note = Description of Artificial Sequence: Synthetic coding sequence
  source 1..1104: mol_type = other DNA
atgcagcccatctcacagtcccaggccgaaatcagaaagcaaatcctaggatcctcctcatctggtaaattcttctgcctctacactgaggaatttgcatccaaggacatgacacccctgaagccagcagagatgcaggaggctaacctgacaagtatggtgctgtttatgaagcgcatcgacattgcgggcctgggacactgtgattttatgaatcggccagctcctgagtcccttatgcaggccctggaggatctggattatctggcagcattggataatgatggaaacctgtcagagtttggtatcatcatgtccgagttcccgctggacccccagctctctaaatctattttggccagctgcgagttcgattgtgtcgacgaggtactgacaatcgccgccatggttacagcgcctaactgcttctcacatgtgccccatggcgccgaggaggctgccctaacgtgttggaagacattcctccacccagagggagaccacttcaccctaatatccatttataaggcatatcaggacaccacacttaattcttcttccgagtattgtgtagaaaaatggtgcagagactactttctgaattgctccgctcttcgcatggctgacgtaattagggccgaattgctcgaaatcattaaaaggattgagctgccatacgccgagcccgcatttggaagtaaggagaatactctcaatataaaaaaggctctgctaagtgggtacttcatgcagattgccagagacgtggacggttcagggaattatctgatgttaactcacaagcaggttgctcagttgcaccctctgtctggctacagcatcacgaaaaagatgccggagtgggtgttgttccataagttcagtatcagtgagaataactacatccgtatcacttccgagatctcgcctgagctgtttatgcagctagtgccccaatattatttctccaacctgccaccatccgagagcaaagatattctgcagcaggtggtcgaccatctgagtcccgtgtctactatgaataaagaacaacaaatgtgtgaaacctgccccgaaacagaacagcgctgtaccctgcagtag

SEQ ID NO: 114175 - DNA, 339 bp, synthetic construct
  misc_feature 1..339: note = Description of Artificial Sequence: Synthetic coding sequence
  source 1..339: mol_type = other DNA
atggaggaagaaggcctggagtgcccaaatagctcaagtgaaaagcgctatttccccgagtccttagattcatcggatggtgacgaagaagaggtgctcgcatgtgaggacttagagctcaatccatttgacgggctcccatattcctcccggtattataagctgctcaaagaacgtgaggatcttccgatatggaaagaaaaatatagttttatggagaatctgttgcagaatcaaatcgttatagtgtctggggacgccaaatgcggaaagagcgctcaggtgcctcagtggtgtgcggagtattgtctgtccatccattatcagcacgggggctag

SEQ ID NO: 114176 - DNA, 1935 bp, synthetic construct
  misc_feature 1..1935: note = Description of Artificial Sequence: Synthetic coding sequence
  source 1..1935: mol_type = other DNA
atgaccatcgagatagatttcctgcagaaaaaatccattgactccaacccctacgataccgataaaatggctgccgaatttattcagcagtttaacaaccaagccttctcagtgggccagcaactagtgtttagttttaacgaaaagctgtttggcctgctcgtcaaggacattgaggcgatggaccccagcattttgaaaggcgagccagccacaggtaaaaggcagaagattgaggtgggattagtcgtgggaaacagccaggtggccttcgaaaaagctgaaaactcttccctgaacttaattgggaaggctaaaaccaaggagaatcggcagagcataattaaccctgactggaactttgagaagatggggattggcggtctggacaaagagtttagtgatatttttcggcgcgccttcgccagcagggtgttcccaccggagattgtggaacagatgggttgtaaacacgttaagggcatcctcctctatggcccacctggctgcggcaaaaccctgctggctcgccagattggtaaaatgctaaacgcacgggaacctaaagtcgttaacggaccagagatattaaataagtacgtgggagaatcggaggccaacatacgcaagttatttgccgacgctgaggaagagcagcggcgtctgggcgcaaattcaggcctgcacatcattatcttcgacgaaatcgacgcaatttgcaagcagaggggatctatggctggatcaactggtgtacatgacacagtcgttaatcagcttttgagcaaaattgatggggttgagcagctgaataacattctggttataggcatgactaatagacctgacctgattgatgaagctctgctgagaccagggcgcctggaggtcaagatggagataggactacccgacgaaaagggaagacttcagatactccacatccatacagcacggatgagaggccaccagttactgtctgcagatgtggacataaaggaattggccgttgagacgaagaatttcagtggtgcagaattggagggacttgtccgggcagcccagtcaacggccatgaatcgccatataaaagctagcaccaaggtagaagttgacatggagaaagctgagtccctccaggttacacgcggagacttcctcgcatctcttgagaatgatataaaacctgcgtttggtaccaatcaggaagactatgccagctatatcatgaatggaatcattaagtggggcgaccccgtcacgcgggtgctggacgatggggaactgttggtccagcagacaaagaattcagaccgaactcctcttgtgtcggtgttgttagaaggcccaccgcactccgggaaaacagcactggcagcaaagatcgccgaggaaagtaactttccgtttataaaaatctgttcgcccgataaaatgatcgggttctctgaaactgctaaatgtcaggctatgaaaaagatcttcgacgatgcatacaaaagccagctgtcgtgcgtggttgtggacgatatcgagaggctcctcgattacgtgccaatcgggccaaggttttctaacttggttttacaggccttgctggtgctcttaaagaaggcacccccccagggtcgcaaactgctcattatcggaacaacaagtaggaaggatgttctgcaggaaatggaaatgctgaatgcattttccacgacaatccacgtgccgaacatagctacaggcgagcagctcctggaggccctagaactactgggcaactttaaagataaagaaaggactaccatcgcacagcaggtcaaggggaaaaaggtgtggataggtatcaagaaactgctgatgttgattgagatgtcgttgcagatggatccggaataccgagtccgcaaattcctcgctttgctccgtgaggaaggcgcttag

SEQ ID NO: 114177 - DNA, 1452 bp, synthetic construct
  misc_feature 1..1452: note = Description of Artificial Sequence: Synthetic coding sequence
  source 1..1452: mol_type = other DNA
atgcctgaagaggctggcttccctcctgctaaacgtttcaggcccgggagcggaccaccttctcgggctgggtcctttccgcccggccgacaagtcgttatgctacttaccgccggaagcgggggccgaggtggtggagggggacgccggcagcaaccaccccttgcacagcctagcgcctctccatatcctgaggctgttgaactgcagcgccgaagtctgccaattttccaggcacgcggccagctgttggcccagcttagaaacctcgacaacgccgtgctgatcggcagcccattttttaccgggcatccgggagttcctcattgggccggtggcgaccgcagtcatgagcaagacgtaccaaggcactgcaaggcgcccccgagaagacttccttgtgacgccgggccatcttccgtacgactccctgcactttgcacagcagccccttccctacctcgtggaccaaaagatagcggtctcgaggtcctggcggttcagcgcgtaagcaaaacccaggcgtggcagcggacaggtagagcgggaagagaggactctggtatttgttacaggctgtacacagaagacgaatttgagaaatttgataaaatgacggtgcctgaaatccagcgctgcaacttggcttccgtaatgttgcagcttttagctatgaaggttccaaatgtcctgacatttgatttcatgagtaagccgtcaccggatcatattcaggccgccatcgcacagttggaccttctgggagccctcgaacacaaggacgatcagttaactttgactcccatgggtcggaaaatggctgcgttccccttggaacccaaatttgcaaaaactattctgatgagtcccaaattccactgtaccgaggaaattttaactatcgtctctctgctgtccgtagattccgtgttgcataacccaccctcaaggcgcgaggaagtgcagggcgtacgcaaaaaattcatctcttctgagggtgaccacatgacattgctcaatatttatcgcacctttaagaatctggggggaaacaaggactggtgcaaggagaatttcgtgaacagtaaaaacatgactctggtggctgaggtcagggcgcagttgcgagatatatgcttgaaaatgtccatgcctattgccagtagcagaggtgatgttgaatcagtacgacggtgcctggcccactcactgtttatgagcacggctgaactgcagccagacggcacctacgctactaccgatacacaccagcctgtggctattcatccgagcagcgtgctgtttcattgcaagccagcctgtgtagtgtatactgagctgctgtacaccaacaaatgttacatgagagatttgtgtgttatcgatgcccagtggctatatgaggctgctcctgagtacttcagaagaaaactccgtactgctaggaattag

SEQ ID NO: 114178 - DNA, 2940 bp, synthetic construct
  misc_feature 1..2940: note = Description of Artificial Sequence: Synthetic coding sequence
  source 1..2940: mol_type = other DNA
atgagctatgactaccatcagaactggggaagggacggaggccctcgttcttccggcggaggctacgggggaggacctgccgggggacatggtgggaaccgcggtagtggtggtggaggtggtggaggcggcggaggaagaggtggccgcggtcgacatcccggtcacctgaagggaagagagatcgggatgtggtatgctaaaaagcaaggccaaaagaataaagaggccgagcgtcaagaaagagcagtggttcatatggacgagcgcagggaggagcagatagtgcagttgcttaattcggtccaggcgaagaacgacaaggaatcggaagctcagatctcctggtttgctcctgaggatcatgggtacggcacagaagtgagcacaaagaataccccatgctcagaaaacaagctggatatacaggaaaaaaagttaatcaaccaggagaagaagatgtttcgaattaggaataggtcctatatcgatcgcgacagtgagtatctgctgcaggaaaacgagcccgacggaactttagaccagaagttgctggaagatctgcagaagaagaaaaatgatctgagatacatcgaaatgcaacacttccgcgaaaagctgccgtcctatggaatgcaaaaagagctggtcaatctaattgacaatcaccaggtgacagttatcagcggtgagactgggtgtggcaaaaccacgcaggttacccaatttatccttgataattatatagaaaggggcaagggtagtgcatgcagaattgtttgtacacagccaaggaggatttcggccattagtgtcgctgaacgggtggccgccgaacgtgccgagagctgcggttctgggaacagcacgggctatcagattcgcctccagagtcgacttccacgcaagcaaggttccattctctattgcactacaggaatcatcctgcagtggttgcagtccgatccatatctgtcttccgtcagtcacatagtgctggacgaaatccacgaaaggaacctgcagtccgatgtcttgatgaccgtcgttaaagacctgctgaatttcaggagtgacttgaaggtgatactgatgagcgcaactctgaacgcggaaaaattttccgagtactttgggaattgccccatgattcatatccctggattcacctttccagtggtggagtatctgctggaggacgtgattgagaagattaggtacgttcctgagcagaaagagcaccgctcccaatttaaaaggggattcatgcagggccatgtgaatagacaggaaaaggaagagaaggaagcgatctataaggaacggtggccagattacgtgcgggagcttaggagacggtactcggccagtacagtcgacgtcattgaaatgatggaggacgacaaagtagacctcaatctgatcgtggccctgatccgatatatcgtgctggaggaagaggacggggctatccttgtcttcctgcccggctgggataacatctcaactctccatgatctcttaatgagtcaagtgatgtttaagagcgataagttcttgatcatccctctacacagcctgatgcccaccgtcaaccagacacaggtgttcaagcggacgccccctggtgtccggaaaattgtgatcgccacaaacattgctgagacctcaatcacaatcgatgacgttgtgtatgtgattgacggtgggaagatcaaagagacccactttgatactcagaacaatataagtacaatgtcagctgagtgggtctctaaggcaaatgctaaacagaggaaggggcgtgctggcagagtccagccgggccactgctatcatctgtacaatgggctccgggctagtctccttgacgactatcagttgcccgagatcttgcggactccgctggaggagctttgccttcagatcaaaattctccggcttgggggcattgcttatttcctttcccgcctgatggatccaccatccaatgaggcggtcctgttatcgatccggcacctcatggagttgaacgctctcgataaacaggaggaactcactcctctgggcgtgcatctcgctcgcctccctgtagagcctcatatcggcaagatgatcctttttggcgctctgttctgctgcctagatccagtgcttacgatcgccgctagcctgtctttcaaagacccgtttgttatcccacttgggtgggaagaggctagacgtcgcggtttccgctacgagaaggactattgctgggagtactttctgtcctctaatacactgcagatgctccacaacatgaagggtcagtttgccgagcacctgttgggcgccggatttgtgtcgagcaggaatccaaaggatcccgagtccaacatcaatagcgataacgagaagatcatcaaggcagtcatctgcgccggcctctaccctaaggtggcaaagatccgattgaatctggggaaaaaacggaagatggtgaaggtatacacaaaaacagacggcctggtcgctgtgcatcccaagtcagtaaatgttgagcaaacggattttcactacaactggctaatataccacctgaaaatgcggacatccagtatatacctttacgattgcaccgaagtgtccccttattgtctgctctttttcggcggtgacatctcaattcagaaggacaatgaccaggagacaatcgccgtggatgaatggatagtcttccagtctcctgcccgcattgcgcacctggtcaaagagttgcggaaggaactggatattctgctgcaggaaaagattgagtctccgcatcccgtggactggaatgataccaagtcccgcgactgtgcagtactgtcagcaattatagatctgatcaaaactcaggagaaggccactcctcgcaactttcccccgagatttcaagatgggtactacagttag

SEQ ID NO: 114179 - DNA, 2985 bp, synthetic construct
  misc_feature 1..2985: note = Description of Artificial Sequence: Synthetic coding sequence
  source 1..2985: mol_type = other DNA
atgagctacgactaccaccagaattggggacgggacgggggccctagatcctctgggggcggctatggcggcgggccagccggggggcatggcggtaatcgggggtctggcgggggaggaggtggcgggggtgggggcaggggcggacgcggtcgacacccaggtcatctgaagggcagggagatcggcatgtggtacgctaaaaaacaaggccagaagaataaggaggcagaacgccaggaaagggcggtggtgcacatggatgagagaagggaagaacagatcgtgcagctgctgaactcagttcaggccaaaaacgacaaggaatctgaggcacaaataagttggttcgctcccgaagatcacggctacgggactgaggtaagcaccaaaaacactccctgctccgagaacaaactcgatatccaggagaagaagttgatcaatcaggagaagaaaatgtttcgaataagaaatcgcagctacattgatagggacagcgaatacctgctgcaggaaaatgagcctgacggaaccctagatcagaagctgctggaggacctgcaaaagaaaaaaaacgacctgcggtacatagaaatgcaacattttcgggaaaagctacctagctacggcatgcagaaagagttagtgaacctcatagacaaccaccaggtgaccgttatttctggcgagaccggctgcggcaaaaccacacaggtgacacagtttattctagataactatatcgagcgggggaaaggcagtgcctgcaggattgtgtgcacccagcccagacgaatctccgccatctcagttgcagagagggtcgccgccgaacgagcggagtcatgcggctctggaaactctaccggctatcagatccggcttcagagcaggctgcctagaaagcaaggctccatcttatattgtacaaccgggatcattctgcagtggctacagagcgatccttacctaagctcggtttcacatattgtactggatgaaatccatgaaagaaacttgcagagtgatgttctgatgacggtggtcaaggacctgttgaactttagatcagatctcaaggtcattttaatgtccgcaactctgaacgccgagaaattttccgagtattttgggaactgtcccatgattcacataccaggatttacgttccctgtggtggagtacctgctggaggacgtgatcgaaaagatcaggtacgtgcccgaacagaaagagcaccggtcacagttcaaacgcggcttcatgcaagggcatgtcaacaggcaagagaaagaggaaaaggaggctatctacaaggagcgctggcctgattacgtgcgggaactccgacgtcggtattctgcgtccaccgtcgatgtgattgagatgatggaagacgataaagtggatctgaacctgatcgtggctttgatcagatatatagtgcttgaggaagaagacggtgccattttggtgttcctgccaggatgggacaacataagcaccttacatgacttgttaatgagccaggttatgtttaagagcgtaaatcagactcaggtgttcaaacggacaccaccaggagtgagaaaaatcgtgatcgctaccaatattgcggaaaccagtatcacaatagatgacgttgtctatgtgatcgatggaggcaagattaaggagacccatttcgacacacaaaataacattagcactatgtctgccgaatgggtgtccaaggctaacgccaagcagcgaaagggcagggccggccgggtccagcctggccactgctatcatctctataacggcctgcgagctagtcttctggacgactaccaattgcccgaaattctgcgaacacccctcgaagagctttgtcttcaaatcaaaattctgagactaggaggtatcgcatatttcctgtcccgccttatggaccccccttctaatgaagcagtgctcctgtccattcgacaccttatggaattgaatgcccttgataagcaagaagagctgacacctctgggcgttcacctggcccgcttgccagtggagcctcacatcgggaagatgatactgtttggagccctcttctgctgccttgacccagtccttactatcgccgcgtctttatccttcaaggacccctttgtgattcctctgggaaaagaaaaaattgcggacgctcggagaaaggagctcgcgaaagatacacgatcagatcacctgaccgttgtgaatgctttcgaggggtgggaagaagcgagaaggcggggatttcggtatgagaaggattactgctgggagtatttcctcagctctaacacgctgcagatgctccataacatgaaggggcaatttgcagagcacctattgggagctggcttcgtgtcatcccggaaccccaaggaccccgaaagcaatatcaactccgataacgagaaaattatcaaggctgtgatctgtgcaggcctgtaccctaaggtcgcaaagatacgtctcaacctgggcaaaaaacgaaagatggtgaaggtgtataccaagaccgacggcctagtagccgtgcatccgaagtcagtgaacgtggagcagacagattttcactataactggctcatctatcatctcaaaatgcggacctctagtatctacctgtacgattgtaccgaagtctctccttactgtcttctctttttcggcggggatatcagcatacaaaaagacaatgatcaagagaccatagctgtcgacgagtggattgttttccagtccccagcccgaatcgctcacctggtcaaagagttacgcaaggagctcgatatcctgctccaggaaaaaattgaatcaccacatcctgttgactggaacgacactaagagccgggattgtgccgtcctctcagctatcatcgaccttatcaagacccaggagaaggcaactcctagaaactttccccccaggtttcaggatggttattatagctag

SEQ ID NO: 114180 - DNA, 3027 bp, synthetic construct
  misc_feature 1..3027: note = Description of Artificial Sequence: Synthetic coding sequence
  source 1..3027: mol_type = other DNA
atgtcatatgactaccaccagaactggggaagagatgggggcccccgatcctccgggggcggttatggcggtggcccagctggcggtcatggcgggaacaggggaagtggcgggggaggagggggtggaggaggcggacgtggcgggcgaggaaggcatcccgggcacctgaaggggcgcgaaatcggcatgtggtatgccaaaaagcaaggccaaaaaaacaaagaagctgagcgccaggaaagagccgttgtccatatggatgaaagacgcgaggagcagatagtccagctgctgaatagtgttcaggccaagaatgacaaggaatccgaagcccaaatcagctggtttgcacccgaggaccacggctacggtacggaggtgtctacaaagaacacaccctgctcagagaacaaactggacatacaggagaagaagctgattaaccaagagaagaagatgttcaggattagaaacagaagctatatcgaccgcgattctgagtatttacttcaggaaaacgagcccgacggcacattagaccaaaagttgctggaggacctgcagaaaaaaaaaaacgacctccgctatattgagatgcagcactttcgtgagaaactcccatcatacgggatgcagaaggaactggtcaatctaatagacaatcaccaggtgaccgtgatcagcggcgagactggctgcggtaaaaccacacaggtgactcaattcatactggataactatatcgagcggggaaaaggatcggcctgcagaatagtgtgtactcagccacggaggatttccgccatctccgttgcggaacgcgtggctgcagagagagctgagtcctgtggtagcggcaactccaccgggtaccaaatccgtctgcagtccagattgccaagaaagcagggcagcattttgtactgcactactggtatcatcctgcagtggctgcagagtgacccatacctgagttccgtaagtcatatcgttctcgatgagatccacgagagaaacctgcaatctgatgtgctgatgaccgtagtgaaagacctgttgaactttcgttccgatttaaaagtgattctcatgtccgcgactttaaatgccgagaaattctcagagtacttcggcaattgtccaatgatccatattccgggattcacattcccagtggtagagtacctcctggaagacgtgatagaaaaaatccgctatgtgcctgagcagaaggagcacaggagccaattcaagagaggctttatgcagggccatgtcaacagacaagagaaggaggagaaggaagcgatctacaaggagagatggccggattacgtgcgggaactgcgtaggagatactcagccagtactgtcgatgtcattgaaatgatggaggatgacaaagtggatctcaacttgatcgtagccctgattcgatacattgtgttagaagaagaagatggagccatcctggtgtttctccccggctgggacaatattagtacacttcatgacttgctaatgagccaagtcatgttcaaatctgataaattcctgattatccctctccacagcttgatgcctacagtcaaccagacccaggttttcaagagaactcccccaggagttagaaaaatcgtgatcgcaaccaatattgctgagactagtattactatagacgatgtcgtctacgtcatagatggagggaagatcaaggaaacccacttcgatacccaaaataacataagcaccatgtccgccgaatgggtctctaaagcgaatgcaaagcagaggaagggtagagctggaagagtgcagcctggacactgttaccatctatataatggtctacgcgcctccctgttagacgactatcagctccccgaaattttgcgcacccccctagaggagctgtgtttacaaatcaagattttacgcttgggcggcatcgcatattttctcagtcgcctgatggatccacctagcaacgaagccgtcctccttagcatcaggcacctgatggaactgaatgccctcgacaagcaggaggagcttactccgcttggagtccatcttgccagactgcctgtagaaccgcatatcggcaaaatgattttgtttggcgcccttttttgctgcctggaccctgtgctaactatcgccgcaagcttgtcattcaaagatccttttgttatccccctcggtaaggagaagattgctgatgccaggaggaaggagctcgctaaggatactcggtctgatcacctaactgtcgttaatgccttcgaaggctgggaagaagctcggcgaaggggtttccgttatgaaaaggattactgttgggagtactttttgtcttccaataccctccagatgctccataatatgaaaggacagttcgcggagcatttactcggagcaggttttgtgtctagcagaaacccaaaagacccagaatcgaatatcaattccgacaacgagaaaattattaaggcagtgatctgcgctggattataccccaaagtagctaaaatcagactcaacctggggaagaagcggaagatggtgaaggtatacactaaaaccgatggacttgtcgcggtgcacccaaagagcgtcaatgtggaacaaactgatttccattacaactggctaatttaccatctcaagatgaggaccagttctatttacctctatgattgcaccgaggtgtccccctattgccttctgttctttgggggggacataagcattcagaaggataatgatcaggagacaattgcagtcgacgaatggatcgtcttccagagtcctgcgcgtattgcccatcttgttaaggaacttcgtaaggagcttgacatcctcctacaggaaaagatcgaatctcctcatcccgtggactggaacgatacaaaaagccgcgactgcgcagtgctgtcagcaattattgacctgatcaagacccaggaaaaggccacacctcgaaactttccgccacgctttcaagacggatattatagctag

SEQ ID NO: 114181 - DNA, 2985 bp, synthetic construct
  misc_feature 1..2985: note = Description of Artificial Sequence: Synthetic coding sequence
  source 1..2985: mol_type = other DNA
atgtcttacgactaccaccagaactgggggagggatggaggaccacggtctagtggggggggctacgggggtggcccagctggtgggcacggagggaaccgcggttcaggcgggggggggggagggggcggcggaggccgaggtgggagagggcggcaccccgggcacctgaagggaagggagatcggaatgtggtatgcaaagaagcaggggcagaaaaacaaagaagcagagagacaggaaagagccgttgtacacatggacgagcgaagagaggaacagattgtgcagctgctaaactctgtacaggccaagaatgacaaggagtcagaagctcaaatctcttggttcgcgccagaagaccacggctacggtaccgaagtgagcaccaagaatacaccttgcagtgagaataagctggacattcaggagaaaaagctcatcaaccaggagaagaagatgtttcgcattcgcaatcgcagttacatagaccgggattctgaataccttcttcaagaaaatgaacctgacggcaccctggatcagaagctgctggaagatctgcaaaaaaagaagaatgatctcagatacatagagatgcagcactttcgtgagaagctacctagctacggtatgcagaaggaactcgttaacttgatagataaccatcaagtcacagttatatcgggtgaaacgggttgcggaaagacaacgcaggttacccagtttattttagacaactatattgagcggggtaagggaagcgcctgtagaatcgtgtgcactcagccccgcaggatctccgcaataagcgttgcagagcgggttgccgcggagcgggccgagtcctgcgggtccgggaattccactgggtatcagatccgcctgcagagtcggttgcctcgcaaacagggcagtattctgtattgcacaactggcatcatcctacaatggctgcagtccgacccctacctctcctccgtctcccacatagtcctggatgagattcatgaacgcaacttgcagtcagacgtgctcatgacagtggtgaaggaccttctgaattttagatcagatttgaaggtgatactcatgtcggctactctaaatgcagagaaattcagcgagtattttggtaactgcccgatgatccacatacccggattcacctttcccgtggttgaatatttgctggaagatgtgatcgagaagattcgctacgtccctgagcagaaggagcacagatctcagttcaagcggggatttatgcagggacacgtgaatagacaagagaaggaggagaaagaggccatttataaggagcgctggcccgactatgtgcgtgagctcagaaggcgctatagcgcctctacagtcgacgtaatcgaaatgatggaggacgataaggttgatctgaacttaattgttgcactcatccggtacattgtgctggaggaggaagatggtgcgatacttgttttcctccctggctgggataatatatcgaccctgcacgacttgctaatgtcccaggtgatgttcaaaagtgggaccatgtctcaggtgtttaaaaggacccctccgggggtgcgcaagattgtgatcgctacaaatatcgccgagacttccattaccatcgacgacgtggtttacgtgatcgacggtggcaaaatcaaggagacccacttcgacactcaaaataatatctctactatgtcggctgaatgggtatctaaggccaacgcgaaacagcgcaaaggaagagcagggagagttcagccggggcactgctaccacctgtataatggcttgagggccagcctgctggatgattatcagctaccggaaatcctgaggaccccgttggaagagctatgccttcagatcaagatcctcagactgggaggcatcgcatatttccttagcagattgatggacccccccagtaatgaagcggtgctcctgagcatccgacatttgatggagcttaacgctcttgataagcaggaagagctgacacctttgggtgtgcaccttgcaaggctgccagtggaaccccatataggcaagatgatcctgtttggggccttgttttgctgcctagaccccgttctgaccatcgcagcctcactatcttttaaagacccgttcgtgatcccactggggaaggaaaagatcgcggatgcccggcggaaggaactagccaaggataccaggtccgatcatttaacagttgtgaacgctttcgaaggctgggaggaagcccggaggagaggttttcggtacgagaaggactattgttgggagtacttcctaagcagcaatactctgcagatgctgcataatatgaaaggccagtttgctgagcacctgttaggggcggggtttgtgtcatcccggaatcctaaagatccagagtctaacatcaacagtgataacgaaaagatcatcaaggcggtcatttgcgctggtctctatcccaaagtcgctaagattcgtctgaacctgggcaaaaagagaaaaatggtgaaagtatacacaaagaccgatggattggttgcagtgcacccgaaatcagtcaacgtagagcaaacggattttcattacaattggttgatctaccatcttaagatgcgaacctcaagcatctacctatacgattgtacagaagttagtccgtactgtctgttgtttttcgggggagacatatcgattcagaaggacaacgatcaggaaaccatagcagttgatgagtggatcgtttttcagtcgccggctcgcatcgctcacctggttaaggaactcagaaaggagttagacattctcctccaggagaaaatcgaatctccacaccctgtggactggaatgacactaaaagcagggactgtgccgtgctttccgctattatcgacctgatcaaaactcaggaaaaagccaccccaaggaactttccacctcggtttcaggatggatattattcctag

SEQ ID NO: 114182 - DNA, 3684 bp, synthetic construct
  misc_feature 1..3684: note = Description of Artificial Sequence: Synthetic coding sequence
  source 1..3684: mol_type = other DNA
atgggagatacatccgaggacgcatccatccaccgcctggaaggcactgatttagattgccaggtcggcggacttatctgcaagtccaaatctgcagccagtgagcagcatgtcttcaaagctcctgctcccagaccgagcttgctaggtctggatcttctcgcctcgttgaaacggcgcgaaagagaggagaaggatgacggtgaggataagaaaaagtcaaaagtctcctcctacaaagactgggaagaaagtaaggacgaccagaaggacgcagaggaagaaggaggagaccaagctgggcagaatatccgcaaggaccggcactataggtccgctcgggtcgaaacccctagccacccaggcggggtaagtgaggagttttgggaacgctctaggcagcgcgagcgcgagcgccgcgagcatggcgtctacgcaagctcaaaggaggaaaaagattggaaaaaagagaagtcgagggacagagattacgatagaaagcgcgacagggacgagcgcgacaggtcaagacactcttcccgcagcgaaagagatggggggagcgaacgatccagtaggagaaatgaacccgagtcgcctcgacacaggcccaaggatgccgccacgccctcgcgcagcacctgggaagaagaggactccgggtatggatcatcacgaaggtcccagtgggaaagcccctcccccactccttcctacagagattccgaaaggtcccatagactgagcacaagagatagggatcgatccgttcgcgggaaatacagcgacgatacacctcttcctacacccagctacaagtataacgaatgggctgatgatcgccgtcatttgggcagcactcctaggttgagcagaggtaggggacgtagagaggaaggagaggaggggattagttttgacactgaagaggagagacagcagtgggaagacgatcagcgtcaggctgaccgagattggtatatgatggatgagggttacgacgaattccacaaccccttggcttattctagtgaggattacgttcgccggagagaacagcacctccacaaacagaaacagaagcgcatatccgctcagcgcaggcagatcaacgaagataatgagcgatgggaaactaataggatgctgacttccggtgtggtgcatcggttggaggtcgacgaagacttcgaggaggataacgccgccaaagttcacttaatggtccacaacttggttcccccatttctggacggccggattgttttcactaagcagccagaacccgtaataccagtgaaagacgccacctccgatttggcaatcatagcgcgtaagggcagtcagactgtgaggaaacatcgcgaacaaaaagagcgcaagaaggctcagcacaaacactgggaactcgctggcaccaaactaggcgatatcatgggggtgaagaaggaagaagaaccggacaaagccgtgacggaggatgggaaggtagattaccgaacagagcagaagtttgctgaccatatgaagcggaagtcggaggcttcctctgaatttgcaaagaaaaagagcatcctggagcagagacagtacttacccatattcgctgtacagcaggagctcctcacgattatccgggataactcaatagtaatcgttgtgggggagacaggatctggcaagaccacccagcttactcagtacttgcatgaggatggttataccgactatgggatgatagggtgcacgcagccacgcagggtggccgcaatgagcgtcgcaaaacgagtgtcagaagagatgggtggtaaccttggcgaggaagtgggatatgcaattagattcgaagattgcacgtcagaaaataccttgattaaatacatgaccgacggcatcctactcagagagtcccttagggaggcggacctcgatcactattcggccatcatcatggatgaagctcatgaaagaagcctgaatacagatgttctgttcggcttgctaagagaggtcgtcgcacgccgctcagatctgaagttgatcgtgacctcagctaccatggacgcagagaaattcgcagctttcttcggcaatgttccaatttttcatattcctggccggactttccccgtcgatatcctgtttagtaaaacacctcaggaggattatgtcgaagccgctgtgaaacaatcgcttcaggttcatctttccggagcaccgggcgatatactcatttttatgccaggccaggaggacattgaagtgacgtctgaccaaatagtagagcacctggaggaactggagaatgcccccgctttggccgtgctgcccatttacagccagctgccatcagatcttcaagccaaaatctttcagaaagcccctgatggagtgcgaaaatgtatagtggctacaaacatcgcggagacatcacttacggtcgacggtattatgttcgtcatcgactccgggtattgcaagcttaaagttttcaaccctaggatcggaatggatgccctgcagatctaccccatttctcaggcaaacgccaaccagcggtccggaagggcaggtcgaacaggtcctggacagtgttttcggctgtacacacagagcgcatacaaaaatgagttgctgaccaccactgtgcctgaaattcagcgcacaaacctggcgaacgtagtgttactgttgaaatctctgggagtccaggacttattgcagtttcatttcatggaccctcctccggaagacaatatgctgaattcgatgtaccagctgtggattcttggggccctggacaatacgggcggtttgactagtaccggtaggttaatggttgaattcccactggaccctgctctatccaaaatgcttatcgtctcctgtgatatgggctgctcatccgaaattctgttgatcgtatccatgctgagcgtgccagccatattctacagacccaagggacgcgaggaggagtctgatcaaatccgggagaagttcgctgttcctgagagcgatcaccttacatacctcaacgtgtacctgcagtggaaaaataacaattactccactatttggtgcaacgatcactttatccatgccaaagcaatgcggaaagtgcgtgaagtcagagctcagctaaaagacattatggtacagcagagaatgagtctggcctcttgcggcactgactgggacattgtccgaaagtgtatctgtgcggcctactttcaccaggcagcaaagcttaagggcataggggagtatgtgaatattagaacaggtatgccttgtcatcttcatcctacgtcctcgttgtttggaatggggtatacacctgattacattgtttaccacgagttggtgatgactacaaaggagtacatgcagtgcgttacagccgtcgacggcgagtggctcgcagaactgggccccatgttttactcagtgaagcaggcaggcaagagcagacaagaaaaccggcggcgcgccaaggaagaggcgagcgccatggaagaagaaatggctcttgccgaagagcagcttcgcgcacggcggcaggaacaggaaaagcgctctcccctgggatcagtgcgctcaacgaaaatttacactccaggtcgcaaggagcagggcgaaccaatgactccaagacggacacctgccaggttcggcctgtag

SEQ ID NO: 114183 - DNA, 1620 bp, synthetic construct
  misc_feature 1..1620: note = Description of Artificial Sequence: Synthetic coding sequence
  source 1..1620: mol_type = other DNA
atgggagacacctctgaagacgcctcaatccatcgcctcgagggaacagacttagattgtcaagtcggaggactgatttgtaagtccaagtctgcagcttccgagcagcacgtctttaaggctccagcaccgcggcctagcctgctgggattggatctgctcgccagcctgaaaagaagggagcgtgaagaaaaagatgacggagaggacaaaaaaaaatctaaggtatccagctacaaagattgggaagagagcaaagatgaccagaaagatgccgaggaggagggcggcgatcaagctaaaatcttccaaaaggctcctgacggagttcgaaaatgcattgtggccaccaatattgccgagaccagcctgaccgtggatggtattatgtttgtgatcgactccggctattgcaaactgaaggtctttaaccccagaataggcatggacgccctgcagatttatccaatcagtcaggccaatgctaaccagcgttccgggcgagccggacgtaccggacctggccaatgttttcgcctctacacccagtccgcctataagaacgagctgctgactacaaccgtacctgaaattcaaaggacgaatctcgcaaacgtggtcctgctcctaaagtcgctgggagtgcaagacctcctccagtttcactttatggaccctccacctgaggacaatatgctgaatagcatgtatcagttgtggatactcggcgctctggataacaccggtggattaaccagcacgggcaggctcatggtggagttccccctagaccccgctcttagcaagatgttaattgtgtcctgcgatatggggtgtagctctgagattctgttgattgtaagtatgctaagtgtcccagctatattctatagacccaagggccgtgaggaggagtccgatcagatccgcgagaaattcgcggtgccagagtcagaccacctgacgtacttgaatgtgtacctgcagtggaaaaataataattatagcactatctggtgcaatgaccactttatacatgcgaaagctatgcggaaggtgcgggaagtcagggcgcaactgaaagacatcatggtgcagcaaaggatgtccctcgcatcatgcggcactgactgggacatagtccggaaatgtatttgtgcagcctacttccaccaggctgcaaagctgaaagggattggtgagtacgttaacatcaggactgggatgccatgtcatctgcaccctacaagctccctgttcggtatgggatacacccccgattacattgtgtaccatgagctggtcatgaccaccaaggagtacatgcagtgcgtgacagccgttgatggcgagtggctggctgagttaggaccaatgttttattcagtaaagcaagccggaaagtctcgtcaagagaatagaagacgcgccaaagaggaggcatccgcaatggaagaagagatggcgcttgccgaggaacaactccgcgcaagaaggcaggaacaggagaagagaagtccattaggaagcgttcgatccacgaagatctacactcctggaagaaaagagcaaggcgaaccaatgacgcctcggcggacgcccgctcgctttggcctgtag

SEQ ID NO: 114184 - DNA, 2340 bp, synthetic construct
  misc_feature 1..2340: note = Description of Artificial Sequence: Synthetic coding sequence
  source 1..2340: mol_type = other DNA
atgtcacgattccctgcagtggccgggcgggctccacggcgccaggaggagggtgagcggtcccgcgacctgcaggaggaaaggctgagtgccgtgtgcatagctgaccgcgaggagaagggatgcacatctcaggaaggaggaaccactccaaccttccccatacagaaacagcgcaaaaagataatccaagccgttagagataattcattcctcatcgtcaccggcaacaccgggtcaggcaaaaccacacagttaccaaagtatctctatgaagccgggttctcccagcacggaatgattggtgtcactcagccaaggaaggtggccgccatcagtgtggcacagcgtgtggctgaagagatgaaatgcactctaggatctaaggtaggttaccaggtcagattcgacgattgttcatcaaaggagactgcaatcaagtacatgaccgatggatgtctccttaaacacatcctaggtgatcctaacctaacaaagttctctgtcattatactggatgaagcgcacgagcgaactttgactaccgatattctgtttgggctgctaaaaaagctgttccaggagaaatcacccaaccgcaaggagcacctcaaagtcgtcgttatgtcagccaccatggaacttgccaagctgtccgccttttttgggaattgccctatcttcgatatcccgggacgcctctatccagtacgggaaaaattctgcaatttgataggtcctagagaccgtgagaacaccgcctacatccaggccatagtgaaagtcacaatggatattcatctgaatgagatggctggagatattctagtgttcctgaccgggcagtttgaaattgagaagtcttgtgagctgctctttcagatggcggaatcagtggattacgattatgacgtacaagacaccaccctggatggtctgctgattctgccctgttacggctcaatgaccaccgaccaacagaggcgtatttttctcccacccccacccgggatacggaagtgtgttatttctacgaacatatctgctacttctctaacaatcgacgggatccgctatgtggtggacggcgggttcgtgaagcagctcaatcacaaccccagactcgggcttgacatcctggaagttgttcccatcagtaagagcgaggccctccagcggagcggtcgagctggaagaacttcttcaggaaagtgcttccggatatactcaaaagatttctggaaccagtgcatgcctgaccacgtgattcccgagattaaacgaaccagcctgacaagtgttgttttaaccctgaaatgcctcgccattcacgatgtaatacgcttcccgtacctggacccacctaatgaacggttaatcctcgaggccttgaaacagttgtatcaatgcgatgctattgatagatcaggacatgtgacgagattgggactttctatggtggaatttcccctccccccacacctcacctgtgcggtcatcaaagcagcctccctcgattgtgaagacctgctcctcccaattgcagcgatgctgtcagtggagaacgtcttcattcgccccgtggatcccgagtaccagaaagaagccgagcagcgacacagggagctggctgctaaagccggcggtttcaacgactttgcaacattagctgtgatctttgagcaatgtaaaagttcaggagcccctgcttcttggtgtcaaaaacactggatacactggaggtgtttgtttagtgcattccgggtcgaagcgcagcttcgggaacttataaggaagcttaagcaacagagtgattttccaaaagaaacatttgagggtccgaagcacgaggtcctgaggagatgcctgtgtgccggatacttcaaaaacgtcgctcggagaagtgtcgggaggactttttgtactatggatggcagaggttccccagtgcatatacatccatcgtcagctctccacgagcaggaaaccaagctcgaatggatcatttttcatgaagtgctggttactacaaaggtctacgcccgaatcgtatgccccattaggtatgaatgggtaagggacctgctgcctaaactgcacgagttcaacgcccacgatctgagtagcgtagcccggcgagaagtcagggaagatgcccgccgacgttggactaacaaggagaacgtgaagcaactcaaagatgggataagcaaagatgtgttaaagaagatgcagcggcgtaacgacgataagtccatctccgatgctagggcccgattcctggagcggaaacagcagagaacacaggaccactccgacacaagaaaggagaccggttag

SEQ ID NO: 114185 - DNA, 2169 bp, synthetic construct
  misc_feature 1..2169: note = Description of Artificial Sequence: Synthetic coding sequence
  source 1..2169: mol_type = other DNA
atgagccggtttccggctgtcgctggccgcgctccgaggcggcaggaggagggggagcgcagtagagatctgcaggaagaaagattgagcgctgtgtgcatagctgacagggaggaaaaggggtgtacaagtcaggagggtggcactacccccacatttccaatccagaagcagcgaaaaaaaattatccaagccgtgcgcgacaactcatttttgatcgtgaccggcaacaccggctccgggaaaacaacgcagctgcccaaatacctgtatgaggccggattttctcagcatggcatgataggcgtaacacaaccgagaaaagttgcagccattagcgtggcgcaacgggtcgcggaggaaatgaagtgcacactgggttccaaggtcgggtaccaggtccgcttcgatgactgttccagcaaggagaccgccattaagtacatgacggacggctgcttgctcaaacacattctgggggacccaaacctgactaagttctcagtaatcattcttgacgaagcccacgaacgtaccctgaccacggacattctttttggactattgaagaaactttttcaggagaagagccccaacagaaaagagcatcttaaagtggtggtgatgtccgccacaatggagctggcgaagctgagcgccttctttggaaattgcccaatcttcgacatccctgggcgtctctatccagtgagagaaaaattttgtaatcttattgggccccgggaccgcgaaaacacggcttacatacaggctatcgttaaagtgacaatggacatccatcttaacgaaatggccggagacattctggtgtttctcacgggtcaatttgagatagagaagtcttgcgaactgctgtttcaaatggcagagagcgtcgactacgactacgatgtgcaggacactactctcgatgggctgctcatactgccctgctacggcagtatgactaccgatcagcagaggcgcatctttctgcccccaccgcccgggattaggaagtgtgtcatctcaacaaatatcagcgccacctcactgaccatagacggcatacgttacgtggtggatggaggcttcgtgaagcagctcaaccacaacccaagacttggtctcgacatcctggaggtggtgcccatcagcaagtctgaggctctgcagcgcagtggtagagcaggacggacgtcgtccggtaagtgtttcagaatttattcaaaggacttctggaatcaatgcatgcccgatcacgtcatacctgagattaagcgaacatctcttacctccgtggtgctcaccctcaagtgtctggccattcatgacgtgatccgttttccatacctggacccgcctaatgagcgtctgattctggaggctctgaagcaattgtaccagtgcgacgccatagaccgttctggtcacgtaactcgtctcggactatcaatggtcgaatttcctttgcccccacacctgacttgtgcagtcatcaaagccgcatccctcgattgtgaagatttgttgctccctattgccgccatgctgtctgtggagaatgttttcatccggccagttgacccggagtatcagaaggaagcagagcaacgccacagggagctagctgctaaggctgggggattcaacgactttgctaccttagcagtgatttttgagcagtgtaaatctagcggcgccccggctagttggtgtcagaagcactggattcactggcgctgtctgttctcagcgttcagggtagaagcccagctgagggaactcattcggaagctcaaacagcagagcgattttcccaaggagacgttcgaaggacctaaacatgaagtactccgaaggtgcctgtgcgctgggtacttcaaaaatgtggcacgccgttcagtcgggaggaccttttgtactatggacggtagggggagcccggtgcatatccatccctcctcagccctgcacgaacaggaaacaaagctggagtggatcatcttccacgaggtgctggtcactacaaaggtgtacgctcgcattgtgtgcccgattagatacgaatgggtccgcgacctgttaccgaagctccacgagtttaacgcacacgatctgtcatctgttgcccgccgggaagtttcaaagattaaactgtttcagtag

SEQ ID NO: 114186 - DNA, 2196 bp, synthetic construct
  misc_feature 1..2196: note = Description of Artificial Sequence: Synthetic coding sequence
  source 1..2196: mol_type = other DNA
atgattggcgtgacacaacctaggaaggtcgcagctatcagcgtagctcaaagagttgccgaagagatgaagtgtacactgggctcaaaggtgggctaccaggtgcgttttgatgactgcagctccaaggagacagccataaagtacatgaccgacggctgccttctcaagcacattctcggcgacccgaacctaaccaagttctccgtgatcattctggatgaggctcacgaacggacccttactaccgacattctcttcggcctactgaaaaaactcttccaagagaagtccccaaatcggaaagagcatctcaaagttgtcgtgatgtccgctacgatggagctagccaaactgagtgccttttttgggaactgtcctattttcgacatccccggccgtctctacccagtgcgcgaaaaattctgtaacctgatcggtcctcgcgacagagaaaacactgcatacattcaggcgatcgtgaaagtgaccatggatatacatctcaacgaaatggccggcgacattctcgtatttctgacggggcaattcgagattgagaagagctgcgaactacttttccagatggcagagtccgtggattacgattacgatgtgcaggacaccactctggacgggctgctgatactcccctgttatggcagtatgactacagtgagccaaacctccctgaccttcgtgacacacatacaaataatgaagcagatatccgagaaccagcactcattgacagggcttaccattgccggcatcacgggcgtgtctcaccacgctaggcccagaaacatgacctgtaatgagaagctgaatcagcagcggaggatcttcctcccacccccacccggcattcgaaagtgtgtgatcagcactaacataagcgctacctctttaaccatcgacggcatcagatacgtcgtggatgggggcttcgtgaaacaactgaaccataaccctcgattggggctcgatattctcgaagtggtgccaatctccaagtccgaggccctgcaaaggtctggacgagccgggcggacctcgtccggtaaatgttttagaatttactcaaaggacttctggaatcaatgtatgcctgaccatgtgattcctgagatcaagcgaacctctctgacgagtgtcgtactcaccttaaaatgtctggcaattcatgatgtcatccgcttcccctacctcgaccctccgaacgagcggctgattctggaagcgctaaagcagctctaccagtgtgatgccatcgaccgtagcgggcacgtgacgagactcggcttgagcatggtagagttccccctcccaccccacttaacatgcgccgtgattaaggccgcctctctcgactgtgaagacctcttgctgcctattgctgcaatgctttcagtggaaaatgtgtttatcaggccagtggaccctgaataccaaaaagaggcggaacaaagacatagggagctagccgcaaaggctggggggttcaacgatttcgccaccctcgcagtcatttttgaacagtgtaagagcagtggggccccagcttcatggtgccagaagcactggatccactggcgatgtcttttctcggcttttcgggtcgaggcacaacttagggagctgatacgtaagcttaagcagcaaagcgactttcctaaggagaccttcgagggaccaaaacacgaggtgttgaggcggtgtctgtgtgccgggtactttaaaaatgtggctaggcgatccgtgggtcggaccttctgtacaatggatgggagggggtcgcccgttcacatccacccgtctagtgctctacacgagcaagagacgaagctcgagtggataatattccacgaagtgttggtgacgaccaaagtatatgccagaatcgtctgcccaataagatatgagtgggtcagggacctgctgcctaagttgcatgagttcaatgcccacgatctgagctctgtagctcgtcgagaagtgagggaggatgcccggagaagatggaccaacaaggaaaacgttaaacagcttaaggacgggattagcaaagacgtgctaaagaagatgcagcggaggaacgacgataaatctataagcgacgctagagcgcggtttctcgagagaaaacagcagaggactcaagaccactctgatacacgtaaagaaacaggctag

SEQ ID NO: 114187 - DNA, 2109 bp, synthetic construct
  misc_feature 1..2109: note = Description of Artificial Sequence: Synthetic coding sequence
  source 1..2109: mol_type = other DNA
atgagtcgcttccctgctgtggccggacgagcgccgcggagacaggaagagggggaaagatcccgcgatctgcaagaggagcgcttgagcgccgtgtgcatcgctgaccgggaagagaaaggctgcacgtcccaagaggggggaaccaccccaacgttcccaatccaaaaacagcgtaaaaaaattatccaggctgaaacagccattaagtacatgaccgacggttgtctgctcaagcacattcttggcgacccaaacttgaccaaattcagcgtcatcattctggatgaggcacatgaacggaccttgaccaccgacattctttttggactactaaaaaagctgttccaggagaaaagccctaacagaaaggagcatctaaaggtggtcgtgatgagcgccaccatggagctcgccaaattaagcgccttcttcggcaactgccccattttcgacattcctggaagactttatcccgttcgggagaaattctgtaatctgatcggacctcgcgatcgggaaaacaccgcctatattcaggctatagttaaggtgacaatggatatacatctgaacgaaatggccggagacatactggtgttccttactggacagttcgaaatcgaaaagtcatgcgaactgctgttccagatggccgaatccgtcgactatgattatgatgttcaggacacaaccctcgacggtttactcatcctgccttgttacggaagcatgactacagatcagcagagacgtatctttcttccccctccccccggtataaggaaatgcgtgatttcaactaatatatcagcaacatccttaaccatcgacggcattcgatacgtggtcgatgggggtttcgttaagcaactaaatcacaatccgaggctgggcctcgacatcctggaggtcgtcccaattagtaaaagtgaagccttacagcggtcaggacgcgctggccggacaagcagcggcaaatgttttcgcatttactcgaaggatttctggaaccagtgcatgccagatcatgtcattccggagatcaaacgcacctccttgacctcagtggtgctgacactgaaatgcttagctatccatgacgttatcagatttccatacctcgacccaccgaacgagcgtcttatcctggaagcattgaagcagctgtaccagtgtgacgctattgacaggagcgggcacgtcacaaggctgggcctcagtatggtggaattcccacttccaccccatctgacctgcgccgtcatcaaggctgcgagtctcgactgtgaagacttgcttctgcctatcgcggcgatgctctcggtagagaacgtattcatcaggccagtcgatcctgaataccagaaggaggctgagcagcggcatagggagttggctgcaaaggctgggggttttaatgactttgccacactggccgtaattttcgaacagtgtaaaagttccggagcgcctgccagctggtgccagaagcactggatacattggagatgtctgttcagcgcatttcgtgtggaggcccagctgcgggaactgattcgcaagctaaaacaacaaagtgactttcctaaagaaacctttgaggggccaaagcacgaagttctgcgccggtgcctctgcgctggatattttaagaacgtggcaagaagatccgtgggtcgaaccttctgcactatggatggaagagggtctcccgtgcacatccatccttccagcgcattgcacgagcaagagaccaaactagagtggatcatatttcatgaggtgctggtcacaaccaaggtttatgcacgaattgtctgcccaatcagatatgagtgggtgagagatctcctgcccaagctgcatgaattcaacgcccatgatctgtcttctgttgccaggcgcgaagtcagagaggacgccagacggcgctggacaaataaggagaatgtaaaacaactgaaagacggcatctctaaagacgtgcttaaaaagatgcaacgaaggaacgacgacaaatcaatttcagacgcaagggcccggttcctggaacggaaacaacagaggacgcaggaccactccgacacaagaaaggaaaccggctag

SEQ ID NO: 114188 - DNA, 3663 bp, synthetic construct
  misc_feature 1..3663: note = Description of Artificial Sequence: Synthetic coding sequence
  source 1..3663: mol_type = other DNA
atggccgttgctgtggctatggcaggagctttgattggctctgagccaggccctgctgaggagctggctaagctagagtacctgagcctggttagcaaggtttgtactgagctggataaccatctgggcattaatgataaggacctcgcagagtttgtgatctcactggctgagaaaaacactacctttgacaccttcaaagccagtcttgtcaaaaatggcgcggaatttaccgattcactgatcagcaatctgctccgtctgattcaaacaatgcgcccaccagcaaaaccaagcacctccaaggacccagttgtgaaacctaagacagaaaaggaaaagctgaaggagctgtttccagtcctgtgccagcccgacaaccctagcgtgaggacaatgctggacgaggatgacgtgaaagtggccgtcgacgtgttgaaggagctcgaagctcttatgccatccgccgcgggccaggagaaacaacgcgatgctgagcacagagacagaacgaagaagaagaagcgatctcgcagccgcgaccggaatcgcgaccgagaccgggaccgggagaggaaccgagatcgagaccataaaaggcgtcatagatcaaggtcccggtcccggtcgcggactcgggaacgcaataaggtgaaaagcagatatagatcccgctctcgtagccaaagtccaccgaaagacagaaaagatcgtgataagtatggggagagaaacctggaccgctggcgggacaaacacgtcgatcgaccccctccagaggagcctacaataggggatatctataacgggaaagtaacgagcattatgcagtttgggtgttttgttcagcttgagggcctcagaaagcggtgggagggcctggttcatatctccgagctgcgccgagagggtagggtcgccaacgtggctgatgtggtgtctaaggggcagagagtgaaggtgaaggttctgagttttaccggcacaaagacaagcttgagcatgaaggatgttgatcaggaaacaggcgaggacctgaatccgaacaggcggcggaatttggtgggcgagaccaacgaagagacttccatgcggaaccccgaccgacctactcatttgtcattggtgagcgcccctgaggtggaagacgactcactggaacgtaagcgcctgaccaggattagtgatccagagaagtgggagatcaaacagatgattgctgcaaacgtgctgtcaaaagaggagttccctgatttcgacgaagagaccggaatactccccaaggtcgacgatgaggaggacgaagacttggagattgaactggtggaagaggagcctcctttcctccgaggccatacaaagcagtctatggatatgtcaccaattaagattgtgaaaaatcctgatggatcactctcacaagcagcgatgatgcagagcgcccttgcgaaagaacgacgggagttgaagcaagctcagagggaagctgaaatggatagcatcccgatgggcctgaacaagcactgggtggatcctcttcccgacgcagagggtcgacaaattgcggcaaacatgagaggcattggtatgatgcctaatgatatcccagaatggaagaagcacgcctttggtggtaacaaagcttcatatggcaagaaaacccagatgtccatactggagcagagggaaagcctccctatctataagctgaaagaacagcttgtacaagctgtacacgataaccagatactcattgttattggagaaacgggaagcggtaagacgactcagatcactcagtatcttgcagaagcggggtacacgtcgcgcgggaaaattggatgtacccagcccaggagggtagcagcaatgagtgtggcaaagagggtttctgaagagttcgggtgttgtctcgggcaggaggtcggctataccatccggtttgaggattgtacaagccccgagacagtaattaaatatatgacagatgggatgttacttagggagtgtctcattgatcctgatctgacacagtatgcgattattatgctggacgaagcacacgaacggaccatacatactgatgtcctgtttggcctgctgaaaaagacagttcagaagcggcaggacatgaagctaatcgtcacgtcagcgactcttgacgcagtgaagttctcccagtatttctacgaagctccaatattcactatccccggcaggacgtatccagtggagatcctttatacaaaggagccagagaccgactacctggacgcgtcgctgattacagtcatgcagattcatctcactgaaccaccaggagacatcctggtgttcctgactggacaggaggaaatcgataccgcatgcgagatcctgtatgagcggatgaagtctctgggccctgatgtgcccgagctaatcatcctcccagtgtattcagccctgccctccgagatgcagacccggatcttcgaccccgccccgccaggcagtcgcaaggtggtcattgctaccaatatcgccgaaacatccttgacaatcgacggaatctactatgtagttgaccctgggttcgtcaagcagaaggtctataatagcaagaccggcatcgatcagttggtggtaacacccatctcccaggcacaagcgaagcagagggcaggacgagctgggagaacaggaccgggcaagtgctatcggctatataccgagcgggcctatcgggacgaaatgctgaccacaaatgtgcccgagatccaacgcaccaacctcgccagtacagtactgtcgttgaaagcaatgggtattaacgacctgctttcattcgacttcatggacgcccccccaatggaaaccctgatcaccgcaatggaacagctatacaccctgggagccttggacgacgaaggtctgttgactaggctggggcgcagaatggccgagtttccgctggagcctatgctgtgtaaaatgctcatcatgagtgtgcacctgggttgtagcgaagaaatgctgactattgtgtccatgctgtccgtccagaacgtgttctatcggcctaaggacaagcaggcactcgccgaccaaaaaaaagcaaagtttcaccagaccgagggtgaccatctgactctgctagcggtgtataacagctggaagaataacaagttcagtaacccctggtgctatgaaaatttcatccaggcacggtcccttaggagagcccaggacattcgaaagcagatgctcggcattatggaccggcataagctggatgtggtgtcatgcggaaaaagcacggtgcgagttcagaaggctatttgctccggtttcttccggaatgctgccaaaaaggacccccaggagggctacaggactttaattgatcagcaagtcgtgtacattcatccatccagtgcacttttcaatagacagcccgaatgggtggtgtaccatgaactggtactcactacaaaggagtacatgcgggaagtcaccaccatcgacccgcgctggctggtggagtttgcccctgccttttttaaagtgtcggaccccacaaagctgagcaaacagaaaaaacagcagagactcgaaccgttgtataatcgctacgaagagcctaacgcctggcgtatatctcgcgctttccgccgcagatag

SEQ ID NO: 114189 - DNA, 3546 bp, synthetic construct
  misc_feature 1..3546: note = Description of Artificial Sequence: Synthetic coding sequence
  source 1..3546: mol_type = other DNA
atggccgtggcagtggcaatggcaggcgctctgataggctccgaacccgggcctgcagaggagctggcaaagcttgagtacctcagcttggttagcaaagtgtgcactgaactagataatcatctcggaatcaatgacaaggatctggccgagttcgtgatctccctagccgagaagaacacgacctttgataccttcaaagcatctctcgtgaaaaacggagccgagttcaccgactccctgatttccaatctgttgcgtctgatacaaacaatgagacccccggccaaaccgagcactagtaaggatccagtggtgaagccaaagacagaaaaggaaaagttgaaggaactgtttcccgtgctgtgtcagccagacaacccgtccgtgcgtaccatgcttgacgaggatgacgtgaaggtggctgtggatgtactgaaggaactcgaagctttaatgccaagcgccgcgggccaagaaaagcagcgagacgccgaacacagggaccgcacaaaaaaaaagaagcgttcacgatcaagggaccgaaaccgggaccgggatagggatagggaacggaaccgggacagggaccataaacgccggcaccgtagccggtcccgaagcagatcaagaaccagggagaggaataaagtcaagagcagatataggagccggtcaagatcacagtctccgccaaaagatcgcaaggacagagataagtacggtgagagaaacctggataggtggcgcgacaagcacgtggatcgtccccctcctgaggagcctacaattggcgacatttacaatggcaaggtgacaagtataatgcagttcggttgctttgtgcagttggaaggcctgcggaagcgttgggagggactggtacacataagcgagttgcgccgagaaggccgagtagccaacgtggcagacgttgtgtctaaaggccagcgtgttaaagtgaaagtgctgagtttcacaggaaccaaaaccagtctgtctatgaaggacgtggaccaggagactggcgaagatcttaatccaaaccgcaggcgcaatctcgtgggagaaactaacgaagaaacctcaatgaggaacccggaccggccgacccatctgtcccttgtatccgcacctgaagttgaggatgacagcttagagcgaaagcgcctgacaagaatctccgaccccgaaaagtgggaaatcaaacagatgatcgcagctaatgtgctctccaaggaagagttccccgacttcgacgaggagaccggcattttgcccaaagtagacgacgaagaggacgaggacctcgagattgagttggtcgaagaagagccccctttccttcgagggcataccaagcagtccatggatatgtcccctattaagatcgtgaagaatccggacgggagcctgtctcaggccgctatgatgcagtctgccctggctaaggagagacgagagctcaagcaggcccaaagagaggctgaaatggactccatccccatgggcctcaataagcactgggtagatcccctgccggatgctgaaggacgacagatagctgccaatatgcgtggtatcgggatgatgccaaacgacatccctgagtggaagaagcatgcttttggcggaaacaaagcatcctacggaaaaaaaacccagatgagcatcctggagcagagagagtcactccctatctacaaactcaaagagcagctcgtgcaggctgtccacgacaaccaaattctgattgtgatcggggaaaccggctcaggcaaaaccacacaaatcactcagtatctcgctgaagcgggatacacatcaagaggcaaaattggatgtacccagccaaggagggtggccgcaatgtccgtggctaagcgcgtctctgaagagtttggatgttgtctaggccaggaagtgggctacaccattaggttcgaagattgcaccagccccgagaccgtgattaagtatatgacagacggcatgttgcttcgtgaatgtcttattgatcctgatttaacacaatatgccatcattatgttggacgaggcccacgagagaacaattcacaccgacgtcttgtttgggctattgaaaaagaccgtgcagaaaagacaggacatgaaactcattgttacctcagccacgcttgacgcagtgaaattttcccagtatttctatgaggctccgattttcaccattccaggccggacatatcccgtcgaaatcctttacacaaaggagcctgaaacagattacctagacgcatctcttatcacagtcatgcagattcatttgactgagcccccaggggacattctcgtgtttcttactggacaggaggaaatcgatacagcttgcgaaatcctgtacgagcgcatgaaatccctgggcccagacgtgccagaacttataatcctgcctgtctacagcgcgctcccgagtgaaatgcagactaggattttcgatccggctccccccgggtccaggaaggtggtcatcgccaccaacattgcagaaacttctctgaccatcgacggtatatattacgtggtggaccctggcttcgtcaaacagaaggtgtataatagcaaaacgggtatcgaccagttggttgttacccctataagtcaggcacaggcaaaacagcgggccggcagggctggtcgaactgggcccggcaaatgctaccggctgtacactgagagggcttaccgggatgagatgctgacaacaaatgtgccagaaatacagcggacgaacctggcctccactgttctatctctcaaagccatggggatcaatgatttgttgagcttcgatttcatggacgccccccccatggaaacactgattaccgccatggagcagctgtacaccctaggtgcattggacgacgagggcttactaacacgcctggggcggcgtatggcggagtttccactggaacccatgttgtgtaagatgctcattatgtcagtgcacctcgggtgttcagaagagatgctcactattgtgtcaatgctaagtgtgcagaatgtgttctaccggcccaaagataaacaggccctggcagatcagaaaaaagctaagttccaccagacggaaggggatcacctgactctcctcgccgtatacaacagttggaaaaacaacaagttctctaatccgtggtgttatgagaatttcatccaggcaaggtcgcttcgtagagcccaagacatacgcaagcagatgttgggtatcatggatagacataaactggacgtcgtgtcgtgtggaaagtctacggtcagggtgcagaaggccatttgctcaggctttttccgcaatgccgccaagaaggatccacaggagggatacaggaccctgattgaccaacaagtcgtctatattcatccatcaagtgcgctctttaacagacagccggagtgtccaaagcattttctgcctgtcgtcgctgttgcagtttctttggagcagtgcctctctaagttcgaagatctgaataaggaattgggattggtcacctgctag

SEQ ID NO: 114190 - DNA, 3813 bp, synthetic construct
  misc_feature 1..3813: note = Description of Artificial Sequence: Synthetic coding sequence
  source 1..3813: mol_type = other DNA
atgggtgacgtgaaaaattttctgtacgcctggtgcggaaagcggaaaatgaccccctcctatgagatcagagctgtcggtaacaaaaacagacaaaaattcatgtgtgaagtccaggtcgagggatacaactacacagggatgggaaacagcactaataagaaagatgcacagagtaacgctgcacgcgactttgtgaactacctggtcagaattaacgagataaaatccgaggaagtgcctgcttttggcgtggcttcaccaccgcccctgacggacacacctgatactacggcgaatgctgagggcgatctccccaccactatgggaggtcccctgcccccccacctcgccctcaaagctgagaacaacagcgaggtcggtgcttctggctatggcgttccaggtcctacatgggaccgcggtgctaacttgaaggactactatagtcggaaggaggagcaggaggtccaggcaaccctagaaagtgaagaagtcgatctgaatgccggtcttcacggcaactggacacttgagaacgcgaaagcgcgcttgaaccagtattttcaaaaagagaagattcaaggcgaatacaagtatactcaggtgggtcccgatcataatagatcattcattgcggagatgaccatatatatcaaacagttgggcagaaggattttcgctagggagcacggcagtaataaaaaattagccgcccagtcttgcgcgctgtctctggtccgtcagctgtaccatcttggggtagtcgaggcctattccggccttacgaaaaagaaggaaggcgagactgtggaaccttataaggtcaacctgtctcaagacctagagcaccagctccaaaacatcatacaggagttgaacctagagatcttgcccccgcccgaagatcccagtgttcccgttgctctcaatatcggcaaactggcacaattcgaaccgtctcagaggcagaaccaggtgggtgtggtaccatggtcacccccacagagcaactggaacccctggaccagctcaaacattgatgaaggaccactcgcctttgccactccagagcagatttcgatggatttgaagaacgaactgatgtaccagctggaacaagaccacgaccttcaggcgattttgcaagagcgcgaactcctgccagtaaagaagtttgaatcagagatcctcgaggccatcagccagaacagtgtcgtgattatccgcggggctactggatgcgggaaaacaacccaggttccgcagtttattctggacgactttatccagaatgaccgtgccgccgagtgtaatatcgtggtgacccagccacgcaggatcagtgccgtcagtgtagctgagcgtgtggcattcgaaagaggtgaggaacctgggaagagttgcggttactccgtgcgatttgaatctatcctcccgcggccacatgctagcataatgttttgtaccgttggggtcctcttgcgaaagttagaggccgggataaggggaatctcccacgtaattgttgatgagattcatgagcgagacattaacaccgactttctgctcgtggtccttagagatgtggtccaggcctacccggaggtaagaatagtgctgatgtccgctaccattgatacatccatgttctgcgaatattttttcaattgccctatcattgaggtgtacggccgtacctacccagtgcaggagtactttctggaagactgtattcagatgactcatttcgtccctcctcccaaggataagaagaagaaggataaagatgatgacggtggggaggatgatgatgctaactgtaatcttatctgcggggatgaatacgggcccgaaaccagattgagtatgtctcaacttaatgaaaaggagacccccttcgagctgatagaggcactgctgaagtatattgagactctgaacgtaccgggcgcagtactggtttttctcccaggttggaatctgatttatacaatgcaaaaacatcttgagatgaaccctcatttcggatctcacagatatcaaattctccccttgcacagccagattccccgcgaggagcaaaggaaggtgtttgatcccgtgccagtaggcgtgacaaaagtcatcctgagcaccaatatcgctgaaacaagtatcacgatcaacgacgtggtgtatgttattgacagttgcaagcaaaaggtgaaactatttacagctcacaataatatgacgaactatgcaactgtgtgggccagcaagactaacctggaacaaaggaagggcagagcaggccgagttagacccggtttctgcttccatctctgttcacgagctaggttcgaacgtctagaaacacatatgacccccgaaatgttccgcactccgctgcacgaaattgcgctctcaattaaactcctcagactcggtggtatcggacaattcctcgcaaaggcaattgagcccccccccctggacgctgtgatagaagcggagcacacccttcgcgaactcgatgctttggacgcgaacgatgaactgaccccacttggaagaatcctggccaagttacctatcgaaccacgattcggcaaaatgatgatcatgggatgtatcttttacgtgggagacgcaatttgcactatagccgccgcaacctgcttccctgaacccttcatcaacgagggaaagcgactcggctatattcacagaaacttcgcggggaatagattcagcgaccacgtcgccctcctatcagtcttccaagcctgggatgacgccagaatgggaggagaagaagcagagatccgcttttgtgagcacaagaggctgaacatggccaccctacgaatgacctgggaagctaaggtgcagctaaaggagatcctgataaactctggatttcctgaggattgtctgctgacacaggtgttcaccaataccggacctgacaacaaccttgacgttgtgatctctctcctggctttcggcgtatatccgaacgtgtgttaccataaagagaaacggaaaattctcacaaccgaggggaggaacgcattgatccacaaatccagcgtaaactgcccttttagcagtcaggacatgaagtatccaagccctttcttcgtttttggtgaaaaaattagaactcgcgccatcagtgcgaaaggtatgactctggttacccccctacaactgttgttgtttgcatcgaagaaagttcagagcgacggacaaattgtactcgtggacgattggataaaacttcagattagccacgaagccgccgcatgcattactggactacgcgcggccatggaggctttggtggtggaggtgacaaagcagccagcaatcatcagccaactggaccctgtcaacgagcgtatgttgaatatgatccgacaaattagccgcccctccgcagcgggaatcaatctgatgatcggatccactaggtacggggacggacctcgccctcccaaaatggccagatacgataatgggtccgggtataggaggggtgggagcagctatagcggtggtggttatggcggtggctattcaagcggaggatacgggtcaggagggtatggcggaagcgctaattcattccgagccggatatggagcaggagtcggtggcggctataggggtgtgtcccgtggcggttttcgcggaaactcagggggcgattatcgaggcccgagtgggggctacagaggtagtggcggatttcagcgcggcggcggccggggagcttatggtaccggctatttcgggcagggccgcggagggggcggctactag

SEQ ID NO: 114191 - DNA, 1800 bp, synthetic construct
  misc_feature 1..1800: note = Description of Artificial Sequence: Synthetic coding sequence
  source 1..1800: mol_type = other DNA
atgggagacgtgaaaaacttcttatacgcatggtgtggcaaacgaaagatgacaccaagttatgaaattagagccgtaggcaacaagaatcgtcagaaatttatgtgcgaagtccaggtggaggggtataactacacgggcatgggaaactctacgaataaaaaagacgcgcaatcgaatgccgcgagggatttcgtaaattacttagttcgcattaatgaaattaaatcggaggaggttcccgcttttggcgtggcatctccccctccgttgactgacaccccggataccaccgccaatgctgaaggggatctgccgacaacaatgggcgggccgctgccccctcatcttgcactcaaggcagagaacaatagcgaggtgggagcttcagggtacggcgtccccggcccaacctgggaccggggcgctaatctgaaggactactactcgcgtaaggaggagcaggaagtgcaagctactctggaatcagaggaagtggatctcaatgcggggttgcacggaaattggacattggaaaatgctaaggcacggctcaaccagtacttccagaaggaaaagattcagggtgaatataaatatactcaagtcgggccggaccacaatcgcagctttatcgcagagatgaccatctacatcaagcagcttgggcgtcgcattttcgcgagagagcacggatcaaacaaaaaattagcagcccaaagctgtgccctgagcttagtgaggcagctgtatcacctaggtgtggtcgaagcatacagcggattgacaaagaagaaagagggggaaactgtggagccttacaaggtgaacctgagccaggacctggaacaccagttgcaaaacataatccaagagctgaacctggagatacttcctccgccagaagacccatctgtaccagtggccctcaatattggcaagctggcccagtttgagccatctcagagacagaaccaggtcggggtagtaccctggtcacccccacaatccaattggaacccctggacatcctccaatattgacgaaggacccctcgccttcgcaacaccagagcagatctccatggatctgaaaaacgagcttatgtatcagctggagcaagatcatgacctacaggccatcctccaggagcgcgaactgttacccgtcaagaagttcgagtctgagattctggaagcaatctctcagaattcagtggtcattatcagaggagccaccggctgcggtaagacaactcaggtgcctcagttcatcctggatgactttattcagaacgatcgcgctgccgaatgcaatatcgtagtaacccaacctaggcgtatttccgctgtgtctgttgcagaaagggtggcgttcgaacggggggaagaacctggaaagtcatgtggttactctgtgcggttcgaaagcattctgccacgccctcacgcgagtatcatgttttgcaccgtgggagtgttgctgcgaaaattagaggctgggattcggggtatatcccacgtcatcgttgacgagatccatgaaagagacataaatactgacttcctgcttgtagtactgcgagatgtggtgcaagcctaccctgaagtgagaattgttttaatgagcgcgaccattgatacatctatgttctgtgagtattttttcaattgcccgatcatcgaggtttacggccggacctatccagtgcaggaatacttcctcgaagattgcatacagatgacccactttgtgcctcccccaaaagacaagaagaaaaaagataaaaagaagaaatag

SEQ ID NO: 114192 - DNA, 1197 bp, synthetic construct
  misc_feature 1..1197: note = Description of Artificial Sequence: Synthetic coding sequence
  source 1..1197: mol_type = other DNA
atgatgttgaagggcataactcgcctgattagtagaattcataagctcgatcctgggaggtttctgcacatggggacacaagctagacaaagcattgccgcacatttggacaaccaggttcctgtggaatcccctagagccattagccgtaccaacgagaatgatcctgctaagcacggagatcagcacgagggacaacattacaacatcagtccccaggatctcgagaccgttttcccccacggactacctcccagattcgtgatgcaggttaagacatttagcgaggcctgtctcatggttcgtaagcctgcacttgagctgcttcactacctgaaaaacacttcttttgcctaccccgctatccggtatctcctgtacggagagaagggcaccgggaaaacactgagtctgtgccacgtgatccatttctgtgcgaagcaggattggttgatcttgcacattcctgatgcgcatctgtgggttaagaattgtagagacctgctgcagagctcttacaacaagcagcgctttgatcaacctctggaggcctctacctggctcaagaactttaagacaacaaacgagcggtttctgaatcaaattaaggtgcaggagaagtatgtgtggaataaaagagagagcacagagaagggtagtcccctgggggaggttgtggagcagggcataacacgggtgcggaatgccacagatgcagtgggcatcgtgctaaaagagctgaagagacagtcctctttaggtatgtttcacttgctggttgcagtggatggaatcaatgctctatgggggcggaccacactgaagcgcgaggataaaagccctatcgcccccgaagaattagcgctcgttcataatctgaggaaaatgatgaagaacgattggcatggtggggctattgtgtccgccctcagtcaaacaggttccctgtttaagcctcgcaaggcgtacttgcctcaagagctgttaggaaaagaagggttcgatgcattagacccattcatccctatcttggtctcaaactacaatcctaaagaatttgagtcttgtatacaatactacctggaaaacaactggctccaacacgaaaaggccccaacagaagagggcaagaaggagttgttgttcctctcaaacgccaatcctagtttgcttgagagacattgcgcctatctttag

SEQ ID NO: 114193 - DNA, 1197 bp, synthetic construct
  misc_feature 1..1197: note = Description of Artificial Sequence: Synthetic coding sequence
  source 1..1197: mol_type = other DNA
atgatgctgaaaggcatcactcggctgatttctcggattcataaactggaccctgggcgcttcctgcacatggggacccaagctcgacagtctattgctgcacatctggacaaccaggtgcctgtggaatcaccacgcgctatcagccgcacgaacgaaaatgaccccgcaaaacacggtgaccaacatgagggacaacactacaatatttccccacaggacctggagacagtcttcccacacgggcttcctccccggttcgtaatgcaggtcaaaacctttagtgaggcttgtcttatggtccgtaagccagcgctggagctgctccattacttgaaaaacacctcttttgcctatcccgcgattcggtaccttctatacggtgaaaaaggcaccggaaaaactctgtccctatgccatgtaatccacttctgtgcaaagcaggattggctcatcctgcacattcctgatgcgcacctctgggttaaaaattgccgcgacctcctgcagtcttcatacaataagcagcggtttgaccagccactggaggcttctacatggttgaagaacttcaaaacaaccaatgagagattcctcaatcagatcaaagtgcaggaaaaatatgtttggaacaaacgggagagcaccgagaagggttctcccctcggtgaggttgttgaacagggtattactcgcgtgcggaacgctacagacgctgtggggatcgtgctcaaggaactcaaaagacagagctctctgggcatgttccacctcctggtggccgtcgatgggattaacgccctgtggggcaggacaaccctaaagagagaggataagtccccaatcgctcccgaagagctggccctggttcacaatctgagaaagatgatgaaaaacgactggcacggaggagcaattgtgagcgctctatcccagacaggctcgcttttcaaaccgcgtaaagcctatcttccgcaagaactcttgggaaaggagggcttcgacgcattagacccgtttattcccatcctggtgtcaaactacaatccgaaggagtttgagagctgtatacagtactatttggagaacaactggttgcagcacgagaaagcacccaccgaggaaggcaagaaggagctgttattcctgagcaatgcaaacccttctctactcgaacggcactgtgcatacttgtag

SEQ ID NO: 114194 - DNA, 1095 bp, synthetic construct
  misc_feature 1..1095: note = Description of Artificial Sequence: Synthetic coding sequence
  source 1..1095: mol_type = other DNA
atgatgctcaaagggattactcgcctgatatcccgcatccacaaactggacccgggtcggtttctccacatgggcactcaggcccggcagtccatcgctgcacatctcgataaccaggtcccagtagaatcaccaagggctatctctaggacaaatgagaacgacccggtgaaaacattcagcgaagcctgcttaatggtgcgcaaacccgcacttgagttattgcactacctgaagaacacttcttttgcctacccggctattcgctatctgctgtacggcgaaaaaggcaccgggaagacactctcattatgccatgttattcacttttgcgctaagcaggattggctgatcctgcatattcccgatgcgcacctgtgggtgaagaattgcagggacctcctccagagctcttacaataaacagcggttcgaccagcctctggaggcttcaacctggctgaagaattttaagacgactaatgagagattcttgaatcagatcaaggttcaggagaagtacgtatggaataagcgtgaatcgacagagaaagggtcacctctgggagaggttgtggagcaaggcatcacgagagtgcggaatgctaccgatgccgtcggcatagttctgaaggaacttaagagacagagcagcctcgggatgtttcacctcctggtggctgtggatggaatcaacgccttgtgggggcggacaacactgaagagagaggacaagagccccatcgcccccgaagaactcgccttggtgcacaatctgcggaagatgatgaaaaatgattggcatggcggcgcgattgtctctgccctgagccagactggtagcctgtttaagccccgcaaggcttacctcccacaagaactgcttggaaaggaggggtttgacgcccttgatccattcatcccaattctcgtgtcaaattacaacccaaaagaatttgagtcctgcatccagtattatctggagaacaattggctccagcacgagaaagctcccactgaagagggcaaaaaggaacttctgtttctgtccaacgcaaaccccagcctccttgaaaggcattgtgcctacttatag

SEQ ID NO: 114195 - DNA, 1074 bp, synthetic construct
  misc_feature 1..1074: note = Description of Artificial Sequence: Synthetic coding sequence
  source 1..1074: mol_type = other DNA
atgatgcttaaggggataacccggctgattagccggatccacaaggccaagcacggcgatcagcacgaagggcagcactacaacattagccctcaggatctcgaaaccgtattcccccacggcctcccacccagattcgtcatgcaggtgaagacatttagtgaggcttgtttgatggtcaggaaaccggcactagagcttctccattacctgaaaaatactagctttgcctaccctgcaatcaggtacctgctgtacggcgagaaaggcaccggaaagactctctctctgtgccatgtcattcacttttgtgctaagcaagattggctcatactgcatattccagacgctcatctctgggtgaaaaactgccgggacctcttgcagagcagctacaataaacagcgcttcgatcagcctttggaggcatccacttggctcaaaaatttcaaaactactaatgagcgcttcctcaaccagatcaaggtgcaggagaaatacgtgtggaataaacgggaaagcacagaaaagggttctcccctgggcgaggtggtggagcaggggattaccagggttcgcaatgccacggatgctgtgggaattgttctcaaagagctgaaaaggcagtcttcactcgggatgtttcatcttctcgtagccgtagacggaataaacgccctgtgggggcgcacaacgttgaaacgtgaggacaagtcccccatcgctccagaagagctggccctggtgcacaacttgaggaagatgatgaagaatgactggcatgggggcgcgatcgtttctgccctgtcccaaacgggctctctcttcaaaccccggaaggcttatctgcctcaggaattgctaggcaaggaggggttcgacgcgctcgaccctttcattcctatcttagtgtccaactacaatcctaaagagtttgagtcgtgtatccagtactacctcgagaacaattggttgcaacatgagaaggcacccactgaagagggaaagaaagaattactgttcctgtctaacgccaacccgtccctgctggagcgacactgtgcctacttgtag

SEQ ID NO: 114196 - DNA, 1047 bp, synthetic construct
  misc_feature 1..1047: note = Description of Artificial Sequence: Synthetic coding sequence
  source 1..1047: mol_type = other DNA
atggccgggctgaaacgacgcgcatcgcaagtttggcctgaagagcatggggagcaggaacacggtctctacagcctgcacagaatgttcgatatcgttggcacccatcttacacatagggacgtccgcgttctgtctttcctgtttgttgacgtgattgacgaccacgaacgcggattgattcgcaatgggcgtgattttctcctagccctggagcgccaaggtcgctgtgacgaaagtaatttccgacaggtcctgcagctgcttcgaatcatcaccaggcatgacctcctgccctacgtgacacttaaacgtcggagagctgtctgtccagatctggtggacaaatacctagaagagacctccataaggtatgtgactccacgggccctctctgacccagaaccgagaccacctcaaccaagtaagaccgtgccccctcactatcctgttgtctgttgccctacatcagggccacaaatgtgctccaaacgcccagccagaggaagggctacgctggggtcccagaggaagcgcagaaaaagcgtcactcctgatcctaaagaaaagcaaacctgcggcgaggaagtgcaaggattccaacggtggtccagactcgagggggaatataaggagctgctcggccattgggcagtttacgctatacagtatatacgattgagggtgagggccgaatactgtcagcatgagacagccttgcaaggcaatgtctttagcaacaagcaggatccactggagcgccagtttgagagattcaaccaggcgaacaccattctgaaaagtcgagatctgggcagtatcatctgcgacatcaaattcagtgaactgacctatttagatgcgttctggcgggattatattaatggctccctgttagaggcgcttaagggagtatttatcacagattccctgaagcaggcagtgggccacgaggccataaagctcctcgtgaacgtggacgaagaggactatgaactcggcagacagaagctgctgagaaacttgatgctccaggccctaccctag

SEQ ID NO: 114197 - DNA, 957 bp, synthetic construct
  misc_feature 1..957: note = Description of Artificial Sequence: Synthetic coding sequence
  source 1..957: mol_type = other DNA
atggccgggctaaaaaggagggcttctcaggtttggcccgaagaacacggagagcaagaacatgggctgtatagtctccaccggatgttcgacattgttggaacgcacctgacgcaccgtgacgtgcgggtgctctcctttttgttcgtggacgtaattgacgatcatgagcgaggacttattagaaatggccgggatttcttgcttgccctggagaggcagggacggtgcgacgaatctaattttaggcaggtgctccagctactaagaattattacaagacacgatttgcttccctatgtaaccctgaagaggaggcgggccgtctgcccagacctggttgacaaatatttggaggagacttctatccgctacgtgacaccccgggccctgtccgacccagaaccacgccctcctcagccatccaaaaccgtccctccacactaccccgttgtttgctgcccaacaagtgggccacagatgtgcagcaaacggcccgccaggggcagggctaccctgggaagtcagagaaagagacgtaaatccgtaaccccagatcccaaggaaaaacaaacttgtgatatcagactgagggtgcgcgctgaatattgtcagcatgaaaccgccctccaaggcaacgtgtttagtaacaagcaggatccactggaacggcagttcgaacggtttaaccaggcaaacactattttgaaatcacgggacctgggcagcattatatgcgacatcaaattcagtgaactaacctatttggatgcattctggagggactatatcaacggctctttgctggaagcacttaagggtgtgtttattaccgacagcctgaaacaggctgtagggcatgaagctatcaagctcctcgtgaacgtggacgaggaggactacgaactgggtagacagaagctgctccggaatctgatgttgcaggcactcccttag

SEQ ID NO: 114198 - DNA, 1047 bp, synthetic construct
  misc_feature 1..1047: note = Description of Artificial Sequence: Synthetic coding sequence
  source 1..1047: mol_type = other DNA
atggccggactgaagcggagggcaagccaagtatggccagaggagcacggcgagcaggaacatggactttacagtctacatcgcatgtttgatatagtggggacccacctgacacaccgcgacgtgcgagtgttatcattcctgttcgttgacgtgatcgacgaccacgaacgcggactgatccgtaatggaagagactttctactagcactcgagagacaggggagatgcgacgagtctaacttccgacaggtacttcagcttttgagaataataacaaggcacgatctgctcccttatgtgactttaaagagacggcgtgcagtctgtcccgacttagtggataaatatttggaggaaactagtattcgctacgtcactcccagagctctgtccgaccctgaaccaaggccaccccagccttcgaagacagtaccccctcactaccctgtcgtctgttgtccaacctctggccctcagatgtgttcaaagcggccagccagaggacgagctacactggggtctcagaggaagaggagaaagagcgtaactccggaccccaaggagaaacaaacctgcggcgaggaggtccagggattccagagatggtccagattggaaggtgaatataaggagctgctggggcactgggctgtctatgcaattcagtacattcgactgagagtgagggctgagtactgccaacacgagaccgcactgcagggcaatgtgttctcaaacaagcaggatcctctggagcgccagtttgagcgattcaaccaggcgaatactattctgaagagtcgcgacttgggttcaattatatgcgacataaagttttccgaactcacgtaccttgacgccttctggagagactatattaacggtagtctcctagaggctctgaagggcgtctttattacggacagtttgaagcaggcagtggggcatgaggccattaagctgctggtgaatgttgatgaggaggattatgaactgggtcgccagaaactcctgaggaacttgatgctacaggccctcccctag

SEQ ID NO: 114199 - DNA, 957 bp, synthetic construct
  misc_feature 1..957: note = Description of Artificial Sequence: Synthetic coding sequence
  source 1..957: mol_type = other DNA
atggcagggctgaaacggagggcatcccaggtgtggcctgaggagcacggcgaacaagaacacggcttgtatagccttcaccggatgtttgacattgttggtacccacctgactcatagggacgtccgcgtcctctcgtttctgttcgtcgacgtaattgacgatcatgagaggggactgatccggaatggacgtgacttcttattagctctggaacgccagggaaggtgcgatgaaagcaacttccgccaggtcctgcagctcctacggatcattaccagacacgacctgctgccttacgtaactctgaagaggaggagggctgtctgcccggatctcgtcgataagtacttggaagaaaccagtattcggtacgtgacaccccgtgctttgtctgatcctgagccacgaccgccacaacctagtaagacagtacccccccattatcctgtggtgtgttgtcctacctctggcccacagatgtgctctaagaggccagccagggggcgtgccaccctgggatcacagaggaaaaggcgcaaatccgtcactcctgaccctaaagaaaaacagacatgcgacatacggctgcgcgtccgggcagagtactgtcaacatgagactgcactccagggaaacgtattcagcaacaaacaggacccactagaaaggcagttcgaaagatttaaccaggccaatacaatcctgaaatcacgtgatctgggctccattatttgtgatattaaattctcagagctgacctacctggatgcgttctggcgcgattatatcaatggctcattactagaagcactcaagggcgtgttcatcactgacagcctgaaacaagcggtcgggcatgaggccataaaactgctggtgaatgtggatgaagaggattacgagctgggtaggcagaagttactgcgaaatctgatgctccaggcgctgccatag

SEQ ID NO: 114200 - DNA, 828 bp, synthetic construct
  misc_feature 1..828: note = Description of Artificial Sequence: Synthetic coding sequence
  source 1..828: mol_type = other DNA
atggccggactgaagcggagggccagtcaggtttggcctgaggagcacggagagcaagagcatggactgtatagtcttcaccgtatgtttgacatcgtaggaactcaccttacccaccgggacgtccttcaattactcagaatcattacccgccatgacctgttaccttatgtgaccctcaagaggcgccgggccgtatgccccgaccttgtggacaagtaccttgaagaaacctccataagatatgtaactccccgtgcattatcagacccagaaccccgacccccccagccctcgaaaaccgttccccctcattacccagtggtctgttgcccgacatccggtccacagatgtgcagcaagagacccgcacgagggagggccaccctcggatcgcagcggaagcggcgcaaatcagtgacccccgatcccaaggagaaacagacctgcgacatacgtttgcgagtgagggcagagtattgccagcacgagacagctctccagggcaatgtgttctctaataagcaggacccactggagaggcaattcgagagatttaaccaagctaacacaatcctcaagagccgggatcttggctctatcatttgtgacataaagtttagcgaactgacctacctcgacgccttctggagagactacataaacggtagcctcctcgaggcattaaagggggtgttcatcacagactccctgaagcaggcagtagggcacgaggccatcaaactcctggtcaacgtggacgaagaggactacgagttggggcggcaaaaactactgagaaacctgatgttacaggctttgccctag

SEQ ID NO: 114201 - DNA, 957 bp, synthetic construct
  misc_feature 1..957: note = Description of Artificial Sequence: Synthetic coding sequence
  source 1..957: mol_type = other DNA
atggccggcctgaagcgacgtgcttcgcaggtctggcctgaagagcacggcgagcaggaacacggcctctattctctccaccgcatgtttgatatcgtgggcacacatctcacccacagagatgtgcgcgtgctttcgtttctgttcgttgatgtcattgatgaccacgagagaggactgattcgcaacggaagagacttcctgctggcgcttgaacgtcaggggagatgcgatgagagtaattttcgtcaggtgctacagctcctccgaatcatcacgcggcatgacctgctcccatacgtaacactgaagaggagaagagctgtttgcccggaccttgtggacaagtacttggaggagacttctatcaggtacgttacgccacgagccctgtctgatcccgagcctcggcctcctcaaccctccaagacagtgccccctcactacccagtggtatgctgcccaacgtcaggtcctcaaatgtgttccaagcgccccgcacggggccgggcaaccctgggctcccagaggaaacgccgtaagagtgtgacaccagacccgaaggaaaagcagacctgtgacatccggctacgggtgagggcggagtattgtcagcacgaaacggctctgcagggtaacgtcttctccaataagcaggacccactggagagacagtttgagagatttaaccaggccaacactatcctaaaatcacgcgacctgggatcaatcatctgtgatatcaagtttagcgaactgacctacctggatgctttttggcgagattacatcaatggttcattgcttgaagcactgaaaggtgtttttatcacagactccctgaagcaagctgtgggtcatgaagctatcaaattgcttgttaatgtggacgaggaggactacgagctgggaaggcagaagctgctccggaatctgatgttgcaagccctcccatag

SEQ ID NO: 114202 - DNA, 957 bp, synthetic construct
  misc_feature 1..957: note = Description of Artificial Sequence: Synthetic coding sequence
  source 1..957: mol_type = other DNA
atggccgggttgaaacgcagggccagccaggtgtggcccgaagaacacggggaacaagaacacggcttgtactccctccatcggatgttcgacatcgttgggacccatcttacacaccgcgatgtaagggtcctctcttttctttttgtggatgtgattgacgaccacgagcgtggattgattagaaatggccgggactttctgctggctttggagcggcagggaaggtgtgacgagtcaaactttcgacaggttttgcagctgttgcgcatcatcacccgtcacgacctgcttccttatgtcaccctgaaacggcgaagagcagtgtgtccagacctggtggacaagtatctcgaggagacgtcaatccgctatgtcactcccagagccctctccgaccctgagccacggccaccccagccaagtaaaaccgtgcctccacattaccctgtagtatgttgtcccacaagtggacctcaaatgtgttcgaaaagaccagctcggggaagggccactctcggctcacaaaggaaacgccgcaaatctgtgacccccgacccgaaggagaaacaaacttgcgatattaggctgcgcgtgcgggcagagtactgccagcatgaaactgccctacagggaaacgtattctctaacaaacaagacccgctggaaagacagttcgagcgctttaatcaagcgaacactatcctgaaatcacgtgacctgggtagcataatctgtgacatcaaatttagtgagcttacctatttagacgccttctggagagattatattaacggctcattgctggaagcgttaaagggcgtgtttatcacagactcgcttaagcaggctgtcggccacgaagcgattaaattactggttaatgtggatgaggaggattacgagttaggccgccagaagctactgcgcaaccttatgctgcaggcactgccttag

SEQ ID NO: 114203 - DNA, 1917 bp, synthetic construct
  misc_feature 1..1917: note = Description of Artificial Sequence: Synthetic coding sequence
  source 1..1917: mol_type = other DNA
atggacttgtggcagctgctcctgacactagctttggcaggtagtagcgacgctttttccggttccgaggccacggcagcaatactttctcgggccccctggagcctgcagtctgtgaatccagggctcaaaaccaatagctccaaagagcctaaattcaccaaatgtagatctcccgagcgcgaaacattctcctgccattggacggatgaggtgcaccatggcacaaagaacctaggacccatacagctgttttacacccggcgcaacacccaggagtggacacaggaatggaaagagtgccccgattacgtgagcgccggagagaactcttgctacttcaattctagctttacaagtatatggatcccttactgcatcaagctgacgtccaatggggggaccgtagatgaaaagtgcttctcggtggacgaaattgtacagcccgaccctcccatcgcactaaattggactctgctaaatgtgtctttaacaggcattcacgccgatatccaggtcagatgggaggctcctagaaatgcagatattcagaaaggctggatggtgctggaatatgaactgcagtacaaagaagtgaatgaaaccaagtggaaaatgatggatcctattctgaccacaagcgtcccagtctatagtctaaaagtcgataaggaatatgaggttagagtgcggtccaagcaacgcaactcaggaaactacggggagttttccgaggtgctgtatgtgacgctgccccagatgagtcagttcacatgtgaagaagacttttactttccctggctcctgattatcattttcgggatattcggcttgacagtaatgctgtttgtgtttctatttagcaaacagcagaggatcaagatgctgatactgcctcccgtcccagtgccgaaaatcaaggggatcgatcctgatctcctgaaagaaggaaagctggaggaggttaacactatactggcaatacacgactcatacaaacccgaattccatagcgacgactcatgggtagagttcatcgagcttgacattgacgaaccagacgaaaaaaccgaggagtctgacacagatcgcctcctcagttccgaccacgagaagtctcactccaatctgggagttaaagatggagattccggcaggaccagttgttgcgaacccgatatcctcgaaaccgacttcaacgccaatgacatccacgagggtacctccgaagtagcacagccccagaggctcaagggagaggccgatctcttgtgcctggatcagaagaatcagaataactccccttatcatgacgcctgtcctgctacccagcagccatccgtcattcaggctgagaaaaacaaaccccagccattgcccaccgaaggagctgagtctacacatcaggccgcccacatccagttatccaatcccagcagcctgtctaacatagatttttacgcacaggttagtgatattactccagctgggtcagtggttctctcccccgggcagaaaaataaggcagggatgagccagtgcgacatgcaccctgagatggtgagtctatgtcaggagaactttttgatggacaacgcttacttctgcgaagccgacgcaaagaagtgcatccctgtggcaccccatataaaagtggaatcacacattcagcccagccttaatcaggaggacatatacattacgaccgaatctctaaccactgcggccggccgcccaggcacaggcgagcacgttccagggagtgagatgcccgttcccgactatacctccatccacatagtgcaatctccccagggtttaattctgaatgctacagcactgcccctacccgataaagaattcctgtcctcctgcggctacgtctccacagaccaactgaacaagataatgccctag

SEQ ID NO: 114204 - DNA, 1113 bp, synthetic construct
  misc_feature 1..1113: note = Description of Artificial Sequence: Synthetic coding sequence
  source 1..1113: mol_type = other DNA
atgttccaggccagtatgaggagcccgaacatggagccttttaaacagcagaaagttgaggacttttatgacatcggagaggagctgggatctgggcagttcgcaatagtcaaaaagtgcagggaaaaaagcaccggactcgaatacgctgcaaagtttatcaagaagcggcagtcccgcgcctcgcgacgcggggtgtcccgggaagaaatcgagcgagaggtttcaattctgcgccaggtgctccaccacaacgtgatcacgttgcatgatgtgtatgagaatagaacagacgtggtactcattctggagctcgtcagtggaggggaattattcgattttctcgcccagaaggagtccctgagtgaggaggaggccacaagcttcataaaacaaattctcgacggggtcaattacctacacacaaagaaaattgcccactttgatttgaaaccagaaaatatcatgctcttggataagaacatacctatcccacacatcaagcttatagacttcggcttagctcacgagattgaagacggtgtggagtttaaaaacatttttggcaccccagaattcgtggcaccagagattgttaactacgaacccttagggctcgaagctgacatgtggagcatcggcgtcataacatatatcctgctaagcggggcctcgccgtttctgggggacaccaagcaggagacattagcaaacatcaccgctgtgtcttacgactttgatgaagaattctttagccagacatcagaactggccaaggatttcatccggaagctcctcgttaaagagactaggaaacggctcaccattcaggaagcacttcgccacccttggattaccccggtagacaatcaacaagccatggttcggagggaatctgtagtcaatttagagaacttccggaaacagtatgtcaggagacggtggaaactgtcgttcagcattgtgagcctgtgcaatcacctcacaaggtcccttatgaagaaggtgcacctgaggcctgatgaggatcttcggaattgtgagagcgatactgaggaggacattgcccgcaggaaagctttacatccaagacggaggtctagcacttcttag

SEQ ID NO: 114205 - DNA, 1113 bp, synthetic construct
  misc_feature 1..1113: note = Description of Artificial Sequence: Synthetic coding sequence
  source 1..1113: mol_type = other DNA
atgtttcaggctagcatgcgcagtccaaatatggaaccgtttaaacagcaaaaggtggaagacttctatgatattggggaggagctgggaagcggccagtttgccatcgttaaaaagtgtagggaaaagtccaccggactggaatatgccgctaagtttatcaagaaacggcagagcagagcaagtagaagaggagtttccagggaggaaatcgaacgtgaagtgtccattctcagacaggtgcttcatcacaatgtgattacactgcacgacgtttacgagaatcggactgacgttgtgctgatcttggaattagtctcaggcggagaacttttcgacttcctcgcccagaaggagagcttatctgaggaggaggccactagcttcataaaacagatcttggacggagtgaactatctccacacaaaaaagattgcacacttcgatcttaagcccgaaaacattatgctgctcgacaaaaacattccaattcctcatataaagctcatagactttgggctcgcccacgagatcgaagatggcgtcgaatttaagaatattttcgggacacctgagttcgtggctcccgaaatcgtgaactacgaacccctggggctggaggctgacatgtggagcataggagtgattacatatatactcctttcaggtgcttctccattcctgggggatacaaaacaggaaacgctggcaaacatcaccgctgtttcttatgattttgatgaagagtttttctcacagacgagcgagcttgcaaaggacttcatcaggaaactccttgtaaaggaaactcggaaaagactcactatacaggaagcattgcggcacccctggattacacctgtggataatcaacaggccatggtacggcgcgagtcagtagtgaatcttgagaatttccgtaagcagtacgttaggaggcgctggaagctgagctttagtatcgtcagtttatgtaatcatctgacgaggagccttatgaagaaagtgcatttaagacctgatgaagacctgcgcaattgcgagtcagacacagaggaggacatcgcccgaagaaaagccctgcaccccaggaggagatcttccacttcttag

SEQ ID NO: 114206 - DNA, 246 bp, synthetic construct
  misc_feature 1..246: note = Description of Artificial Sequence: Synthetic coding sequence
  source 1..246: mol_type = other DNA
atgtttcaggccagcatgaggtcacctaacatggaaccgtttaaacagcagaaggtggaagacttttacgacattggcgaagaattaggaagtggacagtttgccattgtgaagaaatgcagagagaaatcaaccggcctggaatatgccgccaagtttattaaaaagcgccagtcccgagctagtcgtagaggggtgtcgcgcgaagaaatcgagagagaggtcagcattctgaggcaggtgtag

SEQ ID NO: 114207 - DNA, 2223 bp, synthetic construct
  misc_feature 1..2223: note = Description of Artificial Sequence: Synthetic coding sequence
  source 1..2223: mol_type = other DNA
atggccaccgccaactccataatcgtgctcgatgacgacgacgaggacgaggccgctgcccagccaggcccttcacaccccctgcccaacgcggcgtcgccgggagcagaggccccttctagttccgagccccacggggcaagaggatctagctcctccggaggaaaaaagtgctataagctggaaaacgagaagctgtttgaagagttcctggagctgtgcaagatgcagacagctgaccaccccgaggtagtgccttttctgtacaacagacagcagcgagcacactctctgtttctggcatcagctgagttttgtaacatcctgtcacgagtcctctctcgcgcacgctcccggccagctaagctgtacgtctacataaatgaactctgcactgtcctgaaggcccactctgccaaaaagaagctgaacctggcccccgcagctacaacaagtaatgaaccttctggaaacaatccgcccacccatctgagtctggatcccacgaacgcagaaaacacggcttcacagtctccccggaccaggggctcgaggaggcagattcagagactcgagcagctactagccttgtacgtggccgagattcggcggttgcaggagaaggaactagatctgagcgagttagatgacccagattccgcatatcttcaggaagccaggctaaagagaaagctaattagactattcggacggctatgtgaactgaaagactgttcgtccctcactggtcgggttatcgaacaacgtattccataccgggggacgcggtaccctgaggtcaatagacggattgagcggctcattaacaagccaggccctgacacgtttcccgactatggggacgtcttgcgggctgtcgaaaaagctgcagcacgtcatagtctaggattaccaaggcagcaattacagttgatggcacaggatgcgtttcgagatgtaggcattaggcttcaggaacgtcgccatttggatctcatttataacttcggctgtcacttaacagatgattatcggcccggcgtggaccccgctttgtccgatcccgtgttagcacgcagactgagggagaaccgcagtcttgcgatgagtcggctggatgaggtgatttccaagtacgccatgctgcaggacaagagtgaagaaggggagaggaaaaagaggagagcacggctgcagggcacctcctctcacagcgctgacactcccgaggcttctttagactctggagagggccccagcggcatggcctctcagggttgtcccagcgctagtcgagccgagacggacgatgaggacgacgaagagagtgacgaggaggaagaggaggaagaggaggaggaagaagaggaagccacagactctgaggaggaagaggatttggaacagatgcaggagggccaagaagacgacgaggaagaagacgaggaagaggaagccgctgctggtaaggatggggacaagtctccgatgagctctctgcagatctccaacgaaaaaaaccttgaacccggtaagcagatttcccgtagcagcggggagcagcagaacaaaggacggattgttagcccatctttgctgtctgaggagcctcttgccccctcatccattgacgctgaatcaaacggggaacaaccagaggagttgaccctcgaagaagagtctcctgtgtcccagctgtttgagctggagatagaagccctccctctcgatactccctcatctgtagaaacagatataagcagctcgcgtaagcagtccgaggagccctttaccacggtgcttgagaatggagcgggaatggtgagctccaccagttttaatgggggcgtgtcccctcataattggggcgacagcggtccgccttgcaagaagagcagaaaggaaaaaaaacagacaggctccggccccctggggaattcctatgttgaaaggcagcgctccgtccacgaaaagaatggaaaaaaaatctgcaccctgcctagtcccccaagcccactcgcttcactggccccagtggcggatagtagtactcgcgttgactctcctagccacggacttgtaacctcctccctgtgcatcccgagcccggctcggcttagccagactccccatagccagccgcccaggccggggacctgtaagacatcagtcgctacccagtgtgatcctgaggagattatcgtattatccgattctgattag

SEQ ID NO: 114208 - DNA, 2223 bp, synthetic construct
  misc_feature 1..2223: note = Description of Artificial Sequence: Synthetic coding sequence
  source 1..2223: mol_type = other DNA
atggccacagccaacagtattattgttctggatgatgacgatgaggatgaggctgctgcccaacccggaccttcccatccattgccaaatgccgcctctcccggagctgaggccccgagttctagcgaaccacatggcgctcggggcagtagctcttctggggggaagaagtgttacaaactagagaacgaaaaacttttcgaggagtttctggagctatgtaagatgcagaccgccgatcatcctgaagtcgtgccatttctgtacaaccgccaacagagagcccacagtctcttcttagcgtctgcagaattttgcaacatcttgtcccgggtgttatcacgagcaagatcccgtccggccaagctctatgtgtacatcaacgagctgtgtacagtgctgaaagcccactccgccaagaaaaagcttaatttagctccggcggctacaacttcaaacgaaccctctggcaacaatccacccactcacctctctctcgatcctacaaacgccgaaaacaccgccagtcaaagccccaggacacgcgggtcacgaaggcaaattcaacgtctggaacagctcttggccttatacgtcgctgaaattaggaggctgcaggaaaaggagctggacctgagtgaattagacgacccggactctgcttacttgcaggaagccaggctgaaaaggaaactgatccgactatttggtcggctgtgcgagttgaaggattgctcgtcgcttacagggcgcgtgatcgaacagagaatcccttaccggggaacaaggtacccagaagtgaaccgccggattgaaagattgataaataagccaggcccagacacatttcctgattacggggacgtgctcagagccgtcgagaaggcagcagccagacacagcctgggactaccccgtcaacaactgcagctgatggcccaggatgcattccgcgatgtgggcataagactgcaggaacgaaggcatctggacctgatttataacttcggctgtcatctgactgacgactaccgtcctggagtggaccctgctctgtctgatccagttctcgctcggcggctgagagaaaatcgaagcctcgccatgtctcggctcgatgaagttatttccaagtacgctatgctccaagacaagtcagaagagggtgaacgaaagaagcgccgggcccgactgcaaggcactagttcacactctgcagacacccccgaggctagtttggactccggcgaaggcccttccggaatggcttcacaaggatgtcccagcgcttctcgagccgaaactgacgacgaggatgatgaggagtccgatgaggaagaagaggaggaagaagaggaggaagaggaagaggccaccgactccgaggaagaggaagatttggaacagatgcaggagggtcaagaagacgacgaggaggaggatgaggaggaagaagccgcagctggcaaggacggggacaagtctccaatgtcctcccttcagattagtaacgaaaagaatctagaacctggaaaacaaataagcaggtcatccggggagcagcagaataaagggagaatagtatccccatccctgctgtcggaggaacccctcgctcctagctctatcgacgcggagagtaacggcgagcaacctgaggagttaacactcgaggaagaaagcccagtgtcccagctgtttgaactagagatcgaagctttgcctctggatactcccagctcggtggagacagatatcagtagctctagaaagcagtccgaggaaccattcaccaccgtgctggagaatggtgcagggatggtgagtagcactagtttcaatgggggggtctctccacataactggggggactcaggaccaccttgtaagaaatctcggaaggagaaaaaacagacaggttccggcccactcggaaattcttacgtcgaacgtcagcggagcgtgcacgaaaagaacggcaaaaagatatgtactttacccagccccccaagcccgctggcttccttagctcctgtggctgatagttctacaagggtcgattcaccttcacacggactggtgaccagctccttatgcatcccttctcctgccaggctctctcaaacaccacacagccaacctccccgacccggaacttgtaagaccagcgtggcgactcagtgtgacccagaagagattatcgttcttagtgatagtgattag

SEQ ID NO: 114209 - DNA, 2223 bp, synthetic construct
  misc_feature 1..2223: note = Description of Artificial Sequence: Synthetic coding sequence
  source 1..2223: mol_type = other DNA
atggccacagctaactcaataattgtgttggacgacgatgacgaagatgaagccgccgcccagccaggcccaagccatccactgcccaatgcggcctctcctggggccgaagcaccgtcctcttccgaaccgcatggcgctagaggtagttctagcagcggcgggaagaaatgttataaattagagaatgagaaactttttgaagaatttctggagctttgcaagatgcaaactgctgaccatcctgaggtggtaccgtttctgtataacagacaacagagagcccactcactatttcttgccagtgcagaattttgtaacatattgagtcgcgtgctgtcccgggctagaagcagaccagccaaattatacgtctacattaatgagttatgcactgtactcaaggcacactctgccaagaagaagttgaacctcgctccagcggctacgacctctaatgagccatctggaaacaaccctcccacgcacctttctctagatccaaccaatgctgagaacactgcctcccagagcccacgcacccggggcagtaggaggcagattcagagactcgagcagctcctcgctctttatgtagcagagattcgacgattacaggaaaaagagttagacctgtcagagctggatgacccagactcagcctacctgcaggaggccaggttaaaacgcaaattgataagactgtttgggaggctctgtgaattgaaggactgttcaagcctgacgggaagggtgatcgagcagagaatcccctacagaggcacacgctaccccgaggtgaatcgtaggatcgagcgacttatcaacaaacctggcccggatacattccctgattacggggacgtgctgagggctgtggaaaaggcagccgcacgtcactctctggggctgccacggcagcagttacagttaatggcgcaggatgcctttagagacgtgggcatccggctccaggagagaagacatctggaccttatttacaattttggctgccacctgacggatgactatcggcctggtgtagatcccgctctctctgaccccgtgctggctaggagacttcgtgaaaacaggtcactggccatgtccagattggatgaggtgatctccaaatatgccatgcttcaggacaaaagcgaggagggagaaagaaagaagcggcgggccaggctacagggcacaagttcacattccgcagacacgcccgaggcctcactcgacagcggagaagggccctcagggatggccagtcaaggatgtccatctgcctccagggccgagactgacgacgaagacgacgaagagtctgacgaggaagaggaagaagaggaggaagaagaggaagaggaagcgaccgactctgaggaggaggaagaccttgaacaaatgcaagaggggcaggaggatgatgaggaagaagatgaggaagaggaagccgcagccgggaaagacggagataaaagtcctatgtcttcactccagatatccaatgagaagaatctcgaacctggaaagcagatatccagatcatccggcgaacaacagaataaaggtcgcattgtgagtccatctttactatcagaagagccgctcgctccgagttccattgatgcagagtcgaacggagaacagcccgaagagttgacattggaggaagaaagcccagtgtctcagcttttcgagctcgaaattgaggctctgccactggacactccttcctctgttgaaacagatatatcgagctcccgaaagcagtccgaggagcccttcactactgttttggagaacggagccgggatggtcagctcaacttcatttaacgggggtgtttcccctcataactggggggactccggcccgccctgtaagaaatcaagaaaagagaagaagcagactggttccgggcctctaggtaattcttacgtggagaggcagagatcagtgcacgagaaaaatgggaaaaagatctgcactctgcccagtcccccctcccctttggcctcgttagctcctgtggctgatagttccactcgtgtagatagtccaagccacggtctggtgactagttctctctgtatacctagtccggcaaggctcagtcagactccccactctcagcctccgcgacccggcacatgcaagacttctgtggccacacagtgcgatccggaggagatcatcgtgctgtcggatagtgactag

SEQ ID NO: 114210 - DNA, 2223 bp, synthetic construct
  misc_feature 1..2223: note = Description of Artificial Sequence: Synthetic coding sequence
  source 1..2223: mol_type = other DNA
atggccactgccaattcaataattgtactggacgacgatgacgaggatgaagctgccgcacagcctggaccatcccaccccctgccaaacgccgctagccccggcgcagaagctccttcttcttccgaaccccacggagccagggggtctagtagcagcggcggaaagaagtgttacaagttagaaaatgagaaactttttgaggagttcctggagctctgcaagatgcagaccgccgaccaccccgaggtcgttccttttctttacaataggcagcagcgggcacactccctgttcctggcatccgctgaattctgtaatatcctgtctagagtgctgtcaagggcaagaagccggccagcaaagctttacgtatatatcaatgagctctgtaccgttctgaaggcgcattcagctaagaaaaagctaaacctagcgcccgctgccacaacatctaatgaacctagcgggaataatccacctacacatctgtcactggatcctaccaatgccgagaacaccgcctcccagtccccacgcacgcgtgggagtcgtcggcagatacagagactggagcaattactcgcgctatatgtcgcagaaatccgtcgtcttcaagaaaaagagctcgacctgtctgagctggacgaccctgacagcgcctacttgcaagaggcccggttaaagaggaaacttattcggctgtttgggcggctctgtgaattgaaggattgttcaagccttaccggtagggtaattgagcaacgcattccataccggggcactcgataccctgaagtcaaccggaggatcgaacggcttattaacaagccaggccctgatacctttccagactacggtgacgtgcttagggctgtggagaaggcagcggctagacactctctcgggcttcctcgtcagcaactgcaactcatggcgcaagacgctttccgggacgtgggcattcggttgcaggaaagacggcatctcgacctgatatacaactttgggtgccacttgaccgacgattatcgtcctggggtcgacccggcacttagcgaccctgttctggcacgccgccttagagagaaccgcagcttagcaatgtcacggctcgatgaggttatcagcaaatacgccatgcttcaggataagtcagaagagggagagaggaagaagagaagggcacgtctgcagggcaccagctctcactccgcagatacaccagaggcttcattggattccggtgaggggccaagcgggatggcgtcccagggttgtcccagcgcatcgagggcggagacagatgacgaggatgatgaagagagcgacgaagaagaagaggaggaggaggaagaggaggaggaggaagctaccgactcagaggaggaagaagatctggaacagatgcaggaagggcaggaagatgacgaggaagaggacgaggaggaggaggccgcagcggggaaagacggtgacaagtcgcctatgagttcacttcagattagcaatgagaaaaatctagagcctggtaagcaaatctccaggtcaagtggagagcagcagaacaagggccgaatcgttagtcctagtctgctatctgaagagcccctggcaccctcaagtattgacgcggagtctaatggggagcagcctgaggaactgacgttggaggaggaatctccggtgtctcaactattcgagctggaaatcgaggctctgcctctcgacaccccatcctccgttgaaacggacatcagctcctctaggaaacagtctgaagagcctttcactactgtgttggaaaatggagccgggatggtgtcctccaccagcttcaatggaggcgtgtccccacacaattggggcgacagcggtccaccctgtaagaagagcagaaaagaaaagaagcaaactggctcaggtcccctcgggaattcctatgtggaaagacagcgctccgttcatgagaaaaatggaaaaaaaatctgtactctgcctagccctccctccccactggcctcgctagcccctgtggcggactcttcgacaagagtggactctccgagccacggtctggtcacatctagtctatgtattcccagtccagctaggctgagccagactccacattcacagccaccccgtccggggacctgtaaaactagtgtggccacccagtgtgaccctgaagaaatcatcgtgctgagcgatagtgactag

SEQ ID NO: 114211 - DNA, 393 bp, synthetic construct
  misc_feature 1..393: note = Description of Artificial Sequence: Synthetic coding sequence
  source 1..393: mol_type = other DNA
atggccacggcaaacagcataatcgtgctggacgatgatgatgaggacgaggccgccgctcaacctggtccctcccatccgctgcccaatgctgcaagtcccggcgccgaagccccctctagtagcgaacctcatggcgctcggggtagctcctcatccggcggcaagaagtgctataaactggagaacgagaagctgttcgaggagttcctagagctgtgtaaaatgcagacagcggaccaccccgaagtggtgcccttcctatacaacagacaacaacgcgcccacagcttgtttctcgcctccgccgagttctgtaacatcctgtccagggtcctatctagagctcggtcccgaccagccaagctgtacgtgtacatcaatgagctctag

SEQ ID NO: 114212 - DNA, 147 bp, synthetic construct
  misc_feature 1..147: note = Description of Artificial Sequence: Synthetic coding sequence
  source 1..147: mol_type = other DNA
atggctacagccaactccatcatcgtgcttgatgatgatgacgaggacgaagcagccgcacaacctggccctagtcaccctttgcccaacgccgctagtcccggagcagaagccccatcctcctcagagcctcacggagcgaggtag

SEQ ID NO: 114213 - DNA, 393 bp, synthetic construct
  misc_feature 1..393: note = Description of Artificial Sequence: Synthetic coding sequence
  source 1..393: mol_type = other DNA
atggcaacagcgaacagcatcattgtgcttgacgatgatgatgaagacgaggccgccgcacagcccggcccgtctcatcctcttccgaatgcggcctcccccggagccgaagctccatcttccagcgagcctcatggggccaggggtagctcttcctccggaggcaaaaaatgctacaagctggaaaacgaaaaactttttgaagagtttcttgaactctgtaagatgcaaaccgcggaccaccctgaggtcgtgccctttctctacaaccgtcagcaacgggctcattcgttgttccttgcatcagctgagttctgcaacatcctctctcgcgtactgtcccgagctcgctcaaggccagccaagctgtatgtgtacattaatgagctgtag

SEQ ID NO: 114214 - DNA, 147 bp, synthetic construct
  misc_feature 1..147: note = Description of Artificial Sequence: Synthetic coding sequence
  source 1..147: mol_type = other DNA
atggctacagccaattctattatcgtgctggacgacgatgatgaagatgaagccgcggcacaacccggcccctcccatccgctgcctaatgcagcttctcccggagctgaggcaccttccagtagcgagcctcacggagctagatag

SEQ ID NO: 114215 - DNA, 537 bp, synthetic construct
  misc_feature 1..537: note = Description of Artificial Sequence: Synthetic coding sequence
  source 1..537: mol_type = other DNA
atggctaccgcgaactcgatcatcgtgcttgacgacgatgatgaggacgaagccgcagcccagcctgggcccagtcaccctctccccaatgctgcctcacccggagccgaagctccgtcgtccagcgaacctcatggtgcccgaggctcaagcagcagcggaggcaagaaatgttataagctggagaacgaaaaactctttgaggagttcttagaactgtgtaagatgcagacagcagaccacccggaggtggtaccctttttgtacaacagacaacagagagcccatagcctgtttctagcttccgctgagttttgcaacatactgagtcgggtcctctctagagcccggagccgccctgctaagctctacgtgtatatcaatgagttgtgtacagttctgaaggcccacagcgccaagaagaaactgaatctagcgcctgccgctactactagtaatgaaccttccggaaataatccacctactcacttgtctctcgatcccacaaatgctgaaaataccgcttctcaatcctag

SEQ ID NO: 114216 - DNA, 537 bp, synthetic construct
  misc_feature 1..537: note = Description of Artificial Sequence: Synthetic coding sequence
  source 1..537: mol_type = other DNA
atggccaccgcaaacagcattattgtgctggacgacgacgatgaggacgaagctgctgcacagcctggccccagtcacccgctgccaaatgctgcatcacctggcgccgaagctcccagcagctccgaaccgcacggtgcccgtggatctagcagctctggaggaaagaagtgctacaaactcgaaaacgagaagttatttgaggagttccttgaactttgtaagatgcaaaccgccgaccacccagaagtcgtcccctttttatataaccgacagcagagagctcacagtctgttcctggcctccgccgaattctgtaatatactgagcagagtactcagcagggcgagatcaagaccggccaaactatacgtttatataaatgagctttgcactgtcttgaaagctcactcagcgaagaagaaactgaatctggcacctgccgctactactagcaacgaaccatctggaaacaaccctccaacgcacctgagtctggaccccacgaatgccgaaaacaccgctagtcaatcctag

SEQ ID NO: 114217 - DNA, 2223 bp, synthetic construct
  misc_feature 1..2223: note = Description of Artificial Sequence: Synthetic coding sequence
  source 1..2223: mol_type = other DNA
atggccacagcgaactccattatcgtactagatgacgacgatgaggacgaagccgctgctcagccagggcccagtcatcccttgccaaacgctgctagcccgggcgccgaggcgccaagtagctcagagcctcatggagccaggggctccagctctagtggaggaaaaaaatgttataaattagagaacgaaaagttgtttgaggaatttctcgagttgtgcaagatgcaaaccgccgaccaccctgaggtggtaccatttttatataataggcaacaaagagctcactctctgtttctcgcctccgcagagttttgcaacatactatcgcgcgttcttagcagggctaggtcgcgacctgcaaagctctacgtgtatatcaatgagctgtgtacagtgctgaaggctcactccgctaagaaaaaactgaatctggcccccgcggctaccactagcaacgagccctcaggtaataatccccctacccacctgtccttagacccgaccaatgctgaaaacacagcgtcccagtcccccaggacccgcggttcaagacgccaaattcagagactggagcagctcctggctctttacgtggccgaaattcgccgccttcaggaaaaggaattggatttatccgaactggacgatcccgattccgcctatctacaggaggctcgactcaagaggaaactgatccggctttttggtagactttgcgagctcaaggactgttcctccctgacaggtagagtgatcgagcagaggataccatatcgggggactcgttaccctgaggttaataggaggatcgagcggttgatcaataaaccagggcccgacaccttcccggactacggggacgttctgagagctgtggagaaggcagcagctaggcattctttgggattgcccaggcaacaactgcagctgatggcccaggatgcattccgcgacgttgggattagactccaggagagacgacacctcgacctgatatataattttggatgccacttgactgatgattacagaccaggcgttgatccggccctcagtgaccccgtcctggcacgcaggctcagagaaaaccgaagtttggccatgagccgattggatgaagttatatctaagtacgcgatgctgcaggacaaatctgaggaaggagaacgaaaaaagcgccgcgcaagattacagggcacttcctcgcattccgcagatacccctgaagcctccctcgacagtggcgagggcccatcaggcatggcctcccaaggttgcccctcggcatcaagggctgaaacagacgatgaggatgatgaagagagtgacgaggaggaagaagaggaagaggaggaggaggaggaggaggctacagacagtgaggaagaagaagacctggagcagatgcaagaaggacaagaggatgacgaagaggaggatgaggaggaggaagcggctgctggtaaagacggcgacaaaagccccatgtcatcccttcagatctccaacgaaaagaacttggaacccgggaagcaaatcagtcgatccagcggtgaacagcagaataaggggaggatcgtctcccccagcctgttatcggaggaacccttggcgccaagcagcatcgacgccgagtcgaatggagagcagcccgaagagctgacgctggaagaggaatcaccagtctctcagctgtttgagttggagattgaagccctgcccttggacaccccttcatctgtggagacagatatatctagcagtagaaagcagagcgaggaacctttcaccacagtcctggagaacggcgcaggaatggtgagctccactagcttcaatggaggagtgagtccacacaactggggagattccggtcctccatgtaaaaagtcaagaaaggaaaagaagcagacagggtctggacccttgggcaattcttacgtggaaagacagcgaagcgttcacgaaaagaacggtaagaaaatttgtacccttccatcccccccatcacccctcgcctcactggctcctgtggctgactcatcaacacgggtcgattccccgagccatggtctcgtgacctctagtctgtgtataccctctccagcccgtctgtctcagacaccccacagccagccgcccagaccgggcacttgcaagacctctgttgctactcagtgcgatccagaggagatcattgtattatctgatagcgattag

SEQ ID NO: 114218 - DNA, 2223 bp, synthetic construct
  misc_feature 1..2223: note = Description of Artificial Sequence: Synthetic coding sequence
  source 1..2223: mol_type = other DNA
atggcaacagccaacagcataatagtgctcgacgatgacgatgaagacgaggccgctgcccaaccagggcccagtcaccccctgccaaatgccgcatcacctggcgccgaagccccttcttcaagcgaaccccatggtgcccgcggctcgtcaagcagtggaggaaaaaagtgttacaaactcgagaatgagaagctctttgaggagttccttgagttatgcaagatgcagaccgctgatcacccagaggttgttccttttctgtataatcggcagcagagggcccatagcctgttcctcgcttctgcagaattctgcaatatactgagtagagttctgtcaagagcccggtctcgcccagcgaagctctacgtctacataaatgagctttgcacagtgctaaaagcacactccgcaaagaagaaattaaaccttgcaccggccgctaccaccagcaacgagccgtccggcaataatcccccaacacacctgtctctcgacccaacaaatgctgaaaacaccgctagtcagtcacctaggacccggggctctcgcaggcagattcaacgcctggagcagctccttgcactctacgttgccgaaatcagacgcctgcaagaaaaagagcttgacctgagtgagctcgacgatcctgattctgcctacttgcaggaggctcggctaaagcgcaagctgatccgactgttcggccgtctctgcgaactgaaggactgttcctcattaaccggaagagtgattgagcagagaattccctatcgaggaactcgttatcctgaagtgaaccggaggatcgaaagactgatcaacaagcccggccccgataccttccctgattatggcgatgtgctacgggctgtggagaaagctgcagccagacacagccttggtttgccaagacagcagttgcagctgatggcacaggatgcctttcgcgatgtgggtatccgcctgcaagaaagacgccatctggatcttatttataattttggttgccaccttaccgatgattacaggcctggagtagatcctgcactcagcgaccctgtgctggctcgtcgcctgagagagaatcggagtcttgcaatgtctagactcgatgaggtgattagcaaatatgcaatgttacaggacaagagtgaggagggggagaggaagaaaagaagagcacgccttcagggcacaagctctcacagcgccgacacacccgaagccagcctggattcaggtgagggaccaagtggcatggcgagccagggctgcccaagcgcaagcagggcagaaacagatgatgaggacgacgaggagtctgacgaagaagaggaggaagaggaggaagaggaagaggaggaagccacagacagcgaggaggaggaagatctggagcagatgcaggagggtcaggaagacgatgaagaagaggatgaggaggaagaggcagccgcaggaaaggacggagacaagagcccaatgtcaagtttgcagatctcaaacgaaaaaaaccttgaacccggtaagcagattagcagatcatctggagagcaacagaacaaaggccgcatagtctcaccttcacttctctccgaggaaccccttgcgcctagttctatcgatgctgagtcgaacggcgagcaaccagaagagctgaccctggaggaagagtccccagtgagccagttgtttgaactggagatcgaagctcttccgctagatacaccctccagtgtggagactgatatcagctctagccggaagcaatcagaggagcccttcacgaccgtactcgagaatggcgcgggcatggtgagcagcacttcctttaacggtggcgtgtccccacacaactggggagattcaggaccaccttgtaaaaaaagcaggaaggagaagaagcagaccggatccggcccactcggcaattcttacgtggagcgccagagatccgtgcacgaaaaaaacggaaaaaagatatgcacattaccgagtcccccatcgccgcttgcatctttggctcctgttgccgactccagtactcgcgtggattctccttcacatgggctagtcaccagctccctctgcatcccttcgccggctaggctgtcccagacccctcactcacagccaccgaggccaggcacctgcaagacgagcgtggcaacccagtgcgatcccgaagagatcatagtcctgtccgacagcgactag

SEQ ID NO: 114219 - DNA, 393 bp, synthetic construct
  misc_feature 1..393: note = Description of Artificial Sequence: Synthetic coding sequence
  source 1..393: mol_type = other DNA
atggccactgccaactccataatagtacttgatgatgacgacgaagatgaagccgctgcccagcctggaccgtcacaccctcttcctaatgccgccagtcccggagccgaggcaccgagcagttcagaaccacacggcgcaagggggtcatcttcctctggggggaaaaaatgctataaacttgagaacgagaagctcttcgaggaattcttggaactctgcaagatgcaaaccgcagatcacccagaagttgttccctttctgtataacagacagcagcgcgcacactctctgttccttgccagcgccgagttctgtaacatactcagccgggtgctttctagagcgagatccaggccagcaaagctgtacgtttacatcaacgagctgtag

SEQ ID NO: 114220 - DNA, 537 bp, synthetic construct
  misc_feature 1..537: note = Description of Artificial Sequence: Synthetic coding sequence
  source 1..537: mol_type = other DNA
atggctaccgcaaactcaattatcgtgctggatgacgacgatgaggacgaggctgccgctcagccaggaccttcccaccctttacccaatgcggctagtcccggagcggaggccccttcaagtagtgaacctcacggcgcaaggggctcatcctcctcgggcggaaagaagtgttataagctcgaaaacgagaagctgttcgaggaatttctggagctgtgcaagatgcagaccgctgaccatccggaggtggtgcccttcctgtacaacagacagcagagagcccattctttgtttctagcaagcgcagaattttgcaacatactcagcagagttctgagtcgggcacggagtcgaccagctaagctgtacgtatacataaacgagttatgcactgttctgaaagctcacagtgcgaagaaaaaattgaacctggctcccgcagctactaccagtaacgaaccttccgggaacaacccgcccacccacttgagccttgaccccaccaacgccgagaatacggcatcacaatcgtag

SEQ ID NO: 114221 - DNA, 2223 bp, synthetic construct
  misc_feature 1..2223: note = Description of Artificial Sequence: Synthetic coding sequence
  source 1..2223: mol_type = other DNA
atggccactgcaaatagtatcatcgtactggatgatgatgacgaagatgaagccgccgcgcaaccaggaccctcacaccccctccctaacgcagccagcccaggagctgaggcaccatcctcgagcgagcctcatggggcccgcggctcttcctcgagtgggggcaaaaagtgctataagctggaaaacgagaagctgtttgaggaattcctcgagttgtgcaagatgcaaacggccgatcacccggaggtcgtgccatttctatacaatcgccaacagcgggcacatagcctgtttctggcgagtgccgagttttgtaatatcttgtcccgcgttctaagtcgggccaggtccagaccggccaaactgtatgtgtatataaatgagttgtgcacagtgctgaaggctcattccgccaagaagaaacttaacctggcacccgctgccaccactagcaacgaaccatcgggcaacaatcccccgacccacctgtcactggatcctactaacgccgagaacaccgccagtcagagtcccaggacacggggctccaggcgacaaattcagcgcctagagcagcttttggctctgtacgtcgctgagatcagacgacttcaggagaaagagcttgatctgtcagagttagacgaccctgattctgcgtacttacaggaagctaggctcaaaagaaaactcattcggctgttcggtaggctgtgtgaactaaaggactgttcatcgctgaccgggcgggtgatcgagcagagaattccttatcgaggcaccaggtatcccgaggttaatagacgaatcgaaaggctaattaacaagcccggccctgatacgttccccgactacggggacgtgttgcgtgctgtagaaaaagccgccgctcgtcactctctcggtctgccaaggcaacaactccaactgatggcacaggatgcattccgcgatgttgggatccgactgcaggagcggaggcacttagacttgatatacaattttgggtgccaccttactgacgactacaggccgggggtggacccggccctaagtgaccccgtcctggcccggaggctgcgggagaaccgctctctggcaatgagccgcctagatgaggtgatatctaaatacgcaatgctccaggataaaagcgaggaaggagagagaaaaaaacgccgggcacgcctgcagggcacttcaagccattccgcggacacgcccgaggcctccttagatagcggcgaggggcccagtggcatggctagccaggggtgccccagcgcctctcgcgccgaaactgacgacgaggacgatgaggagagcgacgaggaggaggaggaggaagaggaggaggaggaagaagaggctactgattctgaagaagaagaagacctggaacaaatgcaggaggggcaggaggacgatgaggaagaggatgaggaagaagaagccgctgcagggaaagacggcgacaagtctccaatgtcctcactgcaaatcagtaacgaaaagaatctggaaccaggaaagcagatttcacgttcatcaggggaacaacaaaataaaggcagaattgtgtcccctagtttacttagcgaggagcctttggcgcccagcagtatcgatgccgagtcaaacggggaacagcccgaggaactgacccttgaagaggaatcccctgtcagtcagctgtttgaactagaaatcgaagctctgcccctcgacacacctagctcagtagagacagacatatcaagctcccgaaagcagtctgaagaacctttcacaactgtcttggagaatggtgccgggatggtaagctccactagcttcaacggcggggtgagccctcataactggggagattcaggacccccatgcaaaaagagtcggaaagaaaagaaacaaacaggtagtgggccgttgggtaacagttacgtggagaggcagcgctcagtgcatgagaaaaacggaaaaaagatttgtaccctgcctagccctccctccccgctggccagtctggctcctgtggccgattcctctacaagggttgattcgccctcacatggccttgtcacaagttcactgtgcataccctctccagctcgcctgtcccagacaccgcattcacaaccaccccggccagggacatgtaagaccagcgtcgctactcagtgtgatcctgaggagatcatcgtcttgagtgatagcgattag

SEQ ID NO: 114222 - DNA, 147 bp, synthetic construct
  misc_feature 1..147: note = Description of Artificial Sequence: Synthetic coding sequence
  source 1..147: mol_type = other DNA
atggcaacagcgaactccattatcgtgctcgacgacgacgatgaggacgaggccgccgctcagcctggtcccagccaccctctgccaaatgccgctagtcctggggccgaggctcctagctctagcgagccccacggcgcaagatag

SEQ ID NO: 114223 - DNA, 393 bp, synthetic construct
  misc_feature 1..393: note = Description of Artificial Sequence: Synthetic coding sequence
  source 1..393: mol_type = other DNA
atggctaccgccaactcaataattgtgcttgatgatgacgacgaagatgaagcagccgcacaaccgggccccagtcaccccctgccgaatgccgccagccccggggcagaggctccgtccagcagcgagccacacggtgcccgcggcagcagcagctcgggggggaaaaagtgctataaactcgagaatgagaagttgtttgaagaatttctggagctctgtaagatgcagactgcggaccatcctgaagttgttcctttcctctacaatcgccagcagcgggctcatagtctttttcttgcatccgctgagttctgtaatattctctccagggtcctcagtagagcacggagccgtcctgccaaactctatgtttatatcaacgaattatag

SEQ ID NO: 114224 - DNA, 537 bp, synthetic construct
  misc_feature 1..537: note = Description of Artificial Sequence: Synthetic coding sequence
  source 1..537: mol_type = other DNA
atggccactgctaactctatcattgtgttagacgatgatgatgaagatgaagccgccgcccaaccagggccaagtcatcctttgccaaacgccgcctctccgggggctgaggccccctcctccagcgagcctcacggcgccaggggcagttcttcttccggcgggaaaaagtgttacaaactggaaaacgagaaattattcgaagaattcctcgagttgtgcaaaatgcagacggccgaccaccccgaggtggtaccctttctgtataaccgccagcagcgagcgcacagcctgtttctcgccagcgccgagttctgcaacatcctatccagggttctctcaagggcccgctcaagaccggctaagctgtacgtttatatcaacgagctgtgtactgtgttgaaggcacacagcgccaagaagaagttgaatctggctcctgcggccacaaccagcaatgagccgtcaggcaacaatcctcccacacacctgagtctggatcccacgaacgccgagaatactgcctcacagagctag

SEQ ID NO: 114225 - DNA, 2223 bp, synthetic construct
  misc_feature 1..2223: note = Description of Artificial Sequence: Synthetic coding sequence
  source 1..2223: mol_type = other DNA
atggcaacagcaaacagtattatcgttctagacgacgacgatgaggacgaagccgccgcccagcctggtcctagccatccacttcccaacgccgcatcgccaggagccgaagccccctcaagttctgagccacacggagcccgaggctcgagttccagtggcggaaagaaatgctacaagttagagaacgaaaaactgttcgaggaattcctggaactctgcaaaatgcaaacagcggatcacccggaggttgtcccctttctctacaaccgccagcagcgggctcactccctcttcttggcctctgcagagttttgtaatatcttgagcagggtcctctctcgggcccgcagtcgtccggcaaaactctatgtgtacattaatgagctttgtacagttcttaaagcacatagtgctaagaagaagttaaatctcgctccagctgcaactaccagcaacgagcctagcgggaacaaccccccaactcatctttctctggaccctacaaacgcagaaaacaccgctagccagagccctcgcacacgcggctcacggcgccagattcagcgcctggaacagctcctggcactctatgtcgccgaaattaggcgactgcaagagaaggagctggatttgagtgagctcgatgacccagactccgcttacttgcaagaagcccgattaaaacgcaagctgatacggctcttcggccgcctttgtgagctgaaggattgttcgagtttaacaggcagggtaatagaacagcgaatcccgtacagggggacacgttatccagaagtcaatagaaggatcgaacgattgatcaacaagcctggccccgatacgtttcccgattacggtgatgtgctgagggccgtcgagaaggcagctgcacgtcattcattggggctcccccggcaacagctgcagctgatggcccaggatgccttccgtgacgtggggatcaggctgcaagaaagacgtcacctggacctaatttacaactttggatgtcacctgaccgacgattacagacctggagttgaccctgctctttcagatcccgtgctggccagaagactgcgggagaacaggagcctagccatgtcccgactggatgaggttatctctaaatatgcaatgcttcaggacaaatccgaagagggagagcgcaaaaaacgtcgcgcccggctccagggcacttcaagtcattcagccgatacgcctgaagccagcctcgactctggtgaagggccttcaggcatggcgagtcagggatgcccctcagccagccgggccgagactgatgatgaagatgatgaggagtccgacgaagaggaggaagaagaagaagaggaagaggaagaagaggcaacagactcagaagaagaggaggatctcgagcagatgcaggagggccaggaagacgacgaggaggaggacgaggaagaagaagccgcggccgggaaggacggcgataagtccccgatgagttcattgcagatcagcaacgaaaaaaacctggagcctggcaagcagatttcccgatccagcggggaacagcaaaacaaaggccgaatcgtgtccccgtctctgctgtccgaggaacctttggctccatcaagtatcgatgcagaatcaaacggagaacagcccgaggagctcacacttgaggaggaaagcccagtgtcccaactttttgagctagagattgaagccctgcccctggacacccctagctctgtggaaacagacatctcaagttcacgtaagcagtcggaggagcctttcaccactgtgttagaaaatggggccggcatggtttccagtaccagctttaacggcggcgtgtcacctcacaattggggcgatagcggtccgccgtgcaaaaaaagccgcaaggaaaaaaagcagaccggatctggtcccctgggtaactcatacgtggaaaggcagagatcggtccacgagaaaaatgggaaaaaaatctgtacattgccaagtccaccgtccccactggcgagcctggcgcctgtggctgacagctctaccagggtcgattccccgagccacggccttgtgacttcaagtttatgcatcccttcgccggcacgtttaagtcagacgccgcactctcaacctcctcgaccagggacatgtaaaaccagcgtggctacccagtgcgacccagaggagattatcgtgttgtctgacagtgattag

SEQ ID NO: 114226 - DNA, 147 bp, synthetic construct
  misc_feature 1..147: note = Description of Artificial Sequence: Synthetic coding sequence
  source 1..147: mol_type = other DNA
atggctacagccaatagcatcattgtgttggatgacgatgatgaagacgaagcagccgcacagccaggccctagccacccactcccgaacgccgctagtccaggtgccgaggctcccagctcctccgagccacatggtgcccggtag

SEQ ID NO: 114227 - DNA, 1998 bp, synthetic construct
  misc_feature 1..1998: note = Description of Artificial Sequence: Synthetic coding sequence
  source 1..1998: mol_type = other DNA
atgcagaccgcggaccacccggaagtggtcccattcctatataatagacaacagagggcccattccttgtttcttgccagtgcagaattttgtaatattctgtctagagtgctctcaagagcgcggagccgcccggccaagctgtatgtgtacatcaacgagctgtgtactgtactgaaggcgcactccgccaaaaaaaagttgaacctcgccccagcggctaccacttctaatgaacccagcgggaataatcctcccacccacctgtctctggatcccaccaatgccgaaaataccgccagccagtctccgagaacacgaggctcaagaaggcagatccagagattggagcagctcctggccttgtacgtggccgaaatccgccgcttacaagaaaaggagctggatctatctgaactggacgacccagacagtgcctatcttcaggaagcgagattgaagcgaaagcttatacgactgttcggcagactgtgcgagcttaaggactgtagtagcttgactgggcgggtgatagagcagaggatcccttaccggggtacaaggtacccagaggttaatcggaggatcgagcgactcattaacaagcctggtccggatacgttcccagactacggagacgttcttagagccgtagagaaagctgctgctcgccattccttagggttgccacgccagcaattgcaactgatggctcaggacgcatttcgagatgtcggaattaggctgcaggagcggaggcacctcgacctgatttataattttggatgccaccttacagacgattacagacctggagtcgacccagccctctccgatcctgtcttggctcgcagactccgcgagaatcggtctctggccatgtctcgcctcgacgaggtgatttcgaaatatgctatgttacaagacaagtccgaggagggggaacggaaaaaacgtagggccaggttacagggaacttcatcacattcagctgatactccagaagcaagtctggatagcggcgagggcccttccgggatggcatcacagggctgtccctcagctagcagagccgaaacagatgatgaagacgacgaagagtccgatgaggaggaagaggaggaagaagaggaagaggaagaagaagctaccgacagcgaggaggaggaagacctggagcagatgcaagaaggccaggaggacgacgaagaagaggatgaggaagaggaagcggccgccggtaaggacggtgataagtccccaatgagctctcttcagatctctaatgaaaagaatctcgagcccggtaaacaaatcagccgttcatcgggcgagcagcagaacaagggcagaatcgtgagcccgagccttttgtccgaagagccacttgccccatcgtcgatcgatgctgagtctaatggtgaacaacctgaggagttaacacttgaggaggagtcccctgtaagtcagctatttgagctggaaatcgaggcgctccccctcgacacacctagttccgtcgaaaccgatatctcctcttctcgaaagcagagtgaagagcctttcactactgttctggaaaacggagctggaatggtatcctctacatcgttcaacggcggggtgagcccacataattggggtgattcgggccccccctgcaagaaatctagaaaggagaagaaacagacggggtcaggacctctgggcaatagctacgtagagaggcagcggtcagtacacgagaaaaatggtaaaaaaatttgcacactgccatccccaccaagtcccttggcttcacttgcacccgtcgccgattcttccaccagggttgactcaccctcacacggccttgtgacttctagtctgtgtattccatcgccagcccgtctgagccagaccccacactcccagcctcccaggccgggcacctgcaaaacatcagtagccacgcagtgtgatcccgaggagattatagttctctctgacagcgattag

SEQ ID NO: 114228 - DNA, 1998 bp, synthetic construct
  misc_feature 1..1998: note = Description of Artificial Sequence: Synthetic coding sequence
  source 1..1998: mol_type = other DNA
atgcaaacagcagaccaccccgaagtggtcccgttcctttataacagacagcagcgggcgcacagcctgttcctcgcctcagctgagttctgcaacattttgtcacgagtgttaagccgggcccgctcaaggcctgccaagctctacgtgtacatcaatgagttatgcacagttttgaaagcacactccgcaaagaagaagctgaacttggctccagccgcgacaacaagcaacgagccgtcaggaaacaatccacctactcatttgtcgttggaccctacaaatgccgaaaacacagcctcccagagccctcggacgagaggttcgcggcgccaaattcagaggctggagcaattactagccctgtacgtcgctgaaatccgtaggttacaggaaaaggaactggatctgtctgagctggatgatcccgacagcgcttatctgcaggaagcaaggctgaagcgcaaattgataaggctgtttggaagactgtgcgagttaaaggactgctcttccctgactgggagggtcattgagcaacggattccctaccgggggacccgttacccggaggttaatcgacgcatcgaaaggcttattaacaagccaggacccgacacgttccccgactacggcgatgttctaagagctgtggagaaggccgctgcgcgacattcccttggtctgccaagacagcagttacagttaatggcgcaggatgcattcagggacgtgggtatccgcctccaggaaaggaggcacctggatctgatctacaattttggatgccacttgacagatgattaccgcccgggtgttgacccggcccttagcgaccccgtactggccaggcgcctgcgtgaaaatagaagtcttgccatgagcagattagacgaagtgatcagtaaatacgccatgctgcaagacaagagcgaggagggagaacgcaaaaagcggagggccagactacagggcacttcctctcactcagctgacactcctgaagccagccttgattcaggggaaggtccctccggcatggcctcacaaggctgccctagcgcctctagggctgaaacggacgacgaggatgacgaagagtcagacgaagaggaggaagaggaggaggaagaagaagaggaggaggctacagactccgaggaggaagaagacctggaacagatgcaggagggacaagaagacgacgaagaagaagacgaggaggaggaggcggctgcgggaaaagacggggataagagcccgatgagttcgctccaaattagcaatgagaaaaacttggagcccgggaaacagatttctcgaagttccggtgagcaacagaacaagggccgcatcgttagcccatcccttctctctgaggagcccctcgcccccagtagcattgatgcagagtccaatggggagcaaccagaggaactgaccttggaggaggagtctcctgtatcacagcttttcgagcttgaaatcgaggctttgccgcttgacacaccctcatccgtagagaccgatatctccagctcacggaaacagagtgaggagccattcactactgttctggaaaacggggccggtatggtctcatccacaagcttcaatggtggggtctccccgcacaattggggtgactccggacccccttgtaaaaagtcacggaaagaaaagaagcagacagggtccgggcccctcggcaactcttacgttgagcgacaaagatcagtacacgaaaagaacggcaagaagatttgcactctcccgagtcctccatcccctttggccagcctggcgccggtcgctgatagttctacaagagtggattctccatctcacggactcgtcacaagcagtctgtgtatccccagccctgcccggttgtcacaaaccccgcacagtcagccccccaggccggggacatgcaagacatccgttgccactcagtgtgatcctgaagaaatcatagtgttgagcgatagtgattag

SEQ ID NO: 114229 - DNA, 1998 bp, synthetic construct
  misc_feature 1..1998: note = Description of Artificial Sequence: Synthetic coding sequence
  source 1..1998: mol_type = other DNA
atgcagaccgctgatcatccagaggttgtcccattcttgtacaatcgccaacaacgcgctcattcgctgtttctagctagcgcagagttctgcaacatcctcagccgtgtcctttccagagcacggtctcgcccagctaagctgtatgtgtatatcaacgagctgtgtacagtgcttaaagcacactctgccaaaaagaaacttaatctggcgccagccgcaacaaccagtaacgaacctagcgggaacaacccgcccacccatctctcattagacccaactaacgctgagaataccgcttcacaatcaccccgaacgagggggagccgccggcaaatccaaagacttgagcagttgctggccttgtacgtcgcggagatcagaaggctacaggagaaagagcttgacctttcagagttggacgatcctgacagcgcctacctgcaggaggcacgtctcaaacgcaagctgatccggctttttggcagattgtgtgagctgaaggattgcagttctctgaccgggagagttattgaacagaggatcccttacaggggcaccagatatccagaggtgaaccgccgcatagagcgcctaatcaacaagccagggcctgatacatttcccgattacggcgacgtactgagagcagtggagaaagccgctgcccgccacagcctcgggctgcctcgccagcagttgcagctgatggcccaggatgccttccgggacgtgggcatcaggttacaggaacgacgccaccttgatctgatttataatttcggttgtcacctgacggatgattatcgacctggggttgaccctgctctgagtgaccccgtactggcgagaagactgagggagaatcgatccctcgctatgtctaggctggatgaagtgatttccaaatatgccatgttacaagataagagcgaagagggggagcggaagaagaggcgggcaaggcttcagggcactagtagccactccgccgacactcctgaggcctcactcgacagtggggagggaccgtctggcatggcctcccaaggatgcccgtcggctagcagagctgagaccgatgacgaggacgatgaggagagtgatgaagaagaggaagaagaagaggaagaggaagaggaggaagctacagactccgaagaggaggaggacctcgagcaaatgcaggagggacaggaggatgatgaggaagaagacgaggaggaggaagccgcggccggaaaggatggtgataagagtcccatgtcgtcgctccagatcagcaatgagaagaatcttgagcccggaaaacagatcagtcgctctagcggagagcaacagaataagggccggattgttagcccttcactcctctccgaagaacctttggccccctctagcatcgatgccgagagcaatggtgaacagccagaagagctgacactcgaggaggagtcacctgtttctcagctcttcgagctggagatcgaagctctgccactggataccccctcctctgtcgagaccgacatctcaagttctcgaaagcagtccgaggaacccttcaccaccgtgttagagaatggcgccgggatggtgtcgtcaacctccttcaacggaggcgtgtcaccacataattggggcgactcgggcccgccttgcaaaaagtccagaaaagaaaagaaacagaccggaagcggccccctcgggaatagctatgttgagcgtcaacgatctgtgcacgaaaaaaatggaaagaaaatctgtacgctgcctagccctccaagccccctcgcatctttggcaccagtggctgattcctccactcgtgtggactcaccaagtcatgggctggtcacatcttcattgtgtatcccgtctcctgcccgcctgtcccaaacacctcattcccagccacctaggccaggcacctgtaagacatcggtggccacgcaatgtgacccagaggaaatcatcgtgctcagcgattcagactag

SEQ ID NO: 114230 - DNA, 1998 bp, synthetic construct
  misc_feature 1..1998: note = Description of Artificial Sequence: Synthetic coding sequence
  source 1..1998: mol_type = other DNA
atgcaaaccgcggaccatccagaagttgtcccctttctttacaatcggcagcagagggcccactctctgtttctggcgagcgcagaattctgcaatattcttagtcgcgtactgtccagagccagatctaggccagctaagctctatgtgtacatcaacgagctctgcacagtgctcaaagctcattcagcgaaaaaaaaattaaacctagctcctgctgcaactacgtccaatgagccgtcggggaataacccgcctacacacttgtccctcgacccaaccaatgcagaaaacactgccagccagagccctcggactcgagggtcacgaagacaaatacagcggctggaacaattgttagctttatacgtcgcagaaattcggaggctgcaggagaaggaacttgatctttctgagcttgacgacccagactctgcttacctgcaggaagctcgccttaagcgaaagctgattagattgttcgggcgcctctgtgagctgaaagactgctccagcctcaccgggagagttatcgaacagaggatcccgtataggggtacaaggtaccccgaggtgaatcgacgcattgaaaggctcattaacaaaccaggtcccgatacgtttcccgattatggcgatgtgctaagagccgtggagaaggctgcagcacggcacagcctggggcttccaaggcaacagttgcagctgatggctcaggacgcttttcgcgacgtgggaatcagactgcaggagagacggcacctggacttaatctataatttcggctgccatttaaccgatgattaccgcccgggggttgaccccgcccttagtgaccctgttctcgccaggaggttgcgggaaaaccgttccctggccatgtctcgtctggatgaggtcatttcaaagtatgccatgctgcaagataagagtgaagaaggagaaaggaaaaagcgcagggcgagattacaaggcacgagcagtcattcagccgatacaccagaggcttcgctcgattcaggggaaggtccctctggaatggcatcgcaaggttgtccctcagcttctcgagctgagactgatgatgaggatgacgaggagagcgatgaggaagaggaggaggaggaggaggaagaagaggaggaggcaactgactcagaagaagaagaggacctggagcagatgcaggaaggccaagaggatgacgaagaagaggacgaggaggaagaggctgctgccggaaaagacggcgataagagccctatgagctcactgcaaatatctaacgaaaaaaatctggagcccggcaagcagatcagcaggtcttccggtgagcagcagaacaaaggcaggattgtctctcctagcctgctgtccgaggagcccctagccccttcctccatcgacgccgagagtaatggagagcagccagaagagctgaccctggaggaggaaagtccggtcagccagctgttcgagcttgagattgaagccttgcctctggataccccctccagtgtcgagacggatatttcatccagcaggaagcaatccgaagaaccatttaccacggtgctggaaaatggagctggtatggtgtcctctacatctttcaatggcggggtcagccctcataactggggtgacagcgggcctccatgcaagaaatcacggaaggaaaagaagcaaacgggtagtggccccttaggcaatagctatgtcgagagacaaaggagcgtccacgaaaagaatgggaagaagatctgtaccttgccatctccaccaagcccgctcgcttccctggcccccgtggccgatagtagtacccgcgtggatagcccaagccatggtcttgttacatctagtctctgcatcccttctcccgctaggttgtctcagacaccgcattcccaacccccccggcctggcacctgcaaaacaagcgtagctacccaatgcgaccctgaggaaatcattgtgctttcagacagtgattag

SEQ ID NO: 114231 - DNA, 1080 bp, synthetic construct
  misc_feature 1..1080: note = Description of Artificial Sequence: Synthetic coding sequence
  source 1..1080: mol_type = other DNA
atgaaagccaccataatcctgctgttgttggcccaggtgagctgggcaggcccgttccagcagcgcggacttttcgacttcatgctcgaagacgaagcctcaggcatcgggcctgaagtgccagacgatcgggatttcgagccaagtttaggacccgtatgtccattccggtgtcagtgccacctgagagtggtgcagtgctccgatctgggacttgataaggtaccaaaagatctccccccagacacgacactcctcgacctgcaaaataataaaattaccgagattaaagacggagactttaaaaatttaaaaaacttacacgctttaatcctggtgaataacaagatctctaaagtgagtccaggcgcattcacacctctggttaaacttgaaagactgtatctctccaagaaccaacttaaggaattacccgagaaaatgcctaagacactgcaggagctgagggcgcacgaaaacgagattacaaaggtgaggaaggttacattcaatggactgaatcaaatgattgtgatcgagcttggtaccaaccccctaaagagttcaggcattgaaaacggcgccttccaaggcatgaagaagctgtcgtatataagaatcgcagataccaatattacttccatcccacagggactccccccatcactgaccgagctccatctagatggtaacaaaatcagccgcgttgatgcagcatctctgaaagggctcaataatctcgcaaaattaggcctgtcctttaattcgatcagcgcagtggataacggcagcctagctaatactcctcacctgcgtgagctccaccttgacaataataagctaacccgggttccaggcggccttgccgaacacaagtatattcaggtggtgtacctgcataacaataacatcagcgtggtggggtcgagcgacttttgcccccctggccacaataccaaaaaggctagttactctggagtgtctctgttttctaaccctgttcagtactgggagattcagccatctacctttagatgcgtctatgtgcgctctgcaatccaattgggcaattataagtag

SEQ ID NO: 114232 - DNA, 7092 bp, synthetic construct
  misc_feature 1..7092: note = Description of Artificial Sequence: Synthetic coding sequence
  source 1..7092: mol_type = other DNA
atgccggttctgggggtcgcatccaaattgcggcagcccgctgtggggtctaagccggtacacacagccctacctatccccaatcttggaactaccgggtcgcagcactgctcatcccggcccctagaactcaccgaaaccgaatccagcatgctctcctgccagctggctctgaagagtacttgcgagtttggcgagaagaaaccactgcaaggtaaggcaaaagagaaggaagactctaagatctacaccgactgggctaaccactatctggctaagtccggccacaagcgacttatcaaagaccttcagcaggatatcgccgatggagttctgctcgcggagattatccaaatcatcgctaacgaaaaggtggaagacataaacggctgtcccagatcccagagccaaatgattgaaaatgtcgacgtatgcctgagcttcctggctgcacgcggagtcaacgttcagggactatcagccgaggagatcagaaacggcaaccttaaggccattctcggcttattctttagcctttctcggtacaagcagcaacagcatcatcaacagcagtactaccaaagcctcgttgaacttcagcagcgcgtgacccacgctagccctccttcagaagcctctcaagcgaagacccagcaagacatgcagtctagcctggcagcaagatatgccactcagagtaaccattctggtatcgcaacttcccagaagaaacccactagactccctggtcctagcagggtgcccgccgccggaagtagctccaaggtgcaaggcgccagtaacttgaacagaaggagtcagagctttaactctattgacaagaataagcctcctaattacgctaacggaaacgaaaaggacagctcaaagggacctcagagctctagcggagtcaatggtaacgttcaaccacccagcaccgcaggtcagccccccgcctccgccattccatcccccagcgcctctaagccctggcgctccaagtcaatgaacgtaaagcattcagctactagcactatgttaacggtgaaacaaagtagtacagccacttcccccactccctctagcgatagactgaagccgccagtttcagagggggttaagactgctcccagcgggcagaaatccatgctcgagaagtttaagctggttaatgcccgcaccgcgttgaggccccctcagccccctagcagcggacccagcgatggaggtaaagacgatgacgctttctccgagtcaggggagatggagggcttcaattccgggttgaattcaggcggatccacgaacagtagcccgaaggtcagcccaaaactcgccccaccaaaagccgggtctaaaaatctgtcaaacaaaaagtctctattacaacctaaagaaaaggaagagaaaaaccgcgacaagaataaggtttgtaccgagaaacctgttaaagaggaaaaggatcaggtgaccgaaatggcaccgaagaagacctccaagatcgcttctctaattccaaaaggcagtaaaactaccgctgcgaaaaaagagtcgcttatcccttccagtagcggtattcccaagccagggtcaaaagtgccaacagtaaagcagaccatctcacccggctccaccgccagcaaggagtctgaaaagttccgtacgactaaggggtcgcccagccaaagcctgtcaaaacctatcaccatggagaaggccagtgcatctagttgccctgccccgctcgaggggcgggaagcgggacaggcaagcccaagtgggagctgtacgatgaccgtcgcccagtccagcggccaaagtacagggaacggggcagtacaactcccacaacaacagcagcatagccacccaaacaccgcaacagtagccccctttatctacagagctcactctgaaaacgaaggcacggcactgccgtcggcagactcgtgcacttccccgaccaagatggatttgagttattccaagacggccaaacagtgcctcgaagagataagtggggaagaccctgagaccaggcgaatgcgaacagtgaaaaacattgcagacttaagacagaatttggaggagacaatgtcttccctccgaggcacacagatcagccacagcacactcgagaccactttcgatagcaccgtgaccacagaggtgaatgggagaactatccccaacttgacgtctaggccaactccaatgacgtggcgacttggacaggcttgccccaggctgcaggccggggacgctccgagtcttggcgcgggctatcctagaagcggcacaagcagattcattcacactgatccttcgaggttcatgtacaccaccccgttacggagggcagccgtatccagactggggaacatgtcacaaattgatatgtccgaaaaagcctcttcagacctcgacatgtctagtgaggtggatgtgggtggatacatgagcgatggcgacatcctgggaaagtccctgcgaacagacgacatcaattcaggttatatgaccgacgggggcctgaacctgtacactcggtctctgaacagaatcccggacacagcaacctcacgggacattatccagcggggtgtgcatgacgtgaccgtggacgctgacagttgggacgattcttcctccgtctcctccggactgtcggacaccctcgacaatattagtaccgatgatttgaacaccacgtcatccgtctcaagctatagcaatattaccgttcctagccgcaaaaacacacagcttcggacggatagtgagaaaaggagcacgactgatgagacctgggacagtcctgaagaactaaagaagccggaggaggatttcgacagccacggggacgcgggtggtaagtggaagacggtgtccagcggactcccagaagaccctgagaaggccggtcagaaggcaagtttgtccgtctcccagacaggaagctggaggagggggatgagtgcccagggcggcgcacccagcaggcaaaaggcaggaactagcgctctcaagacacctggaaaaactgacgacgctaaagcaagcgagaaaggcaaggccccactcaaaggcagctcacttcagagatcgccgtcagatgccggaaagtccagcggggatgaggggaagaagccaccctccggaataggccgcagcaccgcaaccagctcctttggtttcaagaagccttccggagttggctccagtgccatgatcacaagttcgggggccacaattaccagtggctcagccacactgggtaaaattcccaaaagcgctgctatcggcggaaagagcaacgcaggacggaagacctccctagatggtagtcagaaccaagacgacgttgtccttcatgtgagctctaaaactactctccagtaccggagtctccctagaccctccaagtccagtacatccggcatccccggcagagggggtcaccgcagctccacttcttcaatcgatagcaatgtgagcagtaagtctgcaggagcaaccacaagtaagttgagagagccaactaaaattgggagcgggaggtccagtccggtaactgtcaaccagactgacaaggagaaggagaaggtggcggttagtgattcagaatccgtcagtctttccggatcccccaaaagctcacccaccagcgcctcagcttgtggagcacagggactgcgccaacctggcagcaagtacccggacattgcctctcctactttccgacgactgtttggtgccaaagctggcggaaagtccgcaagcgcccctaacacggagggcgtgaaatcctcatctgtgatgcccagtccttcaacgacactcgcgcgccaggggagcctggagtccccatcctccgggacagggtctatggggagcgcaggaggtctctcggggtcctcatcacccctctttaataaacctagcgacttgacaactgatgtgattagcctctcacattctttggcaagctctcccgcctcggtgcattcgtttacctccgggggcctggtgtgggctgccaatatgtcctcatcatccgccggcagtaaggatacgccctcataccagagtatgacctcactgcacacatctagcgagtctatcgatctgcccttgagtcaccatgggtcactatctggcctgactactggtactcacgaggtgcaatctttgctgatgagaaccggctcggtgaggtccacactgagtgagagcatgcaactggacaggaacactctgcccaagaagggtctgcgctatactccatcctctagacaggcaaaccaggaagaaggaaaggagtggctcagaagccacagtaccgggggcttgcaggacacaggcaaccaatccccgctggtgtcaccctctgccatgtcttcctcagccgcgggtaagtatcacttctcaaatctggttagccccacgaatttatcacagttcaatctccccggtccctctatgatgcggagcaattccatcccggctcaggactcctcttttgatttgtatgatgattctcagctgtgtgggtccgcaacttccctcgaggaacgcccaagagccattagccacagcggatcatttagggatagcatggaggaggtgcacgggtccagtttaagtcttgtgagttctacaagctccttgtattccaccgcagaggcaggcggttcactggagcagattcacaagttaagaagggaactggtggctagtcaggaaaaggtagccactctaaccagccagctaagtgctaacgcgcatctcgttgccgctttcgagaagtcactaggaaatatgaccgggcgccttcagagcctgaccatgacagcggagcagaaggagtcagagctgattgagctccgcgagaccatcgagatgctgaaggcccagaattcagctgctcaagcggctatccagggtgcgcttaacggacctgaccaccctcccaaggatcttcgtatacgccgccaacacagctcagagtccgtttcatccatcaacagcgccacttctcattcatctataggttctgggaacgatgccgactctaagaaaaaaaagaaaaagaactgggtaaatagccggggcagtgaactgaggtcttccttcaagcaagcctttggcaaaaagaagtctacaaagccacccagttcccatagcgatatcgaagagcttacagactcgtccctgccggcctcaccaaagctgccgcacaacgcgggagattgtggctctgcttcgatgaaacccagccagagtgcctccgccatatgtgagtgtaccgaagctgaggctgagatcatcttgcaattgaagtccgagcttagggagaaagaactgaaactaacagacattcgattagaggcactcagctccgctcatcacctggatcagatccgcgaggccatgaatcgcatgcagaacgagatcgagatcttaaaagctgagaatgatagactgaaggctgagacgggtaacacggcgaagcccacgcgcccaccatctgagtcatcctctagtacctcatccagtagttccaggcaatccctgggtctgagcttaaacaatttgaatattacagaggccgtgtcaagcgatatacttttagatgatgctggggatgcaacaggacacaaggacggaagatcggtgaagatcatagttagcatttccaagggatacgggagggccaaggaccagaaaagtcaagcttatctaatcggatccattggagtttccgggaaaactaaatgggatgtgctggatggcgtgattcggaggctttttaaggaatatgtcttccgcatagatacgtccacctccctggggctctcgtctgattgtattgcttcctattgcataggcgacttgatccgcagccataatcttgaggtcccggagttgctgccatgcggttatttggttggtgataacaatatcatcacagtgaaccttaaaggtgtggaggagaatagtctggactcatttgtcttcgacaccttgattcccaaacccataacgcagagatacttcaatttgttaatggagcaccatagaattattctgagcggcccgagtgggacaggaaagacatacctcgccaacaagctggccgagtatgtgatcactaagtctggtcggaaaaagacagaggatgccatcgccaccttcaacgtcgatcacaagtcctcgaaagagctccagcagtacctagctaacttagccgagcaatgcagcgccgacaacaatggagttgagctgcccgtcgtgattatactagacaacctacaccatgttgggtctcttagcgatatttttaacggatttttaaattgtaaatacaacaaatgcccttatatcattggaactatgaatcagggtgtttcttcctcacccaacctggagctgcaccacaatttcaggtgggtactgtgcgccaatcatacagagccagttaaaggtttcctcgggaggtacctgaggcgcaagctgatagaaattgaaatagaacgaaacatacgcaataacgatctcgtgaaaattattgattggatccctaagacttggcaccacctgaattcctttcttgaaactcactcctcgagcgatgtcacgatcggaccccgtctctttttgccttgccctatggatgtcgagggctctcgtgtttggttcatggatctctggaattactcactggtcccatacattctggaagcagtgcgcgaaggcttacaaatgtatgggaagaggactccctgggaagatcccagcaagtgggtgctggatacatatccttggagcagcgcaaccctgcctcaggagagccctgcactgttacagctgcgacctgaagatgtcggctatgagtcctgcacatccacaaaagaagctactacctcaaagcacatcccccagaccgacactgaaggggaccctttgatgaacatgctgatgaagttgcaggaggctgccaattattcttcaacccaatcttgtgactcggaaagcaccagtcaccacgaagatattctggacagcagcctggagagtaccctgtag

SEQ ID NO: 114233 - DNA, 519 bp, synthetic construct
  misc_feature 1..519: note = Description of Artificial Sequence: Synthetic coding sequence
  source 1..519: mol_type = other DNA
atgaaggctaccattattctcctactcctcgcccaagtcagttgggcaggcccgtttcagcaacggggactctttgatttcatgctggaggacgaagcatctggcatcggccctgaagtgcccgacgaccgtgacttcgaaccttctcttggccccgtctgtccctttaggtgtcagtgtcaccttagagtggtgcagtgcagtgacctcggcctcgacaaagtgccaaaagatctgccgccagacactactcttctggatctgcaaaataataagataacggaaatcaaagatggcgacttcaaaaatctaaagaaccttcacgtggtttatctccataacaataatatctcagtggtcgggagcagtgacttctgcccacccggccataatactaagaaggcctcctactcaggggtgtccctctttagcaaccctgttcagtattgggagattcaaccctcaacgttccggtgcgtctacgttcgcagtgctatccaactggggaattacaagtag

SEQ ID NO: 114234 - DNA, 1080 bp, synthetic construct
  misc_feature 1..1080: note = Description of Artificial Sequence: Synthetic coding sequence
  source 1..1080: mol_type = other DNA
atgaaagccaccatcatcctccttctgctagcccaggtatcatgggcaggaccatttcagcagcgtgggctgtttgacttcatgctggaggacgaggcaagtggaattggacctgaggtgccggacgaccgggacttcgaacccagcttgggtcctgtgtgcccatttcggtgccagtgtcacctgagagtagttcagtgttccgacctcgggctcgacaaagttccgaaggacctgcctccagataccaccttgctggacctgcagaacaacaagatcaccgagatcaaggacggagattttaagaatcttaaaaacctgcatgccctgattcttgtaaataacaaaatatctaaggtgagccccggagcgttcaccccgttggtgaagcttgagagattgtacttgagcaagaaccaattgaaagagctgcctgaaaagatgcccaaaactcttcaggaactcagagcccatgagaacgaaatcacgaaagtaaggaaggttactttcaatggcctcaatcagatgatcgtcatagagttagggacaaatccccttaagtcttcaggcatagaaaatggtgcatttcagggaatgaagaagttgagctacatcagaatcgcggacacaaatattacgtcaatcccacagggactgcccccctctctcacagagctgcatctggacggtaacaagattagtagggtcgatgcagcctccctgaaaggattgaacaacctcgccaagcttgggctcagttttaacagcatttcagccgtggacaatggctccctggcaaataccccccatctgagagagctgcatctggacaacaacaaactaactcgcgtacctgggggcctggctgaacataagtacatccaggtggtgtatctgcacaacaacaatattagcgtcgtgggttcctctgatttttgtccaccagggcacaataccaagaaggcttcctattccggcgtttcactgttttccaaccctgtgcagtattgggagatccagccgtcaaccttcaggtgcgtgtatgtcagatcagcaattcagctgggcaattacaagtag

SEQ ID NO: 114235 - DNA, 753 bp, synthetic construct
  misc_feature 1..753: note = Description of Artificial Sequence: Synthetic coding sequence
  source 1..753: mol_type = other DNA
atgaaggcaactattattttgctgctcctggctcaagtctcatgggctggcccatttcagcaacgagggctctttgacttcatgctggaggacgaggcaagcggaatcggtccggaagtgccagatgacagagatttcgagcccagtttaggcccagtttgcccatttcgctgtcagtgtcacctgcgagtggtgcagtgtagcgatctcgaattgggaaccaaccccctgaagagttccggaatcgagaacggtgcatttcaggggatgaagaagctgtcgtatataaggatagctgatacaaatattacctcaatcccgcaaggtcttcctccatccctgacggaactgcacctggatggaaacaaaatctcccgggtggatgccgcgtccttgaaaggtcttaacaacctagcaaagttaggcttgtctttcaattcaatctccgctgttgacaatgggtcactggccaacacacctcacctcagggagctgcatttagacaacaacaaactgactagggttccgggaggactcgccgaacacaaatatatccaagtggtgtatctgcataacaacaacatctcagtggttgggtccagtgacttttgtccacccggtcataatacaaagaaggcttcatattctggcgtgagtctgttctccaatcccgtgcagtactgggaaatccagccgagcacatttcgctgtgtgtatgtaagatctgccatccagcttggcaattataaatag

SEQ ID NO: 114236 - DNA, 639 bp, synthetic construct
  misc_feature 1..639: note = Description of Artificial Sequence: Synthetic coding sequence
  source 1..639: mol_type = other DNA
atgaaggctaccattatcctcctacttttagctcaagtgagctgggccggccctttccagcaacgcgggctcttcgactttatgctcgaagacgaagcttctggaatcgggccggaggtcccggatgacagagattttgaacctagcctggggccagtatgcccttttaggtgccagtgccacttgcgcgtcgttcaatgtagcgatcttgggctcccaccatctctcaccgaactgcatttagacgggaacaagatctctagagtcgacgcagcttctcttaaaggtcttaataatctggctaaattagggctgtcctttaattccatcagtgctgtcgacaatggtagtttggccaacactccccacctgcgagagctgcacctagataataacaagctaacacgggtgcccggtggactagcggaacacaagtacattcaggttgtctatctgcacaacaataatatttccgtagtaggtagttccgacttctgtccccctggccacaatacgaagaaggcttcttattcaggagtgagcctgttttcaaatccagtgcagtactgggaaatccagccgtccacttttaggtgtgtttacgttagatctgccatccagctggggaattacaagtag

SEQ ID NO: 114237 - DNA, 519 bp, synthetic construct
  misc_feature 1..519: note = Description of Artificial Sequence: Synthetic coding sequence
  source 1..519: mol_type = other DNA
atgaaggccaccattatactcctgctactggcccaggtgtcatgggctggacctttccagcagcggggcctgttcgactttatgctagaggacgaagcctccggaatagggccagaggttcctgacgatcgcgatttcgaaccgagcctgggtcctgtatgtccattccgttgtcagtgtcacttacgagtagttcagtgcagtgacctggggctggacaaggtgccgaaggatttgccaccagacacaacactcctcgatcttcagaataacaagattaccgaaataaaggacggtgactttaagaatcttaagaacttacacgtcgtttatctccacaataacaacatttcagttgttggctcatctgacttctgtcctccagggcacaacactaaaaaggccagctattccggtgtgtctctctttagtaaccccgtccagtattgggagatccagccgagcacattccggtgtgtgtacgtgcggtccgccatccagctcggcaactacaaatag

SEQ ID NO: 114238 - DNA, 228 bp, synthetic construct
  misc_feature 1..228: note = Description of Artificial Sequence: Synthetic coding sequence
  source 1..228: mol_type = other DNA
atgaaggccactattatcttgctcctcctggcccaggtgtcgtgggccgggccttttcagcagcgcggtctgtttgacttcatgctggaggacgaggcgagcgggattggccccgaggtgccagacgatagggactttgagccctctctgggacccgtgtgtcccttccgctgtcaatgccatttgcgcgtagtgcaatgtagcgatctggggtgcctgccctcatag

SEQ ID NO: 114239 - DNA, 639 bp, synthetic construct
  misc_feature 1..639: note = Description of Artificial Sequence: Synthetic coding sequence
  source 1..639: mol_type = other DNA
atgaaagcgactatcattttactcctgctggcccaagtcagctgggccggcccctttcagcagcgaggtctgttcgattttatgttagaagatgaagcgtctggaatcggccctgaagtgcccgatgaccgagatttcgagccctcattgggcccagtttgtcctttccgttgccagtgtcacctgagagttgtgcagtgtagtgacctaggcctgcctccttctttaacagagttacatcttgatgggaataagatcagcagggttgatgctgccagcttgaaggggttaaataacctcgcaaaactcggattgtcctttaacagtatctccgccgtggacaatgggtctctggcaaatacaccccatttaagggaactgcacctggacaacaataaactgactcgcgtgccaggcggcctggcagagcacaaatatattcaggtggtgtatctgcataacaataatatttctgttgttgggtccagtgacttctgtcctccaggacacaacacaaaaaaagcctcctactctggtgtgtccctgttttcaaaccctgtccagtattgggagattcaaccgagtacttttagatgtgtgtatgtgaggtctgctattcagttgggtaattataaatag

SEQ ID NO: 114240 - DNA, 540 bp, synthetic construct
  misc_feature 1..540: note = Description of Artificial Sequence: Synthetic coding sequence
  source 1..540: mol_type = other DNA
atgaaggcaactattattttgctgcttctcgcccaggtatcttgggctggcccatttcaacaacgcggcctcttcgatttcatgctcgaggacgaagcatctggaattgggcctgaggtgccagatgatagagatttcgagccaagtttagggccagtatgcccatttcgatgccaatgccatctgcgagtcgttcagtgcagcgatttgggcttggacaaggtgcccaaggacttgccacccgacacaactctgctggatctccagaacaataagatcacagagataaaagatggagatttcaaaaacctcaaaaacctgcacgccctgatacttgtgaacaataagatctctaaagtgagcccgggagcgttcacacccctggtcaagctggaaagactatacctcagcaagaatcagctgaaagagctgcccgagaagatgcctaagaccctgcaagaactcagagctcatgaaaacgaaattactaaggtgaggaaagttacattcaacggcttaaatcaaatgatcgtcatttag

SEQ ID NO: 114241 - DNA, 360 bp, synthetic construct
  misc_feature 1..360: note = Description of Artificial Sequence: Synthetic coding sequence
  source 1..360: mol_type = other DNA
atgaaagccacaatcattctgctgctgctggcccaggtgtcgtgggctggtccattccaacagaggggcctgtttgatttcatgctcgaagatgaggcatcaggcatcggacccgaggtacctgatgacagagacttcgagccctctctgggccccgtgtgccctttccgctgccagtgtcacctccgcgtggtgcaatgttctgatctggggctggacaaggtgccaaaagatctgccaccggacaccacactgctggatctccagaataacaagatcaccgagatcaaggacggggattttaaaaatctgaagaatctacacgcgcttattctggtgaataacaaaatttcaaaatag

SEQ ID NO: 114242 - DNA, 525 bp, synthetic construct
  misc_feature 1..525: note = Description of Artificial Sequence: Synthetic coding sequence
  source 1..525: mol_type = other DNA
atgaaagcgactatcattttgctgctcctagcacaggtgagctgggcgggacctttccagcaacggggcctattcgacttcatgttggaggacgaagcaagcggtattggaccggaggttcctgatgatagggacttcgaaccttctttgggtccagtctgcccatttcggtgccaatgtcatctgagagtcgtccagtgctctgatctaggactcgacaaggtgcctaaagatctcccaccagacactactctactggacctccagaataataagattacggaaatcaaagacggggatttcaagaatctcaaaaacctgcacgccctgatcctggtgaacaataaaatctcgaaagtgtcacccggtgcctttactccgctggtgaagcttgagcggctttacctgagcaagaatcaactgaaggagttgccagagaaaatgcctaagactctgcaagaactcagagctcacgaaaacgagatcacaaaagtgagaaaggttacctttaatggacttaactag

SEQ ID NO: 114243 - DNA, 537 bp, synthetic construct
  misc_feature 1..537: note = Description of Artificial Sequence: Synthetic coding sequence
  source 1..537: mol_type = other DNA
atgaaggctactattatattgcttctgctggctcaggtgtcttgggctggcccctttcagcaaaggggactgtttgattttatgctagaggacgaggcctctggcatcgggcctgaagtgcctgacgatagagatttcgagccttcccttggtcctgtgtgtccctttcggtgtcagtgtcaccttagggtggtgcagtgtagtgatctaggtctggacaaggtgccaaaggacctgcctcccgataccactctgctcgatctgcaaaacaacaagatcaccgagatcaaagatggcgactttaaaaacttgaagaatctgcacgcccttatacttgttaataataaaatctcgaaggtgtcacccggcgccttcaccccattagttaagcttgaacgcttatacttgtccaagaatcagctgaaggagctgccagagaaaatgcctaagaccctccaggaactgagagcccatgaaaatgaaattaccaaggtcagaaaagtcactttcaacgggcttaatcagatgatcgtctag

SEQ ID NO: 114244 - DNA, 1080 bp, synthetic construct
  misc_feature 1..1080: note = Description of Artificial Sequence: Synthetic coding sequence
  source 1..1080: mol_type = other DNA
atgaaggccaccattatcctcctgctcctggcacaggtatcttgggcggggccatttcaacaacgcgggcttttcgactttatgttggaggatgaagccagcggaatcggtccggaagttcccgacgatagagatttcgagccctcactcgggccagtttgcccatttcggtgccagtgtcatctcagagtcgtacagtgctcagacctgggactggacaaagttcccaaagacctgccccccgacaccactctactggacttacagaacaataaaatcaccgagattaaggatggcgactttaagaatcttaagaacttgcatgcactcatcctggtgaacaacaaaatttcgaaggtctcccccggggcttttacgcctttggtcaaactggaacgcttatacctaagcaagaatcagctgaaagaactccccgagaaaatgcccaagacgctccaggagttgcgcgctcacgagaacgagataacaaaagtgcggaaagtcacctttaacggactgaatcagatgatcgttatagaactcgggaccaatccgttgaagagcagcgggatcgagaacggcgcttttcagggcatgaaaaaactttcatacatcagaatcgcagacacaaatatcacatccattccacaaggtcttcctccatctctgaccgagcttcatctggatggtaataagatctcccgcgtggacgccgcctccttgaaagggttaaacaacttggcaaagcttgggctgtctttcaatagtattagcgccgtcgacaatggatctctggccaacacgccacacttgagagagctgcacttggataataataagttgacgcgtgtgcctgggggtttagccgaacataaatacatccaagtcgtctatcttcacaataataacattagcgtcgtgggatcctcagatttctgtccgcccggacataacaccaaaaaagcatcctatagtggagtgtcgctcttctcaaacccagtccaatactgggagatccaaccttcaaccttcaggtgtgtgtacgtgcgctcagctattcaactcggtaattataagtag

SEQ ID NO: 114245 - DNA, 5598 bp, synthetic construct
  misc_feature 1..5598: note = Description of Artificial Sequence: Synthetic coding sequence
  source 1..5598: mol_type = other DNA
atgacacgctgggtccccacaaagagggaggaaaagtacggagtcgcgttttacaattatgacgctcgcggggccgacgagttaagcctgcagattggagacactgtgcacatcctggaaacctatgaaggatggtatagaggctacactttacgcaaaaaatccaaaaaaggtatcttccccgcttcttacatccacctcaaagaggccatcgtcgaaggaaaagggcagcatgagactgtgatccccggcgacctgcccctgattcaggaagtgacaacaaccctgcgcgaatggagtacaatttggcgccagctctatgtccaagataatcgggagatgttcagaagcgttcggcacatgatctacgatctgatcgagtggcgctcgcagattctgtccggtacgcttccccaggatgaattgaaggaactgaaaaagaaggtgacagccaaaatcgactacgggaatcgcattttggacctagatctcgtggtgagagatgaggacggtaacatcctggaccccgagctcacaagtaccatatctttatttagagcccacgaaatagcatcgaagcaagtcgaggagcggctgcaggaagaaaaaagccagaagcaaaacatcgatataaataggcaagccaaatttgccgccacaccttccctggccctgttcgtaaatctcaagaatgtcgtgtgcaagatcggagaggacgccgaggtgctaatgagcttgtacgatccagtcgagagtaagtttataagcgagaactacctagtgcggtggtctagctccggcttgccaaaggatattgatcgtttacacaatctacgcgccgtttttactgatttgggaagtaaagacctgaagagggagaaaatcagcttcgtgtgtcaaatcgtgagggtgggcaggatggagctccgggataacaacactagaaagctcacatccggcctgagacgtcctttcggggtagccgtgatggacgttaccgatattataaatgggaaagtcgacgacgaggataaacagcattttattcccttccagcccgtggccggcgagaatgatttccttcagaccgtcataaacaaagtcatagctgctaaagaagtgaatcacaagggccaaggtctctgggtgaccctaaaactccttcccggagatatccaccagatcagaaaagagtttccacatttggttgatcggaccaccgccgtggcccgcaaaacgggctttccggaaatcattatgcccggggacgtgagaaatgatatatatgtcaccctcgttcagggtgatttcgacaaaggctctaaaaccactgccaaaaacgtggaagttacagtgagtgtctacgatgaggatggtaaaagacttgagcatgtgatcttcccaggggctggtgatgaggctatttcagagtacaagagtgtgatctattatcaggtaaaacaaccacgatggtttgaaacagtgaaagtggcgatccccatcgaggacgttaatcgctctcacctgagattcacatttcggcatcgtagctctcaggattcgaaagataagtcagagaagattttcgcattggccttcgtgaagctcatgagatatgacggtaccacacttagagacggggagcacgatttgattgtctataaagcagaggccaagaaactggaagacgctgcaacgtacctgtccctcccgagcactaaggccgagcttgaggagaaaggtcactccgctaccggcaaatctatgcagtcgctcggaagctgcacaatttcaaaagactcattccagatttccacccttgtctgctctacaaaactgacccagaatgtagacctgctcggcctgctgaaatggcgaagcaacacgtcgctactgcagcagaatctgcgccaattaatgaaggtggacggtggagaagtcgtcaaatttcttcaagatactctcgacgccctgtttaacattatgatggaaaatagtgaatccgaaacgttcgacactctagtgttcgatgcattggtttttattatcggtttgatagccgacaggaagtttcagcattttaatcctgtactcgagacctacataaagaaacatttttccgctaccttggcatataccaagcttaccaaggtgcttaagaactacgtcgatggagctgagaagcccggcgtgaatgagcagctctacaaggccatgaaagcacttgagagtatcttcaagttcattgtgcgcagtagaattttatttaaccagctgtacgagaataagggcgaggccgatttcgtggagtccctgcttcagttgttccggtcaattaatgatatgatgtccagtatgagtgatcagaccgtgagagtaaagggcgctgcacttaagtacctgcctacaattgtcaatgatgtaaagttggtgttcgatccaaaagagctcagcaaaatgttcaccgaatttatcctgaatgtacccatggggctgctgacaatccagaagctctactgtctcatcgaaattgtgcatagtgatctgtttactcagcacgactgtcgggaaattctgctacccatgatgactgaccagttgaagtatcatctcgaacggcaggaggacctcgaagcctgttgtcagctgctgagtcacattctcgaagtgttgtaccgaaaggatgtgggcccaacgcaaaggcacgttcagataataatggagaagcttctgagaaccgtgaatcggactgtgattagtatgggtagggactctgaactgataggcaattttgtggcttgcatgacggcgatcctgagacagatggaagactatcactacgctcatctgattaagacctttggcaagatgagaacagacgtggtggattttctcatggagacgtttattatgttcaaaaacctgatcggtaagaatgtatacccctttgattgggtgatcatgaatatggtccagaacaaagtgttccttcgtgcaatcaaccagtacgcagatatgctgaacaagaagttcctggatcaggcaaatttcgagctccagctgtggaacaattattttcacctcgcggtggcgtttctgacacaggagagccttcagctcgaaaacttctcatccgccaagagggctaagatcctgaataagtatggggacatgagacgacagattggctttgagattagggatatgtggtacaatctgggccaacacaaaatcaagtttattccagagatggtcggtcccatcctagagatgactctgattccagagactgagctgaggaaggccacaatacctatcttcttcgatatgatgcaatgtgagttccactccacccgctcctttcaaatgttcgaaaacgagatcatcaccaaactggaccacgaagttgaagggggccgcggcgacgagcagtataaagtgctcttcgacaaaatccttctggaacattgtcggaagcataagtacttagccaagaccggagaaactttcgtgaagctagtggtgaggcttatggagcgcctgcttgactaccggacaattatgcacgatgagaacaaggaaaaccggatgtcatgtaccgtgaatgtgttaaatttctacaaagagattgagagagaggagatgtatattcgatacttatataaactctgcgatctccataaggagtgcgacaactacacagaagcagcatataccctgctactgcacgcaaagttgcttaagtggagcgaggatgtgtgcgtggctcatcttacccagagggacgggtaccaggcgaccactcagggtcagctgaaagagcagctgtaccaggagataattcattattttgacaaaggaaagatgtgggaagaagccatcgccctcgggaaagagttggccgagcagtacgagaatgagatgttcgattatgagcagttgagcgaactactgaagaagcaggcccagttctacgagaacattgtgaaggtaatccggcctaagcccgattattttgccgtcggatattatggccagggattccccacatttcttcgcgggaaggtctttatctaccgcggtaaagaatacgaaagaagggaggacttcgaagcccgccttctgacccagttcccaaacgctgagaagatgaaaaccaccagtccccctggagatgacattaaaaattcacctggccaatatatccagtgcttcactgttaaacctaaactggatctcccccctaaattccaccgtcctgtgtccgagcagatcgtcagcttttatcgcgttaatgaggttcaaagatttgagtattcccgtccaattcggaaaggagaaaaaaatcctgacaacgaatttgcaaacatgtggattgagcggacaatctataccaccgcctacaaactgccaggcattctcaggtggttcgaggtaaaatctgtgtttatggttgagattagcccacttgaaaacgctatcgagaccatgcagctgacgaacgataagattaactctatggtgcagcaacatcttgacgaccctagcctaccaatcaacccgttaagcatgctgcttaacgggattgtcgacccagctgtcatgggcggctttgcgaattacgagaaagccttttttaccgatagatatttacaagagcaccctgaggcccacgaaaaaattgagaaactcaaagacttgatcgcgtggcagattcctttcctggcagagggaatcaggattcatggtgataaagtcaccgaagccctgaggccttttcatgagcggatggaggcgtgcttcaagcagttgaaggagaaagtcgagaaggaatatggtgtcagaataatgccttcgtctctagatgataggcgcggaagcaggccccgtagcatggtccgaagttttacgatgccaagttcttctaggcccttgtctgtggcctctgtgtcaagtctgagtagcgacagtaccccctcccgaccaggctcggacggttttgccctcgaaccactccttcctaagaaaatgcattcgcgctcgcaggataagctggacaaggacgaccttgagaaagagaagaaggacaagaaaaaagaaaagcggaactccaagcaccaggagatctttgaaaaggagttcaaacctactgacatctccctgcaacaatctgaagcagtgatattgtccgagactattagccccctgagaccacagaggccaaaatcccaggtaatgaatgtcatcggctctgagcgccggttcagcgtctcaccaagttccccaagttcccaacagacgccgcccccggtcacacctcgcgctaagttgtcattttcaatgcagtcatcgctggagctcaacggtatgactggtgcagacgtcgcagacgtgccgccacccctgcccctgaagggaagtgttgctgattacgggaacctgatggagaaccaggatctgctaggttctcctacaccgccccccccaccaccacaccagcggcacctgcccccaccactgccctcaaagacacctcctccccccccccctaagactactcggaaacaggcctccgtcgactcaggtattgtccagtag

SEQ ID NO: 114246 - DNA, 6561 bp, synthetic construct
  misc_feature 1..6561: note = Description of Artificial Sequence: Synthetic coding sequence
  source 1..6561: mol_type = other DNA
atggctggcgagcggacccgacgctttaccaggagcctgctgcgcccaggtcaggccgctgagctgagacattcagctgcttcagctgccgccgtggctgtgagtagtcggcaacaacaacgccaagagaagccacggctcctggaacctcttgattacgagacagtcatcgaagagctcgagaaaacgtaccgaaacgacccactgcaggacttgctctttttcccaagtgatgatttttccgccgcgacagtctcgtgggacatccggactctgtattccaccgttcctgaagacgcagaacacaaggctgagaatttgttggtgaaagaggcgtgcaaattctattcgtcacagtggcatgtggttaactacaagtacgaacagtatagtggagatatccgtcagttgccccgcgctgagtacaagcctgagaagctcccgtcgcactcattcgagatcgatcacgaggatgcagataaggatgaagacaccacatcccactctagcagtaaaggcggggggggcgcaggaggcaccggtgtttttaagagtggttggctgtacaaaggtaactttaacagcactgtgaacaacaccgtaacggtgcgttctttcaagaagaggtacttccagctgacacagctgcccgacaactcctacatcatgaacttttataaggacgagaaaatttctaaagaacccaaaggttgcattttcctggactcctgtaccggagtggtgcagaataatcggctgcgaaagtatgcattcgagctgaagatgaacgatctgacatacttcgtgttggctgcagaaacagagtccgacatggacgaatggatacacacactgaatcgaattctgcagattagcccagagggccctctgcagggaagacgctccacagaactgacagacctgggccttgatagcctggataattctgtgacctgcgagtgcacccctgaggaaactgacagcagtgagaataatctgcacgctgatttcgcaaaatatctcactgagacagaggatacagtcaagactaccaggaacatggagcgtctcaatctcttctcccttgatccagacatcgacactcttaaactacagaaaaaagacttgctggagccagagagcgtaatcaagcctttcgaggagaaggccgcaaagcggattatgatcatctgcaaggccctaaactccaacctgcaagggtgcgttacagaaaacgagaacgatcccatcaccaacatcgaaccctttttcgtgtccgtggccctctatgatctgcgagacagtcgtaagatctctgctgactttcacgtggacctgaaccacgccgcagtacgccagatgctgctcggagcaagcgtcgcactggaaaatggaaatatcgataccatcacaccgcggcagagcgaggaacctcatatcaaaggattacccgaggagtggctgaagttccctaaacaggcagtgttttctgtcagcaaccctcactcagagattgtgctggtggcaaaaattgaaaaagtgctgatgggtaacatcgcatctggggccgagccatacataaagaatcccgacagtaacaagtacgctcagaagatccttaagtctaacagacaattttgcagcaaactgggaaaatacagaatgccctttgcttgggccgtcagatctgtcttcaaggacaatcagggaaacgtcgatcgggacagcagatttagccctcttttccgccaggaatctagtaagatctctacagaagacttagtaaagttagtcagcgattataggagggcagataggatatcaaagatgcaaaccattccgggcagtctggacattgccgtcgacaacgtgccgttagagcacccaaactgcgtcacaagttccttcatccctgtgaagccttttaatatgatggcccagacggagccaactgtggaagtggaggagttcgtatatgattcaacaaagtattgccgcccctatagggtgtataaaaatcagatttatatttatccaaagcacctcaaatacgacagtcagaagtgctttaataaagcccggaacatcacagtgtgtattgagttcaagaacagtgatgaggagtcagccaagcctctcaagtgcatttacggaaaacccgggggccccctgtttacatccgcagcctacactgccgtgctgcaccatagccaaaatcctgattttagcgatgaggtcaagatcgaacttcctacgcagctgcatgaaaagcaccacatcctgttctctttttaccatgtaacttgcgatatcaacgccaaggctaacgcgaagaagaaagaggctctggagactagcgtgggttacgcctggctcccactgatgaagcacgaccagatagctagccaggaatacaacattcctatcgctactagtctaccaccaaactacttgtcattccaagacagtgcctcaggcaaacatggtgggtccgatatcaagtgggtggatggcgggaaacccctgtttaaggtgagtacctttgtggtatcaacagttaatactcaagatccacacgtgaatgccttctttcaagaatgtcaaaagagggagaaggatatgagtcaatcaccaacctcaaactttattcggagctgtaaaaatctgctaaatgtcgagaagattcacgccattatgagtttccttccaattatcctcaatcaattgttcaaagtccttgtgcaaaacgaggaagatgagataaccactacagtgactagagttttaaccgatatagtcgccaaatgtcatgaagaacagctggaccacagtgtccagtcctatataaagttcgtttttaaaacgcgtgcatgcaaagagaggaccgtccacgaagagctggcgaaaaatgtaaccggattactgaaaagcaatgattcaactacggtcaaacacgtgctcaagcactcatggttttttttcgcgattattctaaagagcatggctcagcatttaattgacactaacaaaatccagctacccaggccacagcgattccccgagagctaccagaacgagctggacaacctagtgatggtcctctccgatcatgtgatatggaaatacaaagatgctctggaagaaacaagacgggctaaccatagtgtagcccgctttctgaaacggtgtttcacatttatggacagagggtatgtctttaagatggtgaacaactacatcagcatgttctcctctggggacctgaagacactgtgtcagtataagtttgatttcctgcaagaagtgtgtcagcatgaacacttcattccattgtgcttgccaatcaggtccgcgaacatccctgatcccctgactcccagcgagtcgactcaggaattacacgcttcggatatgccagaatactcagtgacaaacgaattctgcaggaaacattttctcattggaatccttctgcgggaagtggggttcgcattacaggaggatcaggacgtgcgtcatttagctcttgcagtcctgaaaaacctcatggctaagcatagttttgatgacaggtacagggagccacggaagcaggctcagattgcatccctgtacatgcccctctatgggatgctactggacaacatgccccgaatttacctcaaagacctctaccctttcacagtaaacacatcaaatcaaggatccagggacgacctaagcacgaatggcggctttcagtctcaaaccgccataaagcacgccaattcagtggacacctcctttagcaaggacgtccttaacagtatcgcagcattcagcagcattgccatctcaaccgttaaccatgctgacagcagagccagtcttgcaagcctggattccaatccttctactaacgaaaaatctagtgaaaaaactgacaactgtgagaaaatcccccgaccgctctccctgatcggatcaacacttagattcgacaaattagaccaggcagagacccggtctttactgatgtgtttccttcacattatgaagaccatttcttacgagacgctgatagcctactggcagcgggcaccatcccccgaagtgtctgattttttcagcatcctggacgtatgtctgcagaacttccgttatcttggcaaaagaaacataattcgaaagatcgcagccgccttcaaattcgtgcagagtacccagaataatggtactctcaaagggtcgaatcctagttgtcagactagtggtttactgtcacagtggatgcactcaacttcatcacatgaaggtcataagcaacaccgcagccagacgctgcccattatccggggtaaaaacgcactctctaatcctaaattgctgcaaatgctcgataacactatgacatccaactctaatgagattgacatcgtgcaccacgtggacactgaagccaacatcgctactgaagtctgccttactattttagacctgttgagtctctttacacaaacacaccagcgacaacttcagcagtgtgactgccaaaacagcctcatgaaacgcgtcttcgatacctatatgctgttttttcaagtcaaccagtctgccacggccttgaagcatgtgtttgcatcactgcgcctctttgtgtgcaaatttccctcggccttttttcagggccccgccgatctttgcgggagtttctgctatgaggtcctcaaatgttgcaaccatcgatctagatccacccaaaccgaagctagcgcccttctgtactttttcatgagaaaaaacttcgagttcaataaacagaaatcaatcgtgcggtcgcacctgcagttgataaaggcggtcagccagttgatcgccgacgctggcatcggaggcagtcgttttcagcactccctcgcgataacaaataacttcgcgaatggggataagcagatgaaaaattcgaacttccccgccgaggtgaaagatctgacgaagcgtatacgaacggtgctcatggcgacagcccaaatgaaggagcatgaaaaagaccctgagatgctggtcgacctgcagtattcattggcaaatagctatgcctccactcccgaactgagacggacttggctggaaagtatggcaaaaattcatgcaagaaatggtgacctgagtgaagctgccatgtgttatatccacattgccgccctcatagcagagtatttgaaacgcaagggctattggaaagttgagaagatttgcaccgcatcacttcttagcgaagatacacacccctgcgatagcaacagtctcctaactacgccgagcgggggttctatgttttccatgggctggccggccttccttagcatcacaccgaatatcaaagaggagggagcaatgaaagaggactctgggatgcaggacactccctataacgaaaatatcttagtggagcagctgtacatgtgcgtagaatttctgtggaagtcggagaggtatgagctcattgccgacgtcaacaaacccataatcgccgtcttcgaaaagcagagggactttaagaaactgtcagatctctattacgatattcatagaagttacctcaaggtggccgaggtagtcaacagcgagaagcgcctttttggccgatattaccgtgtcgccttttacggccagggattttttgaagaagaagagggaaaagaatacatttataaagagcccaagcttaccggtctgagcgaaatctcccagcggctgttgaagctgtatgcggacaaattcggagcggacaatgtaaaaatcatccaggatagcaacaaagtcaatcctaaggacctcgaccctaaatatgcctatattcaggttacatatgtgacaccattctttgaggagaaagaaatcgaagaccggaaaaccgattttgaaatgcaccataacattaaccgtttcgtgtttgaaaccccatttaccctgtctgggaagaaacatggcggtgtggccgagcagtgtaaaagaaggactatcctgactacatctcacttgtttccgtacgtcaaaaaacgtattcaggtcatcagccaaagtagcaccgagctcaaccctatcgaagtggctatcgatgaaatgtccaaaaaggtgtctgaactcaatcaactgtgtaccatggaggaggtggacatgattaggctgcagttgaagttgcaggggtccgtgagcgttaaggttaacgctgggcctatggcgtacgcccgcgccttcctcgaggagactaatgccaagaaatatcctgataaccaggtaaaactcctgaaggaaattttcagacagtttgcggatgcatgtgggcaggccctggatgtgaatgagcggctgatcaaggaggaccagctggagtatcaagaggaacttcgctcccactataaggacatgctctcagaactcagcaccgttatgaacgagcagatcacaggacgggatgacttgagtaagcgtggggtcgaccaaacatgcacgcgcgtgatttcaaaggccacaccagcgctccccactgttagcatctcatccagcgctgaggtttag

SEQ ID NO: 114247 - DNA, 2103 bp, synthetic construct
  misc_feature 1..2103: note = Description of Artificial Sequence: Synthetic coding sequence
  source 1..2103: mol_type = other DNA
atgacaagtaacagtaatgagatagatattgtccaccacgttgacaccgaagctaacattgctacagaggtctgcctaaccatccttgatctcctttctctgttcactcagactcaccagagacaactgcagcaatgcgattgtcaaaactcacttatgaagcgagtgttcgacacctacatgctgtttttccaagtcaatcaaagcgccacagctctgaagcatgtttttgcgagcctgagactgtttgtttgcaaattcccatccgccttcttccaaggccccgcggacctctgtggtagtttctgctacgaggtcctcaaatgctgcaatcatcgcagccgatctactcagaccgaggcctctgccttgctttattttttcatgcggaaaaattttgagtttaataaacagaagtccatcgtaagatcccacttgcaattaatcaaggccgtgtctcagcttatcgcggatgcaggaatcggaggctcgcggttccagcatagtcttgccatcaccaataatttcgcaaacggagataaacagatgaaaaactccaattttcctgctgaggttaaggatctgactaaaaggattcgtacagttctcatggcaaccgctcagatgaaggagcatgagaaggatccagagatgttggtggacctgcaatattctcttgccaactcgtatgcctccacaccagagctgagacgtacatggctggaaagcatggcaaagatccatgcacgtaacggggacctgtctgaagctgccatgtgctacatacacattgccgctctgatcgcagaatatttaaagagaaaaggcatgttcagcatgggctggcccgccttcctgtctatcacaccaaatattaaggaggagggcgcgatgaaggaagattccggcatgcaagataccccttacaacgagaatattctggtggagcagctgtacatgtgtgtagagtttctgtggaaaagtgaacgttatgaattaattgctgacgttaacaagcctatcatcgctgtgtttgagaagcagagagacttcaaaaaattgtctgatttatactacgatatccatcggtcatacctgaaggtggctgaggttgtgaactccgagaagcggttgttcgggagatactatagagtggcgttctacgggcagggcgtcggattttttgaggaggaggaagggaaagagtacatatacaaggagccaaagctgaccggactctcagagatatcacaaaggctgctcaagctctacgccgataaatttggagccgacaacgtcaagataatacaggactccaataaggtgaatcccaaagatctggacccaaaatatgcatacatccaagtaacgtacgtgacaccgtttttcgaagaaaaggagatcgaggatagaaagactgacttcgagatgcaccacaatattaacagatttgttttcgagacgccttttacactctcaggcaagaaacacggcggcgtggccgagcagtgtaagcgccgcacaattctgacaacaagtcacctgttcccatacgtgaaaaagaggattcaggtcatcagtcagtcttctactgagcttaatcctattgaagtggcaatcgatgagatgtctaagaaggtgagtgaacttaaccagctttgcacaatggaagaagttgatatgatcaggcttcagttgaagctgcagggttcagtaagtgtgaaggtgaatgctgggcctatggcgtacgcacgtgcatttctcgaagagaccaatgcgaaaaaatatccagataaccaagtgaaactgctcaaggagattttccgacagttcgcggacgcctgcgggcaggcactagacgtcaatgagcggcttatcaaggaggaccagttggaatatcaggaggagctgcgctctcattacaaagacatgctcagcgagctatctacagtcatgaatgagcagctgtgtcgcggcccatgcttatatagcttttgtagtagtgtgagctccatttcccttagcacggttagcaaatcagactacggccaagggagacctgttaaagcacggtctggacctaaccttcatagttccaactag

SEQ ID NO: 114248 - DNA, 6543 bp, synthetic construct
  misc_feature 1..6543: note = Description of Artificial Sequence: Synthetic coding sequence
  source 1..6543: mol_type = other DNA
atgtcctttcgaggcaaagtcttcaagcgcgaaccttccgaattttggaagaaacgtagaaccgtgcgtagagtgaatcaggaggagatccacagattttcctcacaggagaagcctagattacttgaaccgctggattacgagacagtgatcgaagaactcgagaaaacctatcgcaatgatccattacaggaccttttgttcttcccatcggatgattttagtgccgccacagtgagttgggatattcgaaccctgtactcaacagtgcctgaagacgccgagcacaaggccgagaaccttctggtaaaggaagcctgcaagttctatagttcacaatggcatgtggtcaactacaagtatgagcaatacagcggagatatcagacagctgcccagagcagaatacaaaccagagaaactgccaagtcatagttttgaaattgaccatgaggacgcagataaggacgaggacactactagccactcctcttcaaagggaggggggggggctggagggacaggcgtctttaaatccgggtggctatacaagggaaattttaattccaccgtgaataataccgttaccgtgagaagcttcaagaagcgctacttccagcttacccaactgccagacaacagttacataatgaacttctataaggacgaaaagatttctaaagaaccaaagggctgtatttttctggattcatgcaccggagtcgtccagaacaataggctccgtaagtatgcgttcgaactgaaaatgaacgatctgacctatttcgtcctggccgcggagactgaaagcgatatggacgagtggatacacacccttaataggatccttcagatttctcctgagggacccctacaagggcgccgatcgactgaactcaccgacctgggactggactctcttgacaacagcgtcacgtgtgagtgcacccctgaggaaacagattcgagcgaaaataacctacacgccgatttcgcaaagtacctgacagaaacagaggacaccgtaaagaccacacgcaacatggagcggttgaatctgttttccctcgatcctgatattgacacactgaagttgcagaagaaagacctgctcgagccagaaagcgtcattaaaccttttgaggagaaagctgctaagcgcatcatgatcatatgcaaggcactcaattcaaacctgcagggatgtgtgaccgagaatgaaaacgaccccattactaacatcgaaccctttttcgtgtccgtagcactgtacgacctacgcgattcacgaaagatttccgcagatttccacgtggatctgaaccacgcggctgtaaggcagatgttgctgggcgcaagcgtggccctcgaaaacggcaacattgacaccatcacaccaagacagagtgaggagcctcatattaagggattgcccgaagagtggctcaagttccctaagcaggccgtcttctctgtttcaaatcctcactcagagatcgtcttagtggctaaaatcgagaaggtgctgatgggaaatatcgcctccggcgctgaaccctacatcaagaacccggacagtaacaagtacgctcagaagattcttaagtccaatcgccaattttgctctaagctgggaaagtatcgcatgcccttcgcctgggcggtgagatctgtttttaaagacaaccaggggaatgtagatcgtgattctcgcttcagtccactcttcagacaagagagctccaaaatctcaacggaggacctggtgaaactggtgtctgactatcggagagctgaccggattagcaagatgcagacaattcctggatctttggacatcgctgttgacaacgtgcccctggagcaccccaactgtgttaccagtagcttcattcccgttaagcctttcaacatgatggcacagacggaaccaaccgtagaagtagaggagttcgtttatgattccacgaagtattgtaggccataccgggtgtacaaaaaccaaatttatatttacccgaagcatctcaagtatgatagccaaaagtgttttaacaaagctaggaatattactgtgtgcatagaattcaaaaactccgacgaggaatccgcaaaaccacttaagtgtatctatgggaaaccagggggccccttattcacctccgctgcttacacggctgtcttgcaccactcccagaacccagacttttctgatgaggtgaagatcgaattgccaacacagctccacgagaaacatcacatcctcttttctttctaccatgtgacctgtgatattaatgccaaagcaaacgctaagaagaaggaagcccttgagaccagcgtagggtatgcctggctgcctctcatgaaacacgatcagatagctagtcaggagtataatatcccgatcgccaccagtctcccgccaaactatctatcctttcaggattcagcttctgggaagcacggcggcagtgacatcaagtgggtcgatggtggaaagccactgttcaaggtgtctactttcgttgtgagcacggtgaatacacaagatccacacgtgaatgcctttttccaggagtgtcagaaacgcgagaaggacatgtcgcagtcccctaccagtaacttcattagaagctgtaagaatttattgaatgtggagaagattcacgcgattatgagctttctccccattattctgaatcagctgttcaaggtcctggtacaaaacgaagaggatgagataacgacgacagttacaagagtgttgacggacattgtggctaaatgtcatgaagagcagcttgaccacagcgttcagtcctatatcaagttcgtgttcaaaacccgggcctgcaaggaaagaaccgtgcacgaagagctggctaaaaatgtaactggtctcctcaaatccaatgattcaacaacagtcaagcacgtgctcaagcattcctggttctttttcgccatcatcctgaaatcaatggctcagcacctgatcgacacaaataagatccaattgccccgcccacagaggtttccagagtcatatcagaatgaactcgacaacctcgtaatggtcttatctgatcacgtgatctggaagtacaaggacgcccttgaggagacacggagggctaatcactcggtcgctaggttcttaaagcggtgcttcacattcatggacaggggttatgtctttaagatggttaacaattacatttcaatgttctcttctggcgatctgaagactctgtgtcagtataaattcgacttcctgcaggaagtgtgtcagcatgaacactttattcccttatgcctccccatccgctctgccaacatccctgaccctcttaccccttccgagtcaacccaggagctgcacgcttctgatatgcccgaatattccgtgaccaacgaattctgtagaaagcactttcttattggtatcctgctgagagaagtggggtttgccctacaggaagaccaggatgtccggcacctcgctctcgctgtgttaaagaatttgatggcaaaacactccttcgatgataggtatcgcgaacctaggaagcaagcgcaaatcgcttcactgtatatgcctctgtacggaatgttattggataatatgccgaggatctatctgaaagacttgtatcccttcacagtaaacaccagcaaccagggctctagagacgatctttcaaccaatggagggttccagtcccaaacagccattaaacatgccaactctgtagacacatcctttagcaaggacgtgctgaattcgatcgctgccttttcctcaattgccatcagtactgttaatcatgcggactcccgggcttcgctcgcgtccctcgacagcaatcctagcactaacgaaaaaagttccgaaaaaactgataactgcgaaaaaattcctagacctctgagcctcattgggagcaccctgagattcgataagttggatcaagccgagaccagatcccttctcatgtgttttttgcacatcatgaagaccatctcgtacgaaacattaatagcatactggcaaagagcaccgtcaccggaagtatcagatttcttttccattctcgacgtgtgcctgcaaaactttcggtatctcggtaagagaaacattatcaggaagattgccgccgctttcaagttcgtgcagagtactcagaacaatggtactcttaaaggctctaacccaagttgtcagacgtctggcctcctgtcacaatggatgcactccacgtccagccacgaaggtcacaagcagcataggtctcagacgttgccaattattcggggtaaaaacgccttaagtaaccccaagctgttacagatgctggataacactatgacctccaatagtaacgagattgatatcgtccatcatgtggacacggaggccaatatcgcgaccgaagtctgtctaactatcctggacctgctgtcattatttacacaaactcaccagcggcagctccagcaatgcgattgtcagaacagtctcatgaagagggtgtttgatacttatatgctcttttttcaggtgaaccaatctgctacagccttaaaacacgtatttgccagtctaaggcttttcgtgtgcaagtttccgagtgcctttttccagggcccagccgacctgtgcggctctttctgctatgaggtcctgaagtgctgcaatcaccggtcacgatctacccagacagaagcaagtgcactcctgtacttcttcatgcgcaagaactttgaattcaataagcagaaatccatcgtgagaagtcatcttcagcttattaaggccgtgtctcagctcatcgctgacgcaggtattggtggttcacggttccagcattctttagctattacaaacaattttgcgaacggcgacaagcagatgaaaaacagcaactttcctgccgaggtcaaagacctgacaaaacgaatccggacagttctcatggccacagcgcagatgaaggagcacgagaaagatcctgagatgctagtggaccttcagtacagtcttgccaacagttatgcttcgacaccggagctccgtagaacgtggctggaatctatggccaagatacatgcccgcaacggagatttatccgaagcggccatgtgttatatacacatcgccgcactgatcgcagagtatttgaaaagaaagggttactggaaggtcgagaagatctgcactgcatccctgctctccgaagacacccacccatgtgattctaatagtcttttgaccactcccagcgggggcagcatgttctccatgggctggccagcatttctcagtatcacccccaatataaaagaggagggagctatgaaagaagactcgggcatgcaggatactccttataatgagaatatcctagtggagcagctttatatgtgcgtcgagtttctctggaagtctgagcggtacgagctgatcgctgacgtcaataagccaatcattgcagtgttcgaaaagcagagggacttcaaaaaactgagcgacctgtactatgatatacaccgatcctatctaaaggtggcggaggttgtgaattcagagaaacgcctgtttggtcgctattaccgggtcgcattctatgggcaggggttctttgaggaagaagagggaaaggagtacatttataaagagccaaaactcacaggcctgagtgagatttcgcagcgactgctgaagctgtatgcggataagtttggagccgacaacgttaaaataatacaggattctaataaggtcaatcctaaagatctggacccaaagtacgcctatatccaggtaacatatgtgacaccctttttcgaagagaaggagatcgaggacaggaaaactgacttcgaaatgcaccacaatattaacaggtttgtgtttgaaaccccttttaccctatccggaaagaagcacggcggcgttgccgagcagtgcaaacgccgcacgatcctgacaacctctcatctcttcccctacgtgaagaagcgtattcaggttatctcccagtctagcaccgagctgaatcctattgaggtggcaatcgatgaaatgagcaagaaggtatctgagctgaaccagctgtgcactatggaggaggttgatatgatccggctgcaactcaaacttcaggggagcgtgagcgtcaaggtgaacgccggcccaatggcctacgctcgggccttcctcgaagagaccaatgcaaaaaaataccctgataaccaggtgaagttgctcaaggaaatcttcagacaattcgccgacgcctgcggccaagcattagatgtaaacgaaagactgataaaggaagaccagttggagtaccaagaggagctgcggtctcactacaaagacatgttgtctgaattgagcacagtgatgaatgagcagattacaggaagggacgacttgagcaagcggggcgtggaccagacatgcaccagggtgatttcgaaagccactcccgctctccccaccgtgagtatatcgtcatcagccgaagtgtag

SEQ ID NO: 114249 - DNA, 5493 bp, synthetic construct
  misc_feature 1..5493: note = Description of Artificial Sequence: Synthetic coding sequence
  source 1..5493: mol_type = other DNA
atggcgccttggcgcaaagctgacaaggagaggcatggagttgccatctacaactttcaagggtcaggcgctccacagctgagtttgcagatcggagacgtcgtccgaatccaggaaacctgtggtgactggtatcgcggttatctgatcaaacataaaatgctgcagggaatcttcccgaaatcctttatacacattaaggaggtaaccgttgaaaaacgtcgcaacactgagaatattattcccgcagaaatcccactggcccaagaagtgaccaccacactctgggagtgggggtcaatatggaagcaactgtacgttgcctcgaagaaggaaaggttcctgcaagttcaatctatgatgtacgatctgatggagtggcgttctcaactgttgtcgggcaccctcccaaaggacgaactcaaggaactcaaacagaaggtgacgagcaaaatagattatggcaacaagatcctggaactagacttgatcgtaagagacgaagatgggaacatcctcgatccggacaacacctccgtaatatccttgtttcacgctcatgaggaggctacagataagatcactgaacggataaaggaagagatgagcaaggaccagccggattatgcgatgtattccaggatatcttctagcccaacccacagtctatacgtgttcgtgagaaattttgtgtgccgtattggggaagatgcagagctttttatgtcgctctacgatcccaacaagcagaccgttatttccgagaattacctggtgagatggggcagtagaggttttccaaaagaaatcgaaatgttaaataacctgaaagtggtgttcaccgatctgggtaacaaggacctgaatcgggacaagatttaccttatttgccagattgtgcgtgtgggcaaaatggatttgaaggacaccggcgcaaaaaaatgcacacaaggactgaggcgtcccttcggcgtggcagtgatggacatcaccgacattataaagggtaaagcggaaagcgatgaagagaagcagcactttattccttttcacccggttactgcggaaaacgacttccttcacagtcttctgggaaaggtaatcgcctcaaagggggactccggcggccaaggattgtgggttactatgaagatgctggtcggagacattattcaaatcagaaaggactatcctcacctcgtggacaggacaacagttgtggcacgcaagttgggctttcccgaaatcattatgcccggggacgtgaggaacgacatctacatcacattgctgcagggagattttgacaaatacaacaagacaacccagcgcaatgttgaggtcattatgtgtgtgtgcgcagaggacggtaaaaccctgcctaacgctatttgtgttggagctggagataagcctatgaacgagtacagaagcgtcgtgtattatcaggttaagcagccccgctggatggagacagtgaaggtcgcagtcccaattgaggatatgcagcgtatacatcttcgcttcatgtttaggcatagatcaagtttagagagcaaggacaagggggagaagaacttcgcgatgtcatacgtgaagctgatgaaagaggatggcacaaccctacatgatggatttcacgacctggttgtgctgaagggtgacagtaaaaaaatggaagatgcatccgcataccttacactgcccagctacaggcatcacgtggaaaacaagggtgcaaccctctcaagatcgtcttctagcgtaggtgggctgtctgtttcctcaagagacgtgtttagcatatcaactctggtatgctccaccaaactcacgcagaatgtggggctgctgggccttcttaaatggcggatgaagcctcagttattacaggagaatctggaaaagttaaagatcgtggatggagaggaggtggtgaagttcctgcaggatacccttgatgctctgttcaatattatgatggaacactcacagtccgacgagtacgacatcctggtgtttgacgcactcatttacataatcggcctgattgctgatcggaaatttcagcacttcaacactgtcctcgaggcctatatacaacaacactttagcgccacactggcctataagaaattaatgaccgtgttgaagacttatctagataccagttctcgtggggaacagtgtgaacctattctgcgcaccctcaaggccctagagtatgtgttcaagttcatagtgcgatctcgtacactttttagccagttgtacgagggaaaagagcagatggagttcgaggagtccatgcggcggcttttcgaaagtatcaataatctgatgaagagccaatataagactaccatcttactccaggtcgctgccctgaagtacattccctcagtgctgcacgatgtggagatggtgtttgatgctaagctcttatcccaactcctgtacgaattttacacgtgtatacccccagtcaaactgcagaagcagaaggtgcaaagtatgaatgaaatcgtccagagcaatctgtttaaaaaacaagaatgtagggatattttgctgccagttattacgaaagagctgaaggaactgcttgagcaaaaggacgacatgcagcaccaggtgctagaaaggaagtactgcgtggaactcctgaattctattctggaggtcctctcctaccaagatgccgcctttacctatcaccatattcaagaaataatggttcaactcttgagaacagtgaataggactgtgattactatgggccgggaccatattctcattagtcactttgtggcctgtatgacagctatcctgaaccagatgggcgatcagcattacagcttttacatcgagactttccagacaagcagtgaactggtggacttcctcatggagacctttatcatgttcaaggatctgattggtaagaacgtgtaccctggtgattggatggcgatgagtatggttcagaatcgggtgtttctgcgggccatcaacaaattcgctgagaccatgaatcagaagtttctagagcatacaaacttcgaattccaattgtggaacaactatttccatttggcagtcgcctttatcacccaagattcactgcagttggaacagttcagccacgcaaagtataacaagatcctgaacaaatacggcgatatgcgcaggcttattggatttagtatccgcgacatgtggtataagctcggccaaaacaagatctgttttatacccgggatggtgggcccgatcctcgaaatgaccctcatccccgaggcagaactccggaaggcaaccatcccgatcttcttcgatatgatgctttgcgaatatcagcgctcaggagacttcaaaaagttcgaaaacgaaattattttgaaattggaccatgaggtagagggaggcaggggcgacgaacaatacatgcagctgctcgagagcatcttgatggaatgtgccgcagagcacccaaccatcgcaaaatctgttgagaattttgtgaacctagtcaagggactcctggagaagctgttggactataggggagttatgacggatgaatctaaagacaaccgaatgagctgtaccgtgaatcttttgaacttttataaagataataatcgggaggaaatgtacatcaggtacctctataagctcagagatctccacctggactgtgataattataccgaagccgcctacacgctgcttctgcatacctggctacttaagtggagcgatgaacagtgcgcaagccaggtcatgcaaacaggacagcaacacccgcagactcatcgtcagctgaaggagacactgtacgagactattatagggtatttcgacaagggaaagatgtgggaagaggccatcagcctgtgcaaagagctcgccgagcagtacgaaatggagatttttgactatgagctgctgtcacagaacctcatacagcaggccaaattctacgagtctataatgaagatcctcagacccaaacccgattactttgccgtgggctactacggccagggcttcccctctttcctgagaaacaaagttttcatatatcgcggcaaggagtatgagcgaagggaggacttccagatgcagctgatgacccagttccctaatgctgagaaaatgaacaccaccagtgcgcccggagacgatgtgaaaaacgccccaggacagtacatccagtgttttacggtccaaccggtcctagatgaacatccgaggtttaagaataagcccgtgcccgatcagatcatcaacttttacaaatcgaactatgtgcagcgattccattattcgaggcccgtccggagggggaccgtagaccccgaaaatgagtttgccagtatgtggatagaaaggacttccttcgtgacggcgtacaagctgccaggcatcctccgctggttcgaggttgttcacatgtcgcagacaacgatctctccgctggaaaatgccattgagacgatgtccaccgctaacgaaaagatactgatgatgatcaaccagtatcagagcgatgaaaccctgcccattaaccctctctcaatgctcttaaatggtatcgtggaccccgccgttatggggggcttcgcgaaatacgaaaaggctttttttaccgaagaatatgtgcgagatcaccctgaagatcaagacaaacttactcacttaaaggatcttatcgcatggcaaatcccattcctgggcgctggcattaagattcacgagaaacgggtttcggacaatcttaggccctttcatgatcgaatggaggagtgcttcaagaatctgaagatgaaggttgagaaggagtacggggtaagagaaatgccggactttgatgataggagagtcggcaggccaagaagcatgctcagatcctaccgccagatgagcatcatatcgctcgctagtatgaacagcgactgctccactcccagcaagcctacaagcgagtccttcgaccttgaactggcatctccaaaaaccccacgcgtagaacaagaagaaccaatatctcccggctctacattgcccgaagtgaaacttagacggtctaaaaagaggacgaagcgctctagcgtggttttcgctgatgaaaaggcagctgccgaatcagatctgaaacggctatcacggaagcacgagttcatgtcagataccaacctttccgaacacgccgctatccctctgaaagctagcgtattgagccaaatgtcttttgcatcccagagcatgcctacaattcctgccttggcattatctgttgcaggcattcctggcttagatgaggccaacacatccccacggctaagtcagacttttttgcagctgtctgacggagataagaagaccttgacgagaaagaaggtcaatcagtttttcaagaccatgctcgcctctaagagcgcagaagaaggtaaacagattcccgactccctgagcaccgacctgtag

SEQ ID NO: 114250 - DNA, 1011 bp, synthetic construct
  misc_feature 1..1011: note = Description of Artificial Sequence: Synthetic coding sequence
  source 1..1011: mol_type = other DNA
atgtgtgtgtgcgctgaggacggtaagaccctgcccgtcgcagtgccaatcgaggacatgcagcgaatccacctgcgttttatgttccgtcacagaagctctctggaatccaaggacaagggtgagaaaaatttcgcaatgtcttacgtaaaattaatgaaagaggacggaacaacattacatgatggcttccacgacttagtggtcttgaaaggcgactccaagaagatggaggatgccagcgcatacctaactctcccttcttatagacatcacgttgagaataaaggggccactctgagtaggtcatccagctccgtgggaggactgtccgttagctcacgcgatgtcttctctatctcaactctggtgtgctccaccaagctgacacagaacgtgggcctcctcgggttgctcaaatggcggatgaagccccagttggaggagtctatgaggcgcctattcgaaagcatcaacaatctgatgaagagccagtataagacgaccatcctcctgcaggtcgcagcactgaaatacattccatcggtgctgcatgacgtggagatggtgtttgacgcaaaactgctcagccagcttttatatgaattttatacatgcattccaccagtgaagcttcaaaagcagaaggtccagagcatgaacgagatcgtgcaatctaatttgttcaagaaacaagagtgcagggatatcttactgccagtcatcactaaagagcttaaagaacttttggaacagaaggacgacatgcagcaccaagtgctggagaggaagtactgcgtcgaattgcttaattctattctcgaggtcctctcctatcaagatgccgcttttacctatcaccacattcaggaaatcatggtgcagcttctgcgcactgttaaccgaactgtcatcaccatgggccgcgaccatatcctcattggggcgtgttgcaattgcggctttccctctagtacacctcactcactaattcagtggctttggggctag

SEQ ID NO: 114251 - DNA, 2676 bp, synthetic construct
  misc_feature 1..2676: note = Description of Artificial Sequence: Synthetic coding sequence
  source 1..2676: mol_type = other DNA
atgaccgctatcctaaaccagatgggcgatcagcactactcattctatattgaaacatttcaaacttcaagcgaattagttgattttttgatggagaccttcataatgttcaaggatctgatcgggaaaaacgtgtaccccggcgactggatggccatgagcatggtgcaaaaccgggtgttcttgagagccataaataaatttgccgagacaatgaaccagaagtttctggagcacaccaactttgagttccaattatggaacaattacttccacctggccgtggcctttatcacacaggatagcctgcagttggagcaattttcacacgctaaatacaacaagatcttaaataaatacggagacatgcgacgcttgattgggttctcgattcgcgatatgtggtacaaactggggcagaataagatctgctttatcccgggaatggtgggccccattctcgagatgacactgattcccgaggctgagctgcgtaaggctactatccctatattctttgacatgatgctgtgcgaatatcagcgatctggcgactttaaaaaatttgagaatgaaattattctgaagctagaccatgaagtggaaggggggaggggcgatgagcagtacatgcaactattagagagcattttgatggagtgcgccgccgagcatccgacaatcgcaaaatccgtggaaaattttgtgaatctggtgaagggtttgcttgagaagctgctggactatcgtggtgtcatgactgatgaatcgaaggataaccgtatgagttgtactgtgaatctgctcaatttctataaggacaacaaccgtgaggagatgtacatccggtacctgtacaaactgagggatctacatctcgattgtgataactatactgaggctgcttacacgcttcttttgcacacttggttgcttaagtggtccgacgagcagtgtgcctcccaggtaatgcaaaccggacagcagcatccgcagacccatcggcagcttaaggagactctgtacgaaaccattatcgggtatttcgataaaggtaagatgtgggaggaggccattagcctttgtaaggaactggccgagcagtatgaaatggaaattttcgactacgagttgttgtcccagaatctgatccaacaagcgaagttctacgagagcataatgaaaattctgcgaccgaagcccgactattttgcggtgggctattacggacagggatttcccagttttttgcgaaacaaggtctttatctaccgagggaaggagtatgaacgaagagaagacttccagatgcagctgatgacccagttcccaaatgccgagaagatgaacacgacttcagcccctggagatgacgtgaaaaatgcgcccgggcagtacatccagtgtttcaccgtgcagcctgtgcttgatgagcatccccgattcaagaacaagcccgtacctgaccagatcatcaacttctataagagcaactacgtacagaggttccattattctaggccagtgcgtagggggacagtggaccccgagaacgagttcgccagcatgtggatcgaacgtacttcctttgtcaccgcatacaaactaccaggcattttgcgttggttcgaagtcgtccatatgtcccagactacgatctcacccttggagaacgccattgaaacgatgtcgaccgccaacgaaaaaatcctgatgatgattaatcaataccagtccgatgagacgctccccatcaaccctctgtccatgctactaaatgggatcgtcgacccagccgtcatgggtgggttcgcaaaatatgaaaaagcctttttcacagaggagtacgtgcgcgatcaccccgaggaccaggacaaattaactcatctcaaagatctaattgcttggcaaataccttttctgggcgcagggattaaaatacacgaaaagagagtgtctgacaacttgagaccctttcatgatcggatggaagaatgcttcaagaacttgaagatgaaggtggaaaaggaatatggggttagggaaatgcccgacttcgatgataggcgggtgggccgcccacgctctatgctgagatcgtatcgtcagatgagcattatcagtctggcctcaatgaactcagattgctctacccctagtaaacccacatctgagtctttcgacttggagcttgccagccccaaaaccccgagggtagagcaggaagagcctatctcaccaggttctactctgcctgaggtaaagttacgcagatcaaagaagcggaccaagcgatccagcgtggtcttcgctgacgagaaagcagccgcagagagcgacctgaaacgcttgagcagaaagcatgagtttatgtctgataccaacctttcagagcatgcagcgatcccactgaaagccagtgttttgagtcaaatgagcttcgccagtcaatccatgcccaccatccccgcactagcgctgagcgtggccggtatcccaggactggatgaggccaacacatccccacggctgagccagaccttcttacagctgagcgacggggacaaaaaaactctcactcgaaagaaagttaaccagtttttcaagaccatgctcgcttcgaagtctgccgaggagggcaagcagatccctgacagtttatccacggacctctag

SEQ ID NO: 114252 - DNA, 6093 bp, synthetic construct
  misc_feature 1..6093: note = Description of Artificial Sequence: Synthetic coding sequence
  source 1..6093: mol_type = other DNA
atgtggaccccaacagaggaggaaaagtatggcgtggtcatatgctccttccgcggctccgtgccccagggcctggtgttagagattggtgagaccgttcaaatactggaaaaatgcgaggggtggtacagaggtgtctccacaaaaaagcctaacgtcaaaggaatctttcctgccaattatatacatctaaagaaagcgattgtgtcgaaccgcgggcagtacgagacggttgtcccgctcgaggacagcatcgtaacggaggtaaccgcaaccctccaggagtgggcgtctctttggaaacagttgtacgtaaagcacaaggttgaccttttttacaagctgcgtcacgtaatgaacgaattaattgaccttcgaaggcaacttctgtcgggccatttgacgcaagaccaggtccgggaagtgaaacgccatattaccgtgaggctcgactggggaaacgaacacctcggcctcgacctagttccacgaaaagattttgaggtggtggatagcgaccagatttccgtgagtgatctgtataagatgcaccttagctcacgccaaagtgtgcagcagagtacttctcaagtcgacacaatgcggccaaggcacggcgagacctgccgcatgccagtgccacaccactttttcttatcattgaaaagttttacttataatacaattggcgaagacacagacgtatttttttctctatatgacatgagagaggggaagcagatctcagagcggttccttgtgcgcctgaataaaaatggaggaccccgcaaccccgagaagatagaacggatgtgtgccctgttcacggacctgtcaagcaaagacatgaagagggatctctatatcgtcgcacacgtcattaggatcggacgcatgctgcttaatgatagcaagaagggtcctccacatcttcattaccgtaggccatacgggtgcgctgtgttatctatcctcgatgtgctgcagtcactcacagaagtgaaagaagagaaagattttgtgttaaaggtctacacatgcaacaatgagagcgagtggtctcagatccacgagaacataattcggaagagcagcgccaagtatagtgcgccctcagccagtcatggcttaatcatcagcctccagctgctgcgaggcgatatggaacagattcgcagagaaaaccctatgatctttaaccgaggattggccattacacggaaactggggtttccagatgtgattatgccaggggacatccgaaatgatctgtacctcactctggagaagggagacttcgagaggggcggtaaaagcgtgcagaagaatatagaagtaaccatgtatgtgctctatgccgatggcgaaatcctgaaggactgcatatcgctgggatccggagagcctaatcgcagctcctatcacagctttgtcctataccatagtaatagccccaggtggggcgagatcataaagctgccaatccccatagaccggttccgcgggtcccatctccgcttcgagtttagacactgtagcacgaaggacaaaggcgagaaaaaactctttgggttcgccttcagcactctcatgcgggatgacgggacgaccctgtctgatgacattcacgaactgtacgtctacaagtgcgacgagaattccacctttaacaaccacgcgctttacttgggtctcccctgttgtaaagaggactataatggctgcccgaacattccatcttctctgatatttcagaggagtaccaaggagtcttttttcatcagcacccagctgagttcaaccaagctgacccaaaacgtggacttgctggccctccttaagtggaaagcattccctgataggatcatggacgtactgggcagactgcggcatgtgtcaggtgaagagattgtgaagtttcttcaggacatccttgatacattattcgtcatcctggatgacaacacagagaaatacggactgctggtattccaaagtctcgtgttcatcatcaatctgttgcgcgacattaaatactttcacttccggcctgttatggatacctatatccaaaagcattttgccggggccttggcatataaagagttaattcggtgtctgaaatggtatatggattgctcagccgagctcatcaggcaagaccacatccaggaggccatgcgggccttggagtatctctttaaatttatcgtccagtcccggattctatacagcagggccacctgcggcatggaggaagaacagtttcgctcctccatccaggagctgtttcagtccatcagatttgtgttgagcctggacagtagaaactccgaaaccctgctcttcactcaggccgccctgctgaacagcttccccactatttttgatgaactcctacagatgtttacagtacaggaggtcgccgagtttgtacggggcacactgggctctatgcctagcacagtccacattgggcagagcatggacgtcgttaaactgcaatccatcgctaggactgtggactctcgcctgttctcattctctgagtcgaggaggatcctgctgccggtggtgctacaccacatccatctccatctgagacagcaaaaagaattgctgatctgtagtggcattttaggtagtatcttcagcatcgtgaagacaagttctctggaggctgatgtgatggaggaagttgaaatgatggtagagtcactcctagatgtacttttgcagactcttttgactattatgtcgaagtcccatgcccaggaagcagttagaggccagcgatgtcctcagtgtactgctgagatcactggtgagtacgtaagctgtctgctctcgcttttgcgtcaaatgtgtgatacacattttcagcacttgctggataatttccagagtaaggatgagctcaaggaatttctgctgaaaattttctgtgtcttccgcaatcttatgaagatgtccgtgtttccccgggattggatggtaatgaggctcttaacctcaaacattatcgtgaccacagttcaatacctaagctcagcattgcataagaacttcacggagactgatttcgatttcaaagtatggaattcatacttcagcctcgcagtgctatttatcaatcagccatcgctgcagctggagatcattacctccgcgaagagaaagaaaatcttggataagtatggggacatgcgagtgatgatggcctatgagctgttcagcatgtggcagaatctcggcgaacataagatccactttattcccggaatgataggccccttccttggagtgacactggttccgcaaccagaggttagaaatatcatgattccgatctttcatgatatgatggactgggagcagaggaaaaatgggaactttaagcaggtggaagccgaactcattgataaactggattcaatggtgagcgagggcaaaggggatgaatcctatagagagctcttcagtctgctgactcaattatttggcccatatcctagcctgctggagaaggttgagcaagaaacatggcgcgaaaccggtatatctttcgtcactagtgttactcggctaatggagcgcttgctggactaccgggattgcatgaaaggcgaagagaccgagaataaaaaaataggctgtactgtgaacctgatgaacttctataagtcggagattaataaagaggagatgtatatacgatacatccacaaattgtgtgacatgcatttgcaagcagaaaactataccgaggccgcctttacgctcctgctatattgcgagttactacaatgggaagacaggccactccgggagttcctgcactatcccagtcagactgagtggcagcggaaagaagggctctgccgtaaaatcatccactactttaacaagggtaagagctgggaatttggaatccctctctgcagagaactcgcctgccagtacgagagtctgtatgactatcaatctctgagctggatcagaaagatggaggctagttattatgacaacattatggagcagcagcgtctggagccagaattcttcagagtcgggttttacggacgcaaattcccattcttcctgcgcaataaggaatatgtgtgcaggggtcacgattacgaacggctggaggcattccagcagaggatgctctcagaatttccccaggccgtcgctatgcagcaccctaaccaccctgacgatgctatcctgcagtgcgatgcacagtatctgcaaatttatgctgtgaccccaatccctgattacgtggacgttctacagatggatagggtccctgacagggtgaaatccttttaccgtgtgaacaatgtacgtaaattccggtacgaccgtccttttcataagggccctaaagataaggaaaacgagttcaagtcactgtggatagagcggacaactctcaccctgacccactcacttccaggcattagtcggtggttcgaggtcgaacgaagggagctggtggaagtgtcaccacttgaaaacgccatccaggtcgtggaaaataagaaccaggagctgcgctcccttattagccaatatcaacacaaacaggtgcacggcaatatcaaccttctgagcatgtgtctcaacggggtgatagacgcggccgtgaatggcggaatcgcgcggtatcaggaggctttttttgataaggattacatcaacaagcatcctggcgacgcagagaagattacccagctgaaagaactcatgcaggaacaggtgcacgtgttgggtgtcggacttgcagtccacgagaaatttgttcaccccgaaatgcggcccctgcacaagaaactgatcgatcaatttcaaatgatgagggcttctctgtaccacgaattcccaggtttggacaagctgtcacccgcatgttcaggcacctcaactccccgaggcaatgtcctagcttcccactctccaatgtcgccggaatcgattaaaatgacccacaggcatagtcccatgaacctgatgggcaccggtcgccactccagttccagtctttcgagtcacgcgtccagcgaagcggggaacatggtgatgttgggcgatggtagcatgggcgatgcacccgaagatctgtaccatcatatgcaactggcctacccaaaccccaggtatcagggatcagtgacgaacgtttccgtgttgtcatcctcccaggctagtccctcgtcctcaagcctcagctctacccattcagccccttcccagatgataacgagcgccccatcctcagcccgggggtccccaagcctgccggacaaatatcgtcacgcaagagagatgatgctgctgcttcctacatatagagaccgccccagttctgctatgtaccccgctgccattctggaaaatgggcagccccccaatttccagagggcactgtttcagcaggtggtaggtgcgtgcaaaccctgtagcgatcccaacctgtctgtggccgagaagggtcactacagcctgcattttgacgcttttcatcatccacttggcgatactccacccgccctgcctgccaggactctgcgaaaatcaccacttcatccgatccccgcgtcacctaccagtccccagtctgggttggacggctctaactcaacacttagcgggtcggcgagctcgggagtctctagcctgagcgagtcaaacttcggtcatagtagcgaggccccacctaggaccgatacaatggacagcatgccgtcgcaggcttggaacgctgatgaagatctggaacctccatatctgcctgtgcattatagcctatcggagtctgctgtcttagactccattaaggcacagccatgccgttcacacagcgcgccaggttgcgtgataccacaggatccaatggacccaccagcacttccaccaaaaccgtatcatcctaggctgccggcacttgaacatgacgaaggcgttctactcagggaagagacagagcgaccccgaggactgcataggaaagctcccctacctcccgggtcagccaaagaagagcaggctcgaatggcctgggaacacggacgcggcgaacagtag

SEQ ID NO: 114253 - DNA, 1785 bp, synthetic construct
  misc_feature 1..1785: note = Description of Artificial Sequence: Synthetic coding sequence
  source 1..1785: mol_type = other DNA
atgccaaagtggctggaagagaccgagaacaagaaaatcggttgcaccgtcaacctcatgaatttctacaaatctgaaatcaacaaagaggagatgtatattcggtatatccacaagctgtgtgatatgcatttacaggcagagaattatactgaagctgcatttaccttgcttctctactgcgagctgttacaatgggaggatagacccttgcgcgaatttctgcactatccctcccaaaccgaatggcagcggaaggagggactgtgtcggaaaataatacactacttcaacaaaggcaagtcctgggagttcggcatacccctgtgtcgggagctcgcctgccagtacgaaagtctatacgactaccagtccctaagttggatacgaaagatggaggcttcctattacgataatattatggagcagcagaggctggagccagagttctttcgggtgggcttctacggcagaaagtttcctttcttcttaaggaacaaggagtacgtgtgtaggggacatgattatgaaaggctggaggcctttcagcaacgcatgctgtctgagttccctcaggctgttgctatgcagcatccgaatcaccctgatgatgctattctacagtgcgatgctcaatatctccaaatctacgccgtgactccaatccctgactacgtcgatgtgctgcagatggatagagtgcctgatagagtgaagtcattttatagagtcaacaacgtgcggaaattcagatatgatcggcctttccacaaaggcccaaaagacaaggagaacgaattcaaatctctgtggatcgagagaaccaccctgaccctgacccacagcttgccaggcatttctcggtggttcgaggtggaaaggcgggagctggtggaagtgtccccattggaaaacgcaatccaggtggtcgagaacaagaaccaggagttaaggtctctcatatcacaatatcagcacaagcaggtgcacggtaatatcaatctgctcagtatgtgcttgaacggcgtgatcgacgcagccgtgaatggaggtatagcgagatatcaggaggctttttttgataaggactacattaacaaacacccgggcgacgcggagaagatcacacagctgaaagaacttatgcaggagcaggtccatgtccttggggtgggcttagccgtgcatgagaaattcgtgcaccctgagatgcgaccactacacaagaagctaattgatcaattccagatgatgcgtgcttcactttaccacgaattcccagggctggataagttaagtcctgcttgctcaggcacaagcacccccagaggcaatgtcctggcctcacactcacctatgagccccgagtccattaaaatgacacatcgacactctcctatgaacctaatgggaactggtagacacagctctagttcacttagctctcacgcctcctctgaggcgggcaatatggtgatgttgggtgatgggtccatgggcgacgcacccgaggatctttatcaccacatgcagctcgcctatcccaatccacgctatcagggaagtgtaacaaatgtctcagtgctgtcatctagccaggcctcaccctcaagcagttctttatcctcgactcatagcgccccctctcaaatgattaccagcgccccctccagcgcgaggggaagccccagccttcctgacaagtaccggcatgccagggagatgatgctgctgcttcctacttaccgcgacaggccgagcagcgccatgtacccggccgcctag

SEQ ID NO: 114254 - DNA, 5778 bp, synthetic construct
  misc_feature 1..5778: note = Description of Artificial Sequence: Synthetic coding sequence
  source 1..5778: mol_type = other DNA
gtcatcgccagtttccgcgggacggtcccatacggcctgagtcttgagataggtgataccgtgcagatacttgagaagtgtgacgggtggtatagagggtttgctctgaagaacccaaatatcaaggggatcttcccatcatcctatgtgcatttaaagaatgcctgtgtcaaaaataaggggcaatttgagatggtcattcccacagaggactctgtgattaccgagatgacatctaccttgcgcgattggggcactatgtggaaacagttgtacgtcaggaatgaaggcgatctgttccatagactctggcatattatgaacgaaatacttgatcttaggaggcaggtgttagtggggcacctgacccatgatagaatgaaagacgtgaagcgacatatcactgcaaggctcgattggggcaacgaacagctaggcctcgatctggtaccacgaaaagagtacgctatggtggaccccgaagatatatccatcactgaactgtatcgtctcatggagcaccggcaccgcaagaaagacacacccgtccaggcatcctctcaccacctctttgtgcagatgaagtctctcatgtgttccaacctgggtgaagaactggaggtaatcttcagccttttcgactctaaggagaataggcctatatctgaaagattctttttgcggctcaacagaaacggactccctaaagctcccgacaagcccgaacgccactgctccctgttcgtggatctggggagctctgagcttagaaaagacatctacatcactgttcatattattcgcatcggccgcatgggggctggtgagaaaaagaacgcttgcagtgtccaatataggcgacccttcgggtgtgctgtcctgtcgatcgccgacttgctgaccggggagactaaagatgatttaatccttaaagtgtatatgtgtaacaccgagtctgaatggtatcagatccacgaaaacataatcaagaagctcaacgccaggtacaacctcactgggtcaaacgcagggttggctgtgagcctacagctgcttcacggtgacattgagcagattagaagggagtatagtagcgtattcagccacggcgtgagtatcacgaggaaattgggtttctcgaacattattatgcccggcgaaatgcgtaatgacctttacatcacgatagagcggggtgagttcgaaaaaggcggcaaatctgtggcccgcaatgtggaggtgacaatgtttattgtggattccagcggtcagacactaaaggatttcatttcttttggatctggcgagcctcccgccagtgagtaccactcttttgtgctttatcataataactccccaagatggagtgagctgcttaagctgcccattcctgtggataaattcaggggggcccatattagatttgaattccggcattgctccacgaaagagaagggcgagaagaaactttttggctttagcttcgtcccactaatgcaggaagacggacgaaccctgcccgatggaacacatgaactcatagtgcataagtgtgaggagaatacgaacttgcaggacaccaccaggtatctgaaactgccattctccaagggcattttcctcggcaataataaccaggcaatgaaagctacgaaagaatctttctgcatcacgtcattcctatgctcaacaaagctgacacaaaacggggatatgttggatctcctgaagtggcgcacccatcccgataagatcaccgggtgtcttagcaagcttaaggagattgacggatctgaaattgttaaattcctgcaggataccttggacactctgtttggaatattggacgagaattcacagaagtatggctctaaggtgttcgattcactggttcacattattaacctcctccaggattccaagttccaccactttaagcccgtgatggatacgtatatagaaagtcacttcgccggggccctggcctatcgggatttaattaaggttctcaagtggtacgtggacagaatcacggaggccgagcggcaggagcatatacaggaagttctgaaggcgcaggagtacattttcaaatatatcgtgcagtctcggcggcttttctccttggccaccggcggacagaacgaagaggagtttcgctgttgtatccaggaactgcttatgagcgttagatttttcctctcccaggagtccaaaggatctggagcattgagccaaagtcaagccgtgtttctcagctcctttcctgctgtctatagcgagctgctcaagctgtttgatgttcgtgaagttgccaatttagtgcaggatactctggggtctctgcccacgattctgcacgtggacgactccctccaggctattaaactccagtgcattggaaagaccgtagagtcacagttatataccaaccccgactcccgttacattctgctgcctgtggtacttcaccacctccacatccatctgcaggaacagaaagatctgatcatgtgtgctcgaatcctgagcaatgtgttttgtttgattaaaaagaattctagcgagaagtctgtcctggaagaaattgacgttatagtagcttcccttttagacatcttactcaggaccattctcgagataacgagtcggccacaaccctcttcaagtgctatgagattccaatttcaggacgtaactggggagttcgtggcgtgcctactgagcctgctgaggcagatgactgaccgccattaccagcagttgctggattcattcaacaccaaggaagaattgcgcgacttcctgctgcaaatcttcaccgtcttcaggatactgattaggcccgaaatgtttccaaaggattggaccgttatgagattggtagccaataatgtgatcatcaccaccgtgctgtacctaagcgacgctctgcggaagaatttcttaaacgagaactttgactataagatatgggattcatacttctacctggcggtaatcttcataaatcagttgtgcctccaattggaaatgttcacgccttctaagaagaagaaggtgctggaaaaatacggcgacatgagggtgaccatgggctgtgaaattttttccatgtggcagaatctcggcgaacacaaactacactttattccggccctgattggaccttttctggaggtgacccttatcccccagcctgatctccggaacgttatgatcccgatatttcacgacatgatggattgggagcagaggaggtccggtaattttaagcaggtggaagccaagcttattgacaaactagattcgctgatgtctgagggcaaaggggatgaaacctaccgcgagctttttaattccattattcccctgttcgggccttatccatctcttctgaagaaaatagaaagggagacgtggcgggaatccggagttagcttaattgcgaccgttactaggctcatggagcggttgctcgattaccgggactgcatgaagatgggagaggtagacggcaagaagatcgggtgcaccgtgtcactgttgaacttctataaaactgaacttaataaagaggaaatgtacatccggtacatccacaagctgtacgaccttcacctgaaagcacagaattttactgaggccgcatacaccttgttactttatgatgaattgctggaatggtccgatcggcctttgcgggagttcctgacgtaccccatgcaaaccgagtggcagaggaaggaacatctgcatcttactataatccagaattttgacaggggcaaatgctgggaaaacggcataatcctgtgccgtaagatagctgagcagtacgagtcgtattatgactacagaaacctgagcaaaatgcgtatgatggaagcctctctctacgataagattatggaccagcagcgtcttgaacccgagtttttcagggtgggattctatggcaagaaatttccattttttctgcgcaacaaggaattcgtgtgtcgcggtcacgactatgagcgcctggaagccttccagcagaggatgctgaacgagtttccccacgcgatagccatgcagcacgcaaaccaacccgatgaaactatatttcaagctgaggctcagtatctacaaatctacgctgtcacaccgataccagaatcgcaagaagttttgcagagggagggagtccctgataacattaagagtttctacaaagtgaaccacatctggaagttccgctacgatagaccctttcataagggcaccaaagacaaggagaatgagtttaagtcgttatgggtggagagaacaagtctgtatctggttcagagtcttcccggcatctcaaggtggttcgaagtcgaaaaaagggaagtcgtggagatgagtcccttagagaatgcaatcgaggtactggagaataagaaccaacagttgaaaacacttatttcccaatgtcagactcgccagatgcaaaatattaaccccttaacaatgtgtctcaacggagtgatcgacgctgccgtcaacgggggcgtatctcgctatcaggaggcctttttcgtgaaggaatacatcctaagccatcccgaggatggtgaaaagatagctcgcctcagggagcttatgctggagcaggcccagattctcgagtttgggctggcggtgcatgaaaaattcgtccctcaggacatgcgacctttgcacaagaagctagtggaccagttcttcgttatgaagagttctcttggaatccaggagttcagcgcatgcatgcaggcttccccagttcattttcctaatggcagcccccgtgtttgccggaattctgcacccgctagtgtgagtcctgacggaacaagggtcatacccaggagatcgccgctgtcatacccggctgttaaccgctattcaagctcatccctcagctcacaggcttctgccgaagtgagcaatatcacagggcagtccgaatcatctgacgaggtattcaacatgcagccaagtccatccacgtcatctctcagttctacgcacagcgcttccccgaatgtcacatcctcagccccatcatcagcacgggcttcacctttattgagtgataaacacaaacacagccgcgaaaattcctgtctgtcaccacgggagagaccttgcagcgcgatttatcccacccccgtggagccttctcagcggatgctgttcaaccacatcggcgacggtgccctgccaaggtccgatccgaacttgtccgcgccggaaaaagcctctcctgcgaggcataccacctccgtgtcacctagtcccgccggtagatcaccgctgaagggctccgtgcagtcatttacaccatccccagttgaataccactccccgggtctgatttcaaatagtccggtgttgtccggttcttactcatcgggcatctccagcctgtcaaggtgtagcaccagtgagaccagcgggttcgagaatcaggtgaacgagcaatcagctccactgcccgtccccgtgcccgtccccgttccgtcctacggaggtgaggagcctgtgaggaaggagtctaaaacccctccaccgtattccgtttatgagcggacgcttaggaggccagtgcctctgccacacagcctgagcatcccagtgactagcgaacccccagctttacctcccaaaccactcgcagctagatcatctcacctggagaacggcgctcgcaggacggatcccggtccccgccccaggcccttgcctcgaaaagtgtcccagctttag

SEQ ID NO: 114255 - DNA, 5865 bp, synthetic construct
  misc_feature 1..5865: note = Description of Artificial Sequence: Synthetic coding sequence
  source 1..5865: mol_type = other DNA
gtcattgcctcctttcgggggactgtgccctacggactgagtctggaaattggcgacacagtacaaatactggagaagtgcgatggttggtatcgcggcttcgccctgaagaaccctaacatcaagggcattttcccaagcagttacgttcatctgaagaatgcatgcgtgaagaacaagggccaatttgaaatggtcattcctacagaagactccgtgataacagaaatgacatctacactccgggactggggtactatgtggaagcagctgtatgtgcgcaacgagggcgatttattccacaggttgtggcacattatgaatgagatcttagatctgcgcagacaagtgctggtgggccatctgacacatgaccggatgaaggacgtgaagagacacatcaccgctcggctcgactgggggaacgagcagctcggactcgacctagtgccgcggaaggagtacgccatggtggatcccgaggatatctcaatcacagaactttatcgcctaatggagcacaggcaccgaaagaaagacaccccagtgcaagcgtctagccaccatctgttcgttcagatgaaaagtttgatgtgctcaaacctgggcgaggagctggaggtcatcttctcactgtttgattccaaggagaacagaccgatatccgaaaggttcttcttacgcctgaacagaaatgggctgccaaaagctcctgataaacccgaacgccattgttccttgttcgtagatctcggaagtagcgaacttagaaaagacatttatatcactgtccacatcattcgcattggcagaatgggtgccggagagaaaaagaatgcatgctccgtccagtatcggagaccgtttggttgcgctgtcctaagcatcgctgatctcttgacaggggagacgaaggatgacctaatcctcaaggtgtatatgtgcaacacagagagcgagtggtaccagatccacgaaaatatcatcaagaagctcaacgctagatacaatttaaccggctccaatgccgggctggcagtgtctctgcagctcttacatggggatattgagcagatacggcgggagtactctagcgtgttctcacacggggtgtctattacaagaaagttgggcttctctaatatcatcatgcctggggagatgaggaatgatctgtatatcacgattgagcggggggagttcgagaagggcggaaagtctgtggctaggaatgtcgaggttaccatgtttatagtcgacagcagtgggcagacattgaaagacttcatcagttttgggtcgggggagcctcccgcgtccgaatatcactcatttgtactgtatcacaacaactctccaagatggagtgaactactaaagcttcccattcccgtggacaaatttcggggtgcccatattcggttcgagtttcgtcactgctctaccaaagagaagggcgaaaaaaaactgtttggattctcctttgtgcctctcatgcaggaggacggcagaaccctccccgacgggacacacgagctgatcgtacataaatgtgaggaaaatactaatttgcaagatacgaccaggtatctgaaattaccattcagtaaagggatcttccttgggaataataaccaggcaatgaaggccacaaaagagagcttttgcatcacaagcttcttgtgcagcacgaagctcacccaaaatggggatatgttggacctactgaagtggcggacacaccccgacaagatcaccggttgcctatcaaaactgaaagagattgacggctccgaaatcgtcaagttcttgcaggacacacttgatactctgttcgggatcctggatgagaacagccaaaaatatggctcgaaggtcttcgacagtctcgtgcatatcatcaatctgctccaagacagcaagttccaccattttaaaccagtcatggacacttatattgagagccacttcgccggagcgctggcatatagggatttgatcaaggtgctgaagtggtatgtggatcgaatcacggaggcagaacgacaggagcatatccaggaagtcttgaaggctcaggaatatatctttaaatatattgttcaatccagaagattattctcactggcgacgggaggccaaaatgaagaggagtttcgttgctgcatccaggagctcttaatgtctgtgagatttttcctgtctcaggagtccaagggctccggagcattaagccaatcccaggcagtattcctgtcctctttccccgcagtctactctgagcttcttaaattgttcgacgtcagagaggtcgccaatctagtgcaggatacactcggttctctccccaccattctgcatgttgatgactccctgcaggccatcaagctgcagtgcatcggaaaaactgtggaatctcagctgtatacaaatcctgacagccgttacatccttctgccggttgtgttacaccacctccacattcacctgcaggaacagaaggatttgataatgtgcgcaagaatactgagcaatgtgttctgccttatcaagaagaactcctcagaaaagtcagtacttgaggagatcgatgtcatcgtggcatccctgttagacatcctcctgcgcacgattcttgagatcacatctcgtccacaaccctctagctcagcgatgcgattccagttccaggacgtgaccggggagttcgtcgcttgcttgctaagccttctgcgacagatgaccgaccggcactaccagcagttactggactcctttaacactaaggaggagttgcgagatttcctgttacagattttcacggtcttcagaattctgatacggcccgagatgtttcccaaagactggacggtgatgcggctggtggctaataatgtcatcattacaaccgtcctttacctgagcgacgcccttcgtaagaacttcctgaacgagaattttgattataagatatgggactcgtacttctacctggctgtgatttttataaatcagctttgcctgcagctggagatgttcaccccatcaaaaaagaagaaagtcctggagaagtatggagacatgcgcgtgactatggggtgtgagatttttagcatgtggcagaatcttggtgagcacaagctgcacttcattcctgccctcataggcccattcttggaagtgacactcatcccacagccggatctgcgcaatgtgatgattcctatcttccacgacatgatggactgggagcaacgccgctctggcaacttcaagcaagtggaggctaagttaatcgataagcttgattccctaatgagcgagggcaagggggacgaaacatatcgcgaattgttcaattctatcctgttgaagaaaattgagagggagacttggcgtgaaagtggcgttagcctcattgccactgttacacgactgatggaacgacttctggactatcgcgattgcatgaaaatgggtgaggtggacgggaagaaaatcggctgcacagtgagcctcttaaatttctataaaactgagctgaacaaggaggagatgtacatacgctacattcacaagttatatgaccttcatttgaaggcacagaacttcacagaggctgcttacacactgctgctctatgacgagcttttggagtggtcagaccgccccctcagggagtttctcacataccccatgcagactgaatggcaacgcaaagagcacctgcacctcacaatcatacagaacttcgaccggggaaagtgttgggagaacgggattattctgtgccgtaaaatcgcagagcagtatgagtcctattatgattaccgcaatctgagtaagatgaggatgatggaggcgtccttgtatgacaaaatcatggatcagcagcgcctggagccagaattctttcgcgttgggttctatggaaagaagtttccattttttctgcggaataaagagtttgtgtgccggggccatgactatgagaggctcgaagcttttcagcagaggatgctgaacgaattcccacacgctattgcaatgcaacatgctaaccagcccgatgaaaccatctttcaggcagaggcccaatacttgcagatctacgctgtcacccctatacctgaaagtcaggaggtgctacagcgagaaggagttccagacaatataaagtcattctacaaggttaaccacatttggaaatttcgttacgaccgcccatttcataaaggcaccaaggataaggaaaacgaattcaagtcactctgggtggagaggacgtctctctaccttgttcaaagcctgccgggcatctccaggtggttcgaggtcgagaagagagaagttgtcgagatgtccccattagaaaacgctatcgaagtgctcgagaacaaaaatcagcagctcaaaaccctgattagccagtgtcagacccgtcaaatgcaaaatatcaacccactgactatgtgtcttaacggggttattgacgccgctgtgaatggcggcgtgagtcgctaccaagaggctttttttgtgaaggaatacattctttctcatcctgaagacggcgagaaaattgctaggctccgggagctcatgctcgagcaagcacagatattagaattcgggctagcagtgcatgagaagttcgtgccccaggacatgcggccactccataagaaactcgtggaccaattcttcgtgatgaagagctcactgggaatccaagaattttccgcctgcatgcaggccagtcccgtacacttccctaatggatctcctagagtgtgtcggaacagcgcgccagcaagcgttagccccgacggcacccgtgtgatccctcgccgaagtccactcagttaccccgcggtgaaccgatacagctcaagcagcctgtcttcccaggcctctgctgaggtatctaacatcacgggccagagcgaatcctccgatgaggtgttcaacatgcagcctagcccttccacctcctcactgagctctacccactccgcctcacccaatgtgaccagcagcgccccgtcgtcggccagagctagccccttactttcagacaaacacaaacactctcgtgagaatagctgtttgagtcctagagaacgaccttgcagtgcaatctatcccacccccgttgagccgagccagaggatgctatttaatcacatcggggatggagcactgccccgaagtgaccctaatctctcagctcccgaaaaagctgtaaatcccacgccctcaagctggtctctcgacagtgggaaagaggcaaagaacatgagcgactcaggcaaactcatttctccacctgtgcccccgcgccccacgcagaccgcatcccctgcaagacacaccacatcagtcagccctagtcctgccggcagaagtcccctgaagggatctgtccagagcttcacgcctagtcctgtggagtaccatagtcctgggctgatcagtaattcccccgtgctgtcgggtagctactccagcgggatttcctcactgtctagatgctccacttccgagacatccggctttgagaatcaggtcaacgagcagagtgctcccctacctgtgcctgtaccagtgcccgtgccctcatatggtggcgaagagcccgtcaggaaagagtccaagactccgcctccgtacagcgtttacgaaagaacgctcaggcggcccgttcccctccctcatagcctgtccatcccagtcacgagtgagccacccgcccttccacccaagccgctcgcagctcgaagttcgcatttggagaatggtgctcgcagaaccgacccaggccccaggcctcggccgctacctcgaaaggtgagccagctttag

SEQ ID NO: 114256 - DNA, 5928 bp, synthetic construct
  misc_feature 1..5928: note = Description of Artificial Sequence: Synthetic coding sequence
  source 1..5928: mol_type = other DNA
atgtggattccgacggaacacgaaaaatacggtgtggtgattgcctcttttcggggcaccgtgccctacggattgagccttgagataggtgataccgtgcagattttggagaaatgcgacgggtggtaccgggggtttgctctgaagaatcctaacatcaagggtatttttccaagctcatatgtccatcttaaaaacgcgtgcgtcaagaacaaaggacaatttgagatggtcattcccaccgaagactctgtgattacagagatgacttctaccctgcgggactggggaacaatgtggaaacagttgtatgttaggaatgagggggatctctttcatagattgtggcatattatgaatgagatactcgatctgagacggcaggtcctggtaggacatctgactcacgatcgcatgaaagacgtgaagagacacatcaccgcccgcctggattggggaaatgagcagctgggcctcgacttagtgccaaggaaagagtatgcaatggtcgatcctgaagatatttctattacagagctgtaccggctaatggagcacagacaccgtaagaaagatacccccgttcaggccagcagccatcacctctttgttcaaatgaagtccctcatgtgctccaacctgggtgaggagcttgaagtgatcttttccctgtttgatagcaaggagaatcgaccaatctcggagcgattttttctgagactcaacaggaacggtctgcccaaggcacctgataaaccagagagacattgttctctctttgtcgatcttggatcttctgaactacggaaagacatttacattactgtgcatataataagaattggccgaatgggggccggtgaaaagaagaatgcttgctccgtgcagtatagacgcccatttggatgtgctgtgctgagtatcgcggatctgcttacaggcgaaacaaaggatgatctgatcctcaaagtgtacatgtgtaataccgagtccgagtggtaccagatccacgaaaacatcatcaaaaaacttaacgccagatataacctgacaggatcgaacgcaggacttgcggtttctttacagctcctgcacggagatattgaacaaattcgcagagaatactcaagtgtcttttcccacggggtttcaatcactaggaagctggggtttagtaatattatcatgcccggcgaaatgaggaatgacctttacattaccatagagcggggggaattcgagaagggcggcaagagcgtggctcgcaatgttgaagtgaccatgtttatcgtcgatagcagcggtcagaccctcaaggacttcatctcatttggctcaggggaaccgccggcatcagaataccatagttttgtattgtatcacaataattcaccccgatggagtgaattactgaagttacccatccctgttgacaagtttcggggcgcccacatccgtttcgagttccgccattgctcaaccaaggagaaaggagaaaaaaagttgttcggctttagctttgtccctctgatgcaagaagacgggagaactctgccagacggcactcatgagctgatagtgcataaatgtgaggagaatacgaatctgcaggacactactaggtacctgaagctgcctttcagtaagggcatctttctcgggaacaataatcaagccatgaaggccacaaaagaaagcttctgtatcacatcattcctgtgctcgaccaaacttacacaaaatggcgatatgttagatcttttgaagtggcggacccatcctgacaaaatcaccggctgcctgagcaaactgaaggaaattgatggttctgagatagtcaagttcctgcaggacactctggacaccctgtttggtatcctggacgagaactctcagaagtatgggtcaaaggtttttgatagccttgtacacattataaacttgctccaggacagcaagttccaccattttaagcccgttatggatacatacattgagtcccatttcgccggagcccttgcttaccgcgacctgatcaaagtgctgaagtggtatgtagatcgaataacggaggccgagcgacaagagcacattcaggaggtcctgaaggcccaagagtatatcttcaaatacatcgtgcagtctcggcgtctcttctccctggccacggggggacagaatgaggaagagttccgctgttgtattcaggagctgctgatgagcgttcggttctttttatctcaggaatccaaaggaagcggtgcgctgtcccagtcgcaagccgtgttcctctcaagcttcccggctgtctactccgagctgcttaagttgttcgacgtgagagaagtggccaatctagtgcaggacactctcggttcactgccgacgattctccatgtagacgactctttgcaagccattaagctgcagtgtatcggcaagactgtggaatcccagctttacacaaacccggatagcaggtacattctgctccctgtcgtgttacatcatttgcacatccatctgcaggagcaaaaggacctcataatgtgcgccaggatcttgtccaatgtcttttgcctgataaagaaaaattcatctgagaagtcggtgcttgaggaaattgatgtaattgtggcttctctgctcgatatcttgctgagaacgatactcgagatcacctccaggccacagccctcgagctcagccatgagatttcagtttcaggacgtgacaggtgaattcgtggcctgcctgctctctctgctgagacagatgaccgatagacattaccagcaactgttggactcattcaacacgaaggaggaattacgggacttcctgctgcagatttttactgttttccggattctgattcggccagaaatgtttcctaaagactggactgtgatgcggctggttgccaacaacgtgattattaccacagttttatatttatcagatgcgctgcgaaaaaatttcctgaatgagaacttcgactataagatctgggacagttacttctacttagcagtgattttcattaaccagctctgcctccagctcgagatgttcacaccttccaagaagaagaaggtgctggagaagtacggggacatgcgcgttacaatgggatgcgagatctttagtatgtggcagaatttgggagaacacaagctgcattttatacccgccctcattgggcccttcctcgaggtcactctaatacctcagccagatctgagaaacgtgatgatcccaatttttcacgacatgatggattgggagcagagacgtagtggaaatttcaaacaggtagaggcaaaacttatcgataagctcgactccctaatgagtgagggcaagggggatgaaacctacagagagctgtttaactctatcattccactcttcggaccataccccagccttcttaagaaaatcgagagggagacttggagggagtctggcgtttccctcattgccaccgtaaccagactcatggaacggctgcttgactatagggattgtatgaagatgggggaagtggatgggaaaaagataggttgtaccgtgtctttgcttaatttttacaagaccgagctcaataaggaagaaatgtacatacggtacatccacaaactgtacgatctgcacctgaaggctcagaatttcactgaagcagcctatacactgctgctgtatgacgaactgctggagtggtccgaccgcccactccgggagttcctgacttaccctatgcagacggaatggcagcgaaaggagcatctgcatctgaccatcattcagaacttcgatagggggaagtgttgggagaacggcataatcctgtgccggaaaatcgccgagcagtatgaatcttattatgactaccgcaatctgagcaagatgaggatgatggaggcttcattgtatgacaagattatggatcagcaacgcctggaaccagagtttttccgcgtgggcttctacggcaagaaattccctttctttttgaggaacaaagaattcgtctgtagaggccacgattatgagcggctggaggccttccaacagaggatgcttaatgagtttcctcacgctatagcgatgcaacatgccaatcagcccgacgaaacgatcttccaggctgaggcccagtatctgcagatatacgcagtcactcctatcccagaatctcaggaagtgctgcagcgggagggggtccctgataacatcaaatcattttacaaggtgaatcatatctggaagttcaggtatgaccgcccgtttcacaagggcaccaaggacaaggagaacgaatttaaatctttatgggtggaacggacgtccctctatcttgtgcagtcgctgcccggcatttcccgctggtttgaggtggaaaagcgcgaggtggtggagatgtctccgctcgagaacgcaatcgaagttctggaaaataaaaaccagcaactgaagacgctaataagccagtgtcagactagacagatgcagaatatcaaccctctgacaatgtgcctgaatggggtgatcgatgccgccgtgaatggcggggttagccgttatcaggaggccttctttgtgaaggaatacattctctcccatcccgaggacggcgaaaagatcgccagacttagagagcttatgctggagcaggcgcagattttagaatttggactagccgttcatgagaaattcgtccctcaggacatgcgacctttgcacaagaaactcgttgaccagttctttgttatgaaatcatccttagggatacaggaattttctgcatgcatgcaagctagtccagtccattttccgaatgggtctccacgggtgtgtcgtaatagtgcaccagctagtgtttctcccgacggcacgcgggttattcccagacgatccccactgagttatccagccgttaatagatacagttcaagttcactctcctctcaggcttcggcggaggtgtccaatatcactggacagtctgaatccagtgacgaagtatttaatatgcaaccctctccctcaactagcagcctgtcctctactcacagtgcttccccgaacgtcacgagtagtgcacccagctccgcacgtgcctctcctttgttgtcagataaacacaagcactcacgggagaattcctgcctcagtcctcgcgagagaccatgtagcgctatctaccctactcctgtcgagccaagccaacggatgttatttaaccacatcggcgacggggcccttccgaggtccgatccgaacttgtccgcaccagagaaagctgtcaacccaactcctagcagttggtcactcgattccgggaaggaggccaagaatatgtccgattccgggaaacttatttccccccctgtcccgcccagacccacacagaccgcctcgcctgctcgccatactacctctgtgtctccatctccagcggggaggagccccctaaagggctccgttcagagctttacacccagccccgtggagtaccattcgccaggtctcatctcaaattcgcctgtgctcagtgggagctactcttcaggcatcagcagcctgtcacggtgctcgactagcgagacctccggcttcgaaaaccaggttaatgaacagtctgccccattgccggtccctgtgccagtgccagtccctagctacggaggggaagaacccgtccgaaaagaatcgaagactcctcccccatattcagtgtacgagcgaacattgagacgccccgtgcccttaccacactcacttagcatccctgtgacaagtgaacccccggccttaccaccgaaaccccttgctgcacgttcttcccatttggaaaacggggcccgtagaactgaccctgggccaaggccaaggcctctgcccagaaaggtgtcacagctatag

SEQ ID NO: 114257 - DNA, 5901 bp, synthetic construct
  misc_feature 1..5901: note = Description of Artificial Sequence: Synthetic coding sequence
  source 1..5901: mol_type = other DNA
atgtggattccaaccgagcacgagaagtacggcgtggtaattgcctcatttcggggcaccgtcccctacggtctgtctctggaaattggagacacagtgcagattctcgagaaatgcgatggatggtatcgcgggttcgctctgaaaaatcctaatattaaggggatcttcccttcaagttatgtgcatctaaaaaacgcgtgtgttaagaataagggacaattcgaaatggtaatccccacagaagactccgtgatcacagagatgacatctactcttcgagattggggtaccatgtggaagcagctgtacgtgcgaaacgagggcgacctgtttcataggttatggcacattatgaacgaaattctggatctgagacgccaggttttggtgggccacctcacacatgatagaatgaaggatgtgaagagacacatcacagcgcgcctagactgggggaacgagcaactgggactcgatcttgtccccaggaaggaatacgccatggttgatcccgaggacattagtattactgaactgtaccggttaatggagcaccgccaccgcaaaaaggatacccccgtacaggcctcatctcatcatctctttgtgcagatgaaatccttgatgtgttccaaccttggtgaagagctggaagtcatttttagtctgttcgacagcaaagagaaccggcctatctcggaaaggttttttttacgactaaacaggaatgggttgcctaaggccccagacaaaccggagcgtcactgcagtctctttgtggatctcggatcctccgagcttagaaaagacatctacataacagttcacatcatccgcatcggaaggatgggagctggcgagaaaaaaaacgcctgtagcgtccagtatcggcgtcctttcggttgcgccgtgctgagcatcgctgatctgctcacaggtgagacaaaggatgacctaatcctcaaagtgtatatgtgcaataccgaatcggagtggtaccaaatccacgagaatattataaagaagctcaatgctaggtataacctgacaggttctaacgctgggctggccgtatccctccagttactgcatggagatatcgagcaaattagacgagaatattcatccgtgtttagccatggagtctctatcacacgaaagctcgggttttccaatatcattatgccaggagagatgcgcaatgacctgtacatcaccattgagaggggcgaattcgaaaaaggggggaagagcgtcgctcgaaacgtggaagtaaccatgtttatagtggacagcagtggccagactctcaaggacttcatttctttcggctcgggagaaccaccagcctcagaataccatagcttcgtgttataccataacaatagcccccgttggagcgagttgctcaaactgcctatcccagttgacaagttcaggggagcgcacatcagattcgaatttcggcactgctccacaaaagagaagggcgaaaaaaagttgtttggtttttcctttgtgcccctgatgcaggaagacggccgcacgctacccgacggaactcatgaactgatcgtgcataagtgtgaggaaaacaccaacctacaggataccacacgttacctgaaactcccctttagcaaagggatttttcttgggaacaacaaccaagcaatgaaggcgaccaaggagtctttttgcataaccagctttttatgctccacaaagctgacccagaacggtgacatgctcgacctcttgaaatggcggactcaccccgacaaaatcacaggatgcttgtcaaagctgaaggagatcgacggctcggagatcgtgaaattcctccaagatacactggatacattattcgggattctggacgagaattcacaaaagtatggaagtaaagtcttcgactccctcgtgcatatcataaatttgctgcaggactcgaaatttcaccactttaaaccagtgatggacacctacattgagagtcacttcgccggcgcgctcgcttatcgcgatcttattaaagtgctgaagtggtatgtggaccgcattaccgaagccgagcgacaggagcacattcaggaagtgctgaaggctcaggagtatatcttcaagtacattgtccagtcacgccggttattctccctcgccaccggaggccagaatgaggaggaatttagatgctgcattcaagaactgttaatgtctgtcagattctttctgtcgcaagaatcgaagggcagcggggccctgtcacagtcacaagctgtgttcttatcatcgttcccagcagtgtatagcgagctcttgaagctctttgacgtgagagaggtagcaaacctcgtccaggatacacttggctcgctgcccaccatcctccatgtagacgatagtttgcaagctatcaagttgcagtgcatcggcaagactgttgagagtcagctgtacacaaacccagatagccgatatattctgttgcctgtggtgttgcaccacctgcacatccacctacaagagcagaaagacctcatcatgtgtgcgcggattcttagtaacgtcttttgcttaataaagaagaattcgtctgagaaatcagttctggaagaaatcgatgtgatcgtcgcaagcttgttagacatactgctcagaacaattctggagatcacctctcgtccccagcccagcagcagtgccatgcgcttccagtttcaggatgtgacgggtgagtttgtggcttgtttgctatccctgctgcgccagatgaccgatagacactatcagcaactgttggattcatttaacaccaaggaggaactgagagatttcctcctccaaattttcacagtgttcagaattctcattcgaccagaaatgtttcccaaggattggacagtgatgcggctggtcgccaataatgtgattatcacgacggtcctgtacctgtccgacgcgctgcgcaagaatttcctgaacgagaacttcgactataagatctgggattcatacttttatttggccgtaatcttcatcaatcagctgtgcctgcagctcgaaatgttcacgccgtccaagaaaaaaaaagtcctcgaaaaatacggtgatatgagagtaacaatgggttgcgagatcttcagcatgtggcagaacttaggcgagcacaaattgcacttcattcccgcactgataggaccctttttagaagtcacgctcatccctcaacccgacttgaggaacgtgatgattcccatatttcacgatatgatggactgggagcagcgccgatcagggaatttcaagcaggtggaggctaaactgattgacaaactggattcgctgatgagtgaagggaaaggggatgaaacttacagggaactgtttaattccatccttctgaaaaaaatagaacgggaaacttggcgcgaaagcggggtgagtctgattgcaaccgtgacgagattgatggagcgcttgctcgactacagggattgtatgaagatgggggaggtggatggcaaaaagattggttgcacggtgtcgttgctgaatttttataaaactgaattgaacaaagaggaaatgtacattcggtatattcataagctgtatgatcttcacttgaaggctcagaactttacagaggctgcttatacactcctgctttacgatgaactactagagtggtctgataggcccttacgggagtttctgacctatcccatgcagacagaatggcaaagaaaggaacatctgcatctgacgatcattcaaaactttgacagagggaaatgttgggagaatgggatcatcctatgtcgaaagattgctgagcagtacgagtcctactatgattacaggaacttgagtaagatgaggatgatggaagcttccctctacgacaagataatggaccaacagaggctcgagccagagttctttagagtaggcttctacggaaaaaaattccccttttttctgaggaataaggagttcgtgtgcagaggtcacgattacgaacgactagaagccttccagcagcggatgcttaacgagttcccccatgcaatcgctatgcagcatgcaaatcaacctgacgaaacaatctttcaggctgaggcccagtacctacagatctatgcagtaacccctattccggaaagccaggaggttctccagagagagggagtaccagataatatcaagagcttttataaggttaatcacatctggaagtttcgatatgatcgcccctttcacaagggcacgaaggacaaagagaacgagtttaaatccctctgggtggaacgaacatctctgtatctcgttcagtcattgcccggcatttctagatggtttgaggtcgagaaacgcgaggtagttgagatgagtccactcgaaaatgcgattgaggttctggaaaataagaaccagcagctgaaaacgctgatttcacagtgtcagacgcgccagatgcagaatatcaaccctttgaccatgtgtctcaatggtgtgattgatgccgccgtaaacggaggggtgagccgttatcaggaggcattctttgtgaaggaatacattttaagccaccctgaggacggagagaaaatcgcgcggctgcgcgaactaatgctggaacaggcccaaatcctcgagtttggcctggccgtccacgaaaaattcgttccgcaagacatgcgacctctgcacaagaagctagtagaccagtttttcgtgatgaaaagctcactgggcattcaggagttttctgcctgcatgcaggcttccccggttcactttccgaatggatccccccgggtctgccggaacagcgcacctgcctctgtctcccccgatggtaccagagtgatcccaaggcgctctcctctgtcatacccagctgtgaacaggtactcttctagctctctatcttctcaggccagcgcagaggtatccaacataaccggtcagtccgaaagcagtgacgaggttttcaacatgcagccttccccttctacatcttctttgagttccacccatagtgcctcgcccaacgtgacctcttccgcacccagctcagcaagggccagcccactgctgtctgacaagcataaacatagtagggaaaactcttgtctgagcccccgcgaaagaccatgttctgctatctaccccacaccagtcgaaccttcacagagaatgttgtttaatcatataggcgatggggccctgcccagatcagaccccaacctgtcagctcccgagaaagcggtgaaccctactccgagttcctggtcacttgactccgggaaggaggcaaagaacatgagcgactcgggaaagctaattagcccaccagtgccaccaaggccgacacaaacagcctctcctgcgcgacatacaacatcggtttctccctctcctgctgggagatctccactgaagggatcagttcagtcctttaccccttcccctgttgagtaccactcacctggacttatctccaactcaccagtcctttctggatcatacagtagcggaatctcgtctctgagccgctgcagcacatctgaaacaagtggctttgaaaaccaggtgaacgaacaaagtgccccactccctgtccccgtgccggttcccgtgccgtcttacggcggagaagaaccagtccgcaaagaaagtaaaacccccccgccttactccgtctatgagcggactctccggcggcccgtgcccctgcctcatagcctgtctattcccgtaactagcgaacccccagctctgcccccgaagccattggcagctagatcctcccacctcgaaaacggagcccgaagaaccgatccgggcccacgaccacggccactgcctaggaaggtatctcagctctag

SEQ ID NO: 114258 - DNA, 2550 bp, synthetic construct
  misc_feature 1..2550: note = Description of Artificial Sequence: Synthetic coding sequence
  source 1..2550: mol_type = other DNA
atgaaaatgcacagcacggagagaatccctctgttcggcccttacccatcgctgctcaagaaaattgagcgggagacctggcgagagtcaggggtttccctgatagccacggtcaccaggcttatggaacgcttactggattaccgggactgtatgaaaatgggtgaagtcgatggcaagaagataggctgtaccgtgtccttactcaatttttacaaaacagaactgaataaagaggaaatgtatatcagatatatacataagctgtatgacctccatttgaaggctcagaacttcaccgaggctgcttataccctgctcttgtacgacgaacttctggagtggagtgatcgccctctgagagagtttctcacgtatcctatgcaaacggaatggcaaagaaaggaacatttgcatttgaccatcatccagaactttgatagaggcaaatgctgggagaacggcattatcttgtgccggaagattgcagagcagtacgaatcctattacgactataggaacctgtcaaaaatgcgcatgatggaagctagtctgtacgataagattatggaccagcagcgcctcgagcctgagttttttcgcgtcggcttctacggcaagaagtttccgttcttccttcgtaacaaagagttcgtctgccgaggtcatgattatgagaggctggaggctttccaacagagaatgctgaatgagttcccccatgctattgcaatgcagcatgccaaccaaccagacgaaacaatctttcaggcagaggcccaatatctgcaaatctatgccgtgactcccatccccgagagccaagaagtcctccagcgggagggtgtaccagataatataaagtccttttacaaagtaaaccatatctggaagttccggtatgaccggcccttccataaaggcacaaaagataaagaaaatgagttcaagtccctctgggtcgagagaacgagtctgtatttggtgcagagcctgcccggtattagcagatggttcgaagtggaaaaaagagaggtcgtggagatgtccccactggaaaatgctattgaggttctggagaacaagaaccaacagctgaaaactctcatttctcagtgtcagaccagacaaatgcaaaatatcaacccactgactatgtgtctgaatggggtgattgacgcggctgttaacggcggcgtgagcagatatcaggaggccttttttgtgaaggaatatatcctgagccaccccgaggacggcgagaagatcgctcggctccgggaactcatgctggagcaggcccagattctagaatttggcctggctgtccatgaaaaatttgtcccacaggacatgcgccctctccataagaagcttgtagaccagtttttcgtgatgaagagcagtctgggtatccaggagtttagcgcctgtatgcaggcctcccccgtccacttcccgaacggctcccctagagtgtgcagaaactccgcacccgctagtgtgtcacccgacggcacccgagtaataccacggcgatcaccactgagttaccccgcggtaaatcgctattcctctagctcactgagtagccaggcatccgctgaggtgtccaacatcaccggccaatcagagagttccgatgaagtctttaacatgcagccttcaccaagtacctcttcattgtcctcaacacacagcgcttcaccaaacgtcaccagcagcgccccgtctagtgcccgggcatctcccctgctgtcagacaaacacaaacacagcagagagaattcctgcctctccccaagggagcggccatgttctgccatttatcccactccagttgagcctagccagcggatgctgttcaaccatattggcgacggtgccctgcctcgcagcgacccaaatctgtctgcaccagagaaggctgtgaatccaactccttcttcctggagcctggattccggcaaagaggctaaaaatatgtccgatagcggcaagctcatatcaccacccgttcccccccgcccaactcagacggccagccctgcaaggcatacgacaagcgtgtctccctcaccggcaggccgtagccccttgaagggtagcgttcagagcttcacaccatctcccgtggagtaccatagcccagggctgatctctaatagtccagtgttaagcgggtcctattccagcggcatctcttctctgagccggtgcagcacctctgagacatcaggttttgaaaaccaggtcaatgagcaaagtgcacccttgccagttcctgtccctgtgcctgtgccctcttatggcggcgaagaacctgtgcgtaaggagagcaagacacccccaccttacagcgtttacgaaaggactctgcgccgtcccgtgcctcttccccactcactgagtattcccgtcacctcggagcctccggccctccctccaaagccattagcggccagatcttcccatcttgagaatggagccagacggactgacccagggccccggcctcgacccttgccacggaaagtgtcgcagctctag

SEQ ID NO: 114259 - DNA, 3318 bp, synthetic construct
  misc_feature 1..3318: note = Description of Artificial Sequence: Synthetic coding sequence
  source 1..3318: mol_type = other DNA
tggatcccatctgagaagcagacctttttcacagtcatagcatccttccgcgggactgtgccatatgggctttccctggagatcggcgataccgtccagattctcgaaaagtgcgacggatggtaccgtggctttgctctgaaaaatccaaacatcaaaggcattttcccttcctcttatgtgcatctcaagaacgcgtgtgtaaaaaacaaaggccagtttgagatggtgatccccactgaggattctgtcatcacagaaatgacctctacgctgcgcgactggggcaccatgtggaagcagctttacgtccgtaacgagggagacctattccataggctttggcacattatgaatgaaattttagatctgagacgccaggttttagtcgggcatctcacccatgacagaatgaaagacgtcaaaagacatattaccgccaggcttgactggggcaatgagcagctcgggttggatcttgtacccagaaaagagtacgccatggtggatcctgaggatatttccattaccgagttataccgcctgatggaacaccggcaccgtaaaaaggataccccggtgcaggcttccagccatcacctgttcgttcagatgaaatcgctgatgtgttcaaatcttggcgaggaactcgaagtcatttttagcctcttcgactcaaaggagaacaggccgatctccgaaagattttttcttcggttgaatcggaacggcctgcctaaagcacccgacaaaccggagagacactgctccctgttcgtagacctgggcagctcagagcttcggaaagatatttatatcacagtgcacatcattcgaatcggtcggatgggcgccggggaaaagaagaacgcttgttccgtgcagtatcggaggccttttggttgtgctgtactgtctattgctgaccttctgacgggagagacgaaggatgatctcatactgaaggtgtacatgtgcaacactgaatcggagtggtaccagatccacgagaacattataaagaagctcaacgccagatataacttgaccgggtcaaatgctggcctggccgtgtctctacagcttctgcatggggacatcgaacagatacgccgtgagtattcctcggtattctcccatggagtttctatcacccgaaagttgggcttttctaacatcatcatgccaggcgaaatgcgaaacgacttatatattaccatcgaaagaggggagttcgagaaaggtggtaagtcagtggcccggaatgtcgaagtcaccatgtttatcgtggactcctctggacagactctgaaagacttcatcagctttggttccggcgagccacccgcctccgagtaccattcgttcgtgctttaccataacaatagtccgcgatggagcgaactgcttaagttgcctataccagtggataaatttcgaggtgctcatattaggttcgagtttcggcactgttctacaaaagagaagggggagaaaaaactgtttgggtttagtttcgtgccgctcatgcaggaggatgggcgcactctacccgatggaactcatgaactcatcgtgcacaagtgtgaagagaatacaaatcttcaagacacaactcggtatctgaagctgcccttttctaaagggatttttttaggcaacaacaaccaggcaatgaaggccaccaaggaaagcttttgcatcaccagctttctctgtagcacaaaactgacccagaatggtgatatgctcgacttgttaaagtggagaactcacccagacaaaatcacgggatgtctcagtaaactgaaggaaatcgatggatctgagatcgttaaattcctgcaggacacactcgacaccctgttcggcattctggacgaaaattcccagaaatacgggagtaaggttttcgattcgctggtccacattatcaatctcctacaagactctaagttccaccactttaagcccgtgatggacacctacatcgagagccacttcgccggggcactggcgtatagggatctgattaaggtgcttaaatggtacgtggatagaattaccgaagccgagcgccaggagcacatccaggaggtgctgaaggcccaggagtacatcttcaaatatatcgtacagtctcggcgactgttctcactcgctacaggcggccagaacgaggaagagtttcgatgttgtatacaggagctccttatgagcgtgagattctttctgagtcaggagtctaaggggtccggtgctctgagtcagagccaagcagtgttcctgtcatcattcccagccgtgtattctgaactgctcaaactattcgacgtgcgggaggttgccaacttggtccaggatacattaggaagtttacccaccattctgcacgtggatgattcactccaggcaattaagctgcaatgtatcggtaagaccgtagaaagtcagctgtacaccaatccagatagcagatatattctcctcccagtggtgttgcaccacttacacatacacttgcaggagcaaaaagacctgataatgtgtgcacggatcctgtccaatgtgttctgtttaatcaagaaaaattctagtgagaaatctgtgctggaggagattgacgtcatcgtggcatcactgttggacatccttttgcgtactatactagagatcacgagtaggccacagccctcctccagcgcgatgcgctttcagttccaggatgtgaccggcgaattcgtggcgtgcctgctgtccctgcttaggcaaatgacagaccgtcattatcaacaactgcttgattcatttaacacgaaggaggagctgcgtgactttctgctgcaaatttttacagttttccgcatcctgattcgaccagagatgtttccgaaagattggaccgtgatgcggcttgtagctaataatgttattattacaaccgtgctttacttatctgatgccttaagaaagaattttcttaacgaaaactttgactataaaatttgggactcttatttctatttggctgtgatttttataaaccagctgtgcctgcagctcgaaatgttcacccctagtaagaaaaaaaaggtccttgagaaatacggagatatgagggttacaatgggatgtgagatcttctccatgtggcagaatctgggggagcacaagctccatttcattcccgccttaagacaggagaacagactgaacctgggcggtggcgggtgctcagagccaagggcatgccattgcacaccagcctgggccactaagagggattgcgtgtcaaagaaaaaggagaagaagacatag

SEQ ID NO: 114260 - DNA, 6144 bp, synthetic construct
  misc_feature 1..6144: note = Description of Artificial Sequence: Synthetic coding sequence
  source 1..6144: mol_type = other DNA
atggcagcctctgaaaggcgagcattcgcccacaagattaatagaaccgtagctgcagaggtgcgtaaacaagtctctagagaacgtagcggatctccacacagcagtcggcgatgcagtagctcactgggggtgccactaacagaagttgtcgagcctcttgatttcgaggacgtgctgctgtctcggccccccgacgctgagccaggccctcttcgcgacctcgtcgagtttcccgcagatgatctcgaattgctgctgcaacctcgagaatgcagaacaacagaacccggtatacctaaggacgaaaagcttgacgcacaagttagagccgccgtcgagatgtatattgaagattgggtcatagtccaccggcgttaccagtacctctcagccgcgtatagcccagtcactaccgacacgcaaagggaacggcagaagggattgcctcggcaggtgtttgaacaagatgccagtggtgacgaaagatctggccctgaggatagcaatgacagtagaaggggtagcggatcacctgaggacacgcctcgcagctctggtgccagctctatctttgatttgcggaacctcgcagccgacagtctgttaccaagcctgctcgagcgcgcagcacctgaagacgtcgaccgtcggaatgagactctccgcaggcagcacaggccccccgctcttctgacactgtacccagcacccgatgaggatgaggccgtcgagagatgtagtaggccagagccaccccgtgagcacttcggtcaacgcatattggtgaaatgtttatccctgaagtttgaaattgagatcgagcctatcttcggtatcctggcactgtatgatgtgagagagaagaaaaaaatatcggaaaacttttacttcgatctgaatagtgactctatgaaagggctgttgagagcccatggaacgcaccctgcaatttctacactggcaaggtccgccatatttagtgtgacctacccttcaccagacattttcctggtgatcaaacttgaaaaggtgctccagcaaggtgatattagcgagtgctgcgaaccgtacatggtgttaaaggaagttgacacggctaagaataaagagaagttggagaagttaagactggccgccgaacagttttgcactcggttggggcggtaccgcatgcctttcgcttggaccgccgtccatctagcaaatatagtcagctccgccgggcagctcgatagagattccgatagcgagggagaaagacgacccgcttggactgatcggcggagaagggggccccaggatcgggcgtccagcggcgatgatgcttgttccttcagtggctttaggcctgcaactctgacagtcacaaatttctttaaacaggaggcggaaagactctcagacgaggacctttttaaattcctcgctgacatgcggcgcccatcatcattgctcaggcgcctgcgccccgtgaccgcccaactgaaaattgacatctccccagctccagaaaacccccatttctgcctgtcaccagagctgcttcacatcaaaccttaccccgaccccagagggaggccaaccaaggaaatcctcgaatttcctgcacgcgaggtttatgctcctcatacaagctaccgcaatctgctttacgtctaccctcactctctcaattttagtagccgacaaggctctgtcaggaatcttgcagtgagggtgcagtatatgaccggagaagatccaagccaggcattgcccgtgatatttgggaaaagctcatgctccgaatttacacgagaggcgttcacacccgtcgtttatcacaataaaagcccggagttctatgaggaatttaaactgcatctgcccgcctgcgtcacagagaaccaccacctcctctttaccttctaccacgttagctgtcagccacgccccggcactgcactggaaacaccggtgggatttacctggattcctctgcttcaacacggcagattacgcacagggccattttgcctgcctgtctcagtcgaccaaccccccccttcttattcggtcctgacccccgacgtggcccttcctggcatgcgctgggttgacgggcacaaaggtgtgttcagtgtagagctaactgccgtgagcagcgtccatcctcaagatccttacctggacaagttttttacactcgtccatgtgctcgaagagggggccttcccatttcggctgaaagacacggtgttgagcgaggggaatgttgaacaggagctgagagcctccctcgcagctctcaggctggccagccccgagcctctcgtggcattctcacaccatgtgttagacaagctcgttagactggttataagaccccccattattagcgggcagatcgtgaacctgggccggggcgccttcgaggccatggcgcacgtggtgtcattggtgcatcggtccctggaggccgcacaggatgcacgcggtcattgcccccagctggccgcatacgtgcattacgcttttagactccctggaacagagccatcattgcctgatggggcgccacctgtcaccgtccaggccgccacgctggcccgaggatccggcagaccagcatcattatatctggccagatctaaaagcatttcaagcagcaatcctgacttggccgtggcgccaggcagcgtggacgacgaagttagcaggatactggcctcaaaactgctccatgaagagctggctctgcaatgggtcgtgtcttcttcagccgttagagaagcaattctgcagcacgcctggttctttttccaactaatggtgaagtccatggctctgcacctcctgctcggtcaaaggttggacactccacgcaaactgcgcttcccagggaggtttcttgacgatatcaccgccttagtgggttctgtggggcttgaggtgattacccgggtgcacaaggacgttgaactggctgagcatctgaacgccagcctggccttctttctgtctgatctcctatcactggtcgaccgtgggttcgtgttctccctggtacgagcacactataaacaagtagcaactcgcctccagagttctccgaatcccgccgctctgctgacactccgcatggagtttaccaggattctgtgttcccatgaacactacgtgacgctgaacctgccttgctgtccgttgagtcctcccgcgagtcccagcccatctgtctcctcaacaacgtcccagagctctaccttttcaagtcaggctcccgatcctaaggtcacgtccatgtttgagctatccgggccctttaggcaacaacactttctggctggccttctactgaccgagctggccttggccttagagcctgaagccgagggagccttcctcctgcataagaaggcaatttccgcggtgcattctctgctctgcggccacgacactgaccctcgttacgccgaggccacagtcaaggcgcgcgtagcagaactctatctgccactcctgagtatagcaagagacactctcccgaggctgcacgactttgctgaaggaccagggcagcgcagtcggctggcctccatgctggattcagacaccgagggggagggagacattgctgggactatcaatccgtctgtcgccatggctattgctggaggacctctagctccaggctctcgcgcaagcatctcccagggtcctcctactgcctcccgagccgggtgcgcactgtcggcggagtctagccgtactttgctagcatgcgtgctctgggtcttaaagaatacggaaccagcccttctgcagcgctgggccaccgatctgactcttcctcagctggggcgtctgctcgatctgctgtatctctgcctcgcagcgttcgagtacaaaggaaagaaggcgttcgaaaggattaatagcctaacatttaagaaaagtttggatatgaaagctaggctggaggaagcaatcttgggtacaataggtgcaaggcaggagatggttaggagaagccgggagcggtctcctttcggcaatcccgagaatgtaagatggaggaaatcagtaacacattggaaacagacaagcgaccgtgtggacaaaacaaaggacgagatggagcacgaagcgctcgttgagggcaacctggcaacagaagcttctctggttgttttagataccctggaaataatcgtgcaaaccgttatgttgtccgaggcgagggagtccgtgctcggcgccgttctaaaggtggtgctatactctttgggttcagcccagtccgcgctgttccttcaacacggactcgccacacaacgcgcactggtcagcaaattccctgaactgctgttcgaagaagatacggagctctgcgctgacttgtgtctgagactgcttcgccattgtgggagtaggatatctactattcgcactcatgcttcggcttctctttatctattgatgagacagaatttcgaaataggacataacttcgctagagtgaagatgcaggttacaatgtctttgtcaagcctggtaggtaccactcaaaatttcagtgaagagcatttgagacggagcctgaaaaccatcctcacttacgctgaagaggacatgggcctacgagactccacatttgcagaacaggtgcaggacctgatgtttaatctacacatgattctcacagacacagtcaaaatgaaagaacatcaggaagaccccgagatgctgattgatctcatgtatcggattgccagggggtatcaaggcagcccggatctgaggttaacatggttacaaaacatggctgggaaacatgctgaactgggcaaccacgccgaggccgctcagtgcatggtgcatgcagctgcactcgtagctgaatacctggccctcctagaagaccaccggcatctgcctgttggatgtgtgtcctttcagaacatttcctccaatgtcctggaggagtctgctatttccgatgatattctgtccccagacgaagagggtttctgcagcggaaaacatttcacagaattgggactcgtcggccttttggagcaggccgccggatacttcactatgggcggactgtacgaggccgttaatgaggtgtataagaacctgatccctatcctggaggcccatcgggattataagaagctagcggctgtgcatggcaaactgcaggaggcctttacgaagattatgcaccagtccagcggctgggagcgcgtctttggaacatactttcgtgtgggattttacggcgctcacttcggtgacctagatgaacaggagtttgtctacaaggagcctagcatcactaagctagcagagatttctcatagacttgaagaattttacacagagcggtttggagacgacgtggtcgagattattaaggattcaaatcccgtagacaagagtaagctcgactcacaaaaggcctacatacagatcacatacgtggaaccttattttgacacctatgagctgaaggaccgtgtgacatactttgatcgcaactacggactgcggacctttctattttgcaccccttttacaccagacggcagggcccatggcgaacttccagagcagcacaagaggaagaccttgctcagcaccgaccacgcgtttccctacatcaaaacccggattcgtgtatgccacagggaggagactgtcctgacccctgtcgaggtggccattgaggacatgcagaagaagaccagagaactggcttttgcgacagagcaggatcctcccgatgccaaaatgttacaaatggtactccagggttctgtgggcccgaccgtaaatcagggccccctggaagtggcccaggtgttcctcgccgagatacctgaggaccccaagctgtttcgccaccacaacaaactgcgtctgtgtttcaaagacttttgtaagaagtgtgaggatgctctccggaaaaataaggcactgataggacctgatcagaaagagtaccaccgagagttggagagaaattactgcaggttgagggaggccctgcagccattactaacacagcgcctgccccagttgatggcccccacacctcccgggctgaggaactcactcaatcgcgcctcttttcggaaagctgatctgtag

SEQ ID NO: 114261 - DNA, 4161 bp, synthetic construct
  misc_feature 1..4161: note = Description of Artificial Sequence: Synthetic coding sequence
  source 1..4161: mol_type = other DNA
atgcgatgggtcgatggacataaaggggtgttctctgtagaactgaccgccgtgtcgagcgtgcacccccaagatccgtatttagacaagttctttacccttgtgcacgtccttgaggaaggcgccttccctttcagattaaaagacactgttctttctgaagggaatgtggaacaggagctgagggccagtctcgccgctctacgcctcgcctctccggagccattagttgctttttcccatcacgttctcgacaagcttgttcgtctggtgatccgtccccccatcattagtggacagatcgttaacctgggcagaggcgcatttgaagccatggcgcacgttgtttcactggttcaccgatctctggaagcagcgcaagacgcccgcgggcattgtccccagctggcggcatacgtgcattatgcatttaggctgccagggaccgaaccaagcctgccggacggtgccccacctgtgaccgtacaggcggcaaccctcgcccgcggtagcggacgccccgcctcgctctacttagcacggtccaagtctatcagtagcagcaaccccgacttggctgtggcacccggttccgtggatgacgaagtcagcaggatcctggcatccaaaggcattgatcgttctcacagctgggtgaatagcgcctatgcccccgggggatctaaagcagttctgcggagggcccctccttactgtggagcggacccacgccaactcttgcatgaagagcttgcccttcagtgggtggtgagtagcagcgccgtaagggaggccatcttgcaacatgcgtggttcttctttcagctaatggtgaagtccatggcactgcatctacttctcggacagagactggatacacctcgaaagctcagattcccgggccgctttctggacgatataacagctttagttggttctgttggcctggaggttatcaccagggtgcacaaggacgtggaactggccgaacatctcaacgcctccctagccttctttctatctgaccttctgagcttagttgaccggggattcgttttttcactggttcgagctcactacaagcaggtagctacacgactccagtcctccccaaacccagccgcactccttaccctccggatggaatttactaggattctttgcagccatgaacattacgttactctgaatctgccttgctgccctttaagccccccagccagccccagtcctagcgtcagctcgacgacgagccaaagcagcactttctcttctcaggcccccgatccgaaggtcacctctatgtttgagctgtccggacccttcaggcagcaacatttcctggctggcctgctgttgacggagctggctttggccctggagcctgaggcagagggggcgtttctcctgcataagaaggccattagcgccgtgcactcactgctctgtggtcatgacaccgatcctcgctacgcggaagccacagtcaaggctcgcgtggccgagctgtacctcccgctgctctctatcgcccgggacaccctgccacgccttcacgattttgctgagggaccaggccaacggtccaggttggcctctatgctagacagtgatacggaaggtgaaggtgatatcgccggcactatcaacccctccgtggccatggccatcgctggtggaccattggcaccaggctcaagagcgtcaatttctcagggccccccaaccgccagccgggccggttgtgccctcagcgcggagagctctagaacactgcttgcttgtgtcctgtgggtgttgaaaaataccgaaccagcattgctccagcgctgggccactgatttgaccctgcctcagctgggacggttacttgatctcctgtacctttgtctcgctgcattcgagtataaagggaaaaaggcctttgagcgtatcaactcactgaccttcaagaaaagcctagacatgaaagccagattggaagaagctattctcggcacgattggggcccgtcaagaaatggtgcgtaggtcacgagagcgttcccctttcggaaatcccgagaatgttcggtggcggaagtccgttacccactggaagcagacatccgatcgagtcgacaagacgaaagacgagatggaacacgaggcgctcgtggaggggaaccttgctaccgaggcctcactggttgtcctcgacacattggagattattgtccagacagtgatgctctccgaggcccgggagtccgtgctgggcgccgtcctgaaagttgttctgtatagtctcggcagtgcccaatccgcgttgtttctccagcatgggctcgctacccagagagcactggtatccaagttccccgaactcctctttgaggaggataccgaactatgcgctgatctctgtttacggttgcttagacattgcggttcaagaataagcactattcgcacgcatgctagtgcatctctgtaccttctgatgaggcagaattttgaaattggccacaattttgcacgagtaaaaatgcaagtcacaatgagcttaagtagccttgtgggtactacacagaatttctcggaggaacacttgaggaggtcactcaagacaatcttgacttacgctgaggaggacatgggcttgcgagacagtacttttgctgagcaagtccaggatctgatgtttaaccttcacatgatcctgaccgatactgtcaagatgaaagagcaccaggaggatcctgaaatgctgattgacctgatgtaccgaattgccaggggctatcaggggagccccgacctgcggctaacctggctccaaaatatggctgggaagcacgctgaattggggaatcacgccgaggctgcacaatgcatggtacacgccgccgccctggtcgccgagtatcttgccttattggaggaccatcggcacctgccagttggttgtgtgtctttccagaacatttcttctaatgttctagaggaaagtgcgatttcggacgatattctatcaccggatgaggaaggcttttgcagtgggaagcactttactgagctgggactggtgggattactggaacaggccgccggctactttaccatgggcggcctgtacgaggccgtgaatgaagtatataagaacctcatacctattctggaagcacatcgcgattataaaaagctagctgccgttcacggtaagctgcaagaggcctttacaaagatcatgcaccagagcagcggatgggaacgcgtgtttggaacctattttcgggttggcttctatggcgcccacttcggcgatttagatgaacaggagtttgtatataaggaacctagcataaccaagctcgcagagatatcccacagacttgaagaattttacacagagcgcttcggtgatgatgttgtggaaatcattaaggattctaaccctgttgataagtcgaagctggacagtcaaaaagcttacatacaaataacttatgtcgaaccgtacttcgacacttacgagctcaaagatagggttacatattttgacagaaactatggcctccggacatttttattctgtaccccttttacgccagacggtcgcgcccacggtgagctgccagagcagcacaagagaaagacactgctgtcaacagatcacgccttcccttatatcaagactcgcatacgcgtttgccacagagaggagaccgtgctgaccccggtggaagtagctatcgaggacatgcagaaaaaaacaagggagctggctttcgctacagagcaggacccccctgatgccaaaatgctgcaaatggtgctgcagggttcagtaggcccaactgtcaaccagggtcctctagaggttgcccaggtgtttctggctgagattccagaagatcccaaactgttcaggcaccataacaagctgcgcctttgcttcaaggacttctgcaagaagtgtgaggatgcactcagaaagaacaaggcactgatcgggcctgaccaaaaagagtaccaccgcgagctcgagcgcaactactgtagactgagagaggccctacagcctctgctaacccagcggctcccccaactgatggctcccaccccaccaggcctgagaaatagcttaaatcgtgcgagctttagaaaagcagacctctag

SEQ ID NO: 114262 - DNA, 5973 bp, synthetic construct
  misc_feature 1..5973: note = Description of Artificial Sequence: Synthetic coding sequence
  source 1..5973: mol_type = other DNA
atggctacattacctagtgctgagaggagagcattcgcactcaaaatcaacaggtattcttcagcagagataaggaagcaatttacgttacccccgaacctcggacagtatcatcgtcagtccatttccacttctggcttcccctctctccagttaccccaattttatgatccagtggagccagtggactttgaagggctgttaatgacccacctcaatagcctagatgtgcagttagcgcaggaactaggagatttcacagacgatgacctggacgtggtcttcacgccaaaagagtgcagaacactccagccttcactaccagaggagggagtcgagctggatcctcacgtgagggattgcgtgcagacctatattcgggaatggctcattgtgaacagaaaaaaccagggcagtcccgagatctgcggattcaagaagacgggaagcagaaaggatttccataaaactctgcccaagcagacctttgagtctgaaactctggagtgctcagagcctgctgctcaagccgggcctcgccacctaaatgtgctctgtgatgttagcggtaaggggccagtgaccgcctgcgacttcgatctgcggtcacttcaacccgacaagaggctggaaaatctcctgcagcaggtgtccgctgaagatttcgagaaacagaatgaggaagcccgccgaactaaccgccaggccgagctttttgctctatacccctctgtggatgaagaggatgccgtggagatccgccccgtgccagaatgccccaaggaacacctgggaaatcgtattctggtgaaactgctcactcttaagttcgaaatagaaatcgaacctctctttgcatcaatcgcactttatgacgtgaaagagcggaaaaagatatcggagaatttccactgtgacctgaattcagaccaattcaagggtttcctccgtgctcatacgcccagtgtagctgccagcagccaggcacgaagtgctgttttttccgtcacatatcccagctccgacatatatctcgtggtgaagattgagaaggtgctgcagcaaggagagattggagattgtgccgagccttacacggtaatcaaagagagcgacggcgggaaatcaaaggagaaaatagagaagctgaagctgcaagcagagtctttctgtcagcggttgggaaagtatcgcatgccttttgcttgggcaccaatatccctcagtagcttcttcaacgtgtcaaccctggaaagggaggtcacagacgttgacagtgtggttggtaggtcctctgtcggagaaaggagaacgctcgctcagtccagacgcttgtccgaaagagcactgtccctagaggagaacggagtggggtctaattttaagacttcgacactgtctgtctcttccttcttcaaacaggaaggtgaccgcctatcagacgaagacctgttcaaatttctcgcggactataaacggagtagcagtttgcaaaggcgggtcaagagcatacctgggctgctccgccttgagatctccacagctccagaaatcattaactgctgtctgacgcccgaaatgttgccagtgaagccctttccagagaataggacgagaccccataaggaaattcttgaattccctacacgggaagtgtatgttccgcatactgtgtaccgaaacttactgtatgtatacccacagagactgaacttcgtgaacaagctcgcttcagcccggaatatcacgatcaagatccagtttatgtgtggggaggatgcaagtaacgccatgccagtgatattcgggaaatcctcaggccctgaatttctacaggaagtgtataccgctgtgacatatcataataagagtccagacttttacgaggaggtgaaaattaagctgccagctaaattaaccgtaaaccaccatctgttgttcacattttaccatattagctgtcagcaaaaacagggggcttcggtagagacacttctgggatactcatggctgccaattctactgaatgagagactgcagactggttcctactgccttcccgtcgccttagaaaagttgccacctaactattcgatgcacagtgccgagaaagttcccctccagaatcctcctattaagtgggcagagggccataagggagtctttaacatcgaagtgcaggcagtcagcagcgtgcacactcaagataaccatttggaaaagttttttactctctgccactccttagagtcccaagttacctttcctatacgagttttggatcaaaagatcagtgaaatggctctggaacacgaattaaagcttagtattatctgtttgaactcgtctaggcttgaacccttggtgctatttcttcatctggtgttagataagctgttccagttgtccgtacagcccatggtgattgctgggcagactgcgaacttctcacaatttgcttttgaatcagtggttgccattgctaatagcctgcataactccaaggacctgagcaaagaccagcacggaagaaactgcctattggcatcctacgtacattatgtttttaggttgccagaagtccagcgggatgtgccaaagtcaggcgcccccaccgccctgctggacccacggtcttaccacacctacggtaggactagtgctgccgccgtgtccagcaagctgctgcaggcgcgcgtgatgtctagctctaaccccgatttggctgggacacatagcgctgccgatgaagaggtaaagaacatcatgagctccaagcacttccatgaggagctggcactgcagatggtcgtgagtacaggtatggtcagagagactgtctttaagtatgcgtggttcttctttgagttgcttgttaagagtatggcgcagcacgtgcataatatggataagagagactcttttcgaaggaccagattttccgaccgattcatggacgacatcacaaccatagtgaacgtggttaccagtgaaattgccgcgctgctggtcaagccccagaaggagaatgaacaagccgaaaagatgaatatctctctggcattctttctttatgacttactgtcactcatggataggggattcgtgtttaacctgataaggcattattgcagtcagctcagtgctaaactgagtaacctgcctaccctcatttcaatgcgccttgaattccttaggatcctgtgtagccacgagcactatctaaacctcaatcttttctttatgaacgccgacacagcacctacttccccgtgcccttctatatcgagtcaaaatagtagttcatgcagctcatttcaggaccagaagatcgcaagcatgtttgatctcacgtccgagtaccgtcagcagcatttcctgacgggcttattattcactgagttagctgccgctcttgatgcggagggagaggggatatctaaggtgcaaaggaaggctgtgagcgccatccactccctcctaagttcacacgaccttgaccctaggtgcgtgaagcctgaggtgaaagtcaagattgctgctctctacctgcctctggtcgggatcattctagatgcactaccacagctctgtgactttaccgtagctgataccagaaggtaccggacgagcgggtctgacgaagagcaggaaggcgccggagctatcaaccagaatgtcgcactcgccattgcaggcaacaacttcaacttaaagaccagcggtatcgttctgagctccctgccctataagcagtataatatgttgaatgcagatactacacggaatctgatgatctgctttctttggatcatgaaaaacgccgatcaatctctgattaggaaatggattgcagatctcccctcgacccaattaaataggatcctcgatctgttgttcatttgtgtgctgtgctttgagtataaaggcaagcagtcaagtgataaagtgagcacacaggtcctgcagaagagccgtgacgtgaaagcaaggctggaagaggccctcctccggggtgagggcgcccgaggggaaatgatgaggcgccgtgcgcctggcaacgacagattcccagggcttaacgagaacttacgatggaagaaggaacagacgcactggaggcaggccaacgagaaactggacaaaactaaagcggaactggaccaggaggcgctcatctccggcaatctagccactgaagcccacctcattatactggacatgcaggagaatatcatccaggcatcctctgccctagactgtaaagattctctactcggcggagtcctgcgagtgctcgtgaattcactgaactgtgaccagagcaccacatacttgacgcactgtttcgcaactttaagggctttaatagccaagtttggggatttgctgtttgaggaagaagtggagcagtgctttgacttatgtcaccaagttttgcaccattgtagctcatctatggacgtgacgcgttcgcaggcttgcgcgacactgtatcttctgatgcgattctcctttggagcgacgtccaactttgcccgcgtcaaaatgcaagtcactatgtccctggcatccctcgtgggtcgagcccccgacttcaatgaggaacatctgcgccgaagccttcgcacaattctggcgtactcagaggaggatactgccatgcagatgacaccgtttccaacacaagtggaggaactgctctgtaacctgaactctattttgtacgacactgtgaagatgcgcgagttccaggaggaccctgagatgctcatggatctcatgtatcggatcgccaaatcttatcaggctagccccgaccttcgcctgacctggctgcagaatatggccgagaagcatactaagaaaaagtgttatactgaggccgcaatgtgtctcgtacacgccgccgccctggtggctgaatacctgagcatgctagaagaccatagttacttacccgttggcagcgtaagctttcaaaatatctcaagtaacgtcctcgaagaatctgtagtgtctgaggatactctgtcaccggatgaagacggagtatgtgccggacagtattttacggagtctggcctggttgggctgttggaacaagctgctgagctgttcagcacggggggcctttatgaaaccgtgaatgaagtatacaaattagtcatccctattctcgaggcccacagggaatttcgaaaactcacacttactcacagtaaacttcagcgtgccttcgacagtattgtcaataaagaccacaaaagaatgtttggtacctactttcgcgtgggtttcttcggcagcaaatttggcgatctggacgagcaggagtttgtttataaagagcccgcaataaccaagctgcccgagatctcccatagactggaggcgttctacggccaatgttttggagctgagttcgtggaagtgatcaaagatagcactcctgtggataagacgaaactggatccaaataaggcctacatacagattacctttgtagaaccttattttgatgagtatgaaatgaaggatcgggttacttacttcgagaaaaacttcaatctccgccggtttatgtataccacaccctttacacttgagggcagacctcgaggtgagctgcatgaacaatatagacgcaacacagtcctcaccacaatgcacgctttcccttatatcaagacgcgtatttctgtgattcagaaggaggaattcgtgctgacacctatagaggtggccatcgaagacatgaagaagaaaactttgcagctggccgtggccatcaatcaagaacctcccgatgccaagatgctgcagatggtgctacagggatcagtgggggccacagtgaaccaaggcccactggaagtcgcgcaagtcttcctcgctgaaatacctgcggacccaaaactgtaccgccatcacaataaattaaggctgtgttttaaggaatttataatgtag

SEQ ID NO: 114263 - DNA, 6096 bp, synthetic construct
  misc_feature 1..6096: note = Description of Artificial Sequence: Synthetic coding sequence
  source 1..6096: mol_type = other DNA
atgacacacctcaactccttagacgtccagctggctcaagagctaggtgatttcactgacgatgatctcgatgtcgttttcacacctaaggagtgtcgtaccctccaaccatctctccccgaggagggcgtggagctggacccccacgtgcgcgactgtgtgcaaacgtacataagagagtggttgatcgtaaatagaaagaaccaaggcagtccggaaatctgcggtttcaaaaaaaccgggagccgaaaagactttcacaaaacactgccaaagcagactttcgagagcgaaaccttagaatgctcggagcctgcagcccaggccggaccccgccatctaaatgtgctgtgtgacgtgtccggtaaagggcctgtgaccgcttgcgactttgacctgagaagcctccaacccgataagcgtctagagaatttgctccagcaggtgagcgcagaagactttgaaaagcaaaacgaggaggctcggaggacgaatcgccaagctgaactgttcgcactctacccctctgtcgacgaagaggatgccgtcgagatccgacccgtgcctgaatgtcccaaggagcacctcgggaatcggattcttgttaagctgcttactcttaagtttgagattgagattgaacccctttttgcttccatcgccctgtatgatgtaaaggagcgcaaaaaaatcagcgaaaatttccattgcgatctgaactccgatcagttcaagggatttctcagggcacacaccccaagcgtggctgctagtagccaagcaagatctgctgtctttagcgtgacatatccctcgtccgacatctatttagtcgtgaagatcgaaaaagtgctccaacagggagagatcggagactgtgccgaaccttataccgtgattaaggagtcggatggcggcaagtcaaaagagaagatcgagaaactgaaactacaggctgagtctttctgtcagcgcctggggaagtatagaatgccatttgcgtgggcacccatcagtctgtcatcattcttcaacgtgtcaacgttagagagagaagttaccgatgtcgattcagtggttggcagaagctccgttggggaaaggcgcacactagctcaatcacgacgcttgagcgagcgggcactctctctggaggagaatggcgtaggctcaaattttaagaccagtaccctgtctgtgagttcgttttttaaacaggaaggcgaccgcctatctgatgaagatctgtttaagttccttgctgattacaaacggtctagtagtttgcaacgcagagtgaaatctattccagggctgttaagactggaaatcagcaccgcccccgagattatcaattgctgtttgaccccggagatgcttcctgtgaagccatttcccgaaaaccgcacaagaccacataaggaaatcctggaatttcccacgagggaagtgtatgtgccacatacagtttaccggaatctgctctacgtatacccacaaaggttaaactttgtcaacaaacttgcttctgctaggaacattaccataaaaattcagtttatgtgtggcgaggacgcttcaaacgccatgccggtgatttttggtaaatcttccggacccgagtttctccaggaggtgtacactgccgtaacatatcataacaagagtcctgatttttatgaggaagtgaaaattaagctaccagccaagctgaccgtcaaccatcacctcctgttcaccttctaccacatcagctgccagcaaaagcagggggcttcagtggagacccttcttggctacagctggctgcccatactactcaacgaaaggctccagacaggcagctactgtctgcctgtggcactggagaagctcccccctaattactccatgcacagtgcagagaaggttcctctccaaaatccccctattaagtgggcagaggggcataaaggggtgtttaatattgaggtccaggccgtgagttctgtccacacgcaggataaccacctggagaagttttttactctgtgccactcattggaaagccaagtgactttcccgattcgtgtgctggaccaaaagatcagcgagatggcattagaacacgagcttaaactctctatcatctgcctaaacagctctaggctggaacccctggtactcttcctccacctggtgctagacaagctcttccaactcagcgtacaacccatggtgatcgccgggcagaccgctaatttctctcagtttgcttttgagtcggtcgtcgctatcgctaactctctgcataattctaaagacctgtctaaagatcagcacggccgcaactgtctgctggcctcttacgttcactacgtgtttcgtctgcccgaggtccagcgcgatgtccccaaatctggggcccctacggccctcctcgatccacgttcttatcacacatacggacggacaagcgcagctgccgtcagcagcaagctcctccaagctcgggtgatgtcgagtagtaaccctgatttggctggaacccacagcgccgccgatgaggaggtgaaaaacatcatgtcctctaagatcgcggaccggaattgctcaaggatgagttattactgctctggctcaagcgatgccccttcaagcccagcagccccacgtcccgcctccaaaaagcacttccacgaggagctagctcttcagatggtggtgtctaccggaatggtccgtgaaacagtgtttaaatacgcctggtttttttttgagctcctggtgaagtccatggcgcagcacgtccataatatggataaacgagatagctttcggcggactaggttcagcgacagattcatggatgacatcaccactatcgtaaacgtcgtgacctcagagatagcagctttgctcgtgaaacctcaaaaggagaatgagcaggcggagaagatgaatatcagtttagcattttttctgtacgacctgctgagtcttatggatcggggatttgtgttcaacttgatccgacactactgcagccagctgtctgccaagctctctaatttgcccacattgatctcaatgcgactggagtttctgcgaatcctctgctctcacgaacactatctgaatctgaacctcttcttcatgaatgccgatactgcacccacttctccatgcccatctatatcaagccagaactcgtcctcctgttcctcatttcaggatcagaaaatcgccagtatgtttgatctgacgtctgaatatcggcagcagcattttctgaccgggctgttgttcacagaattggccgccgctctggacgcggagggggagggcatcagtaaggtgcaacggaaagccgtctcagcaatccatagtttgctgtccagccacgacctggaccctaggtgcgtgaagccagaagtgaaagtgaaaatcgccgccctatatcttccccttgtggggatcattcttgatgccctcccccaactgtgtgatttcacagtcgctgacaccaggcgataccgcacctcagggtcagatgaggagcaggagggagcgggtgcaattaaccagaatgtggctctggctatcgccggcaataattttaatctgaagacttcgggaatcgtgttatcctcccttccgtataaacagtacaatatgcttaacgcggatactacacgcaacctgatgatatgttttctttggattatgaaaaatgccgaccagagcttaattcgcaaatggattgccgacttgccgtctactcagctcaataggatcctcgatctgttattcatctgtgttttgtgcttcgagtataagggcaaacagtcctcggataaagtctcaacccaagtgctgcagaaatcaagggatgtgaaagccagactcgaggaagcactgcttaggggcgaaggagcccggggggagatgatgcgacgccgagcaccaggcaatgaccgctttcctggccttaatgagaacctccgttggaaaaaggaacagacccattggcgtcaggctaatgagaagctcgataagaccaaggccgaattggaccaggaggctctgatctcgggtaatctagctacagaggcacacttgattatacttgacatgcaggagaatattatccaggcatctagtgcactggactgcaaagatagcctcctaggaggagtgctgagagtgctggtgaactctctaaactgcgatcagtcaaccacatacctgacacattgtttcgccacactgagagcgctgatcgcgaaatttggtgatctcctgttcgaggaagaagttgagcagtgcttcgatctgtgccatcaggtgctgcatcattgtagcagctccatggacgtgacacgctctcaggcctgcgctaccttatacttgctgatgagattctcattcggcgcgacttctaatttcgcccgcgtcaaaatgcaggtcaccatgtcgttggcgtctctcgttgggagagccccagactttaatgaagaacatctgcggcggagcctgagaactatactggcttattcagaggaggatactgctatgcagatgacaccctttccgacacaggtggaagagcttctgtgtaacctaaatagtattttgtatgacacggtgaaaatgcgggaatttcaggaggacccagagatgctgatggatctcatgtatcgaatcgcgaagagctaccaggctagccccgacctgaggctaacatggctccaaaatatggccgagaagcatacgaagaaaaaatgttacacagaagcagctatgtgtctggtccacgcagctgcccttgtggcggagtatctgagcatgctggaggatcattcgtacctgcctgtggggagcgtgagttttcagaacatttctagcaatgtgttggaggagtccgtagtgtccgaagatacactgagcccggacgaggatggcgtgtgtgccggccagtactttactgagtccggactggtcggcttactggagcaagctgccgagctcttctcaaccggcggattatatgagacggtcaatgaagtctataagctcgtgatacctattctggaggcacatagggagtttcgaaagttgaccctcacacactccaagctacagcgtgcattcgacagcatcgttaacaaagatcataagagaatgttcgggacatatttccgggtgggattttttgggtccaaattcggagatcttgacgagcaagagtttgtgtataaggagccggccatcaccaaactcccagaaatctcgcacaggctggaggctttctacggccagtgttttggagctgagtttgttgaggtgataaaggattcaacgccagttgacaagaccaagttggacccaaacaaggcatatatccaaattacttttgtcgaaccgtatttcgatgaatacgaaatgaaagaccgcgtcacatactttgaaaagaatttcaacctgcggagatttatgtacacgactccttttactttggagggacgcccacgtggcgaactccacgaacagtacagacggaataccgtgctcacaaccatgcatgcgtttccatatatcaaaactcgaatctctgtcatacagaaggaagaattcgtcctcacacctatcgaggtggccattgaggatatgaagaagaaaaccctgcaattggccgttgcgattaaccaggaacccccagacgctaagatgctgcagatggtgcttcaggggagcgtgggtgctaccgtgaatcaaggaccgcttgaagtcgcccaggtctttctcgctgaaatccctgcggaccctaagctgtatcgccaccataacaagcttaggctctgcttcaaggagtttataatgcggtgtggggaggccgttgagaaaaacaagcgcttgattactgctgaccaaagggaatatcagcaggagctgaagaaaaattacaacaagctcaaggagaaccttagacccatgattgaacggaaaatccctgagttatacaaacccatattccgggtggagagtcaaaagagagatagtttccaccgttccagttttcgaaagtgtgaaacccaattaagccagggatcctag

SEQ ID NO: 114264 - DNA, 6300 bp, synthetic construct
  misc_feature 1..6300: note = Description of Artificial Sequence: Synthetic coding sequence
  source 1..6300: mol_type = other DNA
atggccaccctcccgtccgccgaacgccgcgctttcgcacttaaaataaacaggtacagctccgctgagatcagaaaacagttcactttgccgccaaacctgggccagtatcacagacagtccattagcaccagcgggtttccaagcctccagttgcctcagttctatgacccagtggaaccggttgacttcgagggcctgttgatgactcatctcaattctctcgacgtgcaactggcgcaagaacttggggattttacagatgatgacctggatgtcgtgttcacacctaaagagtgcaggaccctgcagcctagcctgcctgaggaaggtgttgaactcgaccctcacgtcagagattgcgtccaaacttatatccgagagtggctgatagtgaacaggaagaaccagggctctccagagatatgcggctttaaaaagacagggtcacgcaaggattttcataagaccttaccgaaacagacattcgagagcgagacccttgaatgttccgaaccagcagcccaagcaggtccaaggcacctcaacgtactgtgcgatgtatcaggcaaggggccagtgaccgcgtgtgatttcgatctccgatcacttcagcctgataagagactggagaacctgttgcagcaggtgtccgccgaggactttgagaagcagaacgaagaagcacggcgaacaaaccggcaggccgaactatttgcactctacccctctgtagatgaggaggacgccgttgagatccgacccgtccccgaatgcccaaaagagcacctaggaaatcgaatcttggtgaaactgctaaccttaaagttcgagatcgagattgagcccttgtttgcaagtatcgctctatacgacgtaaaagaacggaaaaagatatccgagaatttccattgtgatctcaacagtgaccagttcaagggcttccttcgcgcccatactccatccgtggcagcctcgtcacaagccaggagcgcggtgttcagcgttacctatccaagttccgatatttatcttgtggtcaaaatagagaaagtgctacagcaaggcgaaattggtgactgtgcagagccatataccgtgatcaaagagtcagatggggggaaatctaaagagaaaatagaaaaactgaaactccaggccgagagcttctgccagaggctgggcaaatatcgcatgccgttcgcgtgggccccaataagcctttcctccttttttaacgtgtcaacactcgaaagggaagttaccgatgtggatagcgtggtcgggcggtccagcgtaggtgagagaagaactctcgcccagtcaagaagactatccgagcgggcgctgtccctagaagagaacggcgtgggctctaacttcaagacgtccacgctctctgtcagctccttcttcaagcaggagggcgataggttatccgatgaggacctttttaagttcctggcagactacaaaaggtcttcatcattgcagaggcgggtgaaatcaatcccaggcctcctaagacttgaaattagtactgctcccgagataatcaattgttgcctaaccccggaaatgctccccgtgaaacccttcccggagaataggactcggcctcataaggagatcctcgagtttcccacacgggaagtatacgtcccacacacagtgtaccgcaatctgctctacgtttaccctcagcggctgaactttgtgaataagttggcttcagcccgcaacataaccatcaagatccagttcatgtgcggtgaggacgctagcaacgctatgcctgttatcttcggaaaaagctcagggcctgagtttttgcaagaggtgtacactgcagtaacttaccataacaaatccccagacttttatgaggaagttaaaatcaagttacctgctaagctgacagtcaatcaccatttgctctttacattttaccacatctcttgccagcagaaacaaggggcttccgttgaaaccttactgggttactcatggctaccgatcttgctgaacgaaaggcttcagacagggagttactgcctgccagtggctctggaaaagctgccccctaattattctatgcatagcgcagaaaaagtgcctctccagaacccccccataaaatgggccgagggtcacaagggcgtctttaatatcgaagtgcaagcagtatcctcagtccatacccaggacaaccacttggagaagttcttcaccctgtgtcattctctcgagagccaggtaaccttccctattcgcgttcttgaccaaaagatttcagagatggctctggagcacgaattgaaactgagcatcatttgtttgaactcatcccgtctggagccactggttctctttcttcacctggtattggacaagttgttccaactaagcgtccaacccatggtgatcgcaggacagacagcaaacttctcccagtttgcctttgagtccgtggtcgccattgctaattctctgcacaacagtaaagacctgtcaaaggatcagcacggccggaactgtttgttagcatcatacgtccactacgtgttccgactgccagaagttcagcgggatgtgcccaagtccggagcacctaccgctctgctcgatcctcgaagctaccatacttacggaaggacttcagccgctgccgtttcgtcaaagttgcttcaagctagggtaatgtcttcatctaacccagacctggctggcacacattcggccgccgatgaggaagtgaaaaacataatgtcctcaaagattgcagatagaaactgctcccgaatgagctactattgctcgggttcatctgacgctccttctagtcctgcagccccccggcccgcttccaagaagcatttccacgaggaactggccctgcagatggtagtaagcactggaatggttcgggaaaccgtgttcaaatatgcgtggtttttctttgaattgctggtgaagtccatggcgcaacatgtacataatatggacaaacgggactcatttcgcagaaccaggttcagcgacaggttcatggacgatattactactatagtgaacgtcgtaactagtgaaatcgccgctttgttggtgaaaccccagaaagagaatgaacaggccgaaaagatgaacatcagcctggcctttttcttgtatgatctgctctcactcatggatcgcggcttcgtattcaacctgattagacattattgctcacaactttccgccaagttatctaacctgcccacccttatctccatgagactcgagttcctaaggatcctgtgcagccatgagcattatctgaaccttaacttgttttttatgaatgccgacacagcgcctacttcgccctgtcctagtatttccagtcagaacagttcttcatgttcctcatttcaggatcaaaagatcgccagcatgttcgacctgacttcagagtaccggcagcagcacttcttgacgggcttgcttttcactgaattggccgccgccctggacgctgagggagaaggaatttcgaaagtccagcgcaaggccgtgtccgctatccactcgttactgagttctcatgatctcgatccgcgttgtgtaaagcctgaagtaaaagtcaagatcgcagctctgtatctgccgcttgtcggtatcatcctggacgccctgcctcagctgtgtgattttactgttgccgacaccagacggtatcggacatccggtagcgatgaggagcaggaaggcgccggggctattaatcagaacgtcgcccttgctatcgctggtaacaacttcaacttgaaaacttcaggtatagtgctgtcgtctcttccatacaaacagtataatatgctcaacgccgacacgactaggaatctgatgatttgctttctatggattatgaagaacgctgaccagtcgctcattagaaagtggattgcagaccttcctagtacgcagctaaataggattctggacttactgttcatctgtgtcttatgctttgagtataagggcaagcagtcatcggacaaggtgtccactcaggtgttgcagaaatctcgggatgtgaaagctaggctagaagaggcattactgaggggcgagggagcgagaggagaaatgatgcggagacgtgcccccggcaatgatcggtttcctggactcaacgaaaacctccgttggaagaaagagcagacacattggcgacaggccaacgaaaagctggataagactaaagcagaactcgaccaagaggctttgataagtggcaatctggccaccgaagcccacctcataatcctcgatatgcaggagaatattatccaggcgagttctgcactagactgtaaggatagcctgttgggaggcgtgcttagggtgttggtcaattcattgaactgtgaccagagcactacttacctcacccattgctttgctacactccgtgcacttatcgctaaattcggcgatctgcttttcgaggaggaggtggaacagtgcttcgatttgtgtcatcaggtgcttcaccactgctcgtcttctatggatgtgactaggtcacaggcttgcgctactttatacctcctaatgagattctcttttggagccacctccaactttgcccgcgtgaaaatgcaggtgaccatgtcgctggcttccctagtgggccgtgcaccagactttaacgaggagcacctgcggcggtctctgcggaccattctggcctacagtgaagaggacacagccatgcaaatgactccgttccctactcaagtagaggaactcctctgtaacttaaacagtattctctatgacaccgtgaagatgcgtgagttccaagaagaccctgagatgctgatggatctgatgtatcggattgcaaagtcctaccaggcttcacccgacctgaggcttacctggcttcagaacatggctgagaagcacactaagaaaaagtgctataccgaggccgcaatgtgtctggtacatgctgcagcactcgttgccgagtacttgagcatgcttgaagaccactcatacctgcctgttggctctgtgagcttccagaatatatcttctaacgtgctcgaagagtccgtcgtctccgaggatactctctctccagatgaggacggcgtttgcgcaggacagtactttaccgagagcggtttggtggggcttctagagcaagcagccgagctgtttagtacgggtggcctctatgaaacggtgaatgaggtttacaagctcgtgatccccatcctcgaggcccatcgagagttccgcaaactgacgctcacccattccaagctccaacgagctttcgactctatagtcaataaggaccacaaaagaatgtttgggacatactttcgggtggggttcttcgggtctaagttcggagacctggacgaacaggagttcgtctacaaggagcccgctataactaagttgccagagatttcccaccgcttggaggcgttctacgggcaatgcttcggggcagaattcgttgaggtcatcaaagacagcacaccagtggacaaaacaaagctggatccgaataaggcctatatacaaatcacgttcgtggagccatacttcgatgagtacgagatgaaggacagagttacatatttcgaaaagaactttaatttgagacgcttcatgtatacgacccccttcacactggaagggaggcctcgaggagagttgcacgaacaatatcgccgcaacactgtactcacaaccatgcacgcctttccgtatatcaaaacaaggatatctgttattcagaaggaagagttcgtgctcacccctattgaggtagccattgaggatatgaaaaagaaaactttacagcttgcggttgccattaatcaggagcctcctgacgctaaaatgctgcagatggttttgcagggcagcgtaggcgccactgttaatcaaggacctctcgaagtggcccaggttttcctggccgaaattccagctgaccccaagttgtataggcatcataataagctgcgtttatgctttaaagagtttatcatgagatgtggagaggccgtagagaaaaataaaaggctcattaccgctgaccagcgtgaatatcagcaggaactcaaaaagaactacaataagcttaaagagaacctgcggccaatgattgagcgcaaaatccctgagctgtacaaaccaatattcagagtggagtcacagaaaagggatagttttcaccgaagttctttccgtaagtgtgagacacagttgtcccagggatcttag

SEQ ID NO: 114265 - DNA, 6000 bp, synthetic construct
  misc_feature 1..6000: note = Description of Artificial Sequence: Synthetic coding sequence
  source 1..6000: mol_type = other DNA
atgacccacttgaactccttagacgtccagcttgcccaagaactcggcgactttaccgatgatgatctcgacgtggtttttacgcctaaagagtgtcggacgctgcagccatccctccctgaggagggcgtggaacttgatccacatgttagagactgtgtgcaaacatacattcgggaatggctcattgtgaacagaaaaaatcaggggagtcccgagatttgtggtttcaaaaagaccgggtctcgcaaagacttccataaaacactgcctaaacagacattcgaatcagaaactctcgaatgctctgaacctgcagcccaagccggtcccaggcacctgaacgtgctttgcgatgtcagtggaaaggggcctgtcacagcatgcgattttgacctaagaagcctccaacctgacaaacgactggagaacctactccagcaggtctcagctgaggactttgaaaagcaaaacgaggaggctagaagaaccaatcgtcaagccgagctgtttgccctctacccttccgtcgacgaagaggatgctgtggagattcgacccgtgcccgagtgtcccaaagagcatctgggaaatcgcatcctggtgaaactgttgacattgaaatttgaaatcgaaattgaaccacttttcgcatcaatcgcactatatgacgtgaaggagcggaaaaagatatcggaaaacttccattgtgacttgaactctgaccaattcaagggtttcctgcgggcacataccccatcagtagcggcgtccagccaggccagatcagcagtctttagcgtcacgtatccaagctccgatatctatctggtagtgaaaatcgaaaaagttcttcagcagggggaaattggcgattgcgccgagccctacaccgtgatcaaagaatcagatggggggaaatcaaaagaaaagattgaaaaactgaaactgcaggcagagtcgttttgccagcgcctgggtaaatataggatgccttttgcgtgggcccccatatctttgtcctctttcttcaacgtgtctaccttggagcgcgaggttaccgacgttgacagtgtggttggtaggtcatcggtcggcgaacgccgtaccctggcccagtccaggcggctcagcgagagagccctgagtttggaagagaacggagtcggaagcaattttaaaaccagtactctgagcgtctcctccttcttcaagcaggaaggtgacaggctgtccgatgaagatctgtttaagttcttggctgattacaagcgatctagctcactacagcggcgggtgaaatctatcccgggcttactgcgtctagagataagcaccgcccccgaaattatcaactgttgtcttacaccggaaatgttgccggtgaaacccttcccggagaatcgaactaggccgcataaggagatcttggagtttcctacccgagaggtctatgtcccacacactgtgtatcggaacctgctttatgtgtatccgcagcggttaaacttcgtgaacaaattagcatcggcacggaacataacaattaagatccagttcatgtgcggagaagacgcaagcaatgctatgccagtgatctttggtaagtcttctggcccagaattccttcaggaggtgtatacggcggtcacgtatcacaacaagtcaccagatttttacgaagaagttaaaatcaagttgcctgccaagctgaccgtgaatcatcacttgttgtttacattctatcatattagctgtcagcagaagcagggcgcatccgtggagactttactgggatatagttggcttcccatcctgctcaatgagaggctccagacaggcagctattgcttgccggtcgccctcgaaaaattgccccccaactacagcatgcactccgcggagaaagtaccactgcagaatcccccgataaagtgggctgaaggtcataaaggcgttttcaatattgaggtgcaggctgtttctagcgttcatacccaggacaatcacctcgagaagtttttcactctctgccatagcctcgagagccaagtgaccttcccaatcagagtgcttgatcagaaaatttcagaaatggccctggagcatgagctcaagctgtcaatcatttgccttaatagctcccgacttgagcccctggtgctcttcctgcaccttgtcctcgacaaacttttccagctgtctgtacagccgatggtgatcgccggtcaaactgccaacttttcccaattcgctttcgaatcagtggtggcaatcgcaaactccctgcacaatagcaaggatttgtctaaagatcaacatggcagaaattgtctgttagcatcctatgtgcactacgtgttccggttgcctgaggtacagcgcgacgtgccaaaatctggtgctcctacagcattgctggatccgcgttcctaccatacgtatggtcgcacctcggcggcagccgtttcctccaagcttctgcaggcacgcgtaatgagctctagtaaccccgacctggccggaactcattctgccgcagacgaagaggtgaaaaacattatgagttcaaagcatttccacgaggagctggctctgcagatggtagtctctaccgggatggtaagggaaaccgtttttaaatatgcctggttcttttttgagctgcttgtaaaaagcatggctcagcacgtccacaatatggataaacgggacagcttccgaaggacaaggttcagtgacaggtttatggacgacattactactatagtcaacgtcgttacttctgaaattgcggctctgctggttaagcctcagaaagagaatgagcaggctgagaagatgaacattagcctggctttcttcctgtacgatctgttgagcctaatggacagaggttttgtgttcaacttgatcagacactattgttcacagctaagcgctaagttatccaacctgcccacgctgatctcgatgcgcctggagtttctcaggattttatgttcacacgagcattatttgaacctcaatcttttctttatgaacgcagataccgcacccactagtccatgccccagcatctcttcccaaaactctagctcctgcagcagtttccaggatcagaaaattgcctcaatgttcgatttgacttcagagtacaggcagcaacatttcctgaccggcctactcttcaccgagctcgccgctgcgctcgacgcagagggagagggaatttctaaggtacagcggaaagcggttagtgctatacacagcctgcttagttcccatgacctagatccaagatgcgtcaaacccgaagtaaaggtaaaaatcgccgcactatacctgcctcttgtgggcattattttagatgcactgccgcaactgtgtgacttcaccgtcgccgatacacgcaggtatcgtacctctgggagtgacgaggaacaggagggagcaggagcaataaatcagaacgtcgcactcgctatcgctggtaacaattttaacctgaagacatctggcatcgtcctgtcttcactcccctacaagcagtacaacatgctgaacgccgatactacacgcaacctgatgatctgttttctatggattatgaaaaacgccgaccagtccctcatccgcaaatggattgctgacctgcctagcacccaactaaataggatcttggatctcctattcatttgcgtgctatgcttcgaatataagggtaagcagagtagcgacaaagtaagtacacaggtactgcaaaagtctcgcgacgtgaaggcaaggctcgaagaagccctgttgagaggggaaggtgctagaggcgagatgatgcggcgccgtgcccctgggaatgatagattcccaggtttgaatgagaacttgcggtggaagaaggaacagacgcattggcggcaggctaatgaaaaactggataaaacgaaggccgagttggaccaagaagcactcattagcggaaacctggccaccgaagcccaccttatcatcctcgatatgcaggagaacattattcaggcctcatcagcgctggattgtaaagatagccttctggggggcgtgctaagggtgctggtgaacagtctgaactgcgatcagtctaccacctatctgacccactgcttcgccaccctgcgagcgctgattgctaagttcggggacctgctgttcgaagaggaggtcgagcagtgcttcgatctctgtcatcaggtcctgcaccattgctcttcttcgatggatgtgactaggagccaggcttgcgccacgctgtacctgttaatgcgatttagcttcggtgctacatccaatttcgctagagtgaagatgcaggtgactatgtctctggctagcctcgttggccgcgcccccgactttaatgaggaacatctgaggcgttccctgcgcacaattctggcctatagtgaggaggacaccgcaatgcagatgacccccttcccaactcaggttgaggaacttctgtgcaatctgaattccatcctgtacgacacggtgaagatgcgggaatttcaggaagacccggagatgctgatggatcttatgtaccggatcgccaagtcgtaccaagccagccccgatcttagactgacatggctgcaaaatatggcagagaagcacactaaaaaaaagtgttacactgaggcagccatgtgccttgtccatgcagctgcattggttgctgaatatctctctatgttggaagatcatagttatcttccagtgggtagcgtatctttccagaatatttcgtctaatgtgctcgaggaatcggttgtttcggaggacacgttgagccccgacgaggatggcgtctgcgccggtcagtacttcacagagagcggcttggtggggctcctggagcaggcggcagaattgttctcaactggggggctgtacgagaccgtaaacgaggtgtataagctggtgattcctattttggaggcacatcgcgagtttagaaagctcactctgacacactcgaaactccagcgcgccttcgactcaatcgtgaataaagaccacaagcggatgtttgggacatatttccgtgtcggattttttggatcaaagttcggtgatctggacgagcaggagttcgtgtacaaagaacccgctattacaaagcttccagaaatctcccaccgcctagaagctttctacgggcagtgcttcggcgccgaatttgtggaggtcataaaggactccaccccagtggataaaacaaagctcgatccgaacaaagcctatatccaaatcacgtttgtcgagccatattttgatgagtacgaaatgaaggatcgagtgacctatttcgagaagaatttcaaccttcgtcgcttcatgtacaccaccccattcactctggaaggaagacctcggggcgaactgcacgagcagtatagacgcaacactgtcctgaccacaatgcacgcattcccctacattaagactcgaatttctgtcatccagaaagaggagttcgtcctgaccccaatcgaggtggcgattgaggatatgaaaaagaaaactctgcaactggccgtggctatcaatcaagaacctcccgacgcgaagatgctgcaaatggtcctgcagggaagcgtgggcgccactgtgaaccaaggtcccctggaagtcgcacaggtgttcttggccgaaatccctgcagatcctaagctttataggcatcataataaattgaggctctgcttcaaagagttcatcatgcggtgcggcgaggcagtggagaagaataaacggttaattactgcagatcagcgcgagtatcagcaagagcttaaaaagaactacaacaagctgaaagaaaatctccggccaatgatcgagcgcaagatccctgagttgtacaaacctatttttcgagtggaaagtcagaagcgggacagcttccacagaagctccttccgcaaatgcgagactcagctgtcccaggggagctag

SEQ ID NO: 114266 - DNA, 1182 bp, synthetic construct
  misc_feature 1..1182: note = Description of Artificial Sequence: Synthetic coding sequence
  source 1..1182: mol_type = other DNA
atgaagagaacccgcgatgaggtggatgcaactctgcagatcgccaaactgaacgctgccgagttgctgccagccgtgcactgcctcggtttcggacccggggccagtggagcggccgcaggcgacttttgccttctggagctggagcctactctatgtcagcagctggaagatggtcattctcttgtaattcggggtgacaaggatgaacaagcagtgctttgttccaaggataaaacctacgatctcaagatagccgacacatccaacatgctactgtttatccctggatgtaaaacccccgaccagctgaaaaaggaggattcgcactgcaacataatacatacagagattttcggtttctcaaacaattactgggaactcagacggagacgacccaagttaaaaaagctgaaaaagctcctgatggagaacccatacgaagggccggattcgcaaaaggagaaggattcaaacagctccaaatatactacggaagacttgcttgaccaaatccaggcaagcgaggaggagattatgacccagctgcaggtgctgaatgcatgtaaaattgggggttactggcggattctggagtttgattacgagatgaagctcctgaatcacgtaacacagctcgtggattccgaatcctggagctttggtaaggtacccctaaatacttgcctgcaagagctcggccctcttgaacctgaggaaatgattgagcactgtttgaagtgctatggtaagaaatatgtggatgagggtgaagtgtactttgaactggacgctgacaagatatgtcgggcggccgctaggatgctgttgcagaacgccgtgaagttcaatctggcggagttccaggaggtctggcagcaatctgttccggaaggcatggtgaccagtctggatcaactgaaggggctagcactggtggacaggcattcacgcccggagatcatcttcctccttaaggtggatgatctgccagaggacaaccaggagcgatttaacagtctcttttccctgcgcgagaaatggaccgaagaggacattgctccatacattcaggatctgtgcggcgaaaaacagacaatcggcgcactgctgacaaagtatagtcactcaagcatgcaaaacggtgtgaaagtgtataacagtcggcggcctatctcatag

SEQ ID NO: 114267 - DNA, 342 bp, synthetic construct
  misc_feature 1..342: note = Description of Artificial Sequence: Synthetic coding sequence
  source 1..342: mol_type = other DNA
atgtctgcttctgtggttagtgttatcagcaggtttctggaggagtacttgagctctacccctcaacgactgaaattgctggatgcctacctgttgtatatcctactgaccggcgcgctccagttcggctactgtctgcttgtgggaacttttccgtttaacagctttctgtcagggttcatctcctgcgtggggtccttcattcttgcagtttgtctgaggatccagattaatccgcagaataaagctgattttcaggggattagcccggagagggccttcgccgatttcctctttgcctctacgatactgcatctggtagtgatgaacttcgtgggctag

SEQ ID NO: 114268 - DNA, 285 bp, synthetic construct
  misc_feature 1..285: note = Description of Artificial Sequence: Synthetic coding sequence
  source 1..285: mol_type = other DNA
atgcggactctagccatcttggcagcaatactcctcgtggcattacaagcacaggccgaacccctacaggcccgtgcggatgaggtggcagctgcccctgaacagatcgcagcagatattcccgaagtcgtcgtatccctggcatgggatgaaagtttggctccaaagcatccaggttctcgcaaaaatatggcatgctattgtcgcatcccggcctgtattgcgggtgaaaggcgatacggcacatgcatttatcaaggcaggctatgggccttttgctgttag

SEQ ID NO: 114269 - DNA, 285 bp, synthetic construct
  misc_feature 1..285: note = Description of Artificial Sequence: Synthetic coding sequence
  source 1..285: mol_type = other DNA
atgagaacactcgccatcttggctgccatcttactcgtggcactgcaagcacaggctgagccactgcaggcacgcgccgatgaagtagctgcggcacccgagcagatcgcggctgatatccccgaagttgtggtgagtctggcatgggacgagagtcttgcgccaaaacacccggggtctcgcaagaatatggcgtgctattgcaggataccagcatgtatcgccggtgaacgccgctatggcacctgcatctatcaaggaagattgtgggccttctgctgctag

SEQ ID NO: 114270 - DNA, 294 bp, synthetic construct
  misc_feature 1..294: note = Description of Artificial Sequence: Synthetic coding sequence
  source 1..294: mol_type = other DNA
atgcggataatagctctcttggccgcgattttgctggttgcacttcaggtccgtgccgggccattacaggctcggggtgacgaagctcctgggcaagagcagagaggacccgaggaccaggatatcagtattagcttcgcatgggacaagagctctgcactgcaagtgtccggaagcacgcgagggatggtctgtagctgccggttggtattctgtagaagaactgaattaagagtcggaaattgtcttatagggggcgtctctttcacctactgctgtacaagagtcgattag

SEQ ID NO: 114271 - DNA, 285 bp, synthetic construct
  misc_feature 1..285: note = Description of Artificial Sequence: Synthetic coding sequence
  source 1..285: mol_type = other DNA
atgcggaccatcgccatcctggccgccattctgttggtggcattacaggcccaggccgaaagtctgcaggaacgggcagatgaggctaccacccaaaagcagtcgggggaagataatcaggaccttgccattagctttgctggaaacgggctgagcgctctgcgaacatctggctcacaagcaagggccacctgttattgccgcaccggccggtgcgccacaagagagagtctgagtggcgtgtgtgagatcagtggcagactttatcggctgtgttgccgttag

SEQ ID NO: 114272 - DNA, 303 bp, synthetic construct
  misc_feature 1..303: note = Description of Artificial Sequence: Synthetic coding sequence
  source 1..303: mol_type = other DNA
atgcgaacgcttactattttaactgccgtgctactcgtggctctccaggcaaaggccgagcccctccaggcggaggacgatcctttgcaagcgaaggcttatgaggccgacgcccaggagcagaggggcgccaatgatcaagacttcgccgtgtcttttgcagaggatgccagttcctcgctgagagccctgggctctacaagggcattcacatgccactgtcgtcggagttgctacagtactgagtactcctatggaacttgcactgtgatgggcattaaccataggttctgctgcctgtag

SEQ ID NO: 114273 - DNA, 207 bp, synthetic construct
  misc_feature 1..207: note = Description of Artificial Sequence: Synthetic coding sequence
  source 1..207: mol_type = other DNA
atgagaacaagctacctactgctgttcactctgtgtcttctgcttagtgagatggcttctggcggtaattttcttactggtttgggccatagatcagaccactacaattgcgttagttccggcggtcagtgtttgtactcagcatgtccaatctttactaaaatccagggcacatgttacagggggaaagcaaagtgctgtaagtag

SEQ ID NO: 114274 - DNA, 372 bp, synthetic construct
  misc_feature 1..372: note = Description of Artificial Sequence: Synthetic coding sequence
  source 1..372: mol_type = other DNA
atgaagttactccttctggccctgccaatgctcgtcctgcttccacaggtcatccctgcctactccggggagaaaaaatgttggaaccgcagcggacactgtcgtaaacagtgtaaagatggtgaggcggtcaaagacacctgtaagaacctcagggcatgctgcatccccagtaacgaggaccaccgacgggtgcccgccaccagccccacccctttgtcagattcaactccgggcataattgatgatattctgacggtccggttcactacggactacttcgaggtgagcagtaaaaaggacatggtcgaagagagtgaagccggccggggcactgaaacatccctgccaaatgtccaccattcctcatag

SEQ ID NO: 114275 - DNA, 1002 bp, synthetic construct
  misc_feature 1..1002: note = Description of Artificial Sequence: Synthetic coding sequence
  source 1..1002: mol_type = other DNA
atgtcttggattaaggaaggagaattaagcttgtgggagagattttgtgcaaatatcatcaaggctggccctatgccaaagcatatcgccttcatcatggatggaaatagacgatacgctaagaaatgtcaggtcgaacgacaggaggggcattcccagggctttaacaaactcgcagaaactctccgttggtgccttaaccttggaatcttagaggttacggtgtatgcgtttagcatcgaaaatttcaagagatctaagtcagaagttgacggtctcatggatctggcaaggcaaaaatttagtagactgatggaagaaaaagagaagctccaaaagcacggcgtctgtattagggttttaggggacttgcacctcttgccgcttgacctgcaggagctgattgcccaagccgttcaggccaccaagaattacaacaaatgttttctaaacgtctgctttgcctatacttccaggcacgaaatctctaatgcagtcagagaaatggcctggggcgtagaacagggcctgctggacccatccgatatcagtgagtcactgctagataagtgtctgtacaccaatagaagccctcaccctgacatcctgatacgtacttccggagaagtccgactgtctgatttcctgctatggcagacttctcattcctgtcttgtctttcagcctgtgctgtggccagagtacactttctggaacctgtttgaagccatcctccagtttcagatgaaccacagtgtcctccagaaggccagagacatgtacgccgaagagaggaaacggcagcagctggaaagagaccaggcaactgtgaccgagcagttgctgcgggaagggctccaggcatccggcgatgctcaactccgccgtacccggttacacaagctgtcagcacgaagagaagagagggtgcaggggttcctccaggccctcgaactaaaaagggccgactggcttgctaggctcggcacagccagcgcttag

SEQ ID NO: 114276 - DNA, 1005 bp, synthetic construct
  misc_feature 1..1005: note = Description of Artificial Sequence: Synthetic coding sequence
  source 1..1005: mol_type = other DNA
atgtcttggatcaaggaaggcgaattgtcactgtgggaacgattctgtgctaatatcattaaggccgggccgatgccaaaacatatcgcttttatcatggatggtaaccggcggtacgccaaaaaatgccaggtggagcgtcaggaggggcacagccaagggttcaacaaactggccgaaaccctgaggtggtgtcttaacctgggtatactcgaggtaacagtctatgctttctctatcgaaaattttaagcggtctaaatctgaagtggacggcttgatggatctcgccaggcagaaattttcgcgactgatggaggagaaagagaaactgcagaaacacggggtctgtattcgggtactgggggatctgcacctgctccctctagacctccaggagctgattgcacaggccgtgcaggccacaaagaattacaataagtgtttcctgaacgtatgcttcgcctacacatcgaggcacgagatatcaaacgcagtcagggaaatggcctggggcgtggagcagggcttgctcgacccttcagatatttcagaatcgctgctggacaaatgtctctacaccaacaggtctccccaccctgatatcctgataaggacatctggcgaagtcagactgtcagattttctgctgtggcagacctcacacagttgcctagtcttccagcccgtcctgtggccggaatacaccttctggaacttgttcgaggctattctgcaatttcagatgaaccacagcgtgctacagcaaaaggccagagatatgtacgcagaagagcgaaaacggcagcaactggagcgagaccaagcgaccgtaacagagcagctgctaagggaaggtctccaagcctctggcgacgcccagctccgtaggactagattgcataaattatccgcccgccgagaagagcgcgtgcaggggttcctgcaggccctcgaactgaaaagagccgactggttggctcgcctcgggacagcttccgcctag

SEQ ID NO: 114277 - DNA, 516 bp, synthetic construct
  misc_feature 1..516: note = Description of Artificial Sequence: Synthetic coding sequence
  source 1..516: mol_type = other DNA
atggacttagctagacagaagttctcccgactgatggaagaaaaggagaagctgcagaaacacggagtgtgcattcgggtgttgggggacctccacctgctccctcttgatctgcaggaactgattgcacaggcagtgcaagcaacaaagaattataataacgatatttccgagtccctgcttgataaatgcctgtacaccaaccgctctccgcatccagacattctcatccgcacatctggagaagtgcggttgagtgattttctgctgtggcagcagaaagcgcgggacatgtatgccgaggagcggaagagacagcagctggaacgggatcaagccactgtgactgagcagctcttgagagaaggcttacaggcctccggggatgcacaactccggagaaccagactacacaagcttagtgcccgacgtgaagagcgcgtgcagggattcctgcaggccctggagctgaaaagagccgattggttggcccgcctcgggacagccagtgcttag

SEQ ID NO: 114278 - DNA, 501 bp, synthetic construct
  misc_feature 1..501: note = Description of Artificial Sequence: Synthetic coding sequence
  source 1..501: mol_type = other DNA
atggatggcaacaggcgttatgctaaaaaatgtcaggtggagcgccaggaggggcacagccaggggttcaataaactggcggagacgttacgatggtgccttaatctcgggatcttagaggtgactgtgtacgccttctccatcgaaaattttaagcggagtaagtctgaggtggacggtttgatggatctggcaagacagaaattttccagacttatggaggagaaagagaaactgcagaaacatggcgtgtgtatccgcgtcttgggcgatttgcacctcctccctctggacctgcaggagcttatagcccaggctgttcaggccaccaaaaactacaacaaatgtttcctcaacgtgtgtttcgcgtacacaagcagacatgaaatttcaaatgcagtgcgtgagatggcatggggtgtggaacagggactcctggacccgtcccgggaccgctttcatcacattgggcaggcctccctagagttgctgacctcctag

SEQ ID NO: 114279 - DNA, 546 bp, synthetic construct
  misc_feature 1..546: note = Description of Artificial Sequence: Synthetic coding sequence
  source 1..546: mol_type = other DNA
atggaggagaaggagaagttacagaagcacggtgtttgcattagggtcctgggagacttacatctcctgcccctggaccttcaagaactaattgctcaggctgtacaggccacgaagaactacaacaaatgtttcctcaatgtctgtttcgcttacaccagtcgacatgagattagtaacgccgtgcgggaaatggcttggggcgtggaacagggcctccttgatcctagtgacatctcggagtcccttctggataaatgtttgtatacaaacagaagtccccacccagatatcctcatccggacttccggggaagttcgcttaagtgatttcctgctctggcaaacaagccattcatgcctagtttttcagccagttctatggcctgagtatactttttggaacttattcgaggcaatcctgcagttccagatgaatcactctgtgctccagcacccagggagcctgcttacaaaggcctggaaaaagcctttccagcaagatggggagctatacgggaactgtagcagccctaaatccagctag

SEQ ID NO: 114280 - DNA, 669 bp, synthetic construct
  misc_feature 1..669: note = Description of Artificial Sequence: Synthetic coding sequence
  source 1..669: mol_type = other DNA
atgtcttggatcaaagaaggggaactctcactgtgggagaggttctgtgccaatatcatcaaagccggccccatgccaaaacatatcgcattcataatggacggtaacaggcgttatgccaagaagtgtcaggtggagcggcaagagggtcacagccagggatttaataaacttgctgagactctcagatggtgcctgaacctgggcattctggaagtcacagtatacgcgttcagtatcgaaaacttcaaacgcagcaagtctgaagtggatggcctcatggacctcgctagacagaagttcagccgtcttatggaggagaaagagaagttacagaagcacggcgtctgcatcagggtactgggggatcttcatttgctacccctagacctgcaggagctgatcgcccaagctgtgcaagccactaagaactataacaaatgcttcctgaacgtatgtttcgcctacacttcgcgccacgagataagtaatgctgtccgagagatggcctggggggttgagcagggtctgctagacccacgctatccagacgacattagcgagtccctcctggataagtgtctgtacacaaacaggtcgccacatcctgacatcctgataaggactagcggcgaagtcaggctcagcgatttcctgctatggcagtag

SEQ ID NO: 114281 - DNA, 369 bp, synthetic construct
  misc_feature 1..369: note = Description of Artificial Sequence: Synthetic coding sequence
  source 1..369: mol_type = other DNA
atgagctggattaaggaaggtgagttgagcctgtgggagagattctgtgctaacatcatcaaggccggaccaatgcctaaacatattgccttcatcatggacggaaataggagatacgcgaaaaagtgccaggttgagaggcaggaaggccatagtcagggtttcaataaactcgctgaaactctgagatggtgtctcaatctggggatcttggaagtgaccgtgtatgctttctcgatcgagaattttaagaggtccaagtctgaggtcgacggcctgatggacttggcacgtcagaaatttagcaggctgatggaggagaaggaaaagctgcagaaacatggcgtgtgtatcagagttctggggtag

SEQ ID NO: 114282 - DNA, 216 bp, synthetic construct
  misc_feature 1..216: note = Description of Artificial Sequence: Synthetic coding sequence
  source 1..216: mol_type = other DNA
atgagttggattaaggagggggagctgagcctgtgggagagattctgcgccaatatcattaaggctgggccaatgccaaagcatatagcctttattatggatgggaacagacgctacgctaaaaaatgtcaggtggaacggcaggagggccattctcagggttttaataaacttgcggaaacactgcggtggtgtctcaatttgggtatactctag

SEQ ID NO: 114283 - DNA, 258 bp, synthetic construct
  misc_feature 1..258: note = Description of Artificial Sequence: Synthetic coding sequence
  source 1..258: mol_type = other DNA
atgtcatggattaaagagggggaactatctctctgggagcgcttttgtgcaaatattatcaaggctggcccgatgcctaagcacatcgccttcatcatggatgggaatcgccgctatgctaagaagtgccaggtggaacggcaggaaggtcactctcaagggttcaacaaactggctgagaccctcaggtggtgtctcaacctcggcattcttgaggttacagtgtacgccttttcgattgagaactttaagcgctag

SEQ ID NO: 114284 - DNA, 885 bp, synthetic construct
  misc_feature 1..885: note = Description of Artificial Sequence: Synthetic coding sequence
  source 1..885: mol_type = other DNA
atgagctggatcaaggagggggagctatcactctgggaacgcttttgcgccaatatcattaaggccggacccatgcctaaacatatcgcgtttatcatggacggcaacagacggtacgctaaaaaatgtcaggtggagcggcaagagggccactcccagggatttaataagctcgcagagacgctgcggtggtgtctcaatctaggtatcctcgaagttacagtgtacgcattcagtatcgagaactttaagcgcagtaaatctgaggtggatgggctaatggatctcgcccgtcagaaattctcgagactaatggaagagaaatgcttcctgaacgtctgctttgcgtatacctcacggcacgaaatctcgaatgctgtgcgggagatggcctggggagttgagcaggggctgctcgatcccagtgacatttctgaatccctgctggacaagtgtctgtacactaaccggtcccctcatcctgatatcctgatccgcaccagcggtgaagtcaggttatccgatttcctgctgtggcagactagtcatagctgcctcgttttccagccagttctgtggccagagtatactttttggaatcttttcgaagccatcctgcagtttcagatgaatcactcagtactccagaaagcccgtgatatgtacgccgaagagaggaaacggcagcagttagagcgagatcaggccacggtaactgagcaacttttaagagagggtctacaagcctcaggagacgcgcaattgcggaggaccagattgcataaactgtcagcgcggcgagaggagcgtgtgcaagggttcttacaagctctcgagcttaaacgagctgattggctggccagactgggtacagcttccgcctag

SEQ ID NO: 114285 - DNA, 183 bp, synthetic construct
  misc_feature 1..183: note = Description of Artificial Sequence: Synthetic coding sequence
  source 1..183: mol_type = other DNA
atgtcttggatcaaagaaggtgagctgagcctgtgggagaggttttgcgccaatattatcaaggcaggcccaatgccgaagcacatcgcttttataatggatggaaacagaagatatgccaagaaatgtcaggtcgaaaggcaggaagggcacagccagggcttcaacaaactggctgagtag

SEQ ID NO: 114286 - DNA, 396 bp, synthetic construct
  misc_feature 1..396: note = Description of Artificial Sequence: Synthetic coding sequence
  source 1..396: mol_type = other DNA
atgagttggattaaggagggtgagctgtcactgtgggagcggttctgtgcgaatattataaaagcaggtccaatgcccaaacacatcgccttcattatggacggcaacaggcggtatgctaaaaaatgccaagtcgaacgacaagaggggcatagtcagggctttaacaaattggcagaaacactgaggtggtgcttgaatcttgggatacttgaagtaaccgtctacgcatttagcatagagaactttaaacgctccaagagtgaggtggacgggcttatggacctggcacgccagaagttcagccgtttaatggaggaaaaagagaagttgcagaaacacggagtgtgtataagggtgcttggcgatctgcatctccttccactcgacctgtag

SEQ ID NO: 114287 - DNA, 501 bp, synthetic construct
  misc_feature 1..501: note = Description of Artificial Sequence: Synthetic coding sequence
  source 1..501: mol_type = other DNA
atgagctggattaaggaaggcgaattgtcgctgtgggaaaggttttgcgccaatattatcaaagctggcccgatgcctaaacacatagccttcataatggacggaaaccggagatacgctaagaagtgtcaagtcgagaggcaggaaggtcattcccaaggtttcaacaagctggccgaaacgctgaggtggtgtctgaacttgggaatcctggaagttaccgtgtacgccttttctatcgagaactttaagcggtcaaagtccgaagtggatggcttaatggacctggccaggcagaaattctctaggttgatggaagagaaagaaaaattgcagaagcacggagtctgtattcgcgtcctgggagatcttcatctgctgccactcgacctgcaggaattgatagctcaagcagtgcaagccactaagaattataataagtgttttctaaatgtatgcttcgcatacacctcacggcacgagataagtaacgcagtgtag

SEQ ID NO: 114288 - DNA, 909 bp, synthetic construct
  misc_feature 1..909: note = Description of Artificial Sequence: Synthetic coding sequence
  source 1..909: mol_type = other DNA
atggtgtggaaacggctcggggctctggttatgtttcccctgcaaatgatttatcttgtggtgaaggccgccgtcggcctggtcctgcccgctaagctccgcgacttgagtcgagagaatgtgttgattaccggcggcggcagaggtattggccgtcagctggcccgagaatttgctgaacgtggtgcacgcaagatcgtcctgtgggggcggacagagaagtgtctgaaagagaccacggaagagatccgtcagatgggaacagagtgccattattttatctgtgacgtggggaatcgggaggaggtgtaccaaacggcgaaggcagtgcgggagaaggtgggggatatcaccatcctggtcaataacgccgctgtcgtgcatggaaagagcctgatggattccgacgatgatgccctgttaaaatctcaacatattaacacacttggtcagttttggactactaaggcgtttctgccaagaatgctggagctgcagaacgggcatatcgtttgtctgaattccgtgttagccctgagcgccattcctggtgcgatcgattactgcacatctaaggcttctgcgtttgccttcatggagagccttacattggggcttctagattgtcccggtgtaagtgccaccacagtgctcccttttcacacaagtactgagatgtttcaaggcatgagagtgcggttccctaacctgttcccacctctgaagccagagaccgtggcaagacggacagtcgaagccgtgcaactaaaccaggccctgctgctgttaccctggactatgcatgcacttgtgatcctaaagagtatactgccacaagctgcccttgaggagattcacaaattcagcggcacttatacctgcatgaatacctttaaggggcgtacatag

SEQ ID NO: 114289 - DNA, 444 bp, synthetic construct
  misc_feature 1..444: note = Description of Artificial Sequence: Synthetic coding sequence
  source 1..444: mol_type = other DNA
atggggaccgaatgccactattttatttgtgacgttggcaaccgtgaagaggtttatcagacagctaaggctgtgagggagaaggtgggagatatcacgatcctggtgaacaacgctgccgtcgtgcatggtaagagtttgatggacagcgacgatgatgctctgctgaaatctcagcacattaatacactggggcagttttggaccactaaggcctttctcccccggatgctggaattgcagaatggccacattgtgtgtctcaattccgtgttagcactgtctgccatccccggggctatcgattattgcacatccaaggcttctgcattcgccttcatggagtcactcacactcggactgctcgactgccctggcgtttccgctaccacagtcctcccattccacacctctacagaaatgttccagggcatgagagtgtag

SEQ ID NO: 114290 - DNA, 423 bp, synthetic construct
  misc_feature 1..423: note = Description of Artificial Sequence: Synthetic coding sequence
  source 1..423: mol_type = other DNA
atggctagttccggtatgacaagacgagatccgctagccaacaaggtcgctctcgtgactgccagtaccgacgggatcggttttgctattgcgagacgactcgcccaggacggcgcccatgtggtcgtttcctcccgtaagcagcagaatgtggaccaagcagtggccaccctccaaggggaaggattatccgtgaccggcactgtgtgccatgtgggaaaagccgaagatcgggaacgactcgtcgcaactctctggatggataaggaaaaagaagagagtatgaaggaaactttgcgtatcagaagattgggcgagcccgaagattgcgccggtatcgtctccttcctttgctccgaagacgcttcatatattactggcgagactgtcgtggtcggcggcggaacccctagcagattgtag

SEQ ID NO: 114291 - DNA, 837 bp, synthetic construct
  misc_feature 1..837: note = Description of Artificial Sequence: Synthetic coding sequence
  source 1..837: mol_type = other DNA
atgcataaagccggtctgctaggcctgtgtgctcgcgcttggaactccgttaggatggcttcatccggaatgactagaagggatcctcttgccaacaaggtggcactggttacagcttcaacagatggtatcggcttcgctatcgctcggaggctggcccaggatggagcacatgttgtggttagttccaggaaacagcaaaatgtagatcaagccgtcgcaaccctccagggagaaggtctctctgtgactggcactgtttgtcatgtggggaaagcagaggatagagagagactggtcgccacagccgttaaactgcatggggggattgatatcctggtgtctaatgcggcagtcaaccctttttttggtagcattatggacgtgactgaagaggtttgggataaaactctggatattaatgtgaaagctcctgccctcatgactaaggccgtggtgcccgaaatggaaaaaaggggtggaggttccgtcgtaattgtgagcagtattgcggcttttagtccatctcccggattttctccatacaatgtgagtaagaccgcgctgctgggcctgaccaagactctcgccattgaactggccccaagaaacatccgggtcaactgtctcgcccccggcctaattaagacaagtttctcacggatgctgtggatggacaaggagaaggaagagagcatgaaggagactctcagaatccgacggctgggtgaaccagaagactgcgccgggattgtgtcctttctgtgttcagaggacgcctcctacatcaccggggagacagttgttgtcggcggcggcactcctagccggctgtag

SEQ ID NO: 114292 - DNA, 513 bp, synthetic construct
  misc_feature 1..513: note = Description of Artificial Sequence: Synthetic coding sequence
  source 1..513: mol_type = other DNA
atggcaagttccggcatgactcggcgcgacccactggcaaacaaggttgccttagtcactgcgtctactgatggcatcggattcgcgatcgctcggcgactggcccaggacggcgcacatgtggtcgtgtcctctaggaaacagcaaaacgtagaccaggccgtggccacactgcagggtgaggggctctccgtaacaggtacggtatgtcacgtcggtaaagccgaagaccgtgaacgactggttgctaccgcagtgaagctgcatggagggatagacatattggtctccaatgcggcagtaaatccttttttcgggagtattatggacgtgacagaggaggtgtgggacaagaggagattgagcggagatcgcgtatttcactcaagcctgcaaagtatcagcagtttagacggtcaggggaagcgaggcaaacatgagcggaatcctgccgataagaaggtcaggcgagcgcgagggctgtgctggcaccgtgtttttcccgttctctag

SEQ ID NO: 114293 - DNA, 546 bp, synthetic construct
  misc_feature 1..546: note = Description of Artificial Sequence: Synthetic coding sequence
  source 1..546: mol_type = other DNA
atggccagtagcggaatgacccggagggatccattggcaaataaggtggccctagtgactgcctctactgatggaataggttttgctatagcacggaggctcgcccaggacggagctcacgtcgtagtgtcgtccagaaagcagcaaaacgtagaccaggccgtggccactttgcagggcgaggggctgtccgtgactggcacggtgtgccatgtgggaaaagcggaagacagagagcgattggttgctaccacactggacatcaatgtcaaagcccctgccctgatgactaaggcagtagttccagaaatggaaaaacgcggaggcggtagcgtggtgattgtaagttcgatagccgcttttagccctagcccgctctggatggataaagagaaggaagagagcatgaaggaaacactgcggatccggcggctgggagaacccgaagattgcgcgggcatcgtgtcgtttttgtgtagtgaggacgctagctacataacaggagaaactgttgtcgtgggggggggtacgccatcgaggctgtag

SEQ ID NO: 114294 - DNA, 477 bp, synthetic construct
  misc_feature 1..477: note = Description of Artificial Sequence: Synthetic coding sequence
  source 1..477: mol_type = other DNA
atgcataaagctggattgctcgggctgtgtgcccgcgcgtggaacagtgtcagaatggcttccagcgggatgactcggagagatcctctggctaacaaagtagctctggtgactgccagcacggacgggattggtttcgcaatcgccagacgcctggctcaggacggcgcccatgtggtggtctcctcacggaagcaacagaacgtggaccaggccgtggcaactttacagggagaggggctgagtgtgacaggaaccgtctgtcatgttgggaaagctgaggatcgggagcgactggtggctaccctgtggatggacaaggagaaggaagagtcgatgaaggagactctcaggatcaggcgacttggagaacccgaagactgcgcagggatcgtgtcctttctctgcagcgaggacgcatcctacattacgggagaaacagtggtcgtgggcggcggcacaccaagtcggctttag

SEQ ID NO: 114295 - DNA, 579 bp, synthetic construct
  misc_feature 1..579: note = Description of Artificial Sequence: Synthetic coding sequence
  source 1..579: mol_type = other DNA
atgcacaaagcaggactgctggggctctgcgctcgggcctggaactcagttcggatggcctcctccggcatgactcgccgagaccccttggccaataaagtcgccttagtgaccgcaagtacggatgggattggatttgccattgcccggaggttggctcaggacggggctcatgtggtggtctccagccgaaagcagcagaacgtggaccaagccgtcgctactctgcagggtgagggactatccgtgacggggacggtttgtcacgtaggcaaggctgaagaccgcgagaggttggttgccacggccgttaaacttcacggcgggatcgacatcctggtcagtaatgcagctgtgaatcctttcttcggtagcattatggacgtaactgaggaggtatgggataaactgtggatggataaagagaaagaagagtccatgaaggagacccttcgcatcagacgcctgggggagcccgaagactgcgcaggtattgtgtccttcctttgttccgaggatgcttcctatataacgggcgagacagtggtcgtagggggggggaccccttctagattatag

SEQ ID NO: 114296 - DNA, 681 bp, synthetic construct
  misc_feature 1..681: note = Description of Artificial Sequence: Synthetic coding sequence
  source 1..681: mol_type = other DNA
atggcatccagcggcatgacgcggcgcgatccactggccaacaaggtcgccctggtcacggcctcgacagatggaattggcttcgcaatagcccggcggctcgcccaggacggggcccacgtggtagtatcgtcccggaagcagcagaatgttgaccaggccgttgcaacgctacagggggaagggctctccgtgaccggcaccgtgtgtcatgtgggaaaggccgaggacagagagcgactggtggccaccacccttgacattaatgtcaaggcacccgcactgatgacgaaagcagtcgttcccgaaatggagaagcggggtggcggatccgtggtgatcgtgtccagcatcgccgctttctccccgagccccggattctccccttataacgtgtcaaagacggccctcttaggtctcacaaagaccctagccatagagttagctccccggaatattcgcgtcaactgtcttgctcccgggctcatcaaaacctccttctccagaatgctctggatggacaaagagaaggaagagtcaatgaaagaaaccctgaggattagacggctgggggaaccagaggactgcgccgggattgtcagttttctgtgcagcgaagatgcctcctacatcaccggggagaccgtggtggtgggtggcggcacgccgagccggttatag

SEQ ID NO: 114297 - DNA, 567 bp, synthetic construct
  misc_feature 1..567: note = Description of Artificial Sequence: Synthetic coding sequence
  source 1..567: mol_type = other DNA
atgcacaaagcaggcctacttggattgtgcgcgcgtgcatggaatagcgtccgaatggctagttctggaatgactagacgagatcccctggctaacaaggtggccctggtgaccgcatccactgatggtatcggctttgcgatagccagaaggctagcgcaggacggggcacatgtagtggtaagctcccgaaagcaacagaatgtggatcaagcagtagctacactgcagggcgaaggactctctgtaaccggcactgtttgccatgtgggaaaagccgaagaccgcgagcggttggttgctactgcggtgaagctacacggcggtatagatattttggtctctaacgctgccgtgaacccattttttgggagcataatggacgtgacagaggaggtttgggataaacgtaggctgtctggagatagggtatttcatagctcactgcagtctatctcatccctggacggccaaggcaaaaggggcaagcacgagagaaaccctgctgacaagaaggtgcgcagagctcgagggctctgctggcatagagtattccccgtgttgtag

SEQ ID NO: 114298 - DNA, 600 bp, synthetic construct
  misc_feature 1..600: note = Description of Artificial Sequence: Synthetic coding sequence
  source 1..600: mol_type = other DNA
atgcacaaagcgggtctactgggcctgtgtgcacgcgcttggaactcagtacgaatggcttctagcggcatgacccggagagaccctttagccaacaaagtcgccctggtcactgcctcaaccgatggaatcgggttcgcaatcgctcggaggctggcccaggacggagcccatgtggtggttagttcgcgtaagcagcagaatgttgaccaggccgtggccacccttcagggggagggcctctccgtcacaggtactgtgtgtcacgtgggtaaagccgaagacagagagcgtcttgtcgctaccacactagatatcaacgtgaaagctcctgcgctgatgactaaggctgtcgtgccagagatggagaagcggggagggggctcagtcgtaatagtcagctctattgctgccttctcaccatcacccctgtggatggacaaggaaaaagaggagtccatgaaggagactcttcggattcggcgcctgggagagcccgaggactgcgctgggattgtcagctttttatgttcagaggatgccagctatattactggcgaaacagtggtcgtgggcgggggaacacccagccggctttag

SEQ ID NO: 114299 - DNA, 1374 bp, synthetic construct
  misc_feature 1..1374: note = Description of Artificial Sequence: Synthetic coding sequence
  source 1..1374: mol_type = other DNA
atgcggtcagccgccgttctggccctgcttctctgtgctgggcaagtcacagccctgcccgtgaactcacctatgaataagggcgacacggaagttatgaagtgcatcgtggaggtaatcagtgataccttatccaaaccttctcctatgcccgtgagccaggaatgcttcgagaccctccgcggcgacgagaggatcctcagtatcctgcggcaccagaatctcttaaaggagctccaggacctggccctgcaaggcgccaaggaaagggcgcaccagcagaaaaagcactctggtttcgaagacgaactctctgaagtactggagaaccaatcctcgcaggctgagctgaaagaagccgtcgaggagcctagtagtaaggacgttatggaaaagagggaggacagcaaagaagcagagaagtccggagaagctacagatggggccaggccccaggctttgcccgagcctatgcaggaatcaaaggcagaaggcaacaaccaagctcccggagaggaagaggaggaggaagaggaggctacaaacacacacccacctgctagccttccaagccagaagtatcccggaccacaagccgaaggagacagcgagggtctctcacagggactcgtagaccgcgaaaagggattgtctgccgagccgggctggcaggctaagcgggaggaggaagaagaggaggaagaggaagctgaggctggagaggaggccgtgccagaagaagagggccctactgtggtattaaacccacacccatccctggggtataaagaaatccgcaagggggaatctcgatctgaggcactagccgtggatggcgccgggaagcctggggctgaggaggctcaggacccagagggcaagggcgagcaagaacacagtcagcagaaagaggaggaagaggagatggccgtcgtgcctcaaggcctgtttcggggaggcaagagcggcgagcttgaacaagaagaggagcgtctatcgaaggagtgggaggatagcaaaaggtggtctaaaatggaccagctggccaaagagttgaccgctgagaaacgacttgaggggcaggaggaagaggaagacaaccgagactccagcatgaagctgtcattccgagcccgcgcttatggatttagagggccaggacctcaactgcgccgcgggtggaggcccagcagccgggaggacagtctcgaggctgggttgcctcttcaggtgaggggatacccggaagagaagaaagaggaggaaggttctgcaaacaggagacctgaagatcaggagttggagagcctaagtgcgatagaggccgaattggagaaagtcgcacatcagctgcaagccttacgtagaggctag

SEQ ID NO: 114300 - DNA, 1128 bp, synthetic construct
  misc_feature 1..1128: note = Description of Artificial Sequence: Synthetic coding sequence
  source 1..1128: mol_type = other DNA
atgaactgggagctgctgctttggctgctagttttgtgtgccctactgctgctcttggtccagctgctgcgcttcctccgcgccgatggggacctcacactcctttgggctgaatggcaaggccggcgaccagagtgggagctgacagacatggttgtgtgggtgacaggggcaagctccggcattggcgaagagctggcctaccagctgagcaaactcggtgtctccctggtgttgtccgccaggagagtccatgaactagagcgcgttaaaagaagatgcctggaaaacggaaacttaaaagagaaggacattctagtgctgccgctagacctgacagatacaggcagccacgaggcagccaccaaggccgtgctccaggagtttggacggatagatatccttgttaataatggcggcatgtctcagcgcagcctctgcatggatacatccttagatgtgtacagaaaactaatcgaacttaattatcttggcacggtctcactgaccaagtgcgtgttaccccatatgatcgaacgcaaacaggggaaaattgttacagtcaacagtatccttggcattatctcagtccccctgtcaatcggctactgcgccagcaagcatgctttgcggggcttctttaatggtttgagaaccgagctggctacatacccgggaatcatcgtcagcaatatctgtccggggcccgttcagtccaacattgtggagaactcccttgccggggaagtgaccaagacaattggcaacaacggcgatcagagtcataaaatgaccaccagtcggtgcgtgcgactgatgctaattagcatggccaatgatctgaaggaggtctggattagcgaacagccgttcctcctcgtgacatatctgtggcagtacatgccaacctgggcatggtggattaccaggtggggacgcaagggcctgagaaccctccgcgtcgtatggatgcagaccctgctcatcttgaaaagccttcgccaaaacatgacagagaagtctacttgtaccttccaggctactgggggccgcaatgggaaacatgagaacagtaatttgctaatgcttctgaataaccagcgtctgatttgtgatttcaccttttag

SEQ ID NO: 114301 - DNA, 870 bp, synthetic construct
  misc_feature 1..870: note = Description of Artificial Sequence: Synthetic coding sequence
  source 1..870: mol_type = other DNA
atggtcgtgtgggtcactggagcttcttctgggattggggaggagttagcgtatcagctcagcaagttgggagtcagcctggtgttgtcagcaaggcgcgtgcacgaattagagcgagtgaagagaaggtgccttgagaacggaaatctgaaggaaaaagacatattggtgctcccattggacctcaccgacacgggaagccacgaggccgctaccaaggctgtcctgcaggaatttggaaggatcgacatcctggtgaacaatggtggtatgtctcagcgcagtttgtgcatggacaccagcctagatgtttacagaaaattaattgagctgaattatctgggtactgtctcgctgactaagtgcgtgctgccacatatgattgagcggaagcaggggaagatcgtcaccgtgaacagcatcctcggcataatcagtgtgcccctgtctataggctattgcgcgtcaaagcatgcgttgcgtggtttcttcaatgggctgagaacagaactcgccacatatccaggaatcattgtttccaatatatgtcccgggcccgttcagtctaacatcgtggagaacagcctcgctggagaggtgacgaagactatcgggaacaatggcgaccagtcccacaagatgactaccagccgctgtgtacggttgatgttgatctcgatggcaaacgatcttaaggaggtgtggatctccgaacagcccttcctgcttgttacatatttatggcagtatatgcccacatgggcgtggtggattaccaacaaaatgggaaagaaacgcatcgagaactttaagagcggcgtagacgctgacagttcgtactttaagatattcaagaccaagcacgattag

SEQ ID NO: 114302 - DNA, 1020 bp, synthetic construct
  misc_feature 1..1020: note = Description of Artificial Sequence: Synthetic coding sequence
  source 1..1020: mol_type = other DNA
atgaactgggaactgctgttatggcttctggtgttgtgtgctctcctgttgctcttagtgcagctgctgcgattcctgcgtgcggatggtgacctgaccctcctttgggctgagtggcaaggacgcagaccagagtgggagctgacagacatggtggtatgggtgactggggcctcatccggcatcggagaagagcttgcctaccaactctctaagctgggggtcagcttggtattgtctgcccgcagagttcacgagttagagcgcgtcaagaggcgttgcctcgagaatgggaatctgaaagagaaagatatcctcgttctgccgctggaccttaccgacacagggtcccacgaagcagcaacaaaggcagtcttgcaagaattcgggagaattgacatcttagtgaataatggtgggatgagccagagatcactttgtatggacacctccttggacgtgtatcgtaaactgatcgagctgaattatctgggaacggtttccctgacaaagtgtgtgctgccccatatgatagagcggaagcagggcaaaattgttactgtcaatagcattctagggatcatctctgtacccctgtctatcgggtattgcgcttcaaaacacgccttgagaggcttcttcaatggactcaggacagaattggccacctatccagggatcatcgtgagtaatatctgtccaggtcccgtccaatctaacatcgtagagaactcgcttgccggtgaggtgaccaagaccattgggaataacggagatcagagccataaaatgactaccagccggtgcgtaagactgatgctgatttctatggcaaacgacctcaaggaggtttggatttccgagcagccattcctcctcgtgacatatctctggcagtatatgcctacatgggcatggtggatcactaataagatggggaagaaaagaatagagaattttaagagtggagtggatgcagactctagttattttaagatattcaagactaagcatgattag

SEQ ID NO: 114303 - DNA, 186 bp, synthetic construct
  misc_feature 1..186: note = Description of Artificial Sequence: Synthetic coding sequence
  source 1..186: mol_type = other DNA
atgaattgggaactcctgttgtggttacttgtactctgtgcgttgctgctccttctggttcagctgctgcggttcctgagggccgatggagatctgacactgctctgggcagagtggcagggtaggagacctgagtgggagctgacagatatggtggtgtgggtcactggagcaagctccggatag

SEQ ID NO: 114304 - DNA, 960 bp, synthetic construct
  misc_feature 1..960: note = Description of Artificial Sequence: Synthetic coding sequence
  source 1..960: mol_type = other DNA
atgctcttttgggtgctgggcttgttgatcctctgtggcttcctgtggacaagaaaaggaaagctcaagatcgaggatattacagataaatacatcttcatcacgggatgcgactcaggcttcggtaacctggccgcccgaacattcgataagaaagggtttcatgtgattgccgcctgtttaaccgaaagcggtagtacagctctgaaagctgaaacatcagagcgcctgcgcaccgtgctgttggatgtcacagaccccgagaatgttaaacgaacagcccagtgggtgaagaatcaggttggcgaaaagggcctatggggcctcatcaataatgccggcgtgccaggtgtactagcccctacagactggttgaccttggaagactaccgggagcctattgaggttaacctgtttgggctcatttccgtgaccctgaacatgctccccctggtgaaaaaggcccaaggacgggttattaacgtgtcttcagtcggcgggcgcctggccatcgtcggaggaggatatactcccagtaagtacgccgttgagggattcaatgacagcctgcggcgagacatgaaagcttttggtgttcatgtctcatgcatcgaaccaggcttatttaaaactaacctcgccgatccggtgaaagtgattgaaaaaaaattggcaatatgggagcagctttctcctgacatcaagcagcagtatggagagggatatatcgagaagtcgctggacaaactaaaaggaaacaagtcttatgtcaacatggatctttctcccgtggttgagtgcatggatcacgcacttacctctttgttcccaaagactcactacgccgcggggaaggacgccaagatattttggataccattgtcccacatgcctgccgccctgcaggactttctcctcctgaagcaaaaagccgaattagccaaccccaaagcagtgtag

SEQ ID NO: 114305 - DNA, 960 bp, synthetic construct
  misc_feature 1..960: note = Description of Artificial Sequence: Synthetic coding sequence
  source 1..960: mol_type = other DNA
atgctgttctgggtactaggcttgttgatactctgtggcttcctttggacccgtaaaggtaagctaaaaatcgaagatattactgataagtacatttttatcaccgggtgtgactccggcttcgggaatcttgctgcgaggacatttgacaaaaagggcttccatgtgatcgctgcttgtctgaccgaaagcgggagtaccgctctgaaggctgaaacaagcgaaagactgagaactgtattgctcgatgtgaccgaccccgagaacgtaaagaggactgctcagtgggtcaaaaatcaggtgggggagaagggattgtggggtctcatcaataacgccggagtacctggagtcctggccccaactgattggttgaccttggaagactaccgtgaaccgatcgaagtgaacctatttggcctgatcagtgtcacgctcaatatgctgccgctagtgaaaaaggcccaagggagagtgatcaacgttagcagtgtcggcggccgcttagccattgtgggtggaggatatactcctagtaagtacgcggtcgagggattcaacgattcactccgcagagacatgaaagcctttggtgtgcatgtgagttgcatagagcccggcctgtttaagactaacctcgccgatcctgttaaagtcatcgaaaagaaattggccatctgggagcagctgagcccggacatcaagcagcagtacggtgagggttacatagaaaagagcttagataagctaaagggcaacaagtcgtacgtaaatatggacctatcccctgttgtcgaatgtatggatcacgctctgacctcactcttcccaaaaacacattatgcggccggcaaggatgcaaaaatcttttggatacccctcagccacatgcctgccgcgctgcaggacttcctgcttctgaaacagaaagcagaactcgctaacccaaaagccgtctag

SEQ ID NO: 114306 - DNA, 960 bp, synthetic construct
  misc_feature 1..960: note = Description of Artificial Sequence: Synthetic coding sequence
  source 1..960: mol_type = other DNA
atgctgttttgggtccttggactattgattttatgcggcttcctttggacgagaaaagggaagctcaagatcgaggatatcacagacaaatatatcttcatcactggatgtgattcaggcttcggtaacctggccgcccgcactttcgataaaaagggcttccacgtgatcgctgcatgcctcaccgagagcggcagcacagcgttaaaggctgaaacctctgagcgactgcgaactgtcctgctggatgtcaccgaccccgaaaacgtcaaaagaaccgcccaatgggtcaaaaaccaggtaggagagaaaggcctatgggggttgatcaacaacgctggcgttcccggggtgctggccccaacagattggctgaccctcgaagattaccgcgaaccaattgaggtaaatctatttgggctcatcagtgtcactcttaacatgctgccactcgtgaagaaggcccaggggagggtgataaacgtcagtagcgtcgggggaaggcttgccattgtcggcggaggctatacacctagcaagtacgcagttgagggcttcaatgattcactgaggcgggacatgaaagcctttggcgtgcatgtctcttgcattgagccagggctttttaagactaaccttgcagatccagtcaaggtcattgagaagaagctggctatctgggagcaattaagccctgacattaagcaacagtacggtgagggatacattgagaagagcctggacaaacttaaagggaacaaaagctacgtgaatatggatctttcgcctgtagtggagtgtatggatcatgcactaaccagcctcttccctaaaactcattatgctgctgggaaagatgccaagatcttctggattccgctttctcatatgcccgctgcattacaggactttctgttgctaaaacagaaggccgagcttgctaaccccaaggccgtgtag

SEQ ID NO: 114307 - DNA, 519 bp, synthetic construct
  misc_feature 1..519: note = Description of Artificial Sequence: Synthetic coding sequence
  source 1..519: mol_type = other DNA
atgttgcccctggttaagaaggcccaaggtcgtgtgatcaatgtaagctccgtggggggaagactggctatcgtcgggggcggatacacaccgagcaaatatgccgtggaaggttttaacgactctctacggagagacatgaaggccttcggggttcacgtgtcttgtatcgaaccaggactctttaaaactaaccttgcagatccagtgaaggtgatcgaaaagaagctggctatctgggagcagttatctcccgacatcaaacaacagtacggagagggttacatagaaaagtctctggacaaactgaaagggaacaagagctatgttaacatggaccttagccctgtagtcgaatgtatggatcatgccttgacttccctcttcccgaaaactcactatgccgcagggaaagacgcgaaaatcttctggatacctctttcacacatgcctgcagctctacaggactttcttctactcaagcaaaaggccgagctcgccaatcctaaggccgtgtag

SEQ ID NO: 114308 - DNA, 960 bp, synthetic construct
  misc_feature 1..960: note = Description of Artificial Sequence: Synthetic coding sequence
  source 1..960: mol_type = other DNA
atgttgttttgggtgctgggactgttaattctatgcggctttctatggactcggaagggaaaattaaaaatagaagacataacagacaagtacatattcattaccggctgtgactctggtttcggaaacttggcagcccgtacattcgataaaaagggcttccacgtgatcgctgcatgcctcacagaatctggcagtactgcactgaaagccgagacttcagagcggctgaggacagtgcttctcgacgtaacagatcccgagaatgtgaagcgcaccgcccagtgggtcaagaatcaggtcggcgagaaggggctgtggggcctgattaacaatgctggcgtgccgggcgttctggctcctacggactggcttactctggaagactatagggaacccattgaagtgaacctgttcggtctcatctctgtgactctcaacatgctgccactggtgaagaaggctcagggcagggtgatcaacgtgtctagcgtcggtggccgtctcgcaatcgttggcggcgggtatacaccttctaaatacgctgtcgaaggattcaacgatagcttgcgccgggacatgaaagcctttggggtgcacgtgtcctgtatcgagccaggactgtttaaaaccaatctggcagacccggttaaggttattgagaagaagctggccatttgggaacagctctctcccgacataaaacagcagtatggagaaggctacattgaaaagagcctggataaattaaagggaaacaagagctatgtgaacatggatctgtctcctgttgtcgagtgcatggaccacgccctgacatctctctttccaaagacacactacgctgccggcaaagatgcaaaaattttctggatacctctcagtcacatgcctgctgctttgcaggacttcttactgttgaaacagaaggctgaactcgcaaacccaaaggccgtgtag

SEQ ID NO: 114309 - DNA, 1140 bp, synthetic construct
  misc_feature 1..1140: note = Description of Artificial Sequence: Synthetic coding sequence
  source 1..1140: mol_type = other DNA
atgccagaaggacgctcacactgcgcctgttctattaccagtctcacactcctggtcagcctcacccgcgtgacactggatatcctgcagaaattggatcctcctcagcctgctcattggcgacaccacctgctggtactgtacaagaaaggggtctacctgagtcatactggaggaaagatgctattttgggtgctgggtctactcatcctctgcggattcttgtggacccgtaaaggaaagctgaagattgaggacattacagacaaatacatattcatcacaggatgcgatagtgggtttgggaacctggcagccagaacctttgataaaaaaggatttcacgtcatcgccgcctgcctcactgagtctggcagcaccgctctgaaagccgagacctctgaacgcctcagaaccgttctcctggacgtaactgaccccgaaaatgtcaagaggacggcccagtgggttaagaatcaggtaggagagaagggcttatggggcctaattaacaacgccggtgtcccaggcgtgctggcccccacagactggctaacactggaagactatagggaacccatcgaggtcaacctgtttggcttgatttctgttaccctgaatatgctcccactggtcaagaaagcccaggggagggttataaacgtgagttccgtgggaggcagactagcaattgtgggagggggctatacaccttccaagtatgccgtggaggggttcaacgactctctgcggcgggatatgaaggcttttggggtccacgttagttgcattgagccagggctgttcaaaacaaacttggctgatcctgttaaagtgatcgagaagaagctcgctatttgggagcagctgtctcccgatatcaagcagcagtatggagaaggctacattgagaaatctctcgacaaattgaagggcaacaaatcatatgtcaatatggatttgagtcctgttgtggagtgtatggatcacgctctgacaagcctttttccaaagactcactacgctgctggtaaggacgcgaagatcttttggatcccactgtcgcacatgcctgcagcccttcaggattttctgctccttaagcagaaagccgaactggccaatcctaaagccgtttag

SEQ ID NO: 114310 - DNA, 960 bp, synthetic construct
  misc_feature 1..960: note = Description of Artificial Sequence: Synthetic coding sequence
  source 1..960: mol_type = other DNA
atgctgttttgggtgctgggacttctgatcctctgtggctttctctggacccggaagggcaagctgaagatcgaggatatcacagacaagtatatatttatcaccgggtgcgactctggctttggaaatctggcagcccggactttcgacaagaaggggttccatgtgattgccgcatgcctaaccgagagcggatctacagccctgaaagctgaaacctccgaacggttgcgcaccgtgctgctggacgtaaccgatcctgagaacgtcaagagaaccgcacagtgggttaagaaccaagtaggagagaaaggtctctggggactgatcaataatgccggcgtgcctggggtcctagctcctaccgattggctgaccttggaagattatagagagccaatagaagtgaatttgttcggattgataagcgttacactgaatatgctcccgctcgtgaagaaagcccaggggagagtcattaacgtgagctccgtggggggacggcttgcaatcgtgggaggaggctatactccttccaagtatgccgtggagggatttaacgactcgcttagaagggacatgaaagccttcggcgtccacgtgtcgtgcattgagcccgggctgtttaaaactaatctggccgatcctgtcaaagtaattgagaagaagctggctatatgggaacagttgtcccctgacattaagcagcaatacggcgagggttatatcgagaagtctctggataaactcaaaggcaacaagagctacgtgaacatggatctcagtcctgtcgtcgagtgtatggaccacgcgcttacctccctcttccctaagacccactacgccgccggtaaggacgccaagattttctggatacccctgtctcacatgcccgccgccttgcaggattttctgctgctgaagcagaaggctgagctcgctaaccctaaagcagtctag

SEQ ID NO: 114311 - DNA, 201 bp, synthetic construct
  misc_feature 1..201: note = Description of Artificial Sequence: Synthetic coding sequence
  source 1..201: mol_type = other DNA
atgctgttctgggtgttgggactgctcatcctttgtggcttcttgtggactagaaaaggcaaacttaagatcgaggatataacagataaatacattttcattaccggatgtgattccggctttggaaatctcgccgcgcggactttcgataagaaaggtttccatgtgattgccgcttgcctgacggagagtggatcttag

SEQ ID NO: 114312 - DNA, 486 bp, synthetic construct
  misc_feature 1..486: note = Description of Artificial Sequence: Synthetic coding sequence
  source 1..486: mol_type = other DNA
  misc_feature 1..375: note = DNA
  misc_feature 376: note = RNA
  misc_feature 377..486: note = DNA
atgggattgccacaacctgggctctggctgaaacgactttgggttctcctggaagtggccgtgcacgtggttgtagggaaggttctcctgatcttatttcctgaccgtgtcaaaagaaacattttggcgatgggcgaaaagacaggcatgacccgcaatccccacttttcacacgacaactggatcccgactttcttttccacacaatatttctggtttgtccttaaagtgcggtggcagcgtctggaggacacaaccgagctcggtgggttggctcctaattgccctgtggtcagactaagtggccaaaggtgcaacatttgggagtttatgcagggcaatcgtccgctggtacttaattttgggtcctgcacctgaccttcattcatgttcaaattcgatcagttcaaacgcctgatcgaagacttttcttctattgccgactttctggtgatatatatcgaagaggcccatgccagcggctag

SEQ ID NO: 114313 - DNA, 750 bp, synthetic construct
  misc_feature 1..750: note = Description of Artificial Sequence: Synthetic coding sequence
  source 1..750: mol_type = other DNA
  misc_feature 1..375: note = DNA
  misc_feature 376: note = RNA
  misc_feature 377..750: note = DNA
atgggcctgccacagcctggactgtggctcaaacggctatgggtgctcctggaagtggcagtgcatgtagtagtaggaaaagtcctattgatcttattcccagaccgcgttaagcggaacatcctggctatgggcgagaagaccgggatgacccgaaatccacacttcagccacgacaactggatcccaacttttttctccacgcagtatttttggtttgtgttaaaggttcggtggcaaaggctcgaagacaccaccgaattgggggggctggcccctaattgcccagtggtccggttgagcggccagcggtgtaacatttgggaattcatgcagggcaaccgcccgctggtcttaaacttcgggtcttgcacatgaccgtcattcatgttcaagttcgaccaatttaaaagattaattgaagatttctccagcatcgcagacttcctggttatctatatcgaagaggcacatgcgtctgacggctgggcttttaaaaacaacatggatatccgaaatcatcaaaacctccaggatcgcctgcaggcagcccaccttctcctggcccgctcccctcagtgtcccgttgtggtggacactatgcagaaccagtccagccagctctacgccgcccttcctgagaggctatatattattcaagaagggcgcattctctataagggaaaatcaggtccctggaattacaaccccgaagaggtgagagcagtgctggagaagctacacagctag

SEQ ID NO: 114314 - DNA, 606 bp, synthetic construct
  misc_feature 1..606: note = Description of Artificial Sequence: Synthetic coding sequence
  source 1..606: mol_type = other DNA
atggggctcccccaaccagggctgtggctgaagcgactttgggtgcttctcgaggtcgctgtgcacgtcgtggtcggtaaagtgctgttgattctgttcccagacagagtgaagagaaatattttggcgatgggggagaaaacgggtatgacccgcaatccccattttagccacgacaactggatcccaactttcttcagcactcaatacttttggtttgtgttgaaagttagatggcagcgattggaggatacaacagaactgggcggcctcgcccccaactgccccgtagttcgtctcagcggacagcgatgcaacatctgggaattcatgcaagatggctgggccttcaaaaacaacatggacattaggaaccaccagaacctgcaggatagactgcaggccgcacacctgctgctcgcccgatcacctcaatgccctgtcgtggtggacacgatgcagaaccagtcatcacagctctatgctgccctgccggaacgactttatatcatacaggaaggtcgtatactgtacaaagggaaatcaggcccttggaactataacccagaagaggtcagagctgtgctggagaagctccactcatag

SEQ ID NO: 114315 - DNA, 363 bp, synthetic construct
  misc_feature 1..363: note = Description of Artificial Sequence: Synthetic coding sequence
  source 1..363: mol_type = other DNA
atgttcaaattcgaccagttcaagagactgatcgaggattttagctctatcgctgactttctcgtcatctatatcgaagaggcccacgcctcggacggctgggctttcaagaacaatatggatattcgaaatcatcagaacctgcaagatcgcctacaagccgcgcatctattacttgcacgaagtccccaatgtccagtggtggtggacactatgcagaatcagagctcacaattgtatgccgcattgcccgaacgcttatacatcatacaggagggccgcattctgtacaagggaaaaagtggcccttggaactacaaccctgaggaagtgagggctgtgctcgagaaactgcactcctag

SEQ ID NO: 114316 - DNA, 558 bp, synthetic construct
  misc_feature 1..558: note = Description of Artificial Sequence: Synthetic coding sequence
  source 1..558: mol_type = other DNA
  misc_feature 1..183: note = DNA
  misc_feature 184: note = RNA
  misc_feature 185..558: note = DNA
atggggttgccgcaacctgggttgtggctgaaacgactgtgggtgctgctggaggttgctgtccacgtagttgtgggcaaggtgcttctgatcttgtttcctgatagggtgaagagaaatattctcgcaatgggagagaagaccggcaacaggccattggtcttaaattttgggtcatgcacttgaccttcgttcatgttcaagttcgatcagttcaaaagactgatcgaggatttcagttcaatagctgatttcctcgtgatctatatcgaagaggcccacgcgtctgacggttgggcctttaaaaacaacatggatatccggaatcatcaaaacctccaggaccggctgcaggctgcccaccttctactggcccgcagtccccaatgtcccgtcgtggtggacaccatgcaaaatcagtcctcccagctgtacgccgcattgcctgaacgtctgtatatcattcaggaaggccgcattctgtacaagggcaaaagcggcccatggaactacaaccccgaagaagtccgggcggtattggagaagcttcactcgtag

SEQ ID NO: 114317 - DNA, 342 bp, synthetic construct
  misc_feature 1..342: note = Description of Artificial Sequence: Synthetic coding sequence
  source 1..342: mol_type = other DNA
atgggcttaccacagcccggattgtggctgaagcgcctatgggtacttttggaagtggccgtgcatgtcgtggtaggcaaggtgctgttgatcctgttccccgatcgcgtgaaaagaaacattcttgctatgggggaaaaaacgggtatgacgcgtaatcctcatttttcacacgacaattggatcccgaccttcttcagcacacagtacttctggttcgtgctgaaagtccgttggcagcgactggaggacactaccgaactgggcgggctggcacccaactgtcctgtggtgaggctctctggacagcggtgcaatatttgggagttcatgcaaggctag

SEQ ID NO: 114318 - DNA, 270 bp, synthetic construct
  misc_feature 1..270: note = Description of Artificial Sequence: Synthetic coding sequence
  source 1..270: mol_type = other DNA
atggggatcctgtctgtggaccttcttataacactccagatacttcctgtgtttttttctaactgcctatttcttgcgctgtacgactctgtgatcctgctgaaacacgtggtccttctgctgtcgcgatcaaaaagcacgaggggtgaatggcgcaggatgcttacctcggaaggcctgcgctgtgtgtggaaatcctttttactggatgcctataagcagctgaactgtccgccttcgggtttctccaaggatggccatatactgtag

SEQ ID NO: 114319 - DNA, 399 bp, synthetic construct
  misc_feature 1..399: note = Description of Artificial Sequence: Synthetic coding sequence
  source 1..399: mol_type = other DNA
atgggcatcctgagtgtagacctgctcatcactctacaaatcctgcccgtttttttctcaaactgtctctttctcgcactgtacgattccgttattcttctcaaacacgtcgttcttctcctcagcagatcgaaaagcacgaggggagaatggcgccggatgctcacctcagaagggttaaggtgcgtttggaagtcctttcttctcgatgcgtataaacaggtgaaactcggtgaggatgcccccaacagcagcgtggtccatgtgagttctacagaaggcggggacaactctggcaacgggacccaggagaaaatcgccgaaggagctacatgtcacctcctcgattttgcctctccagaacgacccctggttgtgaattttgggtccgccacgtag

SEQ ID NO: 114320 - DNA, 822 bp, synthetic construct
  misc_feature 1..822: note = Description of Artificial Sequence: Synthetic coding sequence
  source 1..822: mol_type = other DNA
  misc_feature 1..396: note = DNA
  misc_feature 397: note = RNA
  misc_feature 398..795: note = DNA
  misc_feature 796: note = RNA
  misc_feature 797..822: note = DNA
atgggcattctttccgtcgatctgcttatcacactgcagatcctgccagtgtttttctcaaactgcctctttttagctctctatgactcagtgattctcctcaagcacgtcgttcttttgctgtccaggtccaaatccacaagaggagaatggcgcaggatgctaacgtctgaagggctcagatgcgtctggaagtcattcctccttgatgcatacaagcaggtcaagctcggagaggacgcccctaactcttccgtagttcacgtcagctcaacggagggcggtgataactctgggaatggaacgcaggagaagatcgcagagggcgcaacgtgccatctgttggatttcgcttctcccgaacggccattggtggtgaacttcggcagtgcgacatgacccccattcacctctcaactgcctgcgttccgaaaactcgttgaagagttctctagtgtagcagatttcttattggtgtatattgacgaggcgcatccatctgacgggtgggccatcccgggagacagttccctgtcctttgaagtgaaaaagcaccaaaaccaagaggaccggtgcgccgccgcacagcagctgctggaacgtttttctctccctccgcagtgccgcgtcgtggctgatcggatggacaacaatgccaacatagcctatggcgtggctttcgagagggtttgcattgtccagcggcaaaagatcgcttacttagggggcaaagggcccttttcctacaacctgcaggaagtacggcattggctggagaaaaatttttcaaagaggtgaaagaaaacacggctggctggttag

SEQ ID NO: 114321 - DNA, 21 bp, synthetic construct
  misc_feature 1..21: note = Description of Artificial Sequence: Synthetic coding sequence
  source 1..21: mol_type = other DNA
atgggcatcctgtcagtgtag

SEQ ID NO: 114322 - DNA, 21 bp, synthetic construct
  misc_feature 1..21: note = Description of Artificial Sequence: Synthetic coding sequence
  source 1..21: mol_type = other DNA
atggggatccttagcgtgtag

SEQ ID NO: 114323 - DNA, 168 bp, synthetic construct
  misc_feature 1..168: note = Description of Artificial Sequence: Synthetic coding sequence
  source 1..168: mol_type = other DNA
atggggatcttatcagtggatctactgattaccttgcagatcctccctgtgttttttagcaattgccttttcttggctttgtacgactcagtcattcttcttaaacatgtcgtgctgctattgtcccgatccaagagtaccagaggcgagtggaggaggatgctttag

SEQ ID NO: 114324 - DNA, 930 bp, synthetic construct
  misc_feature 1..930: note = Description of Artificial Sequence: Synthetic coding sequence
  source 1..930: mol_type = other DNA
  misc_feature 1..267: note = DNA
  misc_feature 268: note = RNA
  misc_feature 269..504: note = DNA
  misc_feature 505: note = RNA
  misc_feature 506..903: note = DNA
  misc_feature 904: note = RNA
  misc_feature 905..930: note = DNA
atgggaattctgtcagtagatctgttaattacactgcaaatcttaccagtgtttttttctaattgtttgttcctggccctttatgatagcgtaattctgctgaaacatgttgtgctgttactcagcagatccaagagcacaaggggggaatggcggcgaatgctgaccagcgagggcctccgatgcgtgtggaagtcctttctactggatgcatacaaacaattaaactgcccaccctcaggattttcaaaagacgggcacatcctatgactggtttatgaggcttataagagcagactcctggtgtactcacacttggacctgtggatggttaaactcggcgaggacgctccgaacagctcggtggtgcatgtgtcatccaccgagggcggggataatagtggtaacggaactcaagaaaaaatagccgagggtgctacatgccacctgctggattttgcaagtcctgagcgcccccttgttgtgaacttcggatcagcgacctgacccccctttactagtcagctaccagctttccgtaagctggtagaagaattctcctccgtggcagatttcctgcttgtgtacatcgatgaggcccatccgagtgacggttgggcaattccaggagacagcagcctgtccttcgaagtaaagaagcatcaaaaccaagaggatcggtgtgcagctgcccagcaactgcttgagcgattctcactgccgccccagtgcagggtggtagccgaccgcatggacaacaacgcgaacattgcctatggcgtggcttttgagagggtgtgtatagtgcagagacaaaagatagcatacctgggcggaaaaggtccattttcttacaacctccaggaggtgagacactggctcgaaaagaatttttccaaacggtgaaagaaaaccaggttggcggggtag

SEQ ID NO: 114325 - DNA, 822 bp, synthetic construct
  misc_feature 1..822: note = Description of Artificial Sequence: Synthetic coding sequence
  source 1..822: mol_type = other DNA
  misc_feature 1..396: note = DNA
  misc_feature 397: note = RNA
  misc_feature 398..795: note = DNA
  misc_feature 796: note = RNA
  misc_feature 797..822: note = DNA
atgggtatcctgtctgttgatcttctgatcacattgcagatactgccagtgttcttttcaaattgtttgtttctggctttatacgacagtgtaatcctactgaagcacgtggtgctcctgttatcccgctctaaatcgacaaggggcgaatggcgcagaatgctgacctccgaaggcctgcgttgtgtttggaagtcatttctgctggatgcttacaaacaggtgaagctgggggaggatgcgcctaactcttctgtggtccacgtatcatccacagaaggtggcgataatagcggaaacggcacacaggaaaaaatcgccgagggtgccacctgtcacctgctagacttcgcatcccccgaaaggccactggtcgttaacttcgggtcggctacttgaccaccctttacaagtcagctgcccgcgttccggaaactggtggaagaattcagctcagttgcagacttcctgctggtctacatcgacgaagcacatccctcagatggatgggctattccgggagactcatctctgtcctttgaggtcaagaaacaccagaaccaggaggacagatgtgccgctgcccagcaactgcttgagcgattctcacttccaccccaatgtagagtagttgcagatagaatggacaataatgctaacatcgcctacggagtggcgtttgaaagagtgtgtattgtacagcgacaaaagatagcatacctcggaggcaagggccccttttcttataaccttcaggaggtgagacactggctggaaaagaactttagcaagcggtgaaaaaagacacgccttgcaggctag

SEQ ID NO: 114326 - DNA, 915 bp, synthetic construct
  misc_feature 1..915: note = Description of Artificial Sequence: Synthetic coding sequence
  source 1..915: mol_type = other DNA
  misc_feature 1..507: note = DNA
  misc_feature 508: note = RNA
  misc_feature 509..915: note = DNA
atgcctcgccaggcgacctctcggctggtcgtgggcgagggcgaaggtagccagggagcctctggaccggccgctactatgctgcgctccctgcttcttcattcactccggttgtgtgcccagactgcgtcctgtctcgttttgttcccccggtttcttggaaccgcgtttatgctctggctcctggattttttgtgcattcgaaagcactttcttggccggcgccggcggggacagcctgagccagaggtggaactgaatagcgagggcgaagaggtcccacccgatgacccccccatttgtgttagtgatgacaatcgcctgtgtactctggctagcctcaaggctgtgtggcatgggcagaagcttgacttctttaaacaagcccacgaagggggacctgcccccaacagtgaggtggtcttgcctgacggtttccaaagccagcatatccttgactacgcccaaggcaatcgccccctggttttgaatttcggctcttgcacttgacccccgttcatggccaggatgtcagcattccagcgcctcgtaacaaagtatcaaagggatgtggacttcttgatcatttatatcgaagaggcccatccaagcgatggatgggtgacaactgattcaccatacatcatcccacagcatagatcattagaggacagagtttccgctgccagggtgctgcaacagggtgctccggggtgtgccctcgtattagacaccatggccaattcctcgtcctccgcatacggcgcttatttcgagcgactctacgtcatacagagcgggactattatgtatcagggcgggagggggccagatggatatcaggtgtctgagctcagaacctggctggaacgttatgatgagcagttgcacggggcccggcctcgaagggtttag

SEQ ID NO: 114327 - DNA, 1026 bp, synthetic construct
  misc_feature 1..1026: note = Description of Artificial Sequence: Synthetic coding sequence
  source 1..1026: mol_type = other DNA
atgtccgcctctgctccggcagccgaaggggaggggactcctacacaaccggcttccgagaaggaaccagagatgccaggtccacgggaagaatctgaggaggaggaggacgaggatgacgaggaggaggaggaagaagagaagggtaaaggtcaaaaactttgcgagattgagcggattcatttcttcctgtcaaaaaagaagactgatgagttgcggaacctgcataaactactgtataataggcctggcacagtgtcatcactgaagaaaaatgtgggtcagttcagcggattccccttcgagaaggggtctgtgcagtacaagaaaaaagaggaaatgctgaagaagttcagaaacgcaatgctgaagagcatctgcgaagtcctggacctggagcgctcaggtgtcaattcagagctcgttaagcgtatactgaactttctgatgcatcctaagccgtctgggaaacctctgcccaaaagcaaaaaaacatgcagtaagggatctaaaaaggagaggaactctagcgggatggctaggaaggctaagaggacgaaatgtccagagattctttcagacgagtcgtcctcagatgaggatgaaaagaaaaacaaagaggagagttcggatgatgaagataaagaatccgaagaggagccgcccaaaaagactgctaaaagagagaagcctaagcagaaggcgacatctaagtcaaagaagtcggtgaagtctgccaatgtcaaaaaagctgactccagcactacgaagaagaaccagaattcaagcaaaaaggaatctgaaagcgaagacagtagtgacgatgagccactgataaagaaactgaaaaaaccacccacagatgaggaattaaaggagaccatcaagaaactgctggcatcggccaacctggaggaagttacaatgaagcagatttgtaaaaaagtttacgaaaattaccctacctacgacctaaccgagcgcaaggactttatcaaaaccaccgtcaaagagctgatttcttag

SEQ ID NO: 114328 - DNA, 1128 bp, synthetic construct
  misc_feature 1..1128: note = Description of Artificial Sequence: Synthetic coding sequence
  source 1..1128: mol_type = other DNA
atgagcgcttctgcccccgcagccgagggcgaggggacacctacccagcctgcttcagagaaggagcccgagatgcccgggcctagggaagaaagtgaggaggaagaagatgaggacgatgaagaagaggaggaggaggagaaagaaaagagtctgatcgtggagggcaagcgggaaaagaaaaaggtggagcgtttaactatgcaggtatcctctctgcaaagagagccctttactatcgcacagggaaaggggcaaaagttgtgtgagattgagaggatccacttcttcctttcgaaaaagaaaacagacgaactgagaaacctccacaagctgctgtacaatcgtcccggcactgttagttcactaaaaaagaacgtgggacaatttagtgggtttccctttgaaaagggctctgtccaatataaaaaaaaggaagagatgctaaaaaagttccgaaacgcaatgttgaagtcaatttgtgaggttttggacctggagaggagcggggtcaacagcgaactcgttaagcgaatcctgaacttcctgatgcacccaaagccatccggaaagccactgcccaagtcaaagaagacctgtagcaagggcagtaaaaaagagcggaatagcagcgggatggctcggaaagctaagcgaactaagtgtcccgagatcctgtcagacgagtcatcatccgacgaggatgagaagaagaataaggaggaaagtagcgacgatgaagacaaggaaagtgaggaggagccccctaaaaaaacggccaagcgcgaaaaaccaaaacagaaagccacctccaaatctaagaagagcgtgaagagcgccaacgttaagaaggccgattcctccaccacaaagaagaaccaaaacagttctaaaaaggagagcgagtccgaggattctagcgacgatgaacccctgataaagaaactcaagaagcctcccacagacgaggaactgaaagagacaattaagaaactgctggcttcagcgaacctcgaggaagtgacgatgaaacagatctgcaagaaagtgtacgagaattacccaacatacgacctaaccgagcggaaggactttataaagacaacagtcaaggaactgatctcttag

SEQ ID NO: 114329 - DNA, 1101 bp, synthetic construct
  misc_feature 1..1101: note = Description of Artificial Sequence: Synthetic coding sequence
  source 1..1101: mol_type = other DNA
atgtcagccgctaatccagaaacccccaacagcaccatctcccgggaagccagcacgcagagcagtagcgcagccgcttcccagggttgggttctgccagaaggtaagattgttccgaataccgtgttcgtcggaggaatcgatgctcggatggatgaaacagaaattggaagctgcttcggcaggtatggttctgtgaaagaggtgaaaatcattacgaatagaacaggcgtgtcgaaggggtacggcttcgttagctttgtcaatgacgtcgatgtgcagaaaatagtgggaagtcagatccatttccacggcaagaaactgaaacttggcccagccatacgtaagcagaagctgtgtgcccgtcacgtccaacccagaccattagtggtcaatcctccaccgccgccacaattccagaacgtttggagaaacccaaatacggagacatacctgcagccacagatcactccgaatccagtgacacaacacgtccaggcatactctgcttacccacactcacccggacaggtgattacaggctgccaactgctggtatataattatcaagaataccctacctaccctgactctgcctttcaggtgactactggataccagctccctgtgtacaactatcagccatttcctgcttacccgtcaagccctttccaagttaccgccgggtaccaacttcctgtttacaactaccaggcattccccgcttaccctagctcaccttttcaagtcaccacgggataccagcttccagtatacaattaccaggctttccctgcatacccatcatcaccctttcaggtgaccactggctatcagctgcctgtgtataattatcaggcttttccagcatatcccagctctcccttccaagttaccaccgggtatcaattgcctgtatataactatcaggcttttcccgcttaccctaactccgccgtgcaggttaccaccggctatcaattccacgtgtacaactaccagatgcccccacagtgccctgtcggcgaacagcggcgcaacctttggacagaggcctataagtggtggtatctggtctgtttaatccagcgacgtgattag

SEQ ID NO: 114330 - DNA, 1605 bp, synthetic construct
  misc_feature 1..1605: note = Description of Artificial Sequence: Synthetic coding sequence
  source 1..1605: mol_type = other DNA
atgtcagccgcgaatcctgagacacccaattcaacgattagcagagaggcaagcacacagagtagctccgccgctgcttcccagggctgggtcctgcccgaggggaagattgtccccaacaccgttttcgtgggcggcattgacgctagaatggacgagactgagattggctcttgttttggccgctatgggagcgttaaggaggtgaagatcataaccaatcggactggcgtcagtaaaggctatgggttcgtgagcttcgtcaatgacgttgatgtgcagaaaattgtgggctctcagatccacttccacggtaagaagctaaagcttgggccagcaatacgcaagcagaaactctgtgcacgccacgtgcagccaaggcctctcgtggtgaatcctcccccaccaccacagtttcagaatgtgtggagaaatcctaataccgagacctatttgcagccgcagatcacaccaaacccagtaacccaacatgtgcaggcttactctgcctatccccacagtcccgggcaggtcatcactgggtgtcaactccttgtgtacaattatcaggagtaccctacatacccggattccgccttccaggtgacaactgggtaccagctcccagtgtataactatcagccgtttccagcctatccaaggagcccctttcaggtcaccgccgggtaccaattgcccgtgtacaattatcaggcattcccagcctatcctaattctcctttccaagtggccaccggctatcaattccctgtgtacaattaccagcctttccccgcctacccctctagcccatttcaagttacggccggctaccagcttccagtctataattatcaagccttcccagcctatccaaacagcccttttcaagtggcaaccgggtaccaatttccagtctataactatcaggcttttcctgcatatcctaattcaccagtgcaggtgacaacaggctatcaacttcctgtttataactaccaagcttttccagcatatcctagtagcccatttcaggtaacgacaggataccagctgcccgtctataattaccaagccttcccggcctaccccagcagcccctttcaggtgaccaccgggtatcagctgcctgtttataactatcaggcgtttcccgcttacccaagttctccatttcaggttactacaggctatcagctgcccgtgtataactaccaggcttttccggcctatccaagctcaccttttcaggtgaccaccggatatcagttgcccgtgtacaactatcaagcctttcctgcttacccgtcttctccattccaggtgacaaccggctatcagctcccagtgtacaactatcaggctttcccggcttacccctcttcgcctttccaggtgacaacaggatatcagctacccgtctataattatcaagcttttcccgcctatcccaacagtgctgtacaggtgacgactggctatcagttccacgtatacaattatcaaatgccgcctcagtgccctgtgggcgagcagaggcggaatctgtggaccgaggcctacaagtggtggtacctggtgtgtctgatacaaaggcgagattag

SEQ ID NO: 114331 - DNA, 1821 bp, synthetic construct
  misc_feature 1..1821: note = Description of Artificial Sequence: Synthetic coding sequence
  source 1..1821: mol_type = other DNA
atgtctgccgccaatccagaaacacctaattctacaattagtcgcgaggcttcgactcaaagttcttctgccgctgcgagccagggttgggtgctccctgaaggcaaaattgtccctaatacggtgttcgtaggaggaatcgacgcccgcatggacgagacggagatcggctcatgctttggtcgatacggttcagtgaaggaggtaaagatcataaccaaccggaccggtgtttccaaaggctatgggtttgtgtccttcgtcaacgacgtggatgtgcagaagatcgtgggatcccagatccatttccatggtaagaagctgaaactaggtcctgcaatccggaaacagaagttatgcgcaagacatgtgcaacctcggccacttgtagtcaacccacctcccccaccacagttccaaaatgtttggaggaatccaaacacggaaacctacctgcagccccaaatcacaccaaaccctgtaacccagcacgtgcaggcctacagcgcctatcctcactcccccggacaggtgatcacgggatgccagttgctcgtctataattaccaggagtacccgacatatcctgactctgcttttcaagtgactactggctaccagcttccggtatataactaccagccctttccggcatacccccgctcaccctttcaggttactgccggctatcagcttcctgtttacaactatcaggcctttcctgcttaccccaactcgccgtttcaggtcgctactggataccaattccctgtgtataactaccagccatttccagcttacccaagctctccttttcaggtcactgctggatatcagctccctgtttacaactaccaggcttttccggcgtaccccaactcccccttccaagtcgccaccgggtatcaattcccggtttacaactaccaaccgttccccgcctatcctagtagccctttccaggttacagccggctaccagctgcctgtgtataattaccaggcgttccccgcctaccctaacagcccttttcaagttgctactggatatcagtttcctgtgtataattatcaggcattccctgcttatcctaactctcctgtgcaggttactactggataccagcttccagtctacaattaccaagcctttcccgcctaccccaatagtcctgtacaggtgaccacaggatatcagctccccgtctataactatcaggcttttcccgcttacccaagctcaccattccaggtgactaccgggtatcagcttccagtgtacaactaccaggcatttccagcctatcccagcagtccattccaagtaacaacgggctatcagctgcccgtctacaattatcaggcttttcccgcctatccttcatcaccttttcaggttacaactggttatcagctccccgtttataactaccaggctttcccagcatacccttcttcgcctttccaggtaacaacaggttaccaattgcctgtgtacaattaccaagcatttccggcttacccgagttcacctttccaggtgaccaccggataccagctcccagtgtacaactaccaagcctttcctgcctatcccagctctccctttcaagtgaccacggggtatcagctaccagtctacaattaccaggcatttccagcttaccccaacagcgccgtgcaggtgacaacgggttatcagttccatgtttataactaccaaatgccaccacagtgtcctgtcggggagcaacggcgcaacctttggaccgaagcttataagtggtggtacctcgtttgcctcatccagcgccgagactag

SEQ ID NO: 114332 - DNA, 1461 bp, synthetic construct
  misc_feature 1..1461: note = Description of Artificial Sequence: Synthetic coding sequence
  source 1..1461: mol_type = other DNA
atgagcgccgccaatcctgaaacacctaattctacaattagtcgggaggcctccacccagtcctcgagcgccgcagctagccaaggttgggtgctgcctgagggcaaaattgtgcctaacaccgtattcgtgggtggcatagacgctaggatggatgaaacagagataggcagttgctttggcagatacgggtctgttaaagaagtaaagattataactaatcgcaccggcgtcagcaagggctatgggttcgtgagcttcgtgaatgacgtagacgtgcaaaagattgtcgggtcccaaatccactttcatggaaagaaacttaagcttgggcccgctatacggaagcagaaactgtgtgccaggcacgtgcaaccacggccccttgtggtaaatcctccccctcccccgcagtttcagaacgtgtggaggaacccgaataccgaaacgtacttacagccacagatcacaccgaacccagttactcagcacgtgcaagcttactccgcttaccctcactcaccaggacaagtgataaccggctgccagcttcttgtgtacaactatcaggagtaccccacgtacccagacagcgctttccaggtgactaccgggtatcagttaccagtctataactaccagcccttccctgcctaccctaggtccccttttcaagtgactgcaggctaccagttgccagtttacaactaccaggccttccctgcataccctaatagccccttccaggttgccactgggtatcagttcccggtctataactatcagccttttcctgcgtacccgtcttcaccattccaagtgactgcgggctaccagctgcccgtttacaactatcaagcgtttccggcctaccctaactctcccttccaagtggccacaggatatcagttccccgtgtacaattatcagcccttcccggcctatccatccagtccctttcaggtgacagccggctatcaacttccagtctataactaccaagccttccctgcctatcccaacagcccctttcaagtcgctacaggctaccagtttcccgtatacaattatcaggccttcccagcctaccctaattcaccagttcaggtgaccaccggatatcagctgcccgtatataactaccaggccttccccgcctaccccaattccccctttcaggttgccactggttaccagttccctgtgtataattatcaggctttcccagcctacccgaacagcccagtacaagttactactgggtaccagctccctgtttacaactatcaggctttccccgcttaccccaacagtgccgtacaggtgactaccggctaccagtttcacgtgtacaattatcagatgcctccacagtgcccagtcggagagcagcgacgaaacctgtggaccgaggcctataagtggtggtatctggtatgtctgatccagcgtcgggactag

SEQ ID NO: 114333 - DNA, 1677 bp, synthetic construct
  misc_feature 1..1677: note = Description of Artificial Sequence: Synthetic coding sequence
  source 1..1677: mol_type = other DNA
atgagcgctgcaaatccagaaacaccaaacagcaccatctctcgtgaggcttcaacccagtcctccagtgctgcagcttcccagggatgggtgcttcccgaaggtaaaattgtgccaaacactgtatttgtcggcggaattgacgctcgcatggatgagacagagatcgggagctgtttcggtcgctatggctccgtgaaggaggtgaagatcattaccaatcgcaccggtgttagcaaaggttatggctttgtgtcatttgtcaacgacgtggacgtacaaaagatcgtgggaagccagattcacttccacggcaaaaagctgaagttggggccggcaattcgtaagcagaaattatgcgcccgtcacgtgcaaccccgacctctcgtggtgaatccgccaccgccaccacagttccagaacgtatggcgaaatcctaataccgagacttacctccagccccagattaccccaaaccctgtcacccagcatgtgcaggcttacagcgcctacccacattcccccgggcaggtgattacgggttgtcagctcctggtgtacaactatcaagaataccccacatatccagacagcgccttccaggtgaccacgggttaccagctgcctgtgtataactaccagcccttccccgcgtaccctaggtcaccctttcaggttaccgctggttaccagctgccagtctataactatcaggccttccccgcataccctaactctccgttccaagtggccacgggttaccagtttccagtgtataattaccagcctttccctgcctatccgtcttccccctttcaggttactgcaggttatcaactgccggtgtataattaccaagccttccccgcctatccgaacagtccctttcaggtagccacgggttaccaattccccgtgtacaactatcaggcattccccgcttacccaaacagcccagtccaggtgaccacgggctatcagcttcccgtgtataactatcaggcctttccggcctatcccaattccccggttcaagtgaccacgggctaccagttgcccgtttataattaccaggccttcccggcttacccttcatcacccttccaagtcaccaccgggtaccagctgcctgtgtacaattatcaggccttccctgcataccctagtagcccctttcaggttacaacagggtatcagctgcctgtctacaactaccaggcattcccagcatatccgtcatctccttttcaagtgacaactggatatcaactccccgtgtataactatcaggcattcccggcttatccctccagcccctttcaggtcactaccgggtaccagctgccggtatataattatcaggcattcccggcctatcccagtagcccgttccaggtaaccacaggttaccagctgccagtctacaattaccaggcttttcccgcctatcccagttctccgttccaggtgacaacagggtaccagttgccggtctacaattatcaggccttccccgcgtatcccaacagcgctgtgcaggtcacaaccggataccaatttcatgtgtataattatcagatgcccccacagtgcccggtgggcgaacagaggcgcaacctgtggaccgaggcttacaagtggtggtatctggtttgtcttatccaacgcagggactag

SEQ ID NO: 114334 - DNA, 1086 bp, synthetic construct
  misc_feature 1..1086: note = Description of Artificial Sequence: Synthetic coding sequence
  source 1..1086: mol_type = other DNA
atgagcgccgccaacccggaaactcccaactcaaccatatcgagggaagcaagcacacagtcaagctcagccgcagcaagccagggttgggtcttgccggagggtaagatcgtcccgaacacagtatttgtgggcggtatcgacgctaggatggacgagaccgagatcggctcttgttttgggcgctatgggtctgtaaaggaagtcaaaatcatcacaaacagaacaggggtgtcgaaaggctacggcttcgtcagcttcgtgaacgacgtggacgtacaaaaaattgtcggatcccagatccacttccacggcaagaagctgaagctgggccctgcaatccgcaagcagaagctgtgtgcaaggcacgtacagccgcgcccattagtagtaaatcccccccctcctccacagttccagaatgtgtggaggaatcccaacaccgaaacatatttgcagcctcaaatcacccccaaccccgtcacccaacatgtccaggcatacagtgcatatcctcacagccctgggcaggtgatcaccggttgccagcttttagtgtacaattaccaggagtacccaacctaccccgactcagcctttcaggttactaccggataccaactgcctgtgtataactatcaaccctttccagcataccctagatccccatttcaagtcactgccgggtaccagctgcccgtgtacaattatcaggcattccctgcctatccaaattcaccattccaagtcgccacgggataccagtttcctgtgtataactaccaacccttccctgcataccccagttcaccatttcaggttacagccgggtaccagctgcccgtgtataattatcaagccttcccagcgtacccaaactccccgtttcaggtggccactggttatcaatttcccgtctacaactaccaagcctttcctgcataccctaacagccctttccaggttgcaacggggtaccagtttccagtatataattatcaggctttccctgcctaccccaactcaccggtgcaagtcactaccggataccaacttcccgtgtacaattatcagatgcctccatag

SEQ ID NO: 114335 - DNA, 1965 bp, synthetic construct
  misc_feature 1..1965: note = Description of Artificial Sequence: Synthetic coding sequence
  source 1..1965: mol_type = other DNA
atgagtgccgccaatcccgagacaccaaacagcaccatcagtcgagaggcctctactcagagctcctccgccgccgccagccagggctgggtgctgccagaaggtaagatcgtcccgaacacagtattcgtggggggaatcgacgcacggatggacgaaaccgaaatcgggtcgtgttttggccggtacgggtccgtgaaagaggtgaagattatcactaatcggactggggtgtcaaagggttatggctttgtgagctttgttaacgacgtggatgtccaaaagattgttggcagtcagattcacttccacggcaagaaactaaagttgggccctgctatcaggaagcagaagctgtgcgctagacatgttcagccacgacctcttgtggttaacccaccccctcctccccagttccaaaatgtgtggcggaacccaaacacggaaacttacctgcagccacaaattactccgaacccggtcacccagcacgtgcaggcctactcagcttaccctcattcaccggggcaagtgatcactggctgtcagttgctcgtctacaattaccaggagtaccccacgtacccagactccgcctttcaggtcacaacaggataccagctgcccgtgtataattaccaaccctttccggcctaccccaggtccccctttcaggtaactgctggctatcagctgccggtgtacaactaccaagcattcccagcctatccaaattcaccatttcaggtggccaccggataccagttccccgtgtataattaccagccatttcccgcctacccatcatctccattccaggtgactgctggatatcagttgccagtctataactaccaagccttcccagcctatccgaacagtccattccaggtggccactggctaccaattcccagtgtacaattatcagccctttcctgcctacccctcatcacccttccaggtcacagccgggtaccagctgcccgtttataattatcaggcctttccagcataccctaactccccattccaggtggccaccggttaccagtttcctgtgtacaattatcaggcttttccggcctatcctaattctcctgttcaggtgacaacaggttatcagctccctgtgtataactatcagcctttccccgcctatcccagatcaccattccaggttactgcaggctatcagctccctgtgtataactaccaggctttccccgcatatccaaacagccccttccaggtggccactggatatcagtttccagtatacaactatcaggctttcccagcgtaccccaactctccagttcaggtgacaacgggttaccagcttccggtgtataactaccaggcgttcccagcataccctagttcgccgttccaggtgaccaccgggtatcaactgccggtatacaattatcaggcgttccctgcttacccttcgtcaccatttcaggtcactaccgggtaccagctgccagtttataattatcaggctttccccgcatatcccagctcgcctttccaggtgacgacaggttatcaattgcctgtgtacaactatcaggcattccccgcttatcctagttcacctttccaggtgaccactggatatcagctgccagtgtataactaccaagctttcccagcttacccgtcatcccctttccaggttaccacaggttatcaattaccagtttataactaccaggccttcccagcgtatccaagcagccctttccaggtcactacaggctaccagctcccagtctataactaccaggcattcccagcctaccctaacagtgccgtgcaggtcactacaggctaccagttccatgtgtataactatcagatgcctccccagtgcccggtgggggagcagaggaggaacctttggactgaagcctacaaatggtggtatctggtctgcttgatacagcgcagggattag

SEQ ID NO: 114336 - DNA, 1605 bp, synthetic construct
  misc_feature 1..1605: note = Description of Artificial Sequence: Synthetic coding sequence
  source 1..1605: mol_type = other DNA
atgtctgcggctaatcccgagacccctaactccaccattagccgcgaggcatccactcagtcaagtagtgctgccgcttctcagggctgggtgttgccagaggggaaaatcgtccctaacactgtttttgtgggcgggatcgatgcacgaatggatgagactgagattgggagctgtttcggtcgctatggaagtgtgaaggaagtgaaaatcatcaccaacagaaccggcgtgtccaaaggttacgggttcgtgtctttcgtgaacgatgtcgacgtccagaaaattgtgggatcacagatccactttcacggtaagaagctcaagctcggcccagctatcaggaaacaaaaattgtgtgctcggcacgtgcagccacgcccactggtggtgaacccccctcctccaccacagttccaaaacgtgtggcggaatcccaacaccgaaacttatctccagcctcagatcacccctaacccagttacacagcacgtgcaggcgtactccgcttaccctcatagccccggccaggtcattacaggatgccagctgctagtctataactaccaggaataccctacctatcctgattcagcctttcaggtgactacaggctatcagctcccggtgtataactaccagcccttccctgcgtatcccagatccccgtttcaggtcacagcaggttaccagcttccagtttataattatcaggctttccctgcttatcctaactctcccttccaggtcgctactgggtaccagttcccagtttacaactatcagcccttcccagcctatcctagctccccatttcaggttaccgcgggctaccagctcccggtgtacaattatcaggcatttccggcataccccaactcgccatttcaggtagctacagggtatcagttcccagtatacaactaccaagccttccccgcttaccccaacagcccagtgcaggtgacgaccggttaccagctccccgtgtataattaccaggcctttccggcttatccttcaagtccttttcaggtgactaccggataccagctgcccgtctacaactatcaggcatttcctgcgtaccccagctctcccttccaggtgactactggctaccagctgccagtctataattaccaggccttccccgcttacccatcaagcccattccaggtgaccactgggtaccagttgccagtttacaactaccaggcatttcccgcctacccctcatctcccttccaagtgacgactggctaccaactgcctgtctacaattaccaggccttcccagcttatccatcatctccatttcaggttactacaggatatcagttaccagtgtataactaccaggccttcccagcctacccatctagcccattccaggtgactaccgggtatcagctgccagtttataactaccaagccttcccagcataccctaactcagcagttcaggtgactaccggctaccagttccatgtttataattaccagatgcccccccaatgtcccgtgggggaacagcggcgtaacctctggactgaagcatataaatggtggtatttggtgtgtttaattcagagacgcgattag

SEQ ID NO: 114337 - DNA, 1317 bp, synthetic construct
  misc_feature 1..1317: note = Description of Artificial Sequence: Synthetic coding sequence
  source 1..1317: mol_type = other DNA
atgtccgccgcaaatcctgagacacctaactccacgatcagcagagaggcatcaacccagagctcaagcgctgcggcttcccagggctgggtacttccggaaggtaaaatcgtgcctaacaccgtttttgtgggaggtatagatgcgaggatggacgaaactgaaattgggtcctgctttggccggtacgggagcgtgaaagaagtgaaaatcatcaccaacagaaccggagtctctaaaggatacggttttgtgagcttcgtgaacgacgtggacgtccagaagatagtcggctctcagattcacttccacggtaagaaactaaaattggggccagcaatccgcaaacagaagttatgtgcccgccatgtgcaacctcggccactcgtagtcaatcctcctccccctccacagtttcagaacgtgtggagaaaccccaacacagaaacatatttgcagccgcagattacaccaaaccccgttacacaacacgtgcaggcttattccgcttacccgcacagcccagggcaggtcattaccggatgccagctcctggtgtataactatcaggaatacccaacttatcccgactcagccttccaagtcaccactggctatcaacttccagtttataactaccagccttttccagcttacccgaggagtcccttccaagtcaccgcggggtaccaacttcccgtttacaattaccaggcctttcccgcctaccccaacagtcccttccaggttgcaacggggtaccagttcccagtctataactaccaggctttccccgcttatcccaattccccttttcaggttgccacgggctaccagtttccagtctacaattatcaggcctttcccgcttatcctaactcaccatttcaggtggctaccgggtatcagtttccggtgtacaattatcaagccttccctgcataccctaattctcccgtgcaggttacaaccggttaccagctccccgtctacaactaccaggccttcccagcgtaccctaattccccatttcaggtggcaaccgggtatcagtttccagtttataactaccaggcctttcctgcctatcctaacagccccgtgcaggtcactacaggctaccagctacctgtgtataactaccaagccttccctgcctatcccaactccgccgtccaggtgactacagggtatcagtttcacgtctacaattatcagatgcccccgcagtgtcctgtcggggaacagcgcagaaacctctggactgaggcctacaagtggtggtatctggtgtgtctcatccagcgccgggattag

SEQ ID NO: 114338 - DNA, 1173 bp, synthetic construct
  misc_feature 1..1173: note = Description of Artificial Sequence: Synthetic coding sequence
  source 1..1173: mol_type = other DNA
atgtcagctgccaatcccgaaacccccaattctaccatctcgcgggaggcttcaacccaatcttcctccgctgctgcctcccagggctgggtcctcccagaggggaaaatcgtccccaataccgtatttgtggggggaatcgacgctaggatggatgagaccgaaatagggagttgtttcggacggtatggatccgtgaaagaggtgaaaatcatcacaaaccgtactggcgtcagcaaaggttatggcttcgttagcttcgtcaacgacgtagatgtccaaaaaattgtgggctcacaaatccactttcacggtaagaaactcaaattgggccctgctattcggaaacagaagctgtgtgccagacatgtacagccgaggccactggtcgttaaccccccacccccacctcaatttcagaacgtgtggcgaaatcctaatacagaaacctatctccagccacagataaccccaaacccggtaacacagcacgtgcaggcctattccgcctaccctcattcccccggccaggtgatcactggttgccaactgctcgtctataattatcaggaatatcctacataccctgattccgccttccaggttacaaccggctatcaactgcctgtgtacaattatcagccatttccggcctatccacggtctccctttcaggtcaccgctggctaccaactgcccgtgtacaactaccaagcatttcccgcctatcccaactccccatttcaggtggcaacaggttaccagttccccgtatataactatcaaccatttccagcttatccttcttctccattccaggtcacggcggggtaccagctgccagtctacaactaccaagcatttccagcttacccgaacagcccctttcaggtcgcgactgggtaccagtttccagtatacaactatcaggcctttccggcatacccaaatagtcctgtgcaggtcacaactggatatcaactgccggtgtataattaccaggcgttccctgcttatccaaactccgctgtgcaagtgactaccggatatcaatttcacgtgtacaattaccaaatgccaccgcaatgccccgtgggggagcagaggcgcaacctatggaccgaggcctacaaatggtggtaccttgtgtgtctaatccagcgccgggactag

SEQ ID NO: 114339 - DNA, 1746 bp, synthetic construct
  misc_feature 1..1746: note = Description of Artificial Sequence: Synthetic coding sequence
  source 1..1746: mol_type = other DNA
atgatggatgagactgagatcggatcttgttttggaaggtacgggtccgtgaaggaagtcaaaatcatcactaaccgcaccggggttagtaagggctacggcttcgtgtcatttgtaaatgatgtagacgttcagaaaattgttggcagtcaaatccatttccatggcaaaaaactgaagctaggccccgccatccgcaaacaaaaactgtgtgcccgacacgtccagccccggccattggtcgtcaatccccctccccctccacagttccagaatgtttggcggaatccaaatacagagacttatctgcaaccccaaatcactccaaatccggtgacacagcacgttcaggcctactccgcttatccccatagtccaggacaggtgattactggctgccagctccttgtgtacaattatcaggagtatcctacgtacccggatagtgccttccaagtcactaccggttatcagctgccggtctataattatcagccattccctgcatacccaaggtcaccctttcaggtaaccgccggatatcagctcccagtttataactatcaggccttcccagcctaccctaactccccctttcaggtggcgactggctaccaattccccgtatataactaccagcctttccccgcttatccatctagccccttccaggtgacggcaggataccagctccctgtgtacaactatcaagcctttcctgcctatcctaattccccttttcaggtggcaacaggttaccagttccccgtatacaactatcaggcttttccagcatacccaaacagccccttccaggtggctacgggatatcaatttcctgtctataattatcaggcgtttcccgcctaccccaatagtcccgttcaggtgaccaccggctaccagctgcccgtgtacaactatcaacccttcccagcgtaccccagatcccccttccaagttacagccggatatcagctgcccgtctacaattaccaggcattccctgcttaccccaattcccctttccaggtagcaacaggatatcagttccctgtctacaattatcaagctttcccggcatacccgaattctcctgtacaagtgactaccgggtatcaactaccagtctataattatcaggcttttccagcttacccctcttcacctttccaggtgacaactggctaccagctgccagtatacaattatcaggctttccctgcatatccctcgagtccctttcaggttaccaccgggtatcaactaccggtgtataactaccaggcgttcccagcatatcctagttcccctttccaggtcacaaccgggtatcaattacccgtctacaactaccaggcattccccgcttacccctcatcaccttttcaagtcaccaccggttaccagctgccagtttacaattaccaggcattccctgcatacccatcttcccccttccaggtgacaactggataccagttgcctgtgtataattatcaggcctttcctgcctatccttcttcccccttccaagtgaccacagggtaccagctaccagtctataactaccaggctttccctgcttatcccaacagcgcggtgcaggtgacgaccggataccagttccatgtgtacaactatcaaatgccccctcagtgtcctgtgggtgagcagaggcggaacctgtggaccgaggcttataagtggtggtaccttgtatgcctgatccagagaagagactag

SEQ ID NO: 114340 - DNA, 1014 bp, synthetic construct
  misc_feature 1..1014: note = Description of Artificial Sequence: Synthetic coding sequence
  source 1..1014: mol_type = other DNA
atgagtgctgccaaccccgaaactccgaactccacgattagtagggaggcctcaacccagtcctcttctgccgctgcatctcagggttgggtgcttcccgaaggaaaaattgtgcctaataccgtctttgtcggaggaattgacgctagaatggatgaaactgaaatcgggagctgttttggacgttatggatcagtcaaagaagtgaaaataatcacaaacagaacgggtgtatctaagggttatggcttcgtttcctttgtaaatgatgtagacgtgcagaaaatagtgggctcccagatccatttccatggaaagaagttaaagcttggccccgccattagaaaacaaaagctgtgcgcccggcacgtgcagccccgtcccctggtggtaaacccccccccgccaccccagttccagaacgtatggcgaaatcctaatacggagacatatctgcagccacagatcacgccaaatcctgtgactcagcatgtgcaagcctactccgcataccctcacagtcctggtcaagtgattaccggctgtcagctactcgtgtataactaccaggagtacccaacttacccggactccgcgttccaagtcacaactggttatcagctcccggtatataattatcagccttttccggcttaccctcggtcaccttttcaagtgaccgccggctaccagctgccagtgtacaactaccaggccttcccggcctaccctaatagtccatttcaggtggccactggctaccagtttcctgtctacaattaccaggctttcccggcgtacccaaattccccggttcaggtgacaacagggtaccagctccctgtgtacaattaccaggcgttccctgcctacccaaattccccttttcaggtggccacaggataccagttccctgtgtataattaccaggccttccccgcgtacccaaattcccctgtgcaagtgacgaccggttaccaacttccagtgtacaactatcaaatgcccccgtag

SEQ ID NO: 114341 - DNA, 1101 bp, synthetic construct
  misc_feature 1..1101: note = Description of Artificial Sequence: Synthetic coding sequence
  source 1..1101: mol_type = other DNA
atgagcgccgcaaaccctgagactccaaactcaacaatatctcgtgaggcctccacacagtcctcatcggccgccgcaagtcagggatgggtcctgccggagggaaaaattgttcccaacactgtgttcgtgggaggcatcgatgctcgaatggacgagacagagattggctcttgtttcgggcggtacggatccgtcaaagaggttaaaatcataaccaatcgaaccggcgtgagcaagggctacgggtttgtgtcctttgttaatgacgtcgacgttcaaaagatagtgggttcccagatccatttccatggaaagaagctgaaactgggtcccgccatcagaaagcagaagctatgcgctagacacgtccaaccccggcctctggtcgtaaaccccccacctccccctcagttccagaatgtgtggcgaaatcccaacaccgagacatatctgcagccacagataactcctaaccccgttactcagcacgtgcaggcttatagcgcctaccctcactctcctggccaggtgatcaccggctgccagctcctcgtctataattatcaggagtatccaacatacccagacagtgccttccaggtcaccaccggatatcagttacctgtatacaactatcaaccattccccgcgtatccacggtccccctttcaggtgaccgccggctaccagctgccggtgtacaactaccaagcattcccagcgtaccctaactcccctgtgcaggtgaccacaggataccagctcccagtatacaactatcaggccttccccgcctatcctaacagtcccgtacaggtaaccacaggctaccagctccctgtgtacaactaccaggcgtttcccgcatatcccaacagcccagtccaggtaactaccggctaccaactgccagtctacaattatcaggcttttcccgcctacccgaactccgccgtccaggtcaccaccgggtatcagtttcacgtgtataattaccagatgcctcctcagtgcccggttggagaacaaaggcgaaatttgtggactgaggcttataagtggtggtatctggtgtgcctgatccagcggcgggactag

SEQ ID NO: 114342 - DNA, 1317 bp, synthetic construct
  misc_feature 1..1317: note = Description of Artificial Sequence: Synthetic coding sequence
  source 1..1317: mol_type = other DNA
atgtccgcggccaatcccgagacaccaaactccaccattagccgcgaagcatccacccaatcatcttcagccgcggcctcccaagggtgggtactgcccgagggcaagatagtccccaataccgtcttcgtgggtggcattgatgcacggatggatgagaccgagattggttcctgctttggccgatacggaagcgtgaaagaagtgaaaattatcaccaatcgaactggcgtgtccaaaggatacgggttcgtttcattcgtgaacgacgtcgacgtacagaagatcgtaggatctcagatacactttcacggtaaaaaactgaagctcgggcctgctattcgtaagcagaagttatgcgcccgccacgtacagccacggccactagttgtgaacccccccccgccgcctcaatttcagaatgtatggcgcaaccctaatacagagacctacctacagccccagatcacacccaatccggtcacgcagcacgtccaagcctattctgcttaccctcattcaccaggacaagtcattactgggtgccagctcctggtgtataactaccaggaataccctacttatcctgattctgcatttcaggttaccaccggataccaacttcccgtttataactatcaaccatttcccgcctatcctcgatccccattccaggtcactgcggggtaccagctgcccgtttacaattaccaggcctttcccgcctacccaaactctcctttccaagtagcaacaggataccagtttccagtgtacaactaccaggcgttcccagcttatcccaattcccccgtgcaggtgaccactggctatcagctgcccgtttataactaccaggcctttcccgcctacccaaacagcccctttcaggtggcaacaggctatcagtttcccgtgtacaactatcaagcattccctgcttatcccaacagtcctgtgcaggtgacaacaggctaccagcttcccgtctacaactaccaagcttttccggcttatccaaatagcccattccaggttgccacaggctaccagttccccgtctacaattaccaagccttcccagcgtatccaaatagtcccgtgcaggtgacgacaggctaccagctcccagtgtacaattatcaggccttccccgcctatcccaacagtgctgtgcaggtgacaacaggctatcaattccacgtgtacaactatcaaatgcccccacaatgtcctgtcggggaacagaggcgcaacctttggaccgaggcctataaatggtggtacctcgtgtgtcttattcagcgcagagattag

SEQ ID NO: 114343 - DNA, 1086 bp, synthetic construct
  misc_feature 1..1086: note = Description of Artificial Sequence: Synthetic coding sequence
  source 1..1086: mol_type = other DNA
atgtcggctgctaatcctgaaacccctaacagcaccataagcagagaggcctcaacacagagtagttccgccgcagcctcccaggggtgggtgttacccgagggaaagatcgtgccaaatactgtttttgttgggggaattgacgcccgaatggacgaaacagaaatcggttcctgcttcggacgatatggttctgtaaaggaagtaaaaattataaccaataggacaggagtgagcaaggggtacggattcgtctccttcgtgaacgacgtggacgtgcagaagattgtggggtcacagattcacttccatggtaaaaaactcaaacttggacccgcgataaggaagcagaaactatgcgcccgccatgtacaaccccgaccccttgtggtaaacccccctcctccgccccagtttcagaacgtctggagaaaccccaatacggagacctacctgcagccccagatcacaccaaacccggtgacccagcacgttcaggcttactctgcttatccccacagccccggccaggtgataacagggtgtcagctactggtgtataattatcaggaataccctacctaccccgattccgcatttcaggtgaccactggctatcagctgccagtgtacaactaccaacctttcccagcctatcctcgttccccattccaggtaaccgccgggtatcagctgcccgtttacaactatcaagcctttcctgcatatcctaacagtccctttcaggtggcaactggataccagtttcccgtgtacaattatcaagcgtttcctgcatacccaaactcccccgtccaggtgaccacggggtaccagcttcccgtgtacaattatcaggcgtttccggcataccctaattcgccatttcaggtggctactgggtatcaatttcctgtatataattatcaggcctttccagcgtatcctaatagccctgttcaggttaccacagggtaccagttgcctgtttataactaccaggcctttcccgcataccccaactctcctgtccaggtcacaacggggtatcagctcccggtgtacaactaccagatgccgccatag

SEQ ID NO: 114344 - DNA, 1173 bp, synthetic construct
  misc_feature 1..1173: note = Description of Artificial Sequence: Synthetic coding sequence
  source 1..1173: mol_type = other DNA
atgtccgctgcaaatccagagaccccaaactccacaatatcccgtgaagcaagtactcagtcaagctccgccgctgcttcccaagggtgggtgctcccagaagggaaaattgtaccaaatacggttttcgtcggagggatagacgcccgaatggatgaaacggaaatcggtagctgcttcggccgctatgggtccgtgaaggaagtgaagattattacaaaccgcacaggcgtgtctaaagggtacggttttgtgtcgtttgtcaatgacgtcgatgttcagaaaattgtgggcagccagattcacttccacgggaagaaattaaaattgggtcctgcaatcaggaagcagaagctgtgtgctcgacatgtgcaaccgcggccacttgtcgtgaatccccctccccccccccagttccaaaacgtgtggcgcaacccaaacactgaaacatacctacagcctcagatcaccccaaacccagtcacacagcatgtccaggcatactccgcctatccccattccccaggccaggtcattactggatgtcagctcctggtgtacaactaccaggaataccctacatatcccgattctgcattccaggtgacaacgggataccagcttccagtctacaattaccagcccttccctgcctatcctcgttctccattccaagtgacagcaggttaccagctgccagtctataactaccaggcctttcccgcctacccaaattcaccctttcaggttgcaaccggttatcaatttcccgtgtataattaccaggcttttccagcctatcccaattctcccgtgcaggtaaccacaggataccagctaccagtttacaactatcaggcgtttcccgcctaccccaactccccatttcaggtcgccactggctatcagttccctgtttacaactatcaagccttccccgcctatcctaatagtccagtgcaggtaacgaccggatatcagctgcctgtttataattaccaggctttccctgcatacccaaacagcgctgtgcaagtgactacagggtaccaattccacgtatataactatcagatgccgccccaatgccctgtaggggaacagcgtaggaacctgtggacagaggcctacaaatggtggtaccttgtgtgtctgatccagcggcgtgactag

SEQ ID NO: 114345 - DNA, 948 bp, synthetic construct
  misc_feature 1..948: note = Description of Artificial Sequence: Synthetic coding sequence
  source 1..948: mol_type = other DNA
atggcagcacccagttgtggaggtgaccggaaggccagactgactccctccctgccccatgagtccactgccaatcctgagacccccaattccaccatctccagagaggcctcaactcagtccagctccgccgcaacttcccaagggtatattctacctgagggcaagattatgcccaacacagtgtttgtaggcggaatcgatgttaggatggacgagacggagataagatccttttttgctcggtatggttcagtcaaggaagttaagattattaccgatagaactggtgtctccaaaggatatggtttcgtgagcttcttcaatgacgtcgatgtgcagaagattgtagaatcccaaatcaactttcacggtaagaaactgaagttgggtccggccattagaaagcagaacctgtgcgcctaccatgtgcaacctaggccactggtgttcaatcacccgccgccaccgcagttccaaaatgtttggacaaatccaaacaccgaaacttatatgcagcccactacgaccatgaaccccattacacagtacgtgcaggcctatcccacgtacccgaactctcccgtgcaggttatcacagggtaccagctgccagtttacaattaccagatgccgccgcagtggcctgttggggaacaacgaagctacgtggtacctccagcctatagcgccgtgaactaccactgcaatgaagtggaccccggcgccgaagtcgtacccaatgagtgttctgtgcatgaggcgacccccccctctggaaacgggccacaaaagaagagcgtggatcgctccattcaaactgtggtgtcgtgtctgtttaatccagagaaccgcttgcggaatagtgtggtcactcaggacgattatttcaaggacaagcgggtgcatcattttcgtcgaagcagagcaatgttgaagagcgtgtag

SEQ ID NO: 114346 - DNA, 888 bp, synthetic construct
  misc_feature 1..888: note = Description of Artificial Sequence: Synthetic coding sequence
  source 1..888: mol_type = other DNA
atgtcgacagctaatcctgaaaccccgaacagcacaatctctcgggaggcttccacacagtccagcagcgctgcaacatctcaaggttacatcttgcctgaaggcaaaattatgcccaatacggtgttcgtggggggcatcgacgtccggatggatgagacagagataagatctttctttgcccggtatggttcagtcaaggaagttaagattatcaccgaccggacgggggtgtctaagggttatggcttcgtttctttttttaatgatgtggacgtgcagaagatagtagaatctcagattaatttccatgggaagaagctcaaacttggccccgccattaggaaacaaaacctgtgcgcttaccacgtccagccacggcctctggtgttcaatcacccaccaccaccgcagtttcagaatgtgtggacgaacccgaacaccgaaacatacatgcagcccactaccaccatgaatcccatcactcagtacgtccaggcatacccaacatatcctaactctccagtgcaggttattaccggttatcagctgcccgtgtacaactatcagatgccacctcagtggcccgtcggggaacagcggtcttacgtggtaccaccagcatatagtgctgtgaattatcattgtaacgaagtagacccaggcgcggaagtggtgcctaacgagtgtagtgtgcacgaggcgacccctcctagtgggaatgggccacagaagaagtccgttgacagaagtatccagaccgttgttagttgcctgttcaaccctgagaacagattacgcaactctgtagtcacccaggatgattactttaaggacaaacgggtgcaccattttaggcgcagtagggctatgctgaaatctgtgtag

SEQ ID NO: 114347 - DNA, 2286 bp, synthetic construct
  misc_feature 1..2286: note = Description of Artificial Sequence: Synthetic coding sequence
  source 1..2286: mol_type = other DNA
atgaactggagatttgtagaactcctgtattttctctttatttgggggcgaatctctgtacaaccaagccatcaagagcctgcggggaccgaccagcacgtgagcaaagagtttgactggttaatatcagacaggggtcccttccatcacagcaggtcttacttaagctttgtggaacggcaccgccagggctttactacacgctataaaatctaccgtgaatttgcaaggtggaaggtccgaaatacagccatcgagcggcgggaccttgtcaggcatccagtgcctctgatgcccgaatttcagcgctccatcagactgctgggaagaagaccaacgacccagcagttcattgatactatcataaaaaagtacgggacccacttgctcatcagcgccacactgggaggggaagaagcactgaccatgtatatggacaaaagtcggcttgatcgcaaatctggtaatgctactcaatctgtcgaagcccttcaccagctggccagctcttactttgttgacagagacggcacaatgcgtagactgcacgaaatccaaatcagtaccggcgctattaaggtgaccgagacccgcactggacccttagggtgcaacagttatgacaatctcgattccgtgagttcggttcttctacagtccaccgagtccaaactgcatcttcaaggccttcaaattatttttcctcagtatttacaggagaaatttgtccagtctgcactaagctacattatgtgtaacggagaaggggagtacttgtgtcaaaattcgcagtgcaggtgccaatgcgctgaggaattcccccagtgcaactgtcccataaccgatattcagatcatggaatatacattagctaatatggctaagagttgggcggaggcttataaagatcttgagaattcagatgagttcaaaagcttcatgaaacggctaccttccaaccattttctgacaattggctctatccaccaacactggggcaacgattgggacctccagaatcgctacaagctgctgcagagcgcaactgaggcccaacgccagaagattcagaggacagcccgcaaactcttcgggctaagtgttcgctgccgacacaaccctaaccatcagcttcccagggaaagaactatacaacagtggctagctagagtgcagagcctgctatattgtaatgaaaatggtttctggggcacattcctcgagtcgcagcggtcttgtgtgtgccatggatccactaccctctgtcaacgccccataccttgcgtgatcggtggaaataactcctgcgcaatgtgctcactggctaatatcagtctgtgtggaagctgcaacaaagggtataagctctatcgcggacgctgcgagccccagaacgttgactctgagagaagcgagcagtttatctcctttgagaccgatttagattttcaagatctggaactgaagtacttattgcagaaaatggatagccgtctgtacgttcacacaacattcatctccaatgaaatccggctggatacattctttgacccccggtggcgcaaaagaatgtccctgacgctgaaatctaacaaaaatagaatggattttatccacatggtgatcgggatgagtatgcgcatttgccagatgcgcaactcgtcccttgaccctatgttctttgtttatgtaaatcctttttctgggagtcactccgagggatggaatatgccctttggggagttcggatacccccggtgggaaaaaattagactccagaatagtcaatgctataactggacccttttgctcggaaataggtggaagacgttcttcgagactgtgcatatttatttacgctctcgcacgagactgccaacactactcaggaacgagactgggcagggtccagtggacctctcagacccctccaaacgccagttctatatcaaaattagcgacgtacaagtgttcggttactctcttaggttcaatgccgacttgctgcgtagcgctgttcagcaggtgaaccagagttacacacaaggcggccagttctattcttctagcagcgtgatgttacttctgttggacattagggacagaatcaacaggctggccccccccgtggccccaggaaaacctcagcttgacttgtttagctgcatgctgaaacacaggttgaaactcaccaacagcgaaataatacgggtaaaccacgccctggacctgtataacactgaaattcttaagcagagcgatcagatgactgctaaactctgttag

SEQ ID NO: 114348 - DNA, 963 bp, synthetic construct
  misc_feature 1..963: note = Description of Artificial Sequence: Synthetic coding sequence
  source 1..963: mol_type = other DNA
atgaactggaggtttgtggagctactgtattttctgtttatttggggccgcatttctgttcaaccgtcacatcaggagcctgccggcactgatcagcacgtcagcaaggaattcgactggctgatcagtgatagggggcctttccaccacagtaggagttatctctccttcgtggagagacaccggcagggttttaccactcgatacaagatctacagagaattcgcacgctggaaggtcaggaatacggcaatagagcgaagggatctggttcggcaccccgtccccttgatgcccgaattccagcgctcaatccggctgctcggccgtcgccctactactcagcagttcattgatacaatcataaaaaagtatggaactcacttgctcatctctgctactctcggcggtgaggaagcccttactatgtacatggacaagagtcgcctggatcgcaaatccggaaacgctacacagtccgtcgaagcattgcatcagttagcttcctcatactttgtggaccgcgatgggacgatgcggcggttacacgagattcagatctctacaggggctattaaagtgaccgaaacacgcactggtcctctcgggtgcaactcatatgacaatctcgatagcgttagcagtgtcctcttgcaatccactgaatctaagctgcacctgcagggactccaaatcattttcccacagtacttgcaggagaagttcgtgcagagcgcgctttcatatattatgtgtaatggagagggagagtacctgtgccagaactctcagtgtagatgtcagtgtgcagaggagttccctcagtgcaattgtcccataacagatatccagatcatggaatacaccctggccaacatggcaaagtcctgggccgaagcctacaaggaccttgaaaactccggcagagaaagccactcagtgcctctgcacgaatggccctag

SEQ ID NO: 114349 - DNA, 2286 bp, synthetic construct
  misc_feature 1..2286: note = Description of Artificial Sequence: Synthetic coding sequence
  source 1..2286: mol_type = other DNA
atgaactggagattcgtagaattgctatatttcttgttcatttggggtcggatttccgttcaaccaagtcaccaggagcctgctggtacagatcagcacgtgagcaaagagttcgactggttaatttcagacagaggccctttccatcacagccgaagctatctttcattcgtcgaacgtcatcgccaggggtttacaacgaggtataagatttaccgtgagttcgccaggtggaaagtaagaaataccgctattgagcgccgagacttggtccgtcatcccgtgccactcatgccagaatttcagcgatccatcagactgctgggtaggaggcctaccactcaacagtttatcgacaccatcataaagaagtacggtactcatttactgatatcagcgacattaggtggcgaggaagcgttaacaatgtatatggataagtccaggctggacaggaagtccggaaacgccacccagagcgtggaggctctgcatcaactggcctcctcctacttcgtggatagagacggtaccatgcgcagattacacgaaatccagataagcacgggggccattaaagtgacagaaactcgtacgggaccccttgggtgcaacagttatgacaacttggactccgtatcatctgtgctgcttcagagcaccgaatctaaactgcacttgcaaggcctgcagattatatttccccagtatcttcaggagaagttcgtccagagcgccctttcatatattatgtgtaatggcgaaggcgagtatctgtgtcagaacagccaatgcaggtgccagtgcgccgaagagttcccccagtgcaattgtccaattacagacattcagattatggagtacaccctggcaaacatggcaaagtcctgggcggaggcttataaggacctggaaaacagcgatgaatttaagagttttatgaagaggctcccttctaatcattttctaacaatcggcagcattcatcagcattgggggaacgattgggatctgcagaaccgatataagctgctgcagagcgccaccgaagctcagcggcagaaaattcagaggaccgcgcgaaaacttttcgggttaagtgttcggtgccgtcacaatccaaatcaccagctgccaagagaacgcacaatccagcagtggctggccagggtccagagcctgctctactgtaatgagaacggcttctggggcacatttcttgaatcgcagcgctcctgcgtctgccacggaagcactactctttgccagaggcctataccatgcgtcatcggaggaaacaattcttgtgccatgtgttccctcgcaaacattagtttgtgcggatcatgtaacaagggctataaattgtaccgcggccgatgcgaaccccaaaatgtagatagtgagcgttcagaacagttcatcagtttcgaaacagatctggacttccaggatctggagcttaaatatctgcttcaaaagatggatagccgcctatacgtccacacaacatttatttctaatgaaattcggctggacacattttttgaccctcggtggcggaagcgaatgtccctgacactaaagtctaacaaaaaccggatggatttcatccacatggtcatcggaatgagcatgaggatctgtcagatgcgcaattctagtttggatcccatgttcttcgtgtatgttaatcccttctcaggtagccacagtgagggctggaatatgcctttcggagaatttgggtatcccagatgggaaaagataagactgcagaactcccagtgctataattggaccctgctgctaggcaatcgatggaaaactttcttcgagacggtccacatatatctgagaagtagaacacgactacccaccttactgcggaacgagactgggcagggacccgtggacttaagtgatccaagcaagagacagttctatatcaaaataagcgacgtgcaagtgttcgggtacagcctaaggttcaatgctgacctactccggagcgctgtacagcaggtcaatcagtcgtacacccaaggaggacaattttatagtagttcttcagtaatgctgctcctgctggacatcagagaccggattaatcggctggcacctcccgttgctcctggaaaaccacagctggatctgttctcatgcatgcttaaacaccgcctcaagcttactaacagcgagattatcagagtgaaccacgcacttgacctctacaacacagagattcttaagcagtctgaccagatgaccgcaaaactgtgctag

SEQ ID NO: 114350 - DNA, 1404 bp, synthetic construct
  misc_feature 1..1404: note = Description of Artificial Sequence: Synthetic coding sequence
  source 1..1404: mol_type = other DNA
atgaagcggattaaagtacccgattataaggaccgatcagttttcggcgtgcccctgactgtaaacgtccagcgcacaggacagccactaccacagtcaattcaacaggccatgcgttatcttcgaaaccactgtctggaccaggtgggtctgtttaggaagtcgggcgtcaagtcacgaatccaggccctgcggcagatgaatgagggggccatcgactgtgtgaactacgagggtcagagcgcttacgatgtggcggatatgctgaagcaatacttccgggatcttcccgagcccctgatgaccaataaactcagcgaaacattcttacagatatatcagtacgtgcccaaggaccaaagactgcaggccattaaggctgctatcatgctcctgccagatgagaatagggaagtgttgcaaaccctgttatatttcctgtcagacgtgaccgcagcagttaaggagaaccagatgacacccactaatctagctgtgtgcctggcccctagtctcttccacttgaatacacttaagagggaaaattccagtccgcgcgtgatgcagcggaagcagagcttgggcaagcccgatcagaaagatctcaacgaaaatctagcagctacgcaggggctggcccacatgatagctgagtgtaaaaaattattccaggttcctgaagaaatgtcccgctgtcgcaactcatatactgaacaggagcttaagccgcttacccttgaggctctgggccacctgggcaatgacgattctgcagattaccagcatttcttacaggactgcgtggacggattgttcaaagaagtcaaggaaaaattcaaaggttgggtgagctatagcacatcggagcaagccgaactgtcctacaaaaaagtgtccgagggcccaccactgcgactgtggaggagtgtgatcgaagtcccagcggttcccgaagaaattctgaaacgccttcttaaggaacagcatttatgggatgtagacctgctggacagcaaagttatcgagatcctcgatagccaaacagagatttaccagtacgtgcaaaattctatggctccacacccagctcgggactatgtggtacttcggacatggcgcacaaatttgcccaaaggagcctgtgcactcctactcaccagcgtagatcacgaccgcgctcccgtggtcggcgtccgcgtcaacgtactgctgtctcgttatttgatagagccatgcggcccagggaagtccaagctaacatatatgtgtagagtcgatctgcgcggccacatgcctgagtggtacaccaagtctttcggacatttgtgtgctgcggaggtagtgaagatccgcgacagcttctccaaccaaaataccgagacaaaggacaccaaatcacgttag

SEQ ID NO: 114351 - DNA, 3378 bp, synthetic construct
  misc_feature 1..3378: note = Description of Artificial Sequence: Synthetic coding sequence
  source 1..3378: mol_type = other DNA
atgggggaccctaaagcgcacgtcatggcaaggccattacgggcacccctgcgaaggtctttttccgaccacatcagggattccactgctagggccctcgacgtgatctggaaaaacacgagggacaggcggctggctgagatcgaggctaaagaagcttgtgattggcttagggctacgggcttcccccagtatgcccagctctatgaggactttctctttccaatagatatcagtctggtgaagcgggagcatgacttccttgaccgagacgctatcgaagctctgtgccggcggctaaacacactaaacaaatgcgccgtgatgaaactggaaatcagtcctcatcgcaagaggagtgatgattccgacgaggatgaaccatgtgcgatttccgggaagtggacattccagagggacagcaaacggtggtccaggcttgaagaatttgacgtgttctcacctaagcaggatcttgtccctggctctcccgacgattcgcatcccaaggatgggccctcccctggtggtaccctgatggatctctccgagcggcaggaggtatcctccgtgagatctcttagctccacgggatccttgccgtctcacgcccctccttctgaggatgctgccaccccccggaccaactctgttataagcgtttgttccagcagtaaccttgcggggaacgacgacagttttgggtcgctgccctcccctaaagaactcagttccttctcattctcaatgaaaggacatgagaaaaccgctaagagcaagacccgatcattgctcaaaagaatggagtcacttaagctgaagagcagccaccacagcaagcataaggccccatccaagttaggcttaatcatatcaggacctatattgcaggaagggatggacgaggaaaaattgaagcagctcaactgcgtggaaataagtgctctcaatgggaaccgcatcaatgtccctatggtgcgaaagcggtccgtgtctaacagcacgcagacctcttcgtcttctagtcaatcggagacctccagtgctgtgtctaccccaagcccagtcacaaggacaagatccctgtcagcctgcaacaaacgggttgggatgtacctggaaggcttcgatccgttcaatcagtccaccttcaacaacgtcgtcgagcaaaattttaaaaacagagagtcttaccccgaggatactgtgttttatataccggaggatcacaagcccggaacattccctaaggcacttacgaatggctctttctccccaagcggtaataacggatctgtgaactggcgaaccggcagtttccacgggcccggccatatctctctccgccgcgagaattcctcagatagcccgaaggagctgaaacgtcggaactcatccagttctatgtcctcacgactgtcaatttatgacaacgtccccgggtctattctgtatagtagcagtggcgacctggctgatctcgaaaatgaagatatcttccccgagttggatgacatcttgtaccacgttaagggcatgcagcgtattgttaaccagtggtctgagaagttttccgacgagggtgattctgattctgcccttgactctgtgagtccttgtccaagctctcctaagcaaatacatttagatgtggacaacgacaggacaaccccctccgacttggacagcacaggcaattctcttaacgagcctgaggaacccagcgaaattccggagagaagggattcaggcgttggggcctctctgacaagaagtaacagacatagactccgctggcactcattccagtcttcgcacagacctagcctaaacagtgtgagcctccagatcaactgtcaaagcgtagcacagatgaacctcttacagaagtattctcttctgaagctgactgcactcttggaaaagtacacaccttctaacaagcacgggttttcctgggctgtgccaaaattcatgaagaggattaaagtgcccgactacaaagaccggtccgtgttcggcgtgccactaactgtgaacgtgcaaagaacgggtcaacctctacctcagtccatccaacaggctatgcgctatctgcggaaccattgtcttgaccaggtgggcctgtttcgaaagtctggggtcaagtcacgcatccaggccctgcggcagatgaacgaaggcgcaatcgactgtgtcaactatgagggccagagcgcatatgatgtggctgacatgttgaagcagtacttcagggacctccctgaaccactgatgacgaacaaactaagcgagacatttttgcagatttatcagtacgtgccaaaggaccaaagactccaggccattaaagctgctatcatgcttctccctgatgagaatcgggaggtgttgcaaactctcctttattttttatccgatgtgacagcggctgtgaaagaaaaccagatgactcctactaatctggcagtgtgcctggctccttccctcttccaccttaatactctcaagcgtgagaattcaagtcccagggtgatgcaacgcaaacagtcgctcggtaaacccgaccagaaagatctcaatgaaaatctggctgctacccaagggcttgctcatatgatcgccgagtgcaagaagctgttccaggttccggaggaaatgagccgatgtagaaatagctatacagagcaagaactgaagccactgaccctggaggcactggggcacttgggcaatgatgatagtgctgattaccagcacttcctgcaggactgtgtcgacggactctttaaggaagtcaaagaaaagttcaaagggtgggtgtcctactccacttccgagcaggctgagctgtcctataagaaagttagcgaagggccacccctccggctctggcgctcagttattgaagtgccggccgtgcctgaagaaatactcaaacgccttctgaaagaacagcacctgtgggatgttgatctcttggacagcaaagtcattgaaattttagatagtcagaccgagatctaccagtatgtgcagaactctatggcaccccatcctgcgcgcgactacgtcgtcctgcgcacctggaggacgaatctcccaaaaggcgcatgcgccctgttacttacatccgttgaccacgaccgtgccccggtagttggagttagggtgaacgttctcctgtcacgctatctgatcgaaccttgtggtcccggcaaatcaaagctaacctatatgtgcagggtggacctgaggggccatatgcctgagtggtatactaagagttttgggcacttgtgcgctgctgaggtggttaagatccgcgattctttcagtaatcagaacacggagacgaaagataccaagtctaggtag

SEQ ID NO: 114352 - DNA, 3054 bp, synthetic construct
  misc_feature 1..3054: note = Description of Artificial Sequence: Synthetic coding sequence
  source 1..3054: mol_type = other DNA
atgaagttagagatctcaccccacaggaagcgatcagatgattctgacgaagatgagccatgcgccatctcaggaaagtggacctttcagagagatagtaagcgctggagcagactggaggagtttgacgtcttcagtccaaagcaagatctcgtgccagggtcacctgatgattcccacccgaaggatggcccctcccccggcgggaccctcatggatctgagtgaaaggcaggaagtctcctccgttagatctctaagttcaactggaagtctgccatcccatgctccgcccagcgaggacgctgccactccaaggactaactccgtcatatcagtgtgttcgtcaagcaacttagctggtaacgacgactctttcggcagcctcccttcgccaaaagagctgtcttcattctcgttctccatgaagggtcatgagaagaccgccaaaagcaagactagatccctcctcaagaggatggaatccctcaaactcaaaagcagtcatcactccaagcacaaggccccatctaaactaggtctgataatatctgggcctatccttcaggagggtatggatgaagaaaaactgaagcagctcaactgtgtcgagatcagtgcgctaaacgggaaccgaatcaatgtaccaatggtgcgcaagcgcagcgtatcgaacagtacccaaactagttctagtagtagtcagtcagaaacttccagtgccgtgtctactccctctccagtcacgaggacgcggtcactcagcgcctgcaacaagcgagtgggaatgtacttagaaggtttcgatcctttcaatcagtcaacttttaataacgtggtcgaacagaattttaagaacagagaatcctaccccgaagacacagtcttctacatccctgaggatcacaagcccggaacgttccccaaagctctaaccaacggctctttcagtccctcgggcaacaatgggtctgtgaattggcgaactggctccttccacgggcctggtcatatctcactccggcgagaaaacagctccgatagtcctaaagagctaaaaaggcggaattccagcagctctatgagcagcagactcagtatctacgacaatgtgcctggttctatcctgtattcatcctcaggtgatctcgctgatctggagaacgaggacatattccctgagttggatgacatcctgtatcacgttaagggcatgcagcgcatcgtgaaccaatggagcgaaaagttttctgacgagggggactcagacagcgccctcgattcagtttccccctgcccctcttcgccaaagcaaatacacctggatgtggataacgatagaacaacgccatctgatctggattcaaccgggaactctctaaatgagccagaagagccatctgaaatcccagagagacgagactcaggggttggtgcttcgctgactaggagcaataggcatagacttcgctggcattcgttccagtcgtcccaccgaccatctctgaacagcgtgtcgttgcagatcaattgccagtctgtggcccaaatgaacctgctccagaaatactctcttttgaagcttacagccctcctcgaaaaatataccccctccaacaaacatggcttttcttgggctgtaccaaaatttatgaagagaattaaagtacctgactacaaggataggagcgtcttcggagtccctctcacagtcaacgtgcagagaacagggcagcccctcccccagtccatacagcaggctatgcggtacctcaggaaccattgccttgatcaggtaggactgtttcggaagagtggcgtcaagagccggattcaggcacttaggcagatgaacgagggggctatcgattgtgtgaactatgaaggccagtcagcctacgatgtggcagacatgctgaagcagtattttcgggatctgcccgagcccctcatgacaaacaaactgagtgaaacttttcttcagatctaccagtacgtgcctaaggaccagcgcctgcaggccattaaggccgctattatgctgctccccgatgaaaacagggaggtgcttcagacactcctctatttcttaagcgacgtgacagcagccgtcaaagagaaccaaatgacgcccacaaacctggcagtatgccttgccccatcccttttccacctgaatacactcaagcgggaaaatagctctcctcgcgttatgcagcggaagcaaagccttggcaagcctgaccagaaggacttaaacgagaacttagccgccacgcaggggctggcccacatgatcgcagaatgcaagaaactcttccaggtgcccgaggaaatgagcaggtgtcggaacagttacacagaacaagagcttaagccattgactctggaggccctaggacacttaggaaacgatgactcagccgattaccagcactttctacaggattgtgtcgacggactctttaaagaggtgaaggagaagtttaaaggctgggtaagttatagcacctccgaacaagcagagctctcctacaagaaagtcagtgaggggccgccgcttcggctgtggaggagcgtgattgaggtgcccgccgtgccggaagagatcttaaagcgtttattgaaagaacagcacctatgggatgttgatctgctggacagtaaggtgattgaaatattggactctcagaccgaaatttaccagtacgtccagaattcgatggcaccacatccagctagagactatgtcgtcctgcgtacctggcgaaccaatcttcccaaaggagcatgcgcccttctcctgacttcagtcgatcacgaccgggctcctgtcgtgggcgttcgggtgaatgtcctgctttcgagatatctgatcgagccatgcggccctgggaaatccaagcttacttacatgtgcagggtagacttgcgcgggcacatgccagagtggtacactaagagcttcggacatctctgcgctgctgaggtcgtcaagatcagggactcattctcgaatcagaacactgagaccaaggacaccaagtctaggtag

SEQ ID NO: 114353 - DNA, 972 bp, synthetic construct
  misc_feature 1..972: note = Description of Artificial Sequence: Synthetic coding sequence
  source 1..972: mol_type = other DNA
atgggtaatagcgcctccaggtcagatttcgagtgggtttacacagatcagcctcacactcaaagacggaaggagatccttgcgaaatatccagctataaaggcattgatgcgcccagacccaaggttgaagtgggcagtgctagtgctggtgctggtccaaatgctcgcctgttggcttgtgaggggtcttgcctggagatggctcctgttctgggcatacgcattcgggggctgcgtcaaccactcacttaccctagctattcacgacatttcacataacgccgcattcgggacaggacgcgcagccagaaatcgctggctggctgtgttcgcaaacctgccagtcggcgtgccctatgcggcatcctttaagaaatatcatgtagatcatcaccgatatctaggcggagacgggctagacgtcgatgtcccgacacgtcttgaaggctggttcttttgcacaccagccagaaaactgctctggctcgtgctgcagccattcttctactccttacggccactgtgcgtgcacccaaaggctgtaacacggatggaggtgctcaacacactggtccagctggccgccgatttagccatctttgcactctggggacttaagcccgttgtttatctgctggcgtccagttttctcggactgggactgcaccccatctctggccattttgtcgccgagcactacatgtttctcaaggggcacgagacctactcctactacggccccctaaattggattacttttaacgtcggttatcacgttgagcaccacgattttcctagcattcctggctacaacctgcccctcgttcgtaagatcgcccctgaatactacgaccacctcccacaacaccactcctgggtcaaggtgttgtgggattttgtgtttgaggattcgcttggtccttacgccagagtgaagcgggtatatagacttgcaaaggacggactctag

SEQ ID NO: 114354 - DNA, 2214 bp, synthetic construct
  misc_feature 1..2214: note = Description of Artificial Sequence: Synthetic coding sequence
  source 1..2214: mol_type = other DNA
atgcagccccgcagggcccaggcaccgggagcccaactcctgcccgccctggccttacttctgctgctgctaggtgcgggaccaagggggagctcactcgcgaatccggtgcccgcggcacctctgtccgcgcctggaccgtgcgccgctcagccatgcaggaacggcggagtatgcacatctcgtccggagcctgacccccagcatccagcgccggctggcgagcctggctattcatgtacctgtcccgcggggatttctggagccaattgccaactggtggctgatccatgcgcttctaatccgtgccaccacggaaattgtagttccagctcctcctctagtagcgatggctacttgtgcatctgtaatgaaggctacgagggcccaaattgcgaacaggcacttccctcactgcccgccacaggatggactgaatccatggccccgcgccagcttcagccagttccagcgacccaggagccagataaaatcctgcctcggagccaggccaccgtgactctgcccacctggcagcccaagaccgggcagaaagttgtggaaatgaaatgggatcaggtagaggttattccagacatcgcctgtggcaacgcctcttccaattcttccgcaggagggaggctagtgtcgttcgaggtcccccagaataccagcgtgaagatccggcaggacgccactgcttcactgattctgctgtggaaggtcacagctactggctttcaacagtgttctctgattgacgggcgctccgtcactcccctgcaggcaagtggcgggcttgtgctgttggaggagatgctggccctcgggaacaaccatttcatcggatttgtcaacgactcagtcaccaagagcatcgtagcactgcggctcacactcgtggttaaagtgtcaacatgcgtgccaggcgaatcccatgccaacgacctcgagtgttccggcaaagggaaatgtactacaaaacccagtgaggcaactttcagctgcacttgtgaagaacagtatgttggcacattttgcgaagagtacgacgcatgccagagaaagccatgccaaaataacgctagctgcatcgacgctaacgagaagcaggacgggagtaacttcacatgtgtctgtttaccgggatatactggtgaactctgtcagtcaaagattgattactgtattctggacccttgccgtaacggcgctacctgtatttcttcactgagcggattcacctgtcagtgccctgagggatatttcggtagtgcatgtgaggaaaaagttgacccttgtgccagctccccatgtcagaacaatggaacttgctacgtggacggagtccatttcacctgtaattgttcgcccggctttacaggcccaacgtgtgctcagctcatagatttttgtgccctgagtccatgtgcacacgggacctgcaggagtgtgggcacctcctacaagtgcctgtgtgaccctggctaccatggcctgtattgtgaggaggagtacaacgagtgcctgtccgctccatgcctgaacgccgctacctgtcgagacctggtgaatggatatgaatgcgtgtgtctggcagagtacaaagggacacactgcgagttgtataaggatccctgcgctaacgtgtcgtgcctcaatggcgccacttgtgacagtgatggactaaatggaacgtgcatctgcgcacctggattcacaggggaagagtgcgatatagacatcaacgaatgcgactcaaacccgtgtcaccacggtggtagctgcctcgaccaacccaatgggtataactgccactgccctcatggctgggtgggcgccaattgtgaaatccacctccagtggaagagcgggcatatggcagagtctttaaccaacatgcctcgccattccctctacataattatcggagctctgtgcgtggccttcatacttatgcttatcatcctgatcgtcggcatttgccgcatctcacgaatcgagtaccagggttcaagtaggcctgcttacgaggaattttataattgtcgctcaatcgactccgaatttagcaatgccattgcctctatacggcatgccaggtttggcaagaagagtcgcccagccatgtacgatgtgtctcccattgcgtacgaagactattctcccgacgacaagcccctagtgaccctcatcaagacaaaggatctgtag

SEQ ID NO: 114355 - DNA, 1368 bp, synthetic construct
  misc_feature 1..1368: note = Description of Artificial Sequence: Synthetic coding sequence
  source 1..1368: mol_type = other DNA
atgttggctctgggtaataatcatttcatcggatttgtgaacgatagtgtgacaaagtccatcgtggccctgaggctgaccctggtcgttaaagtatccacctgtgtcccaggagagtcacacgccaatgatctggaatgctcaggcaagggaaaatgcacaaccaagcctagtgaagctaccttctcatgtacttgcgaggagcagtatgttggcacattctgcgaggagtacgatgcttgtcaaagaaagccatgccagaataacgcatcttgtatcgatgccaatgagaagcaggatgggagtaatttcacttgtgtgtgcttgcctggttatacaggagaactttgtcaatctaagatcgattactgcattttggacccctgtcggaatggtgccacatgcatcagtagtctgagcggatttacctgccagtgtcctgagggatattttggctcagcctgtgaggagaaggtcgatccatgtgcttctagcccctgtcaaaacaatggcacctgctgctcccctggattcacaggccctacttgtgcacagttgatcgacttctgcgccttgtcgccctgtgctcacgggacttgtaggtctgtaggaacatcctataaatgcctgtgcgaccctgggtaccatggcttgtattgcgaggaggaatataacgagtgcctgtccgctccatgtcttaacgctgcgacctgcagagatttggtcaacgggtatgagtgtgtctgcttggctgaatataagggcacccactgtgaattgtacaaggatccatgtgcaaatgtatcctgcctgaatggggctacctgtgattcagatggactgaacggtacctgcatctgtgccccaggctttactggggaggagtgcgatatcgacattaatgaatgtgactcaaacccctgccatcacggaggtagctgtttggatcaacccaacgggtacaattgccactgccctcatggatgggtcggcgccaattgcgagattcatttgcagtggaagtcaggacacatggcggagagcctcaccaacatgcctcgtcactccttgtacatcattatcggggccctctgcgtggctttcatcctaatgctgatcatcttaatcgtagggatttgccggatttctcggattgagtaccagggctcttctaggccagcttatgaggagttctataattgcaggtccattgactcagaattttcaaatgctattgcctcgatccgccatgcacgctttggaaagaaaagccgccccgccatgtacgatgtctctccgatcgcttacgaagactattctcccgatgacaagcccctagtgacacttattaaaacaaaggatctctag

SEQ ID NO: 114356 - DNA, 933 bp, synthetic construct
  misc_feature 1..933: note = Description of Artificial Sequence: Synthetic coding sequence
  source 1..933: mol_type = other DNA
atgacggccacagaggcacttctcagagtactgctgctcctactggcctttgggcatagtacttacggagctgagtgctttcctgcatgcaacccccagaatggcttttgcgaggatgataatgtgtgcagatgccagcccgggtggcagggtcccctttgtgaccagtgtgttaccagtcccgggtgcctccacgggctgtgcggggaacctggtcaatgcatctgtactgatggctgggacggggagttatgcgatagagatgtgcgcgcttgtagtagcgccccctgcgcgaacaacagaacctgtgttagcttagacgatggcttgtacgaatgttcttgcgcccctgggtactcaggaaaggactgccagaagaaggacggaccctgtgtcatcaatggatccccctgccagcacggcggaacctgcgttgatgacgagggccgcgcaagccatgcgagttgtctctgccctcctgggttcagcggcaatttctgtgaaattgtcgccaatagctgcacccctaatccctgcgaaaacgatggggtgtgtaccgatattggcggcgattttcgttgtcggtgccctgcaggctttatcgacaaaacatgcagtcgtcccgtcacaaactgcgccagctccccctgccagaacggaggcacctgcctgcagcacacccaggggcaggccatctgttttactattttaggtgtgcttacaagtttagtggtgcttgggactgtcggtatcgtgttccttaacaagtgcgagacatgggtcagcaacctgaggtacaaccacatgcttaggaagaagaagaacctgttgctgcagtataatagcggagaggatttggccgttaatatcattttcccagagaaaatcgatatgacaaccttctctaaggaagccggagatgaggaaatttag

SEQ ID NO: 114357 - DNA, 1152 bp, synthetic construct
  misc_feature 1..1152: note = Description of Artificial Sequence: Synthetic coding sequence
  source 1..1152: mol_type = other DNA
atgaccgcgacagaggctttgttgagagtcctcctgctcctcctagctttcggccattctacatatggagctgagtgtttccccgcgtgtaatccccagaatggcttctgtgaagatgataacgtctgcagatgccagccaggatggcaggggcccttgtgcgatcaatgtgttacaagccctggctgcctccatgggctttgcggcgaacccggtcagtgcatctgcactgacggttgggatggagaactttgtgaccgtgacgtccgggcttgttcatccgcgccttgcgcgaacaataggacatgcgtcagcctggacgacggcttgtacgaatgtagttgtgctcccggctacagcggaaaagactgccaaaaaaaggatggcccatgcgtgatcaacggctcaccttgtcaacacgggggcacttgcgtggacgatgaaggccgggcgagccacgctagctgcctgtgccccccaggattctccggcaacttctgcgagatagtggccaacagctgcaccccaaacccctgtgaaaacgacggggtttgtacggacattgggggtgacttccgttgcaggtgccccgccggattcatcgataaaacgtgttcacgcccagtcacgaactgtgctagctccccttgtcaaaacgggggtacatgcctccagcacactcaggtttcttacgagtgtctatgtaagcccgagttcaccggcctgacttgtgttaaaaaacgcgcgctcagcccccagcaggtgacaagattaccgagcggatatggcctcgcatatcgtctaacacccggtgtgcacgaactgcctgtgcagcagcctgagcatcggatattaaaagtaagtatgaaggagcttaacaaaaaaacaccactcctgaccgagggccaggctatatgctttacaattctcggagtcctgaccagcctcgtcgtcctgggcactgtgggaattgttttcttgaataagtgtgagacgtgggtgtcaaacctccggtataaccacatgttgcgtaagaaaaagaaccttcttttacagtacaattcgggggaagatctagcggtaaatataatctttccggaaaaaatcgatatgaccacctttagtaaagaagccggcgacgaagagatctag

SEQ ID NO: 114358 - DNA, 294 bp, synthetic construct
  misc_feature 1..294: note = Description of Artificial Sequence: Synthetic coding sequence
  source 1..294: mol_type = other DNA
atgaccgcgacagaggccctgctccgggtgctcctactcctgctggcctttggccactcaacctacggggctgagtgctttccagcctgcaatccacagaatggcttctgtgaagacgataacgtttgcaggtgtcagcccggctggcagggccccctgtgtgaccagtgcgtcaccagcccagggtgtctacacggcttgtgtggggaaccgggacagtgcatttgcacagacgggtgggacggggaactatgcgatcgggatgtccgggcttgctccagcgccccctgctag

SEQ ID NO: 114359 - DNA, 3612 bp, synthetic construct
  misc_feature 1..3612: note = Description of Artificial Sequence: Synthetic coding sequence
  source 1..3612: mol_type = other DNA
atggcggcctgtggcagagtaagacggatgttcagactgtccgccgctctgcatcttttgttgctattcgcagccggtgccgaaaagttgccaggacagggggtacatagccaggggcaagggccaggggctaatttcgtgagttttgtgggccaggctgggggaggcggacccgcagggcagcaactgccacagctgccacagtccagtcagttacagcagcagcaacagcagcagcagcagcaacagcagccccaaccgccccagcctccgttccccgcaggggggccccctgctcgccgggggggagcgggtgcaggcggcggttggaagctggcagaggaggagagttgcagagaagatgtgacacgagtctgccccaaacatacctggtcaaataatttagcagtcctggagtgtctgcaagacgtgagggagcctgagaacgagatcagctctgattgcaatcacctgctgtggaactacaagctaaatcttacaactgaccctaagtttgagagcgtggcaagagaagtctgcaagtcaaccattaccgaaattaaggagtgcgctgacgagcccgtggggaagggatacatggtgtcatgcctggtagaccatagaggcaacatcactgaataccagtgccatcagtatataacgaagatgactgcaatcattttctcggactatcggctgatttgtggcttcatggatgattgtaagaacgacataaacattctgaaatgcggctccatacggttgggcgagaaagatgcccatagtcagggagaagtcgtctcatgtctggagaagggtctcgtgaaggaggctgaagaacgcgagccaaagattcaggtttctgaactgtgtaaaaaggccatactgcgcgtggcggagctgtcttccgacgatttccatttggatcgacacctctacttcgcctgcagggacgatagagagcgcttttgtgaaaatactcaggcaggggaaggtcgggtctataaatgcctgttcaatcataagttcgaggagtccatgtcagaaaaatgcagggaagccctgacaacccggcagaagctgattgcgcaagattataaggttagttacagtcttgctaaaagctgtaaatccgacctgaagaagtatcgttgtaatgtggagaacttacctcgctcaagagaggcccggctatcttacctgctgatgtgtcttgaaagtgccgtgcaccgaggcaggcaggttagctccgagtgccagggcgaaatgttagactatcggaggatgttaatggaggatttctccctgagtccagagattatactgtcttgccgtggggagattgaacaccattgttccggcctccataggaaggggcgtactcttcattgcctgatgaaggtggtcaggggagagaaaggcaatctcggaatgaactgccaacaggcactgcaaactctgattcaagagactgaccctggcgctgactacagaattgatcgggccctcaatgaggcttgcgagtcagtgattcagacggcttgcaaacatattcgcagcggagatcccatgatcctgtcgtgcctgatggagcacctgtacactgaaaaaatggtggaggattgcgaacaccgcctgctggagctgcagtacttcatatcaagagactggaagctagatcccgtgttataccgcaagtgccaaggtgacgcatctcggctctgtcacacccacggctggaacgaaacctcagaatttatgccgcagggggctgttttcagttgtctgtatcgacatgcttatcgcactgaagagcaagggcgtcggctgagccgcgagtgccgggccgaagtacaaaggattctgcaccaaagagcaatggatgtgaaactggatcctgccctgcaagacaagtgcctgatagacctaggcaagtggtgtagcgagaagacagaaaccggacaggagctggagtgtctgcaggatcaccttgacgatttggtggtggaatgtagggacattgtggggaacctcacggaactggaatcagaggatattcaaattgaggctctcctaatgagagcttgcgagccgattatccagaacttctgccacgatgtcgccgataatcagattgattcgggagatcttatggagtgccttattcagaacaagcatcagaaggacatgaacgaaaaatgcgcaattggcgtgacccactttcagttagttcagatgaaggatttccggttctcttacaagtttaagatggcatgcaaagaagatgttctgaagctctgccccaacattaaaaaaaaagtggatgtggtgatttgcttgagtacgactgttcgaaatgacacccttcaagaggctaaggagcatcgtgtcagtcttaaatgccgtaggcagttgagggttgaggagctggaaatgaccgaggatattagattagaacctgatctgtacgaagcctgtaaaagtgatatcaaaaacttctgttctgccgttcaatacggaaatgcccagattatcgagtgcctgaaggagaataaaaaacagctgtctaccaggtgtcaccaaaaggtctttaaactgcaggaaacagagatgatggacccggagttggattacacactgatgagagtctgtaagcagatgattaaaaggttttgtccagaggctgactcgaagaccatgttgcaatgcctgaaacaaaacaaaaacagcgaactgatggatccaaagtgtaagcagatgatcaccaaacgccagattacgcaaaacactgattaccgactcaacccaatgttaaggaaagcatgtaaagccgatatccctaagttctgtcatggcattcttacaaaggccaaggatgacagcgaactcgagggacaggtgatctcctgtcttaaactcagatatgcagaccagcggctttccagtgattgtgaggaccaaatcagaatcattatacaggagtccgcgctggactaccggctcgacccccaactgcagctccattgctccgatgaaatatcatccttgtgcgcagaggaggccgcggcacaggaacaaaccggccaggtggaagaatgcctgaaagtgaacttgctgaagatcaaaaccgaactctgtaaaaaagaagtgctgaatatgcttaaagagagcaaggctgacatcttcgtggacccggtcctccataccgcctgtgcccttgatatcaaacaccactgcgcagccatcactccaggcagaggacgacagatgagctgtcttatggaggcgttggaagataaacgtgtgagactccagccggagtgcaaaaagcgactgaacgacagaatcgaaatgtggtcgtatgcagcgaaagttgcccctgcagacggcttctctgacctggcaatgcaggtcatgaccagtccaagcaagaactacattctgagtgtcatatctgggtctatatgcattctgttcctgattggcctgatgtgtgggaggattaccaaacgagtgacccgcgaactcaaggataggctgcagtatagatctgaaacaatggcttataaaggtcttgtctggagtcaggacgtgacgggcagccccgcttag

SEQ ID NO: 114360 - DNA, 1764 bp, synthetic construct
  misc_feature 1..1764: note = Description of Artificial Sequence: Synthetic coding sequence
  source 1..1764: mol_type = other DNA
atggtgtctcctcgcatgtctggactgctttcgcagacggtcattttggctctaatctttcttccccagacacggcctgctggggtgtttgagctacagatacacagctttggaccaggacctggtcctggcgcccccaggtccccttgtagcgcaaggcttccttgccgtctgttcttccgcgtctgcctgaagcctggtctctccgaagaagctgccgagagcccatgtgcattgggagccgcactatccgcccgaggcccagtgtacactgagcagcccggggccccagccccagacctgccattgccggatggcctactgcaggtgcctttccgcgatgcttggccaggcactttcagctttatcatcgaaacatggcgagaggagcttggagatcagattggcggacctgcctggagcctactcgccagggtggccggccggcggcgtctggccgctggcgggccatgggccagagatattcagagagccggagcttgggagctgaggttctcttaccgggctagatgtgaaccccctgccgtgggaaccgcgtgcaccaggctgtgccgtccccgctctgcaccttctcgctgcgggccgggattacgcccatgtgctcctttggaagacgagtgtgaggccccattagtgtgtcgcgcagggtgtagcccagagcatgggttctgtgaacagcccggcgaatgtcggtgcctcgaagggtggactggaccactttgtaccgtgcctgtgtcgaccagctcctgtctgtctccccgcggaccatcttctgccactactgggtgcctggtccccggaccagggccgtgtgacggaaatccatgtgctaatggtggctcctgctctgagacacctcgatcattcgagtgtacctgcccaagagggttttatggcctgaggtgcgaggtgtcaggcgtgacctgtgccgacggcccgtgctttaacggaggactatgcgtaggaggcgccgatcccgattcagcgtacatttgtcattgcccccccggctttcagggctccaattgtgagaagcgtgtggatcgatgctccctgcagccgtgccggaacgggggactctgtctggatttgggacacgcgctgcgctgcagatgtcgcgccggatttgccgggcctcgctgcgagcacgacctcgatgactgcgctgggagggcatgtgccaacggaggtacctgtgtggaaggtggaggagcacacagatgcagctgcgccctaggcttcggcggacgggactgccgggaaagggcagacccctgcgccgcacgcccctgtgcccacggtgggcgatgttatgcccactttagcggactggtttgcgcatgtgcccccggctatatgggggcaaggtgtgaattccctgtccacccggatggggcgtctgccctcccagccgccccccctgggttgaggcctggcgatcctcagaggtatttacttcctccagccctggggttgctcgtcgcagcaggcgtggctggagccgctttgcttctggtacacgtgcggagacggggacactctcaagatgcaggctctagactcctcgctgggacccccgaaccttctgtgcacgctcttccagatgcactgaacaacctgcgaactcaggaaggctccggcgacgggccctctagctctgttgattggaacagacccgaagatgtggaccctcagggaatatacgtgatatccgctcctagcatatatgcacgtgaagcatag

SEQ ID NO: 114361 - DNA, 2058 bp, synthetic construct
  misc_feature 1..2058: note = Description of Artificial Sequence: Synthetic coding sequence
  source 1..2058: mol_type = other DNA
atggccgccgcctcgcgctcagcgagcggttgggccctactcttgttggtggcactttggcagcagagggcagccggaagtggcgtatttcagctgcagctccaggaatttatcaatgagagaggcgtacttgcctcgggtagaccctgcgagccgggctgcaggacgtttttccgagtgtgcctaaagcacttccaggctgtcgtatctccgggcccttgtactttcgggactgtgtcaactcctgttctgggcacaaatagtttcgctgtgcgcgacgattcaagcgggggcggacgtaatccgctccagctgccattcaactttacctggcccggaacatttagtctgattatcgaagcttggcacgctcctggcgacgacctccggcccgaggccctgcctcccgatgctttgataagtaagatcgcaatacaggggtcactggcggtcggccagaactggttactggacgaacagacttccaccctgaccagattgagatattcttacagagttatatgttctgacaattattatggagacaactgcagccgcctgtgcaagaagagaaatgatcacttcggacactatgtgtgtcagcctgatggcaacctcagttgtctacccgggtggacaggtgaatactgccagcagccaatttgcctctctgggtgccatgagcaaaacggctactgtagcaagccggcagagtgtctttgtagacccgggtggcaaggtcgtttatgtaatgaatgtatcccccacaacggctgtaggcatgggacatgcagcacgccttggcagtgtacttgcgacgaggggtgggggggcctgttctgtgaccaagaccttaactattgcactcatcacagcccgtgcaagaatggggctacatgttctaattccggacagcgatcttacacatgtacctgtcgccccgggtacacaggagtcgactgcgaacttgaactgtctgagtgtgacagcaatccctgccgcaatggaggctcctgcaaggatcaggaggacggatatcactgcctatgcccgcctggctattacgggctgcattgtgaacatagtacacttagctgtgccgattcaccttgtttcaacggaggctcctgtcgcgagcggaatcaaggcgccaactacgcatgtgagtgtccgcctaatttcaccggcagcaattgtgaaaagaaggtggacaggtgcacttccaacccctgcgccaatggaggacagtgtctgaaccggggcccttcacgcatgtgtaggtgtcgtccgggtttcaccggtacctactgcgaactgcacgtgtcagactgtgcgcggaacccttgcgcccacggcggaacttgtcacgacctggagaacggtctgatgtgcacctgtcctgctggcttttctggacgccggtgcgaagttcgtacatctattgatgcctgcgcctctagcccatgttttaatcgggctacatgttacaccgatctttccaccgatacatttgtctgtaattgtccttatggatttgtggggtcacgctgcgagtttcccgttggccttcccccttcttttccatgggtggccgtgtccctcggggtggggttagccgtgcttttggtgctgctgggaatggttgccgtcgctgtgcgccaactccgcctgcgcagaccggatgacggctctagagaggctatgaacaatttgagcgacttccagaaggataacttgatcccagccgctcagctgaagaatacaaaccagaaaaaagagctggaagtggattgcggtctggacaagtccaactgcgggaaacaacagaaccatacactcgattacaatctggcgcctggcccgctggggcgagggacgatgcccggtaagttccctcacagcgacaagtccctgggggaaaaagccccgctacggctgcattcggagaagccagagtgcagaatttctgcaatttgctctcctagagacagcatgtaccagtccgtctgccttattagcgaagaacggaacgagtgtgtgattgcaaccgaagtctag

SEQ ID NO: 114362 - DNA, 2223 bp, synthetic construct
  misc_feature 1..2223: note = Description of Artificial Sequence: Synthetic coding sequence
  source 1..2223: mol_type = other DNA
atggcttcacatctgaggccgcctagcccgctcctggtccgagtgtacaagagcgggccacgggtccgcaggaaacttgagtcctatttccagtctagtaaaagtagcggcgggggtgagtgcacagtctcgacccaggaacacgaggcgcctgggacgttccgagtcgagttctcagagagggcagcaaaagaacgagtgctcaagaagggagagcaccagatcttagtggacgagaaaccagttccaatctttctcgtgccgaccgagaatagcatcaagaaaaacacacgacctcaaatcagtagcctcacacagagccaggcggagacgcctagcggggacatgcatcagcacgaggggcatatccctaacgcagttgattcttgcctgcagaaaatatttctaacagtgacagctgacctgaattgtaatctgttttccaaggagcagcgtgcatatatcacaaccctatgtccatctattcgcaaaatggaaggtcatgatgggatcgaaaaggtctgcggagatttccaggatattgagcgaatccatcaattcctgtcagaacagttcctcgagtctgaacagaagcagcagttcagtccatcgatgacagagcgcaagccgctgagccaacaggagagggatagttgtatctctccgtctgaaccagaaactaaagccgaacaaaagtccaattatttcgaggtcccactaccatacttcgagtactttaaatatatatgccccgataagataaattctattgagaagagatttggtgtgaacatcgagatccaggaatccagtcccaacatggtttgcctcgacttcactagtagcagatctggcgatctcgaagcggccagagagtctttcgcaagtgagttccagaagaacacagaaccactaaagcaggagtgtgtaagcctggcggactccaaacaggccaacaagtttaaacaggaattgaaccaccaattcacaaaacttctgattaaagaaaagggcggagagcttaccctgctgggaactcaggatgacatcagcgcagccaaacagaagattagtgaagccttcgtaaagatcccagtgaagctgtttgctgctaattacatgatgaacgtgattgaggtggactccgctcactacaaattattagagacagagctgttacaggaaatttctgagatcgaaaagcgttacgatatctgtagcaaagtcagcgagaagggccagaagacatgcattttattcgagagcaaggatcgccaggtggatctaagtgtacatgcgtatgcttcattcatagacgccttccaacatgctagctgtcagctaatgagggaggttttgctgcttaaatccttaggtaaagaaaggaagcacctccaccagacaaagttcgctgacgattttaggaagcgccatccaaatgtgcacttcgtacttaatcaggagagtatgacactgacaggcctcccgaaccatttagctaaagcaaagcagtacgttttgaaaggtggcgggatgagttcactggccggaaaaaagctaaaagaagggcacgagactcccatggatattgacagtgacgattccaaagccgccagccctccgctcaagggctctgtgtctagtgaagctagcgagctggataagaaagaaaagggaatctgtgtcatctgcatggacacaatctctaacaagaaggtcctgccgaagtgcaaacacgagttttgcgccccgtgtataaacaaagccatgtcctacaagcctatctgtcctacctgccagacatcttacggcatccagaagggcaaccagcctgaggggagcatggttttcacagttagcagagatagcttgccaggatatgagtcgttcgggactattgtcatcacttactccatgaaggctggcatccagactgaggaacatcctaatcccggaaaacgctaccccgggatccagagaactgcctacctgccggacaataaggagggtcgaaaagtgctcaaactgctctatagagcattcgatcagaagctcatttttactgttggctattcccgcgtcctgggagtgtccgacgtcatcacctggaacgatattcaccacaagacctccagattcggggggcccgagatgtacggctacccagatccatcttatctgaagagggtgaaagaggaactgaaggccaagggtatcgaatag

SEQ ID NO: 114363 - DNA, 1863 bp, synthetic construct
  misc_feature 1..1863: note = Description of Artificial Sequence: Synthetic coding sequence
  source 1..1863: mol_type = other DNA
atgtcgagaccaggccatggaggcctgatgcctgtaaacgggctcgggtttcctccccaaaacgtcgcacgagtcgttgtatgggaatggctcaatgagcattctaggtggcgaccgtatactgcgacagtttgccaccatattgagaatgtgctgaaggaggatgcccgcgggagcgtggttctgggtcaggtagatgcccagctagtgccttatatcattgatctacagtcgatgcaccaattccggcaggacacgggcaccatgcgccctgtgcgtaggaatttctacgatccgtcatcagctccaggcaagggaatcgtgtgggagtgggaaaacgatggaggcgcctggacagcctacgacatggatatttgcatcacaatccagaacgcctatgagaagcaacatccatggctagacctatcttccctggggttctgttacttgatctacttcaattccatgtctcaaatgaataggcagaccaggagacgccgtcgccttagaagacgcctggatctggcatacccactgaccgtaggaagcattccgaaaagtcagtcctggcctgtcggagcatcttcaggccagccttgttcatgtcagcagtgtctgctggtcaatagcacccgggccgctagcaacgctatcctggccagtcaaaggaggaaggccccaccagccccgccgttgcctccacctccgccccctggaggaccccccggagccctagctgtaaggcccagcgccacctttaccggtgcggctttatgggccgcaccagcagcaggaccagcggagccagccccaccccccggcgcgccgcctcgcagcccaggtgccccgggaggcgcccggactccaggacagaataatctgaataggccaggcccccagcggaccacctctgtctcagcccgtgcttctattcctcccggcgtcccagctctgccagtgaaaaatctgaatggcacaggcccagtacatcccgccctggccggtatgaccggaatcttgctttgcgccgcaggcttacccgtatgtttgaccagagcccctaagccaatccttcatccgccccccgtgtctaagtcagatgttaaacctgtgccgggggtccctggggtttgcagaaaaaccaaaaaaaagcacctcaagaagagtaaaaaccccgaagacgtggtccggagatacatgcagaaagtcaaaaaccccccagatgaggactgtactatctgtatggaacgtctcgtcacagcttctgggtacgagggcgtgttgagacataaaggggttcgccccgagctcgtgggccgactgggacggtgtggccatatgtaccatttgctgtgtttggttgcaatgtactcgaatggcaacaaggacgggtccctgcagtgcccaacctgcaaggcaatttatggagaaaaaacaggcactcagcctcctggtaagatggagttccatctgattccccattccctgcctgggtttcccgatactcagaccatccgcatcgtgtacgacatcccaaccggcattcaggggccggaacacccgaaccctggcaaaaagtttacagcacgcggcttccctcgccactgctatctgccaaacaatgagaagggaaggaaggtgctaagactgctaatcacagcttgggagcggagactaatctttactataggaactagcaataccaccggcgaatccgacacggtggtttggaatgagatccatcacaagaccgagttcgggagcaacctgaccggacacgggtatcctgacgcctcatacctcgacaatgtgctggcagagctcactgcccaaggggtcagcgaggcagcagccaaggcatag

SEQ ID NO: 114364 - DNA, 1044 bp, synthetic construct
  misc_feature 1..1044: note = Description of Artificial Sequence: Synthetic coding sequence
  source 1..1044: mol_type = other DNA
atgtccttcgtcctgtcaagaatggccgcctgtgggggcacatgtaagaataaagtaaccgtatccaagccagtgtgggacttcctttccaaagagacacccgcacgacttgctagactgagggaggaacaccgggtatcaattctgatcgacggcgaaacctctgacatttatgttctgcagttatccccccaggggccaccccccgcgcctccgaatggtctatacttggccagaaaagccctgaaagggctcctgaaagaggcagagaaggaactaaaaaaggctcagaggcagggcgagctcatgggctgtctggcactgggcggcggcggcgagcatccagagatgcatagggctggcccaccccccctcagggcagcccccttgcttccgcccggagccagaggactgcccccaccacctcctcctctcccaccccccctgcccccccgcctcagagaggaggctgaagagcaggaatccacatgtcctatctgcctcggagagatacaaaacgccaagaccctggagaaatgccggcatagcttttgcgaaggctgtattactcgggccctgcaagtaaagaaagcatgtccgatgtgcgggaggttctacggccagctggtcgggaatcagccacaaaatggacgtatgctcgtctccaaggatgccactctcctgcttccatcatacgagaagtatgggacaatcgtgattcaatatgtgttccctcccggggtgcaaggtgccgagcatccaaaccccggcgtgcgatatcctgggacaacaagagtcgcttacctccctgactgtcccgaaggtaataaagtactgaccctgttccgtaaagcttttgaccagcgactaacttttacgattggaacctcaatgaccaccggacggcctaacgttatcacctggaacgacatacaccataagacgagctgcactggcgggccccaattgtttggataccccgaccccacctatctgacacgggttcaagaggagttgcgagccaaaggcatcacagacgactag

SEQ ID NO: 114365 - DNA, 1044 bp, synthetic construct
  misc_feature 1..1044: note = Description of Artificial Sequence: Synthetic coding sequence
  source 1..1044: mol_type = other DNA
atgtctttcgtattgagcagaatggctgcttgtggcggaacctgtaagaataaagttactgtgtcgaaacccgtgtgggactttctttccaaggagactcccgcacggttagcaaggctgcgcgaagagcaccgtgtgtcaattctgattgacggcgagactagtgatatatacgttctccagctctcaccccaaggacccccccccgctccccctaacggcttatacctcgcaagaaaggccttaaagggtctactgaaggaggctgagaaagaattgaaaaaggcgcagcggcagggagagctgatggggtgtctggccctaggaggcggcggtgagcatccagagatgcaccgcgccggtcccccaccgttaagagccgcaccattgcttccccccggagctagaggtttgcccccccccccacctcccctcccccctccactgccgccccggcttcgggaggaagcagaagaacaagaatccacgtgcccaatatgtttgggtgagattcaaaacgccaagacactcgaaaagtgtcgtcattcattctgtgagggctgtatcactcgggccctacaggtgaagaaggcctgtcccatgtgtggacgattttacggacagttggttggaaaccaaccacagaacggccggatgttggtgagcaaggatgccacgctgctactcccatcctacgaaaaatatggtacaattgtaatacagtacgtgtttcccccaggtgtgcagggtgcagagcaccccaacccgggagtgcgatacccgggaacaacacgcgtggcttacctgccagactgccccgagggaaacaaggtgctgacactgtttcggaaggccttcgatcagaggctaactttcaccattggcacgagcatgactactggacgaccaaatgtaataacctggaatgacattcaccataagaccagctgcacaggtggaccacaactgttcgggtacccagaccctacctatcttacgcgagtgcaagaggagctacgggccaagggtatcaccgatgattag

SEQ ID NO: 114366 - DNA, 1044 bp, synthetic construct
  misc_feature 1..1044: note = Description of Artificial Sequence: Synthetic coding sequence
  source 1..1044: mol_type = other DNA
atgtcattcgttctcagtcgtatggcagcttgtggaggcacctgcaagaacaaggtgactgtatccaaaccagtatgggacttcctgagtaaggagactcctgcgcgcctggctcgattgcgtgaggagcatcgagtgtctatactcattgatggagagacctcagatatctacgtgctgcagttgagcccccaaggcccacctcctgcgcctcctaatggactatacctggccaggaaggctctgaaaggactgttaaaagaggctgagaaggagttgaagaaagcacagcgacagggtgagttaatggggtgtctggcgctaggaggcggaggagaacatcctgagatgcaccgagccggaccaccacccctgcgggccgccccactgcttccaccaggagcaaggggcttaccacctccacccccgccattaccgcccccacttcccccaaggctgcgggaagaggccgaagagcaggagagcacctgccccatctgcttaggcgagatccagaacgccaagacgctcgagaagtgtaggcattcgttttgcgagggttgcattacaagggccctccaagttaaaaaagcttgtccaatgtgtggacgcttctacggccagcttgtcggtaatcagccgcagaatggaaggatgctggtatctaaggacgccacactgcttcttccttcttacgagaagtatggcactattgtgatccagtacgtcttcccaccaggagtgcaaggggctgaacatcccaatccaggcgtgcggtatccaggtactacccgggttgcttatttacctgattgccccgagggcaacaaggtgcttaccctgtttagaaaggccttcgaccagcgactgacatttaccattgggacttccatgacgaccggccgacctaacgtcattacctggaacgacattcaccataaaaccagctgtactgggggtccacagctcttcggatacccagaccccacttacctcacgcgtgtccaggaagagctaagagctaaagggatcactgacgattag

SEQ ID NO: 114367 - DNA, 615 bp, synthetic construct
  misc_feature 1..615: note = Description of Artificial Sequence: Synthetic coding sequence
  source 1..615: mol_type = other DNA
atgcccatcctgagcagttccggctccaagatggccgcctgcggagggacctgcaaaaataaggtcacagtgagcaagcctgtatgggattttctgtccaaggaaacaccggcccgcctggcacggcttagggaggaacatagagtaagtatcctgatcgacggcgagaccagcgacatctacgtgctgcaactgagcccccaaggacccccacccgctccaccaaatggcttgtacttagcccgcaaggcactcaaaggacttctgaaggaggctgaaaaagaactaaagaaagcgcaacgccagggagagctcatgggatgtctggctctgggaggaggtggagaacaccctgagatgcatagagctgggccaccgcccctacgagcagccccactgttgccacccggggctcgtgggctccccccccccccccctccactgcctcctccactccccccccgccttcgcgaagaggccgaggaacaagagtcaacctgtcctatctgccttggagaaattcaaaacgcaaagaccttggaaaagtgccgccatagcttctgtgaagggtgtattacacgggccttgcaggtgaagaaggcatgtcccatgtag

SEQ ID NO: 114368 - DNA, 24 bp, synthetic construct
  misc_feature 1..24: note = Description of Artificial Sequence: Synthetic coding sequence
  source 1..24: mol_type = other DNA
atgccaatattgagctcttcctag

SEQ ID NO: 114369 - DNA, 1053 bp, synthetic construct
  misc_feature 1..1053: note = Description of Artificial Sequence: Synthetic coding sequence
  source 1..1053: mol_type = other DNA
atgcccatactctcctcgtcgggatctaaaatggctgcgtgcggcggcacctgtaagaataaggtgacagtctccaaaccagtttgggatttcctgagcaaggagacacctgctagactggctaggctgcgtgaggagcaccgcgtgtctattctcatcgatggcgaaaccagtgacatatacgtgctgcagctctcacctcaaggtccaccaccggcccctccaaacggcctgtacctcgccaggaaggcccttaagggcctgttaaaagaggccgaaaaagagttaaagaaggcgcagaggcagggagagttgatgggttgtctagcgctggggggtggcggggaacatcctgagatgcatcgtgcaggccccccacctctgcgggcagccccactgctgccccccggagcacggggtctgccccccccaccaccccctctccctcctcctctgcctcccagattacgagaagaggccgaagagcaggaaagtacttgccccatttgcctgggcgaaattcagaacgccaagactttagagaagtgccgccactcgttctgcgaggggtgcatcacgcgggctctgcaggtgaaaaaggcctgtccaatgtgtggaagattttacggccaactagttggtaaccaacctcaaaacgggcgtatgctggtctctaaggatgcaaccctgctacttccttcctatgagaagtatggcaccattgttatccagtacgtgtttccacctggggtgcaaggtgccgagcaccctaaccccggggtgcggtatccaggaaccacccgcgtggcttatctgcccgactgtcctgaggggaacaaggttctgacgttgttccggaaagcttttgatcagcgactgacctttacaatcggaacaagtatgactactggccggcccaacgtgataacatggaatgatatccatcacaagacatcctgtacaggcggaccccagcttttcgggtacccagacccaacctatctgacccgcgtgcaggaggagctaagggcaaaaggcatcaccgacgattag

SEQ ID NO: 114370 - DNA, 150 bp, synthetic construct
  misc_feature 1..150: note = Description of Artificial Sequence: Synthetic coding sequence
  source 1..150: mol_type = other DNA
atgagcttcgtcctgagccggatggctgcctgcggcggaacgtgcaaaaacaaagtgaccgtctcaaaaccagtctgggacttcctcagcaaagagactccagcaaggcttgcaagactacgcgaagagcatagagtgtcaatcctgtag

SEQ ID NO: 114371 - DNA, 2136 bp, synthetic construct
  misc_feature 1..2136: note = Description of Artificial Sequence: Synthetic coding sequence
  source 1..2136: mol_type = other DNA
atgctggacggtccactcttttccgaggggcctgactctcctcgcgaactgcaggatgaagagtcaggtagctgtctctgggtgcagaagtcaaagctgctggtgatcgaggttaagacaattagttgtcactatagcaggcgcgctccatctaggcagcctatggatttccaggcaagccattgggcccgggggtttcaaaaccgcacctgtggccccagacctggaagtccccagccccctcccagaaggccttgggcttcgagagtcttgcaggaggccacgaactggagggccggccccctggccgaggttagggcgcgggagcaggaaaaacgtaaagcagccagtcaggagcgggaagccaaggaaacagagagaaagcggaggaaagcgggaggcgcaaggcgaagccctccaggtcgccctaggcctgagccgcgtaatgcccctagggttgcccagctggcagggctgcctgcaccgcttcgcccagaaagactcgcaccagtgggccgcgccccccggcctagcgcccagcctcagtctgatccagggtcggcttgggctgggccctgggggggtcggaggccaggccctccaagttacgaggcacatctcctcctcagagggtcagccggaactgccccaaggagacgctgggaccgaccccccccatatgtggcccccccatcttacgaggggcctcacagaaccctaggcaccaagcggggacccggtaatagccaagttcccacatcctcagccccagcagcaacccctgcccggacggacggcggaagaaccaaaaaaaggctcgacccaagaatatatcgcgacgtgcttggagcttggggcctgaggcaaggacagggccttctgggggggagccctggttgtggagccgcaagagcgaggcctgaaccgggaaagggtgtggttgaaaaatctttggggctcgccgccgcggacctgaattcaggatccgactcccatccacaggcaaaagcaaccggcagcgcaggtacagaaatcgctcccgccggctccgccaccgctgcaccttgtgctcctcacccagccccaagaagtcggcatcatctgaagggatcacgcgaagggaaagagggggaacagatctggtttccaaagtgttggattccctcccctaagaagcagcccccccgccattcccagacactgcctcggccttgggctccaggaggcactggctggcgtgaaagtctcggcctaggagagggcgctgggcccgaaactttagaggggtggaaagccactcggcgagcacatactctgcctcgcagcagtcaaggactgagcaggggagagggcgtgttcgtgattgacgcaacgtgtgttgtgataaggagccagtacgtgcctacacccaggacacaacaggtgcagctcttgccctctggggtgacaagagttgttggagattcaccctcacagagcaagcctggcaaagaggagggtgaaggagccactgtgtttccctcaccttgtcaaaagcgcctgtcatcttcacggctgctccaccagccagggggcggaaggggaggtgaagctgagggcgggcgccctggcgacagcactctagaagagcgcacatttaggattctgggcttgcccgcgccagaggtgaatctgagggatgcacccacccagccaggtagtcctgaacaccaggccttggggccggctgcgagcggcgcgcaaggccgcgccgaagggtccgaagttgctgtggttcagaggcgggcaggccgaggctgggccaggactccgggaccttatgcaggggccttaagagaagccgtgtcccggattcggaggcacactgcccctgacagtgatactgatgaggcagaggaactgagcgtgcattcaggaagtagtgatggatctgacactgaggcgccaggtgcttcatggcggaacgaaaggaccctccctgaggtgggcaattcctcgcccgaggaagacggtaaaaccgcggaactgagtgattccgtgggcgaaatactcgatgtcatctcacagaccgaagaagtactgttcggagtgagagacatccgcggaactcaacaagggaacagaaagcgccagtag

SEQ ID NO: 114372 - DNA, 852 bp, synthetic construct
  misc_feature 1..852: note = Description of Artificial Sequence: Synthetic coding sequence
  source 1..852: mol_type = other DNA
atgggcatttggacttccggcactgatatattcctctcattgtgggaaatctatgtcagccctcgaagcccaggatggatggattttattcagcatcttggagtctgttgcttagttgctctgatttctgtgggcctgctgtccgttgcggcttgttggttcctgccctctataatcgcggcagcagcgtcctggatcattacttgtgtgctattgtgctgctccaagcacgccagatgtttcatcttgctggtgtttttgagctgcggcctccgagaaggccgtaatgccctgatcgctgccggaactgggattgtgattttaggacacgtggaaaacatttttcacaactttaaggggctactggacggcatgacttgtaacctgagagccaagtctttcagcatccatttcccgcttctgaaaaagtacatcgaggcaatccagtggatatacgggttggccacaccattatctgtattcgacgacctcgtgtcctggaaccaaaccctcgccgtatccctcttcagtccttcgcacgtgctggaggcccagctaaatgattccaagggcgaggtgctgtcggtactataccaaatggctaccaccacagaggtcttgagctctcttggccagaaactgctggccttcgctggtttgtctctcgtgctgctcggaactggcctatttatgaagcgctttctgggaccatgtggctggaaatacgagaacatctatattaccagacagtttgtgcaattcgatgagagagaacgacaccagcagagaccttgtgtgcttccccttaacaaagaagaaaggcggaaattcattagcgggtttcagagttag

SEQ ID NO: 114373 - DNA, 1401 bp, synthetic construct
  misc_feature 1..1401: note = Description of Artificial Sequence: Synthetic coding sequence
  source 1..1401: mol_type = other DNA
atgctgaagtggccaattcctggccaagtggccctctttcaaatcctccgatgccggggcaatagccgcaggaccacagtgacgtctctgaccgtcagccaggttggacaaaacttcacgtttgtattgactgacatcgactctaagcaacgctttgggttttgccgtctctctagtggggccaagtcctgcttttgcatcctcagctacctaccatggttcgaagtattctacaaactactgaacatcctggcagactacacaaccaaacggcaagagaaccagtggaatgagcttctggaaaccctccacaagctgcccatacctgacccgggggtgtccgtgcatctgagtgtacatagttactttactgtcccagatacgagagaacttcccagtatccccgaaaatagaaaccttactgaatatttcgtcgccgttgacgtgaataatatgctgcatctctacgcgagcatgctgtatgagcgtcgcattttgatcatctgctccaaactttctacgctgacagcgtgtatacacggaagcgctgccatgctgtatcctatgtactggcagcatgtctatattcccgtactgccgccacatttgctcgattattgctgtgctccgatgccctatctgataggcattcatctctctcttatggaaaaagtgaggaacatggcgttagacgacgtagtaattctcaacgttgacactaatactctcgaaactcctttcgatgatttacaatccctcccaaacgacgttattagttcccttaagaataggcttaagaaggtgagtactaccactggggatggggttgcccgagcgttcttaaaagcacaggctgctttctttgggagctataggaacgcacttaaaatcgagcctgaggagcccattacattttgcgaggaagcctttgtcagccattaccggagtggcgccatgaggcagttcttacagaatgctacccaattacaattattcaaacagttcattgacggaagactggatctcctgaattccggggagggattctccgacgtgttcgaagaagagatcaatatgggcgagtatgctggcagcgacaagctttaccaccagtggcttagcaccgtgcgcaagggcagtggggcaatactgaacactgtgaaaacaaaggctaatccggcgatgaagacagtttacaagttcgctaaggatcatgctaaaatgggcattaaggaggtgaagaatcgattgaaacagaaggatattgcagagaacggttgtgcacctacacctgaagagcaactcccaaagacagctccttctcctctggtggaagcgaaggacccaaagctccgggaggaccgcaggccaattacggtgcacttcggacaagcactgtag

SEQ ID NO: 114374 - DNA, 1680 bp, synthetic construct
  misc_feature 1..1680: note = Description of Artificial Sequence: Synthetic coding sequence
  source 1..1680: mol_type = other DNA
atgggcagccgtataaagcagaaccctgaaacaaccttcgaagtctacgtggaggtagcctaccccaggacaggcgggacgctctccgacccagaggtacagcggcaattccccgaggattacagcgatcaagaagtcctgcagactctgaccaaattttgttttccattctacgtggacagcctgacagtcagtcaggtgggacagaacttcacatttgtgctgacagacattgacagcaaacaaagattcggcttctgccgtctcagctctggcgctaaatcatgcttttgtatcctctcatatctcccatggttcgaagtgttttacaaactgctgaacattttagccgactacacaactaaaagacaggagaaccagtggaatgagttgctggaaacattacacaagttgccaattcctgaccccggagtttctgttcatcttagcgtgcactcatattttacagtccccgacactagggaactgccaagcatcccagaaaatcggaacctgacagagtatttcgttgcagttgatgtgaacaacatgctacacctatatgcttcaatgttgtatgaacgcaggattcttataatttgttctaaactaagcacattaacagcctgtattcatgggtccgctgcaatgctttaccccatgtattggcaacatgtctatattccagtgttacctcctcatttactggattactgttgtgccccgatgccttaccttatcggaatacacctgtcactcatggagaaggtcagaaacatggccctagacgacgtggtgattttgaacgtagacactaacactttggaaactccatttgacgacctgcaatctctcccaaatgatgtcattagcagcctgaagaaccggctgaaaaaggtatcaacaacaactggagacggcgtagccagggccttccttaaggcccaggctgctttttttggatcgtatcggaatgccctgaaaatcgagccagaagagcctattactttctgcgaggaggcatttgtgtcccattaccggtcgggggccatgcgacaattccttcagaatgctacacaactgcagttgttcaagcagttcatagatggcagattggacctgctgaatagcggcgaagggttctccgatgtattcgaggaagaaatcaatatgggtgaatacgccggaagcgataagctttatcaccagtggttgtcaacagttcgaaagggctcgggggctatcctcaacacggtgaaaaccaaagccaaccccgccatgaaaacagtatacaaattcgccaaagaccacgcgaagatgggaatcaaagaggtgaagaacagactcaagcaaaaagacatcgccgagaacgggtgtgcccctacaccagaggagcagctcccaaagacagctccctcccctcttgtcgaggcaaaggaccctaagctacgggaagacaggaggcctatcactgtgcacttcgggcaagtccgccccccacggcctcatgtggtcaagcgtcccaagagcaatatagccgtggaaggcaggcgcacatctgtgcctagtcccgaacagaacaccatagcaactccagccacgttacacattctacagaagagcattacccattttgctgccaaattcccaacacgtggttggacatccagctctcattag

SEQ ID NO: 114375 - DNA, 3030 bp, synthetic construct
  misc_feature 1..3030: note = Description of Artificial Sequence: Synthetic coding sequence
  source 1..3030: mol_type = other DNA
atggggagccgcatcaagcaaaacccagagaccacatttgaggtgtacgtggaagtagcttaccctcgcaccggaggaactttgagcgatcccgaagtacagcgacagttccccgaagattacagcgatcaggaagtgctccagactttgacaaagttttgctttccattctacgtagattccctgactgtgtcccaggtaggtcagaacttcactttcgtgctgacagacatcgactcaaagcaaagattcggattttgccgcctgtcgtctggggctaaatcgtgtttttgcattctttcatatttgccatggtttgaggtcttctacaaattactgaacatcctagctgactacaccacgaagcggcaggagaatcagtggaacgagctgctggagactctgcacaaactcccaatcccagacccaggcgtcagcgtccatctcagtgtccacagctactttacggtgccagacactcgggagttgcccagcatcccagagaaccggaatttaacagaatatttcgtagcggttgatgttaacaatatgttgcacctttatgccagcatgctttacgagcgccgcatactgattatttgttctaagttgtcaaccttaaccgcatgcatacatgggtccgccgccatgctgtaccctatgtattggcaacacgtttacatccccgtgctgccaccccaccttctcgactattgttgcgctcctatgccttatctgattggaattcatctttcacttatggagaaggttaggaacatggcgctggacgacgtggtgatactgaatgtcgatacaaacacgttggagacaccctttgatgatctgcagtccttgcccaatgatgtcatcagcagcttgaaaaacagattgaagaaggtgtccaccaccactggcgacggggtagcccgcgccttcttaaaagcgcaagccgctttcttcggcagctatcgtaatgcactcaagatcgagcctgaggaacccatcacattctgtgaggaggctttcgtgtcccactatcggtcaggagccatgaggcagtttctgcagaacgccacacaactccaacttttcaagcagttcatcgacggacgcctcgatttactgaactctggagagggcttcagcgatgtgttcgaggaggagatcaatatgggagagtacgcgggatccgacaagttgtaccatcagtggctatccacagttcggaaaggcagtggggcaattcttaatacggtcaagaccaaggccaacccagccatgaagaccgtgtacaaatttgctaaggaccacgccaagatgggcataaaggaagtcaaaaacagactgaaacagaaagatatagccgaaaatggctgcgcacctacccctgaggagcagctgcctaaaactgccccatcacctctggtggaagccaaggatcccaagctccgggaagaccgaaggcccattactgtccatttcggacaggtgaggccaccaaggccccatgtcgtgaaacgccccaaaagcaatatagccgtcgaaggcagaaggacctcagtgccgagtccagaacagccccaaccgtatcgcactttacgggagagtgattctgccgagggggacgaagccgaatcccccgagcaacaggtaagaaaatctaccggacctgtgcctgccccgcccgaccgagccgcctctatcgatctgctggaagatgtgttttcaaatctcgacatggaggctgccctgcagcccttaggacaagcaaaaagcctggaagatctcagggcgccaaaagacctccgagagcagcctgggaccttcgactaccagcggctcgacctgggaggcagcgagaggagccggggcgtgaccgtggctctgaagctcacacacccatataacaaactgtggtccctggggcaggacgacatggctattcctagtaagcctccagccgcctccccagagaagccgtccgccctgctgggaaactcactggccctgccaaggcgcccccagaatagggatagtatcctcaacccctccgacaaagaggaggtcccgacacccacattgggctcgattacgatccctcggccccagggccgcaagacaccagagctaggaattgtgcctcctcccccgattcctagacctgccaaactgcaggctgcaggtgctgccctaggggatgtgtccgagcgcctccaaacagaccgcgatcgtcgtgcagccctttcacctggcctcctaccgggagtggtcccccaggggcccacagaattgctacaaccattgtctccaggacctggcgccgccggcaccagcagcgacgccctcttggctctcttggaccctctgagtaccgcttggtcaggtagtacacttccctcaagaccggctacacccaatgtggccactcctttcaccccccaattttcattcccacctgccggaacccccactcccttccctcagcccccattgaacccattcgttccaagcatgcccgcagccccacctacactgcccctcgtatccactcctgccggtccttttggtgccccgcctgcatcgctaggacccgcatttgcctcggggttgcttctctcctccgcgggcttttgcgcacctcaccgttcccaacctaatctcagcgccctgagcatgccaaacttatttgggcagatgccaatgggaacccatactagtccgctccagcccttgggcccccctgccgtcgcgccttctagaatacgcaccctacccctagcaaggagctcagccagggccgctgagaccaaacagggccttgcactccgacctggagacccccctctgttgccaccacgaccgccccagggcctcgagccaaccctccaaccttccgctccgcagcaagctcgcgatccctttgaggatctgctccaaaagactaaacaggatgtctcccctagcccagccctggcaccggctccggattcagttgagcagctgcggaagcagtgggagaccttcgagtag

SEQ ID NO: 114376 - DNA, 1590 bp, synthetic construct
  misc_feature 1..1590: note = Description of Artificial Sequence: Synthetic coding sequence
  source 1..1590: mol_type = other DNA
atgctgaagtggcccattcccggtcaggttgctctcttccaggaagtcctgcagacccttaccaagttctgttttccgttctacgtggacagcctgacagtttcacaagtgggtcagaacttcacgttcgtccttactgacatcgacagcaaacaaagattcgggttctgccggctctcctctggggcaaaaagctgcttctgtatcctttcttacctgccgtggtttgaggtattctataagctgcttaacattctcgctgattacacgaccaagcggcaagaaaatcagtggaacgaattattggaaactctgcataagctgcctatccccgacccaggagtcagcgtccatctgtctgtccattcatatttcaccgtacccgatacaagggagcttccaagcatccccgagaacagaaacctgaccgagtattttgtggcagttgatgtgaataatatgctccatctgtatgccagcatgctgtacgagaggagaatcctgatcatctgtagcaaactcagtaccctgaccgcttgtatccacggctctgcagcgatgctttaccccatgtactggcaacacgtctacatcccagtattgccaccccatctactcgactattgttgtgcccctatgccctatttaatcggtatacatttgtccctgatggaaaaggtgaggaacatggctctagacgatgttgtgatcctcaacgtagatacaaatactctggagactccgttcgacgatctccagtcattgccaaacgatgttatttccagtctgaagaaccgcctgaagaaggtaagcaccactaccggtgatggcgtcgctagggcctttttaaaggcacaggccgccttctttggttcctatcgaaacgccctgaagatcgagccagaggagcccataacgttttgtgaagaggcattcgtgtctcactatagaagcggcgctatgcgccagttcctccagaacgctacccagctccagctgtttaagcagttcattgacgggaggctagatctactgaactccggcgaggggttcagtgatgttttcgaagaggagatcaatatgggagaatatgccgggtccgataaactttaccaccaatggctgagcacggttcgcaagggctccggtgctatacttaataccgtgaaaacaaaggctaaccctgccatgaaaacagtttacaagttcgctaaggatcatgccaaaatgggtataaaagaggtgaaaaataggttgaaacagaaggatatagccgagaacggttgtgctcccacgcccgaagagcagctgcctaaaacggccccatctcccttggtggaggccaaggatccgaagctgagagaagacagacgccctattactgttcatttcgggcaagtgcgccccccgcgaccacatgttgtgaaacgtcctaaatctaacattgctgtggaaggtcgcagaacaagtgtgccctctccagagcaaaacactattgccacaccagccactctccacatattgcagaagtccattacacactttgctgccaagtttccaacaaggggctggacctcttccagccactag

SEQ ID NO: 114377 - DNA, 3063 bp, synthetic construct
  misc_feature 1..3063: note = Description of Artificial Sequence: Synthetic coding sequence
  source 1..3063: mol_type = other DNA
atgcggcgcccgggcgatcatggcctgcaggaccaggaagtgctacagacactgactaagttctgcttcccattttacgtagatagtctgaccgtttctcaggtcggtcagaacttcacctttgtgttaactgatatcgactcgaagcaaaggtttggtttttgtcgcctgtcttccggggccaaaagctgtttctgcattctgtcatacttgccatggtttgaggtgttctacaagcttctcaatatcctcgctgattacaccaccaagagacaggagaatcagtggaacgaacttctcgaaacccttcacaagctcccaatccccgacccaggtgtcagtgtgcatcttagtgttcactcttattttaccgtcccggacacgcgtgagctccccagtatacccgagaacagaaatctgactgaatattttgttgcagttgacgtcaacaacatgcttcacctgtacgcctccatgctgtacgaaaggcgcatcttgatcatctgcagtaagctttccactctgactgcttgcatacacgggagtgcagccatgctctatccgatgtattggcagcacgtctacattccagtgcttcctccacatctgctggactactgctgtgcccccatgccctatctgattggcatccacctctccctgatggagaaggttaggaatatggccctggacgacgtggtaatcctgaacgttgacacaaacaccctagaaaccccgtttgacgacttgcaatctctccctaatgacgtgatttccagcctcaagaatcgtctgaagaaggtcagcactacaacaggcgatggagtggccagagccttccttaaagcccaggcagccttctttggaagctacaggaatgccttaaagatcgagcctgaagaaccgattaccttctgcgaggaggctttcgtttctcactaccgaagcggcgctatgcggcaattcctgcaaaacgccacacaattgcagcttttcaagcagttcatcgatgggcggctggatctgctgaattcaggcgagggcttctccgacgttttcgaagaggagattaacatgggggagtacgcaggttcagacaagctataccatcagtggctctcaacggttcggaaagggagtggtgccatcctcaacacagtgaaaacaaaggccaaccctgcaatgaagactgtgtataaatttgccaaggatcatgcaaaaatgggaatcaaagaggtgaaaaataggctcaaacagaaggacatagcggaaaacgggtgcgccccaacccctgaagaacagcttccaaagacagcccccagcccacttgtggaggcaaaggaccctaagcttagagaggacaggcgccccatcacagtgcattttgggcaggtacggccaccgcggcctcacgtggtgaaacgcccaaaaagtaatattgccgtggaggggcgccggacttctgtaccgtctccagaacacctcgtgaaacccctgcgccactacgccgtgttccttagcgaggactcaagcgacgatgagtgtcagcgggaggagggccccagctctgggttcacagaatcatttttcttctccgcccccttcgagtggccccagccctaccgcaccctgcgtgagtctgactctgccgagggggacgaggccgagagtcccgagcagcaggtccggaagagcaccggaccagttcctgccccccctgatcgggctgcaagtatcgatctccttgaggacgttttcagtaatttagacatggaagccgctctgcagcccctgggccaggcaaaaagcctcgaagacctcagggcccccaaggatcttcgggagcagccaggaaccttcgattaccaacggctcgacttgggcggcagtgaacgctctcgaggcgttacggttgctctcaaacttacccatccgtataacaagctttggagcctcggccaagatgatatggcaattcctagcaaacccccagccgcctcacctgagaaaccctcggctctgcttgggaatagcctcgccttacctcggagacctcagaatcgcgattctattctgaatcccagtgataaagaagaagtgccgaccccaacgctggggagtatcaccatacctaggccccagggcaggaagacccccgaactgggcattgttccccccccacccattcccagacctgccaaattgcaggccgcgggcgctgccctcggcgacgttagcgagagacttcagacagaccgggaccgtcgggcagccttatccccaggcctgctgcctggagtggtcccgcaaggtcccacagagctgctgcaacccttgtcacctggacccggagccgctggtacgtcctctgatgccttgcttgcccttctggatcctcttagcacagcttggtccggctccacattgccgtcccggccagccacacctaatgtggctactccatttacaccacaatttagcttcccacccgccggcacccctactcctttccctcagcctcccctaaaccctttcgtcccgagtatgcctgcagcaccaccgactctgcctctggtatctacccccgctgggccttttggagccccacctgcgtctcttggtccagcttttgcaagcggtctcttgctgtcatctgccggcttctgtgcgccacacaggtcccagcccaatctcagcgctttgagcatgcccaatctcttcgggcaaatgccaatggggactcatactagcccgctacagcccctcggcccaccagcggtggcacctagtcggattcgtaccctgcccctggcccggtcttccgccagggccgctgagactaaacagggactggcactgaggccaggtgatccacctctgctgcccccgagacccccccagggcttggaacctacactgcaaccgagcgctccacagcaagcaagagacccctttgaggacctcctgcaaaagaccaaacaagatgtctctccttcacccgcactggcccccgccccagacagcgtggagcagttgaggaagcagtgggagacattcgaatag

SEQ ID NO: 114378 - DNA, 2385 bp, synthetic construct
  misc_feature 1..2385: note = Description of Artificial Sequence: Synthetic coding sequence
  source 1..2385: mol_type = other DNA
atgttgtatcctatgtattggcagcatgtgtacatccccgtcttgcctccacaccttctggactactgctgtgccccgatgccctacctgattggtatccacctctcgctcatggaaaaagtgaggaacatggccctggatgatgttgtcatcttgaatgtggacacaaacacacttgaaactccattcgatgatctgcagagtttacctaacgacgtggaggaacctattacattttgcgaagaggctttcgtcagtcactaccggagcggggcgatgcggcagttccttcaaaacgccacccaattacaactcttcaaacagtttatagacgggcgacttgatctcctcaactccggagagggtttttcggatgtgtttgaagaggaaatcaacatgggtgagtacgcagggtccgacaagctctaccaccagtggttgtcaacggttcgcaaaggctccggtgctatactgaatacagtgaagactaaggctaatccggcgatgaaaacagtgtataagttcgccaaggaccatgccaagatgggcatcaaggaagtgaagaatagactcaagcagaaagacatcgccgaaaacggctgtgccccgaccccggaagaacaactgccaaaaaccgcccccagccctttggtggaggccaaggatcccaaactgcgagaagaccgtcggcccattacagtccacttcggccaagtgagacctccgagaccccacgttgtgaaacggccgaagtccaacatcgctgtcgagggtcgccgaaccagcgtgcccagcccggagcacttagtgaagccattgcgtcactacgcagtctttctgagcgaagacagtagcgatgacgaatgtcagagagaagaaggcccctcgtcaggttttacagagagtttcttcttcagtgctccgtttgagtggccccaaccttaccgaacactcagggaatcagactccgctgaaggtgatgaggcagaatctcccgagcagcaagttaggaaaagcactggacctgtcccggcgcctcctgaccgggcagcttccatcgatctcctcgaagacgtgttctcaaacctcgacatggaagcagccctccagcccttaggacaggctaaaagcctcgaggatcttagggcgccgaaagatctcagagaacaacctggcactttcgactatcagcgtctggatctgggcgggtccgagagatcgcgaggggtgaccgtcgccctgaaattgacccatccttataataagctatggagtctcggccaggatgatatggccatcccatcaaagcccccagccgcttccccggagaagccatctgctctcttggggaattccctagcgctgccaaggcggccccagaatagagactcgattctgaatcctagcgacaaggaggaggtccccaccccaacgcttggctcaatcacaatccccaggccccagggccgaaaaaccccagagctggggattgtgcccccacccccaataccgcgaccagccaagcttcaagcagccggggctgccctgggcgacgtttccgaaagactccaaaccgaccgcgatcgcagggccgccctcagccctgggttgttgcctggagttgtgccacagggacccactgagctcctgcagcccctgtccccaggaccgggcgcagccggaaccagctctgatgcactgctggccctgctcgaccctctcagtaccgcctggagtggcagcacccttcctagccgccccgcaaccccaaatgtggctactcctttcacgccacagttcagctttccacctgccgggacccctacgccgttcccacagcctccactgaatcccttcgttccctccatgcctgcggcaccacctacactgccgctcgtttctaccccggcagggccattcggagctccacctgccagcctaggccccgcattcgcatcgggcttgctcctaagctccgcaggattttgcgcgccgcatcggtctcagcctaatctttccgctctctccatgcctaatctgtttggacagatgccaatgggtacccacaccagcccattgcagcctttgggcccccctgcagttgccccctcacggataagaacactcccgctggctaggagttctgccagagcagcagaaacgaagcaaggtttagccttgcgacctggcgacccacccctcctcccccctaggcctccccaggggcttgagccgaccctgcagcctagcgccccccaacaggcccgagatccgtttgaagatctgctgcagaaaacgaagcaggatgtttcaccatcgcccgccctggcacctgccccagactcagtggaacaactgaggaagcagtgggagacattcgaatag

SEQ ID NO: 114379 - DNA, 1191 bp, synthetic construct
  misc_feature 1..1191: note = Description of Artificial Sequence: Synthetic coding sequence
  source 1..1191: mol_type = other DNA
atggcagccgcccccagggaggagaaaagatggccccagccagtcttctcgaacccagtggtgctgtggaagtttcccgaagactttggcgaccaggaaatactgcagagtgttccaaagttctgttttccatttgacgtggagcgcgtctcccagaaccaagttggtcagcatttcacattcgtgctgacggacatagagagcaagcaacgcttcggtttttgtcgcctcacgagcggaggcaccatatgcctttgcatcctctcctatcttccttggttcgaagtgtattacaagctcctaaatacactcgctgactacctggccaaggagttggaaaatgacctaaacgaaaccctgagatctctgtacaatcacccggtgcccaaagccaatactcctgtcaatctaagtgtgcactcttattttatcgctcctgatgttaccgggctgcctaccatacctgagtccaggaacctgactgagtacttcgtggccgtggacgtgaacaacatgttgcagttgtatgcgtctatgcttcacgagcgcaggattgtaatcatctcctccaaactcagtactctgacagcgtgcatccacggttcagccgccctcctttaccctatgtattggcagcacatttatattcctgtgcttcccccccaccttttggactattgttgcgctcctatgccttatttaatcggtattcactcaagcctcatcgagcgggtgaaaaataagtctctggaggacgtggtaatgttaaatgtcgatactaacacactggagagtcctttttctgatcttaacaacttaccttctgatgtcgtctccgcactaaagaacaagctgaaaaaacagtcaacggccaccggtgacggcgtagcaagagcgttcctgagagcccaagccgcccttttcggatcctatagagatgccctgaggtacaaacccggtgagcccatcactttctgcgaagagtctttcgtgaagcaccggtcttctgtcatgaagcagtttctagagaccgcaattaatctacagctctttaaacaatttatcgacggaaggcttgcaaagctgaacgcgggacgtggatttagcgatgtctttgaagaggagattacaagtggtggtttctgcggcgggaaggacaagctccagtatgactatcccttttcccaatag

SEQ ID NO: 114380 - DNA, 1281 bp, synthetic construct
  misc_feature 1..1281: note = Description of Artificial Sequence: Synthetic coding sequence
  source 1..1281: mol_type = other DNA
atggactgtcggaccaaagccaatcccgatagaacgttcgatctcgtgttgaaagtgaagtgccatgccagcgagaacgaagacccggttgtgctttggaaatttcccgaagactttggagaccaggagattctacagtccgttccgaagttctgtttcccatttgatgtggaacgggtctcccagaaccaggtggggcagcattttacctttgtgttgaccgatattgaaagtaagcagaggtttgggttctgtcgactgacctcgggtggcactatttgtctgtgtattctgagctacttgccgtggttcgaagtgtactataaacttttaaacaccttggcggattatctggctaaggagctggagaatgatttgaatgagactctgcgtagcctctacaatcatcctgtgccaaaggcaaacacccctgtgaacttgtccgttaatcaggagatctttatcgcatgcgaacaggtgcttaaggaccagcctgcactcgttccacactcctatttcatcgctcccgatgttaccggtctaccaacaatccccgagagtagaaatctcaccgaatactttgtggccgtggacgtgaataatatgctgcaattgtatgcctctatgttacacgagcgcaggatcgtgataatttccagcaaactgtcaactctgacggcatgtatccatggctccgctgcccttctgtatcctatgtattggcagcacatttatattcccgtgctgccccctcacttactggactattgttgtgcacccatgccctacctgattggcatccattcatcgctgattgagagagtaaaaaataagagccttgaagacgttgtcatgctgaacgtggacactaacacgctggagtcccctttctccgatctcaataacctgccaagcgatgtggtgagcgctctgaagaacaagttaaagaaacaatccacggctactggagacggcgtggctcgggccttccttagagcccaagccgcgctgttcggtagctaccgcgatgctttaagatataaaccaggcgagccaattactttctgtgaagagtcattcgtcaagcaccggagtagcgtgatgaagcagttcttggagacggcgattaatctccaactgtttaagcaatttatcgatggccgtctggccaagctaaacgcgggcaggggcttctccgatgtctttgaggaagagataacctcagggggtttttgcggaggcaaagataaactccagtatgactatccctttagtcagtag

SEQ ID NO: 114381 - DNA, 1191 bp, synthetic construct
  misc_feature 1..1191: note = Description of Artificial Sequence: Synthetic coding sequence
  source 1..1191: mol_type = other DNA
atggctgccgctcctcgggaggagaagagatggcctcagccggtctttagtaatcctgtcgttttgtggaaatttcccgaggatttcggagatcaagagattctccagtcagtgccaaaattctgtttcccctttgatgtagaacgagtgagccaaaaccaggtgggccagcacttcacatttgtccttacggatatcgagtcaaaacaacgattcggcttctgccgtttaacatcgggtggcacaatctgtctgtgcatcctttcatacttgccatggttcgaagtttactacaagttactcaacaccctggccgactatttggctaaggaactcgagaacgaccttaacgagaccctccgatccctgtataatcaccccgtccccaaagccaacacccctgtaaacctcagcgtacacagttactttattgctcctgatgtgacaggacttcccaccatccccgagtctcgcaatcttactgagtattttgtcgctgtcgatgtgaacaatatgttacaactctacgcatctatgcttcacgaaaggagaatcgtcattatctctagcaaattgtccacgctgacggcctgtattcacggcagcgccgccctgctgtacccaatgtactggcagcacatctatatcccggttctcccacctcacctccttgactactgttgtgcccccatgccgtatctcatcggcatccacagctcactaatcgaacgcgttaagaataaatctcttgaggacgtcgtaatgctgaatgtggatacaaatacccttgaatctccttttagcgacctgaacaacttgccgtccgatgtcgtctccgccctaaagaataagcttaagaaacagtccacagccactggcgatggggtggctagggcatttctcagagcccaagctgccctgtttgggtcctacagagacgctctgcgctataagcccggcgaacccattaccttctgcgaagagtctttcgtcaaacaccgatcctcggtgatgaaacagttcctggagacagcaattaatttgcagctgtttaaacagttcatcgacggtaggctcgccaaattgaacgccgggcgcggcttcagcgatgtcttcgaagaggaaattacctcaggggggttctgcggaggaaaggacaaacttcagtatgactacccgttcagccagtag

SEQ ID NO: 114382 - DNA, 2268 bp, synthetic construct
  misc_feature 1..2268: note = Description of Artificial Sequence: Synthetic coding sequence
  source 1..2268: mol_type = other DNA
attgagacgaagacgcgagccaaccctgaccggacctttgaccttgtcctgaaggtgaagtgccatgccagcgagaacgaggatcccgtagttttgtggaaatttcctgaagattttggggatcaggaaatcctgcagagtgttcctaaattctgcttccctttcgacgtggagcgggtgagccagaatcaagtgggccagcactttacatttgtcctaaccgacatcgagtcaaaacagcgatttggtttctgtcgacttacttccggtggcacgatttgcctgtgtattttgtcctatctgccctggtttgaagtctactacaagctcctcaacacgctagctgactaccttgctaaagagctcgagaacgacttaaacgaaaccctaaggagtctgtacaatcaccccgtgccaaaggctaatacgcccgttaatttgtcagttcactcttactttattgcccccgatgtcactggcttacctaccatccccgaatcgcgaaacctcactgagtacttcgtggctgtcgacgtgaataatatgttacagctttatgccagcatgctacacgaaagaaggatcgtcattatctcttccaaactctctactcttacagcttgcatccatggatccgctgccctactttacccgatgtactggcagcatatttatattccggtccttccccctcacctactcgactattgctgtgctcctatgccgtatctcatcgggatccactcctctctgattgaaagggtaaaaaacaaatcattagaagatgtcgtgatgttgaacgtcgacaccaatactctggaatcaccgttctctgacttgaacaacctcccaagcgacgtagtgtccgcactgaagaataaactgaaaaaacaaagtacagctaccggcgacggcgtcgcacgcgctttcctgcgggcccaggcggccctctttggttcttaccgcgatgccctgagatacaagccaggtgagcctatcactttttgcgaagagtctttcgtaaagcatagatcctctgtcatgaagcagttcctcgagactgcaatcaacttgcagttattcaagcagttcatcgatggccgcctcgctaaactgaatgccggccgtggcttttccgacgtgttcgaagaggagatcacaagtggggggttctgtggcggcaacccacggtcgtatcagcagtgggtgcatactgtgaaaaagggcggcgctctgtttaataccgcaatgacaaaagcaacccccgccgtgcggacggcatacaagttcgccaaaaaccatgccaagttaggtctcaaggaggtcaagtccaaacttaaacataaggagaacgaggaggattatggcacatgcagcagctccgttcagtataccccggtctacaagctgcacaatgaaaagggcggaaacagcgagaaacgcaaattagcacaggccaggttgaagcgtcccttaaagagcttggacggtgccctttacgacgacgaggatgatgatgacatagagcgagctagcaagttgagtagtgaagatggggaggaggcttctgcctacctgtatgagtccgatgactcagtggaaacccgcgtgaaaacgccctacagcggagaaatggacctactgggtgagatactcgacacgctgagtacccactcatccgaccaagggaaactggcagccgctaaaagcttagatttttttaggagcatggacgatatcgactacaaaccaacaaataagtcaaacgcgccttctgaaaacaacctggctttcctgtgcgggggatccggagaccaggctgagtggaatctgggacaagacgacagcgccctgcacggcaaacacctgcctccatccccccgcaagcgagtgtccagttcaggactgaccgatagcttgtttattctgaaggaggaaaactccaataagcatcttggtgccgacaatgttagcgatccaacaagcgggctggactttcagctaacgagtcccgaggtttcccagacagacaagggcaaaacagagaaacgggaaacacttagccaaataagcgatgaccttctcatcccagggttgggcagacacagttcaactttcgtcccatgggagaaagagggtaaagaggctaaggagaccagcgaggacatcggcctactgcacgaggttgtgagcttgtgtcatatgaccagcgacttccagcagagtctcaatatctccgacaagaatactaacggtaaccagacctag

SEQ ID NO: 114383 - DNA, 2328 bp, synthetic construct
  misc_feature 1..2328: note = Description of Artificial Sequence: Synthetic coding sequence
  source 1..2328: mol_type = other DNA
atagagactaagacacgggccaatcctgatcggaccttcgatctagtgctgaaggtaaagtgccacgcatcagagaacgaagatccagtagtgctctggaaattccccgaggattttggagaccaggagattctgcaatcagtgcctaagttctgcttcccatttgacgtcgaacgcgtgtcccagaatcaggtgggtcagcacttcacttttgtcctgactgacatagagtccaagcagagatttggattttgtagactgacaagcggcggcacaatctgcttgtgtatcctgtcatacctgccctggtttgaggtgtactataagctgctaaatacacttgccgactatttggctaaagagctggaaaatgatcttaacgagactctccgatccttatataaccatcctgtgcctaaggccaatacaccagttaatttgtccgttaaccaagagatcttcatagcttgtgaacaggtgttaaaggatcagcctgccctcgtccctcattcttattttattgcacccgacgtgactggtctgcccaccatccctgagtctcgcaacctgacagaatatttcgtggcggttgacgtaaacaacatgctgcaactatatgcgtccatgctacatgaaagacggatcgtgattatttcaagcaagctatcaaccctgaccgcctgcatacacggttctgccgctctgctgtatccaatgtattggcagcatatctacatccccgtactcccgcctcacctcctggattactgctgcgctcctatgccctacttgatcggtatacactcatccctgattgagcgcgttaaaaataagagcctcgaagacgtcgtaatgctgaacgtcgataccaatacgctggaaagccccttctccgatctcaacaacctaccatctgacgttgtgtctgccctcaaaaacaaactgaaaaagcagtccacggctacaggcgatggcgtggcaagagccttcctgcgcgcacaggccgccctgtttgggtcctacagggacgccttgagatataagcctggagaacctattacgttttgcgaggagagcttcgtgaagcatcgctcatcagtgatgaagcagtttctggaaactgctattaatctgcagttatttaagcaattcattgacggcagactggcgaagttgaacgcgggcagggggttctctgacgtgttcgaagaggaaattacatctgggggtttttgcggtggtaaccccaggtcctaccagcagtgggtgcataccgtcaaaaagggaggcgctttattcaatacggcaatgacgaaagctacaccagccgtgaggacagcctacaagttcgccaaaaaccatgccaaactgggcctaaaggaggttaagtccaaactcaagcacaaggagaacgaggaggattacggaacatgtagctcatcagtgcagtataccccagtctataaactacacaacgagaaagggggaaattctgagaagaggaagctggcacaagcccgcttgaagagacctctaaaatctttggatggcgccctctacgacgacgaggatgacgacgacatcgagcgcgctagcaaactttctagcgaggatggagaggaggcatcagcctacctgtacgagtcagacgatagcgttgaaactagagtgaaaacaccctatagtggtgaaatggacctgcttggggaaatactcgacacattgtccacacacagttcagatcagggcaagttagcagctgccaaaagtctggatttttttcgctcaatggacgacatcgactacaagccgacgaacaaaagtaatgccccgagcgagaataatctcgcctttctgtgtggcggctctggagatcaggcagagtggaatctgggacaagacgattctgctctccatggcaagcacttacctccatcacctagaaagcgagtttccagctccgggctgacagacagtcttttcatcctgaaagaggagaatagcaataagcatctcggggcagacaatgtgagcgacccaaccagcggccttgactttcagcttacctctccggaagtgtcccaaacagacaaaggaaaaaccgaaaaacgggagacactcagtcagatctcagacgaccttttgatacccggtctgggcagacatagcagcacttttgtgccttgggagaaggaggggaaggaggctaaagagactagcgaagacatcgggctgcttcacgaggtcgtgtcgctgtgccatatgacgagcgatttccagcagtcgctgaatatcagcgacaagaataccaatggtaaccagacctag

SEQ ID NO: 114384 - DNA, 1248 bp, synthetic construct
  misc_feature 1..1248: note = Description of Artificial Sequence: Synthetic coding sequence
  source 1..1248: mol_type = other DNA
gtgaagcatcgctccagtgtgatgaagcagttcctggagaccgcgatcaatctccagctgtttaaacagttcatagacgggaggttggctaagctgaacgccgggcgcggattttctgacgtgttcgaagaagagataacgtcaggtggattctgtggtggaaatccacggagctaccagcagtgggtccataccgtgaagaagggcggggctttgttcaatactgccatgacaaaggcaactcccgcagtaaggaccgcttataagtttgctaaaaatcacgccaagctcgggctcaaggaggttaagtccaaactgaagcacaaagagaatgaggaggattacggcacctgcagttcttcagtgcagtacacccctgtttacaagctacataatgagaaggggggaaactcggagaagcgaaagctcgctcaggccaggctgaaacgtccattgaaatcactagacggagccctctatgatgacgaagatgatgacgatatcgagagagccagtaaactgtcatcagaggacggagaagaggcttctgcctacttgtatgaatcagacgattctgtggagacacgggtaaagacaccatattccggagagatggacctgctgggcgagatattagatacactaagcacccactcctctgatcagggaaagctggccgccgccaaatctctggacttttttagatctatggatgatatagattacaagccgacgaataagtccaatgccccatctgagaataacctggcttttctgtgcggcggatccggggaccaggctgagtggaacctgggtcaagacgactctgccctgcatggaaagcatctcccacccagcccacgcaagcgcgtctccagctccggcctgacagattctctgtttatattaaaagaggaaaactccaataaacatttaggagcagataatgtgagcgatcctacgagcgggctggactttcagctcacatcccccgaggtctctcagactgacaaggggaagaccgaaaaaagagagactctgagtcaaatctcggacgatctgttgattcccggactgggaagacactcatccactttcgtcccctgggagaaggagggtaaggaggccaaagaaacgagcgaggacattggcctactccacgaagtggtttcattatgccatatgaccagtgacttccaacagtctctgaacatttcagataagaacacaaatggcaatcagacctag

SEQ ID NO: 114385 - DNA, 2406 bp, synthetic construct
  misc_feature 1..2406: note = Description of Artificial Sequence: Synthetic coding sequence
  source 1..2406: mol_type = other DNA
atggagtcccgagccgagggcggtagccctgctgtgttcgactggttctttgaagcagcttgcccagcctctctgcaggaggacccgccaatcctccgccagtttcctcctgatttccgtgaccaggaagcaatgcaaatggtgcccaagttttgctttcctttcgacgtcgagcgggagcccccttcccccgcagtccagcacttcacttttgctttgaccgatctggcagggaatagaagattcggcttctgtagactcagggccgggacgcaaagctgtctctgcatactgagtcatctgccctggtttgaagtgttttataaactgctgaacactgtcggagacttgctggctcaggatcaggtcaccgaggcagaggaactcctgcagaatttgttccagcaaagcttgtccggcccacaggccagtgtcgggctggagcttggaagcggggtcaccgtatcttcaggtcaagggataccacctccgacccgtggcaacagcaaacccctgtcttgcttcgtggcaccggacagcgggcggctccccagcataccagagaaccgaaatcttaccgaactcgtggttgcagtgacggacgaaaatatagtggggctgtttgccgctctgcttgcagaacgccgagtgttgttgacggcaagcaagctgagcactctgactagctgcgtacatgcttcatgtgccctgctataccctatgcggtgggagcacgttcttatccccactctccctccccacttactggattactgttgcgcccctatgccttatctgatcggagtccacgcaagccttgccgaaagagtgcgcgagaaagcccttgaagacgtagtggtacttaacgtcgatgcaaacacactcgagaccacattcaacgatgtccaggctctgcctcctgatgttgtaagtcttctacggttgagactgcggaaagtggcgcttgcacctggggaaggcgtgagtaggctgtttctgaaagcccaggcccttctttttggcggttatcgggacgccttagtttgctcccccggccagccagtgacctttagcgaggaggttttcctagctcagaagcctggagcgccactgcaggcctttcatcggagggccgtgcatctgcaacttttcaagcaattcatcgaggcgaggctggagaaactgaacaaaggtgaggggtttagcgatcagttcgaacaagagatcaccggctgcggggcctcaagcggcgccttacgcagctaccaactgtgggcagataatctgaaaaaggggggtggagccctgttgcactctgtgaaggcaaagacccagcctgccgtgaaaaacatgtatcgttccgctaaatctggactcaaaggggtgcagtccctgctcatgtacaaagatggagacagcgtgcttcagcgggggggctcattgagggctcctgcactgccttcacggtctgaccggttgcaacagaggttaccaataactcaacactttggcaagaacaggcccttaaggccatcacgacgccggcagttggaggaaggtacatctgagcctccaggtgcgggcacgccgccactgagccctgaggacgagggctgcccttgggctgaagaagccctcgactccagtttcctggggtcaggcgaagagctggacctcctttctgaaatcttggactcgctaagtatgggcgctaaaagcgctggatctctccggcccagccaaagtttagactgctgtcacaggggggatctagatagctgttttagcctccccaacataccaaggtggcagcctgacgacaagaagcttcctgagcccgagccccagccactgagcctgcctagcctccagaacgcttcctcactggacgcaacctcctcatctaaagatagccggtctcagttaatcccctccgagagcgaccaggaagtcacctccccaagccaaagctccaccgcctcggccgatcccagtatatggggtgatccaaagcctagcccgctgacagagccactgattttgcacctgactccctctcacaaagcagcggaggattcaactgctcaggagaaccccaccccatggttatcaaccgccccgaccgagccaagccctccagagtccccccagatcctggcaccaacaaaacccaactttgatatcgcctggacgagccaaccgctggacccttcctcagatccatcatcattggaggaccccagggctaggccgcccaaagctctcctggctgagagggcccatctccagccccgggaagaaccaggtgccctcaactcccccgccacccccaccagtaattgtcagaaatcccagccatcgagtagacctcgggttgccgatttgaagaaatgttttgaggggtag

SEQ ID NO: 114386 - DNA, 2274 bp, synthetic construct
  misc_feature 1..2274: note = Description of Artificial Sequence: Synthetic coding sequence
  source 1..2274: mol_type = other DNA
atgcaaatggtgccaaagttctgtttcccattcgatgtggaacgtgaaccaccctcaccagcagtccaacatttcacattcgcacttaccgatctggctggcaatagacgttttgggttctgccgtttgcgcgccggaacccagagctgtctgtgtattctgtctcacctgccgtggttcgaggtcttctataaactcctgaataccgtgggtgatctgctggctcaggaccaggtgacagaagccgaggagctgctacagaatctttttcagcagagcttgagcggtcctcaggcctcggtcggactggagcttggtagcggcgtgactgtcagcagcggccaaggcattccccctccgaccagggggaacagcaaacctctttcttgctttgttgcccccgatagtggccgcctcccgagtatccccgagaacaggaatcttacagaattagtggtggctgtgactgacgagaatatcgtgggcctcttcgccgcactgctggcagagaggcgtgtgctcctcaccgcatcaaagcttagcactctcacatcatgcgttcacgcttcctgcgcgcttctctacccaatgagatgggagcatgtgctcatcccgaccctacccccacacctgctggactactgttgtgctcctatgccttatcttatcggtgtccacgcgtcattggctgagagggttcgggagaaagcactggaggacgtggtggtactaaacgttgatgctaatacactagagacaactttcaatgacgtacaggcactgccaccagacgtcgtgtcccttctgcgtctgaggcttcgcaaggtggcgttagctccaggtgaaggagtgtcaaggctgtttcttaaagcccaggccctccttttcggcgggtatcgtgatgctttggtgtgtagcccgggacagcctgttaccttcagtgaagaagtattcctggcacagaaacccggtgccccactgcaggcattccaccgacgtgccgtgcatctccaactgttcaagcagtttatcgaggctcgactggagaaacttaacaagggagaggggttctctgatcagttcgaacaggagatcaccgggtgtggtgccagcagcggggccctgagaagttaccagctttgggctgacaacttgaaaaaaggtggtggcgctctactgcattctgtcaaagctaagacgcagcccgctgtgaaaaacatgtatcggtctgccaagagcggcctaaaaggagtgcagagcctgttgatgtacaaggacggcgactccgttctgcaaaggggtgggtccctgagggcccccgcactgccctctagatctgatcgcttgcagcaaagactacccatcacgcagcattttggtaagaatcggcccctccggcctagccggaggaggcaactggaggaagggaccagtgagccccccggtgccggtacgcctcccctgtcacctgaagacgagggatgtccctgggccgaggaggccttagacagttcctttctgggctctggtgaagagttggacttgctctcagagattttggacagtctgagcatgggtgctaagtcagcaggttctctccgccccagtcagtctctggactgttgccaccggggggatctggactcttgcttctccctgccaaacataccacgatggcaaccagatgacaagaaacttcctgaaccagagccccaaccattgagcctccctagcctacagaacgccagctcactcgatgctacttcatccagcaaggatagtaggagtcagctgattccttccgagtcagaccaggaggtgacctccccgtctcaaagctctactgccagtgccgatccctccatttggggagaccccaagccgtctccactgacagagccgctcatcctccatctgacaccttcccataaagcagctgaggatagcacggcccaggaaaaccccactccttggttgtctactgctcctacagaaccatcccctcccgagagtccccagatcttagcacctactaagcctaacttcgatatcgcctggacaagccaacccctagatccttcaagtgacccttcctccctcgaggaccctcgagccaggcctcccaaggccctgctggcggaacgcgcccacttgcagccgagagaggagcctggagccctgaatagccctgctacgccaacatccaactgccagaagtcacagccaagctcccgcccgcgagtggcagacctgaagaaatgcttcgaaggatag

SEQ ID NO: 114387 - DNA, 2193 bp, synthetic construct
  misc_feature 1..2193: note = Description of Artificial Sequence: Synthetic coding sequence
  source 1..2193: mol_type = other DNA
atgctgttcaattctgtgctacgacaacctcagctgggcgttctaagaaatggctggtcttctcagtatcccttacagtcattgctgactggttatcagtgcagtggaaacgacgagcacacttcctacggcgagacaggcgtccctgttcctcccttcggctgcacattctccagtgctcccaatatggagcacgtgctggccgtggccaatgaggaggggttcgtgcgcctgtataatactgaatcccaatcgttccgcaaaaagtgcttcaaggaatggatggcccactggaatgctgtgttcgatttggcgtgggtacctggggaactgaaactcgttaccgcagcgggtgatcagacggctaaattttgggatgtgaaagctggcgaactgattggaacatgtaagggacatcagtgttctctcaaatcagtagctttctctaagtttgagaaagctgtcttttgtacaggtggcagagacgggaatatcatggtttgggacaccaggtgtaacaagaaagatggtttctaccgtcaggtgaaccagatcagtggcgctcacaatacctcagacaagcagactccttcaaaacccaaaaaaaagcagaattctaaaggtctggcccctagcgtggacttccagcaatctgtaaccgtcgtactgtttcaggatgaaaacaccctggtgtctgccggagcagtcgacgggattattaaggtatgggacttgcgcaagaactacactgcttacagacaagagcctattgcttccaagtcctttctgtatcccggctcaagtaccaggaaactggggtactccagcctaattttagattccaccgggtccaccctgttcgccaattgcacagatgacaacatttacatgttcaatatgactggcttgaaaacatcaccagtcgccatattcaacgggcatcaaaattctactttttatgtgaagagttccctgtcccctgacgaccaattcttggtatcggggtcttcagacgaagccgcttacatttggaaagtctccacaccatggcaacctccaacagtgctgctggggcactcacaggaggtcacatcggtgtgttggtgcccatcagacttcacaaaaatcgccacatgttcagatgacaatacactcaagatctggcgattgaatcgcggcctcgaggaaaagcctgggggggacaagttgtccacagtgggctgggctagtcagaaaaagaaagaaagtaggcctgggctcgtcacagtgacttccagtcagtcaacacccgcgaaggcccccagggctaagtgtaatcctagtaacagcagtccttcaagtgctgcatgcgccccatcttgcgccggtgatttgcccctcccaagtaatacgcccacattcagtatcaagacgagcccagcaaaggccaggtcccccatcaacagacgcgggtcagtgagctctgtgtcacctaagccaccttctagttttaaaatgtccatcagaaattgggtaacaaggactccatcaagcagccctcccataaccccccccgccagcgagacaaaaattatgagcccccggaaagcattaattcccgttagccagaaaagttcacaggccgaagcatgttccgagagtagaaatagagtgaagcgtcgactggactcaagttgcttggagagcgtgaagcagaagtgtgtgaagtcatgcaactgtgtcacggagctcgatggccaggtcgagaacctccatctggatctttgttgcctggccggcaaccaggaggacctgtcaaaggacagcttaggccccactaagtcatcgaaaatagagggcgctggtacttctatatccgagccgcccagccccattagcccctatgcaagcgagtcatgcggaacattgcctcttcccctcagaccgtgcggagaaggatcagaaatggtgggcaaggagaactcaagcccggagaataagaattggctccttgccatggctgccaaacgtaaagccgaaaacccaagtccacgttccccctcaagtcagactcctaactccagaaggcagtcaggaaagaagctgccctcaccggtgaccatcacccctagctccatgagaaaaatctgtacgtattttcatcgaaagagtcaggaagatttctgcgggcccgagcactccactgagctgtag

SEQ ID NO: 114388 - DNA, 1230 bp, synthetic construct
  misc_feature 1..1230: note = Description of Artificial Sequence: Synthetic coding sequence
  source 1..1230: mol_type = other DNA
atgctatttaatagtgtactgagacagccgcagctgggcgtgttacgcaacggctggtcatcacaatacccactccagtctctgcttactgggtatcagtgttccggcaatgacgaacacacctcatacggagagacaggcgttccggtgcccccctttgggtgtacatttagctcagatgacaacaccctgaagatctggcggctcaatcgcggtctggaggagaagccaggaggcgataagttgagcaccgttggttgggcgagtcagaaaaagaaagaatccagaccgggccttgtcacggtgacttcttctcagtctaccccagcaaaggccccacgcgcgaaatgcaacccgagcaatagctccccctcatccgccgcttgtgcccctagttgtgccggtgatctcccgcttccctctaatactccgacctttagtattaaaacgtcaccggccaaggcccgttctcctattaaccgccgagggtccgtcagcagtgtgtcacctaaaccaccctcctcgttcaaaatgtcgatcagaaactgggtgacacgcaccccttcctcctctccacccattaccccccctgctagcgagaccaagataatgtcacccaggaaggccttaatccctgtttcacagaagagttcccaagccgaggcttgtagtgaatccaggaacagggtgaagcgccgactggatagtagctgcctggagagtgtgaagcagaagtgtgtgaaatcatgtaactgcgtgacagagcttgacggtcaggtagagaatctgcacctggacctctgttgtctcgccggcaatcaagaggaccttagtaaggactcgctgggcccaacaaagtcatcaaagatagaaggcgcaggaacctcaatttccgagcctcctagccccatttcgccttacgcctccgaatcttgcggtaccttgccgctccctctccggccgtgcggggaaggatctgagatggtgggcaaggagaacagtagtcccgaaaacaagaactggcttctggccatggccgccaaaagaaaagctgagaaccccagtccccgctccccttcttcgcagacaccgaactctcgacgccagtccggcaagaagcttccaagccctgtgaccattactccaagctccatgagaaaaatctgcacatacttccaccgcaaaagccaggaagacttttgcggccccgagcattccacagagctgtag

SEQ ID NO: 114389 - DNA, 2067 bp, synthetic construct
  misc_feature 1..2067: note = Description of Artificial Sequence: Synthetic coding sequence
  source 1..2067: mol_type = other DNA
atgctcttcaattccgtgctcagacagcctcagctcggagtcttgcggaatgctcccaacatggaacatgtgcttgccgtggcaaatgaagagggattcgtgaggttatataatacagaatcacagtccttcagaaagaagtgttttaaagaatggatggcccactggaacgctgtatttgacctggcatgggttcctggtgaattaaagctggtcaccgcagctggcgatcagaccgcaaagttctgggacgtgaaggcaggagaactcattgggacgtgcaaggggcaccagtgcagcctgaaaagcgtggctttcagcaaattcgaaaaagctgttttttgcaccggcggccgcgatgggaacatcatggtgtgggataccagatgcaacaagaaggatggattctaccggcaggtgaatcagatttcgggtgcacataatacctccgataaacaaaccccgtctaaacctaaaaagaagcagaattctaagggccttgcccccagtgtcgattttcagcaaagcgtgacggtcgtactcttccaggacgagaatacgctggtgtctgcgggcgctgtagacgggataatcaaggtctgggacctacgcaagaactacacagcgtatcggcaggaacctatcgcttccaagagctttctctatccaggaagctcgacccgaaaactggggtattcttccctgatactggactcgactggctccaccctcttcgccaactgcacagacgataatatctatatgttcaatatgacaggtctgaaaacctctcccgtcgccatctttaatggccaccagaacagtaccttttacgtaaagagcagcctcagccctgacgaccagtttctggtgtcgggaagtagcgacgaggctgcctacatttggaaagtaagtaccccatggcaaccccctacggtcctgttggggcactcccaggaggtaacttcggtttgttggtgtcccagtgactttacgaagatcgccacttgtagtgatgacaacactcttaaaatttggcgcctgaatcgcggacttgaagagaaacctggcggtgacaagctctccacggtcggctgggcatcacaaaaaaaaaaggaatcccgtccagggctggttactgtgacatcttctcagagtacccccgccaaggcccctcgagctaaatgtaacccatcgaacagcagcccttcatctgccgcatgcgccccctcttgtgccggcgacctcccacttccatctaatactcccactttctccataaagacttctcccgctaaagctcggtcccctatcaacaggcgcggatcagtcagcagcgtgtctcccaaaccaccttcaagctttaaaatgagcatccgtaactgggtgactaggaccccttcatcgagcccccccatcaccccccctgcctccgagacgaagataatgagtcctagaaaggccttaatccccgttagtcaaaagtctagccaggccgaggcttgctctgaatctcgaaatagagtgaaacgccgtcttgactccagctgtcttgaaagcgtcaagcaaaagtgtgttaagtcatgcaactgtgtcactgagcttgacggtcaagttgaaaacctgcatctggacctctgctgcctggctgggaaccaagaagacctgtcaaaggactcactgggcccgactaagtcatctaagattgagggcgccggtacatcaatctccgagccaccatcgccaattagcccatacgccagtgaatcctgcggcactctgcccctgccactgagaccttgtggggagggaagcgagatggtgggtaaggaaaactcatccccagagaacaagaattggctgctggctatggctgcaaagcgtaaagccgagaatccttctcccagaagcccatcgtcacagacgccaaactcacggcgacagtctggaaaaaagctgccatcaccagtgacaattactccctcaagcatgaggaaaatctgtacatattttcataggaagagtcaagaggatttttgtggacctgagcactcgaccgagctctag

SEQ ID NO: 114390 - DNA, 1494 bp, synthetic construct
  misc_feature 1..1494: note = Description of Artificial Sequence: Synthetic coding sequence
  source 1..1494: mol_type = other DNA
atgaagataagcatcctgctaatgttcctgtggggcctgagttgcgcactcccggttacacgatatcagaataacgagtccgaagactccgaggagtggaaaggccacctcgctcaggcccccacaccccctctggccaacgaagacccaagtgatagcacccaaagtgaggaagggcttggatcagatgatcatcagtacatatatagattggccggcgggtttagccgttcaacaggaaaggggggtgatgataaggacgacgatgaagatgatagcggagacgacacctttggggacgatgattcagggccagggcccaaggaccgccaggaaggcggcaactcccgcctcggttcggatgaggattcagacgatactatacaagccagtgaagagtcagcacctcagggccaggactcggcgcaggatacgacgtccgaatcacgcgagctagataacgaagatcgcgtggatagcaaacccgaggggggggattcaacccaggagtcagagtccgaagaacattgggttgggggcggaagcgacggcgaaagctcccacggagacggatcagaactggatgatgaaggtatgcagtcggacgaccctgaatctattcgaagtgagagagggaacagccgcatgaacagtgcagggatgaagagtaaggagtctggagagaactccgagcaggctaacacacaagatagcggaggcagccaactgcttgagcacccttcacgcaagatcttcaggaaatcccgtatctccgaggaggatgatcggagcgaactggatgacaacaataccatggaagaggtcaagtccgacagcactgaaaattcaaactcaagggacaccggactctctcagccccgccgagactcaaaaggtgacagtcaggaggattcaaaggagaatctctcgcaagaggaaagccagaatgtggacggaccatcctccgagtcctcccaggaagccaacttgtctagccaggagaatagctccgagtcccaggaggaggtggtttctgagagcaggggagataatcccgacccaacaaccagttacgtggaggatcaggaggattcagacagttcagaggaggattctagccatacactgagtcactccaagagcgaatccagggaggaacaggccgattcggagtcctcagaaagcctgaacttctccgaagagagtccagagagtcccgaggatgaaaactcaagcagccaagaaggattgcagtcacatagcagctctgccgaatcacagtcggaggaatctcacagcgaggaagacgacagcgacagtcaggattcatctcgctcaaaggaggactctaattctacagagagtaaatccagttcagaggaagatgggcagctgaagaacattgagattgaaagccggaaactcaccgtggacgcttaccacaacaagcctattggtgatcaggatgacaatgactgccaggacggatactag

SEQ ID NO: 114391 - DNA, 1542 bp, synthetic construct
  misc_feature 1..1542: note = Description of Artificial Sequence: Synthetic coding sequence
  source 1..1542: mol_type = other DNA
atgaagatttccatcttgttgatgttcttatggggactgagttgcgctctgcctgtgactcgctaccagaataatgaatcagaggattccgaggaatggaagggccatctggctcaggcaccaacaccccctcttgagtcctcagagtcttcagaagggagcaaagtgagctctgaggaacaggctaacgaggacccctccgacagcactcaatctgaagagggacttggaagcgatgaccaccagtacatctatcggctagccggcgggttctctagaagcacagggaaggggggagacgacaaggatgatgatgaagatgattctggcgatgacacattcggagatgacgacagtggaccaggacccaaggatagacaggagggtggaaactcaagactgggaagcgatgaggacagtgacgacaccatacaagcaagtgaggagtccgccccacagggccaggactccgctcaagacactacctccgagagccgagaattggacaacgaagatagagtcgacagtaagcctgagggaggcgatagtacacaggaaagcgaatcagaggaacactgggtgggcggggggtcagatggagagtcctctcatggagacggcagtgagctggacgatgagggcatgcagtccgacgaccctgagagtatccgatctgaacgcggtaactccagaatgaacagtgccggaatgaagtccaaggaatcgggagagaattctgaacaagctaatacacaggatagtggcgggtcccaactgctggagcatccatcgcgaaagatcttccggaagtctagaatctctgaggaggatgatcggtccgagctggatgataacaatacaatggaggaggtgaagtccgactccacagagaacagtaactctagggacactggcttgtcccagcctcggagagattcaaagggagacagtcaggaggacagcaaggagaatttgtcacaggaagaaagtcagaacgtcgacgggcctagcagtgagtcaagccaggaagccaatttgagttcccaggaaaacagctctgaatcccaagaagaagtggtgtcagaatcccggggggacaatccggacccaactacttcctacgttgaggatcaggaagattcagatagctcagaagaagactcctctcacacattatctcactcgaagagtgaaagccgcgaggagcaggccgattccgagtctagcgaatctcttaacttctcagaggagtctcctgagtctcccgaagatgagaattcaagttctcaggaagggctgcagtcccactcctccagcgcagaatctcaatccgaggaatcgcactctgaggaggacgatagtgacagccaggattcttcacgcagcaaggaagacagtaacagtaccgagtctaagtcatcgagtgaggaggatgggcagctgaaaaatattgaaatcgaatctcggaagctgaccgttgacgcatatcacaacaagccaatcggcgaccaggatgataacgactgccaagacggttactag

SEQ ID NO: 114392 - DNA, 3906 bp, synthetic construct
  misc_feature 1..3906: note = Description of Artificial Sequence: Synthetic coding sequence
  source 1..3906: mol_type = other DNA
atgaagattataacctacttctgtatttgggcggtggcctgggccatcccagtgcctcagtctaaacctctggaacgccacgttgagaaaagtatgaatttgcacctactggcaaggagtaatgtatctgtccaagatgagctgaacgcatcagggacaatcaaagagtctggagtgttagtgcacgaaggggaccggggccggcaggagaatacccaggacggccacaagggcgagggtaatgggagtaagtgggccgaggttggcggaaagagtttttcaacctactcaacgttagctaatgaggagggaaatatcgagggctggaacggggatacgggtaaggcggaaacttatggtcacgacggcatccacggcaaggaggagaatatcacggctaacggtattcaaggccaggttagtatcatcgacaacgcgggcgccacgaacaggagcaataccaacggcaatacagacaagaacactcagaacggcgacgtcggggacgctggacacaatgaggacgtggcagttgtgcaggaagacggcccccaagtggccggctctaacaactctactgataacgaagatgagatcattgagaactcatgtcgtaacgaggggaacacatccgagataaccccccagatcaacagtaaaagaaacggtacaaaggaagccgaagtgacccccggaacaggggaggacgcggggctcgacaactctgacgggtccccatccggcaacggcgccgatgaggacgaggatgagggcagcggtgatgatgaagatgaggaggcaggcaatggcaaagactccagtaacaatagcaagggtcaagagggccaggaccatggcaaagaggacgaccatgattcatctattgggcagaactctgattcgaaggagtactatgatccggaagggaaagaagacccccataatgaggttgacggagacaaaacaagcaagtcggaggagaattctgcaggcattccagaggacaacggctcgcagcggatcgaggacacacaaaagctcaaccaccgagaatctaaacgggttgagaaccggataacaaaggagtctgaaactcacgccgtgggtaaaagccaggacaaaggcatcgagatcaaggggccttcctccggcaataggaacattacaaaggaggtgggtaagggaaacgaaggaaaggaggacaagggccaacatggtatgatcctgggcaaagggaacgtgaagacacagggcgaggtggtgaatatcgagggcccagggcagaaaagtgagcccggcaataaagttggacacagcaacacaggttccgatagtaatagcgatggatacgatagttacgatttcgacgataagtctatgcaaggggacgaccccaatagttctgatgagagtaatggcaatgacgacgccaacagcgagtccgacaacaactcttctagccgcggggacgccagctacaactccgatgaaagcaaagacaacggtaatggttctgatagcaagggcgccgaggatgatgactctgactcaacctcggacacaaacaatagcgactccaatggaaatggcaacaacgggaatgatgacaacgataagtcagactccgggaagggcaaatccgatagcagtgatagtgactctagcgactcttcgaactcttcagattcatcagatagcagtgattctgactcatccgactctaactctagcagcgactctgacagctccgacagcgattctagtgactcttctgacagcgattccagcgactcttcaaactcctcagactccagtgacagttcagatagcagtgattcaagtgactctagcgattcaagcgacagcaaaagcgactcctccaagagtgagagcgatagttcagactcggactctaagagtgactcaagcgattctaattcttccgactcctcagacaattccgactcgtccgattcatcaaattccagcaactcatctgatagtagcgactcatcagactctagcgattcaagtagtagttcggattcctcaaatagctctgatagctccgactccagcgactcctcaaacagcagcgaaagtagtgacagtagcgacagctctgactccgacagcagtgatagcagcgattcctctaacagtaatagctccgattcagatagtagcaattcctctgatagctcggacagcagtaattcatctgactcatcagacagcagtgactcttccaactctagtgacagttctgactcctcagatagctcaaacagttccgacagctccgacagctccgattccagtgactcctctgatagcagcaacagttctgattccaacgactcctctaacagttccgatagctccgacagttccaattcttccgatagttcaaacagcagcgacagttctgactctagtgatagcagcgattctgatagttctaacagctccgatagctccaattcctctgattcctctgacagttctaactcgtcggactcaagtgactcctctgactcatctgacgggagcgattctgattcctccaacaggtcagacagtagtaactctagtgatagtagtgatagctctgactccagcaactcttctgactcttccgactcttctgacagcaacgagagcagcaactctagcgacagctctgactcatccaacagcagtgattctgacagttcggatagctccaactcttccgattccagtgatagtagcaactcctctgactcctcggagtcttctaattcatcggataattctaatagcagcgactcctcgaacagttctgactcttctgacagctccgattcttctaacagcagtgactctagtaattcttccgactctagtaatagcagtgactcttccgactccaacagttctgactcttcagacagttccaactccagtgactcctctgactcgtcggatagcagtgactcatctgacagctctgatagttcaaatagtagcgactccagtgatagctctgattccagcgattcatccaatagcagcgactcctctaactcttccgactcctctaactccagtgactcatccgattcctccgactcgtccgatagttcagactcctcagactccagcgactcctccgacagcagcaattcttccgatagtagcgactcttcagacagctctgactcctcagacagtagtgacagcagcgattcctctgactctagtgaaagtagcgattcatccgactcctctaattcctccgactcttccgacagcagcgacagtagcgacagcagtgattcttctgactcatctgacagcagtgattcatccgattcgtccaattcctctgactctagtgattctagcgactcttccgactcatctgattcaagtaattcctctgactcatctgacagtagcgagtcctccgactcttctgattcatccgacagcagtgattctagtgattcaagtgattccagcgattcctccgatagctcggactcctctaatagtagtgattcttcagatagttctgactctagcgactcttctgactccagcgacagctctgactcaagcgattcctcagatagctccgactcatccgactcttctgactcctccgacagctcagactcctctgactcgtcagactcatctgacagcaatgaatctagcgattcttccgacagctccgacagttcagacagcagcaattcctccgactcctctgactcttccgattccagcgacagcacctccgattccaatgacgagagcgacagccaatcaaaatctgggaatggaaataataacggttccgattcagacagtgattctgagggctcggactctaaccatagcaccagcgacgactag

SEQ ID NO: 114393 - DNA, 3906 bp, synthetic construct
  misc_feature 1..3906: note = Description of Artificial Sequence: Synthetic coding sequence
  source 1..3906: mol_type = other DNA
atgaaaatcatcacatacttctgtatctgggctgtggcctgggcaatccccgtgccccaatcaaaacctctggagaggcatgttgagaaaagcatgaacctgcacctgcttgctaggagtaatgtgtccgtgcaggacgagctcaatgcctctggaacaatcaaagagagcggcgtgcttgtgcacgagggggacaggggcagacaggagaacactcaggatggccacaagggcgagggcaatggcagcaaatgggcggaggtgggtggtaaatcattcagtacttacagcactctcgcaaatgaggaagggaacattgaaggctggaatggcgataccggcaaagcagaaacttatggtcacgacggcatccacggaaaggaagagaatattaccgccaatgggatccagggccaggttagtatcattgacaacgctggcgccactaatcggtctaacacaaacggcaataccgataaaaacacccagaatggcgacgtcggagacgccgggcataacgaagatgtggccgtggtccaggaagatggtccccaggtagcaggcagtaacaattctaccgataatgaggacgaaattattgagaactcctgccgcaatgagggaaatacttctgagatcacccctcagatcaattccaaaaggaatgggaccaaagaggctgaggttacccccgggactggagaggacgcaggcctggacaattccgatggaagtcccagcggtaacggcgccgacgaagacgaagacgagggctctggagacgacgaggacgaggaggcggggaacggaaaggatagcagcaataacagtaagggccaagaagggcaggatcatggtaaggaagatgaccacgatagtagcataggacagaacagcgatagtaaagaatactacgatcctgaagggaaggaggatccacacaacgaggtggatggcgacaaaactagtaagagtgaggagaattcagcaggcattcccgaggacaacgggagccagcgcatcgaagatacacaaaagctaaatcatagggagtcaaagagagtggaaaaccgcattactaaggaatctgaaacacacgcagtggggaaaagtcaggataaaggaatcgaaattaaaggtccaagcagcgggaaccgcaacatcacgaaagaggtgggtaagggaaacgagggcaaggaggacaagggtcagcacggaatgattctcggaaagggaaatgtaaagacacagggggaggtggtgaatatcgaaggacccggacagaagagtgagcctgggaacaaggttggtcacagcaatactggctctgattctaactctgatggatacgatagctatgactttgacgataagagtatgcagggggatgacccaaattcttctgacgagagcaacggcaacgatgatgcaaattctgaaagcgataacaacagcagctcacggggtgatgccagttataactccgacgagtcaaaggacaacgggaacggttccgatagcaaaggagcagaagacgatgattctgattccaccagcgatacgaataacagtgacagcaatggcaacggaaataatggtaacgatgacaacgataagtccgattcgggaaaagggaaatctgacagctctgattcggactcctcagacagtagcaacagcagtgacagttcagacagcagtgattcagacagcagcgacagtaattcctcctccgacagtgactcctctgattctgatagctccgattcttctgattcagacagctctgatagctctaacagcagtgactccagcgattcttccgacagctctgactcatccgatagtagtgattcctcagactccaagagcgactccagcaagtccgagtcagacagtagcgactctgatagcaagtctgactctagcgacagtaactctagcgattcctctgacaactcagactccagcgactcaagtaatagcagtaattccagcgactcgtctgatagcagtgattcatccgactcttcgtcctcgtcagactccagtaactcctcagatagcagtgattccagcgattcgtccaacagctcagagtccagcgacagtagtgattcctctgactccgacagcagtgatagttctgactcgagcaacagtaactcatccgattctgatagctcaaattcttccgatagtagcgattcctcaaactcatcagactcatcagactcctccgattcctccaatagctctgattccagtgactcaagcgattcctctaattcttcagactcatctgattcaagtgactcgagtgacagctctgatagctcaaacagttcagattccaacgattcatcaaacagctcagattcttccgactcaagcaacagcagcgacagcagcaattcctctgactcatccgactcttccgactcttccgactcagactccagcaacagttccgactcgtccaactcgtcagactcatcagacagtagtaactctagcgactcgtctgatagctcagactcctcagatggctccgactcggacagcagcaatcggtcagattcatccaactctagcgactcttccgacagtagcgacagttccaattcctcagactctagcgactcttcagacagcaatgaatcaagcaatagctctgattcgtctgatagttctaactcttccgacagcgattcaagtgacagctccaattcttctgattcttcagactcatccaattcaagtgactcttcagaatcgagcaactcatccgataattcaaatagcagcgattcaagcaactcctcagacagctccgacagtagcgatagtagcaactcatctgacagcagcaattcttcagattcatccaacagctctgattcatcagacagcaactcttcagactcaagtgactcgtcaaatagtagtgatagctctgatagcagcgactcctccgattcgtctgactcctcagatagctcaaattcctccgatagctctgattcctccgacagctcagattcctctaacagctctgacagttcaaactcatctgatagcagcaacagctcagacagctccgatagttccgattctagcgatagttccgactcgagtgactctagtgattccagtgactcttccaactcctcagatagtagtgactctagtgactcttcagatagctcggactcctccgacagctctgatagttccgacagcagtgagagtagcgattcctctgatagttccaatagttccgactctagcgattcctctgactccagcgactcctcagactcatctgactctagtgacagcagcgacagcagcgatagcagcaactctagcgactccagcgactcatctgactcctcggattcctccgattccagcaattcttccgactccagtgactcatccgagtcatctgatagcagcgactccagcgactcctcagactctagcgattcctccgactcttccgattcctccgacagctcagattcttcaaacagctcggacagctcggattcaagcgattcttcagatagcagcgatagttcagattcatccgacagctcagatagcagcgacagcagtgactccagtgactcctcggactccagtgactcctccgacagctcagacagtagtgacagcagcgacagcaatgaaagctccgactctagcgacagttctgatagttctgactcttctaatagcagcgacagtagtgattcatctgattcctctgactccacaagtgattcgaacgatgaatccgacagccagtctaaatcaggcaatggtaacaacaacggaagcgacagtgactcagatagtgaaggttcagattccaatcacagtacctccgacgattag

SEQ ID NO: 114394 - DNA, 783 bp, synthetic construct
  misc_feature 1..783: note = Description of Artificial Sequence: Synthetic coding sequence
  source 1..783: mol_type = other DNA
atggcaacaccaccaaagagaagctgtccaagtttttctgcctccagcgaaggaacccgcataaagaagatctccatcgagggcaatatcgccgccgggaaaagcaccttcgtcaatatcctgaagcagctgtgcgaggattgggaggtggtgccggaacccgtggctagatggtgtaacgttcagagcacacaggacgaattcgaggaactgaccatgtctcagaaaaacgggggcaacgtgctgcagatgatgtacgagaagcccgagcgctggtcattcaccttccaaacttacgcttgcctctctcgcattagagcacagctggctagtctgaatggcaagttgaaagacgcagagaagcccgtcttgtttttcgagcgcagtgtgtactctgataggtacatcttcgcttccaacctatatgagagtgaatgcatgaatgagactgaatggaccatttaccaggactggcacgactggatgaacaatcagtttggacagagtttggaattggatggcattatctacctccaggccactccggagacctgtctgcatcggatctacctcagaggtcggaatgaagaacaaggaattccgctcgagtacctggaaaagctccactacaaacacgaatcctggctgctgcatcgcaccctaaagactaatttcgattacctgcaggaagtgcctattctgaccctggatgtcaacgaggacttcaaagataaatacgaatcactggtggagaaagtgaaggagtttcttagcactctgtag

SEQ ID NO: 114395 - DNA, 48 bp, synthetic construct
  misc_feature 1..48: note = Description of Artificial Sequence: Synthetic coding sequence
  source 1..48: mol_type = other DNA
atggccacaccgccaaagcgatcctgtccttccttttctgcgtcttag

SEQ ID NO: 114396 - DNA, 834 bp, synthetic construct
  misc_feature 1..834: note = Description of Artificial Sequence: Synthetic coding sequence
  source 1..834: mol_type = other DNA
atggccgccggccgcctgtttttaagtcgcctccgcgcaccctttagtagcatggccaagagtccccttgaaggggtatcatcttcccgcggcctccacgcgggacgcggtcctagaagactctcgatcgagggcaacattgccgtgggtaagagcacgttcgtgaaactactaaccaaaacctaccccgaatggcacgttgctaccgaaccggtcgccacctggcaaaacatccaggctgctggcacccaaaaagcctgcacggctcagtcccttggcaatttactagacatgatgtatcgcgagccagcccggtggtcttataccttccagacctttagttttctgagccgtttgaaggtgcaactggagccctttccagagaaactgctgcaggcccggaagcccgtgcagatttttgagcgcagcgtatacagtgacaggtacatttttgccaagaaccttttcgagaacggaagtctttccgacattgaatggcatatttatcaggactggcacagctttctgctgtgggaatttgcatcaagaatcactctacacggctttatctacctccaagcctctccgcaggtatgtctgaaaaggctataccaacgggcacgcgaggaagagaagggaattgagctggcgtatctggaacagttgcacggacagcatgaagcctggcttatccataaaacaacaaaactccacttcgaggcattgatgaacatccccgtactggtcttggacgtgaacgatgacttctccgaggaggtcaccaagcaagaagatctgatgcgggaagtaaatacgtttgtgaagaatctttag

SEQ ID NO: 114397 - DNA, 720 bp, synthetic construct
  misc_feature 1..720: note = Description of Artificial Sequence: Synthetic coding sequence
  source 1..720: mol_type = other DNA
atggccgctggaagactgttcctgtccagactgcgcgctcccttcagctctatggctaagtcacccctggaaggtgttagcagttctaggggcctgcacgcaggtcgcggaccgcggagactgtccatcgagggaaacatcgcatgcactgcacagagccttggcaatctgttagatatgatgtatagggaacctgcacggtggtcatatacctttcagacattttcattcctcagtcggctgaaggtgcagctggaaccatttccagagaagctgcttcaagccagaaaacctgttcagatattcgagagatcggtttactcagataggtacatcttcgcaaaaaatctctttgagaacggcagtctgagcgacatagagtggcatatctatcaggactggcatagctttttactgtgggaattcgcttcaaggattaccttacatggtttcatctacctgcaggccagcccacaggtatgtctcaaacgcctgtatcagcgagccagagaagaagagaaagggatcgagcttgcttacctcgaacaactccacggtcagcatgaggcctggctcattcacaagaccactaaactccactttgaagctctgatgaatataccagtgctcgttcttgatgtgaatgacgacttttccgaggaagtgacgaagcaggaagaccttatgagagaagtcaatacatttgtaaaaaacttgtag

SEQ ID NO: 114398 - DNA, 570 bp, synthetic construct
  misc_feature 1..570: note = Description of Artificial Sequence: Synthetic coding sequence
  source 1..570: mol_type = other DNA
atggctgcgggcagactattcctgtccagattaagggccccctttagtagcatggccaagagccctctggagggtgttagttcgtctaggggcctgcacgctggaagaggtcctcgccggctaagcatcgagggaaacattgctgtgggaaagagcactttcgtgaaattgctgaccaaaacttaccctgaatggcacgtggctaccgagccagtcgctacctggcaaaacatacaggcagcaggcacccagaaagcctgcacagctcagtcactcgggaaccttctggatatgatgtatagagagccagcccgctggtcctacacctttcagaccttcagtttcctgagccggttaaaagtgcaattggagcctttcccggaaaagcttctgcaggcacgtaaacccgtgcagatctttgagcgttctgtgtactccgatcgcctgcactttgaggctctcatgaacatccccgttctggtgctcgacgtgaacgatgatttcagcgaggaggttacaaagcaggaggacctcatgcgggaggtgaacacgttcgttaaaaacttatag

SEQ ID NO: 114399 - DNA, 768 bp, synthetic construct
  misc_feature 1..768: note = Description of Artificial Sequence: Synthetic coding sequence
  source 1..768: mol_type = other DNA
atggccgccgggaggctgttcctcagtcggctgcgagctccattcagttctatggccaagtcgcctctcgagggggttagctcaagccgcggtctacacgcgggcagagggccgagaaggctcagtatagaaggcaacattgggaatatactgaagcagatccggatgcgcgcccctatccaggagacagcttgtaccgcacagagcctcggaaacctgcttgacatgatgtacagggagcctgctcgctggtcttacacattccaaacattcagttttctctctcgcctgaaggtgcaacttgaacctttcccggagaaactgttgcaggctcggaagcctgtccagattttcgaacggagtgtttattctgataggtatatttttgcaaaaaatctttttgaaaatggaagcctgtcggacatagaatggcacatataccaggactggcattcattcctcctgtgggaattcgctagccggatcacactccatgggttcatctaccttcaggcgagcccgcaggtgtgcctgaagcgcctgtaccaaagggccagagaggaggaaaaggggattgagctggcatacttagagcagctgcacggccaacacgaagcctggctgattcataaaacaaccaagctccatttcgaagctctgatgaatatccccgttctcgtcttagatgtcaacgacgatttctctgaagaggtcacaaaacaagaggatctgatgagagaggtaaacaccttcgtgaagaatttatag

SEQ ID NO: 114400 - DNA, 1416 bp, synthetic construct
  misc_feature 1..1416: note = Description of Artificial Sequence: Synthetic coding sequence
  source 1..1416: mol_type = other DNA
atggccaaaaaggtcgcggtcatcggcgccggcgtttccggcttgatttcactgaagtgttgtgtggacgagggattggaacccacatgcttcgaacgtactgaagacatcggaggcgtttggcggttcaaggagaacgtggaagacgggagagcatccatttaccagagcgtcgtgactaacacctctaaggaaatgagctgtttcagcgatttccctatgccagaagacttccctaacttcttacacaacagtaaactgctggagtatttccgcattttcgctaagaagtttgacctgctgaagtatatccagttccaaaccacagtcctttctgtacgcaagtgccctgactttagctcatctggacaatggaaagtagttacccagagtaatgggaaggagcagtcagccgttttcgacgcagtgatggtgtgcagtggacaccatattcttcctcacataccactgaagtccttccctgggatggagcggtttaagggccagtacttccacagccggcaatataagcatccagatgggttcgagggtaaacggattctcgttatcggcatgggcaattctggctccgacatcgccgtggagctgagcaagaatgcagctcaagtgttcattagcaccagacacggcacctgggttatgtcaaggattagtgaggatgggtacccctgggattccgttttccacacccgattcaggagcatgctgcggaacgtccttcccagaacggcggttaagtggatgattgagcaacagatgaacagatggttcaatcacgaaaactatgggcttgaacctcagaataagtatatcatgaaagagccagtgcttaatgacgacgttccatcccggctcctgtgcggagcaatcaaggtgaaaagcacagttaaagagttgaccgagactagcgcgatattcgaggacgggaccgtggaggagaacattgatgtgatcatattcgccactggatattctttctctttcccctttttggaagatagtttagtgaaggtcgaaaataacatggtttctctgtacaagtacatcttcccagctcacttagacaaatcaacactggcctgtataggcctaattcaaccactggggagtatctttccaaccgctgagctccaagccagatgggtcactcgggtgttcaaaggcctctgtagtctgccctccgagcgcaccatgatgatggatataattaaaagaaacgaaaaacggattgacctattcggggaatcacagtcgcagacacttcagaccaattacgtcgattatctggacgaactcgcactcgagatcggagcgaagcccgatttctgcagcctgttgtttaaagaccctaagttagccgtaaggctgtactttggtccatgtaacagctattag

SEQ ID NO: 114401 - DNA, 969 bp, synthetic construct
  misc_feature 1..969: note = Description of Artificial Sequence: Synthetic coding sequence
  source 1..969: mol_type = other DNA
atggagggcagtttggaaagagaggcaccagccggagcacttgccgccgtgttaaagcactcttcaacccttccccctgagagtacacaagtcagaggctatgacttcaataggggtgttaactatcgagcactgctagaggccttcggcactaccggttttcaagccacgaattttggccgggcagtacagcaagtaaatgctatgatagagaagaagctggaaccgctctcccaagatgaggaccaacacgctgaccttacgcaaagccgccggcccctcacttcgtgcaccatcttcctggggtatacttctaacctcatttcaagcggaattagggagacgataaggtatttggttcagcacaatatggtggacgttcttgttactactgcaggcggggtggaagaggacctcatcaagtgcttggccccgacctatctgggggagttctccctgcgcggaaaggaactgcgcgagaatgggattaatcgcatcgggaatctcctggttccaaatgaaaactactgcaagttcgaggactggctgatgcccatcctggatcagatggtcatggaacagaataccgagggcgtgaagtggacaccctcaaagatgatcgcgcgactgggtaaggaaatcaacaaccctgagagcgtatactactgggctcaaaagaaccacattcccgtcttctctcctgccctaactgacggttccttaggagacatgattttttttcacagttacaagaacccgggcctggtgctcgatattgtggaggctcaggaatttgatgggtctgacagcggggcccgcccagatgaggccgtgtcctgggggaaaatccgcgttgatgcccagccagtgaaggtgtacgctgacgcctcccttgttttcccattgctggtggcagaaacatttgctcagaagatggatgccttcatgcatgaaaagaatgaggattag

SEQ ID NO: 114402 - DNA, 984 bp, synthetic construct
  misc_feature 1..984: note = Description of Artificial Sequence: Synthetic coding sequence
  source 1..984: mol_type = other DNA
atgcctattatcccggcattctgggaggccgaagccggcggctcaagggaagaagagttcgaaacaagtctggcaaacatgattgaaaaaaaactggaaccgcttagccaggatgaggatcagcacgccgacctgacacaatcaagaagacccctcaccagctgcaccattttccttgggtacactagcaatctcatctcttcaggcattcgtgaaacaatccgatacctagttcagcataatatggtggatgtactggtgacaaccgctggaggcgtggaggaggatctgatcaagtgcctcgcccctacctacctgggggaattctccctccgcggtaaggaattaagggaaaatggaattaaccgaatcgggaatctgctcgtccctaacgaaaattattgcaaatttgaagattggcttatgccgattttagaccagatggtgatggaacagaatacagaaggcgtgaagtggacccccagcaagatgattgctcgcttgggcaaggagattaacaaccccgagagtgtttactactgggcccaaaagaatcacatacctgtattctcacctgcactcaccgatggtagcttaggagacatgatcttttttcatagctacaaaaatccggggctggtactcgacatcgtggaggaccttcgcctcattaacacccaggcaatctttgctaagtgcaccggcatgatcatcctcgggggcggtgttgtgaaacaccacattgccaatgccaatctgatgagaaatggcgctgattatgcagtgtacatcaataccgcccaggaattcgatgggtccgattccggcgcaaggcccgatgaggcagtttcatggggtaaaatcagagtggacgcgcagcctgtaaaagtctacgccgatgccagccttgtttttcctctgttagtggctgaaacgttcgcccagaagatggacgcctttatgcacgagaaaaatgaggactag

SEQ ID NO: 114403 - DNA, 462 bp, synthetic construct
  misc_feature 1..462: note = Description of Artificial Sequence: Synthetic coding sequence
  source 1..462: mol_type = other DNA
atgcctcagctgtgcacccgggcgagctctagcgagattccaggaagactcctcacaacacttcagtcagcccagggccagaaattcctccacttcgctaagagcgatagctttctcgacgacatatttgccgcttggatggcccagcgcctcaagacccacctcctaactgaaacgtggcagcgcaagagacaggagctcccgagtaactgctctcttccgtaccacgtttacaatatcaaagcaatcaaactaagcagacactcttacttttccagctaccaagaccacgcgaagtggtgtatcagtcagaagggtaccaaaaaccgatggacctgtatcggcgatctcaacaggtctccacatcaggcttttagatcaggggggtttatatgcacccaaaattggcagatctatcaggccttccaaggtcttgtgctatactatgagtcttgcaagtag

SEQ ID NO: 114404 - DNA, 1086 bp, synthetic construct
  misc_feature 1..1086: note = Description of Artificial Sequence: Synthetic coding sequence
  source 1..1086: mol_type = other DNA
atgaaacagaaaatgatggccagattgttgcgaacatctttcgccctcctttttctcggtctcttcggcgtgcttggggctgcaacaatcagctgccgaaacgaggaaggcaaagccgtggattggtttaccttctacaaactcccgaaaagacagaataaggaaagtggtgaaaccggccttgagtacttatacctggacagtaccacccgcagttggagaaagagtgaacaactgatgaatgacaccaagagtgtgctcggacgcaccttgcagcaactgtatgaggcatacgccagcaagtctaacaacacagcctatttgatttacaacgatggggtgccaaagcctgtaaattattctcggaagtatggccacactaagggcctgctgctctggaatagagtgcagggtttctggctgatacactccattccccagttccctcccatcccagaagaaggctacgattatccccctaccggccgacggaatggacagagcggtatttgcattacatttaaatataaccagtatgaggccatcgatagccagctgctcgtctgtaatccaaacgtttacagttgcagtataccagccactttccaccaggaacttattcacatgccccagttgtgcactagggcgtcgtctagcgagatcccaggaagacttttgaccacgctgcaatccgctcaaggacaaaaattcctgcactttgcaaaaagcgactcgttcctcgatgatatctttgccgcctggatggcccagagactgaagacacacctattgacagaaacctggcagcggaagagacaagaactgccttcaaactgcagtctaccatatcatgtctataatataaaagcaattaaactgtcacgccatagttatttttcttcttatcaggaccatgccaaatggtgcatatcacagaagggcaccaaaaataggtggacatgtattggggacctgaatagatcccctcatcaggccttccgaagtggaggattcatctgtacacagaactggcagatataccaggcatttcagggcttagttctgtactacgagtcatgcaaatag

SEQ ID NO: 114405 - DNA, 1317 bp, synthetic construct
  misc_feature 1..1317: note = Description of Artificial Sequence: Synthetic coding sequence
  source 1..1317: mol_type = other DNA
atggcgttaaggggcgtcagcgtgcggctcctgagccgggggcctggactgcacgtgttacgaacttgggtcagctccgctgcccaaacggagaaagggggtaggacgcagagccaactggctaaaagttcacgtccggaattcgattggcaggatcctcttgttctggaagaacaactgacaaccgatgagatcttgatccgggacacatttaggacctactgtcaggaaaggttaatgccgcggattttgcttgccaacaggaacgaagtgtttcacagagagatcatttcggagatgggggaactaggagtgcttggtcctacgatcaaaggatatggatgtgccggagtgtcatccgtggcctacggactgctggcacgggaactcgagagagtggattcaggctacagatccgcaatgagtgttcagtccagtctggttatgcaccctatctatgcgtatggctctgaggagcagcggcagaaatacctgccgcagctggcaaaaggcgagttactcggctgcttcgggttgactgagcccaactccgggtccgatccctcgagtatggagacgagggctcattataactccagcaacaagtcgtatactttgaatggcactaagacttggatcactaatagtccgatggccgacctgtttgtagtttgggctcgctgcgaagacggatgcattcggggctttttgcttgagaaaggcatgagaggtttgtccgctcctcgcatccagggtaagttttctttgagagcctcagcaaccggcatgatcatcatggatggcgtagaggtgcctgaagaaaacgtgttaccaggcgcttcttcgctgggcggtccatttggatgtctaaacaacgcccgatacggcattgcctggggagtcctcggcgcgtccgaattctgcctgcacactgcccgacagtacgctttagaccgaatgcagtttggggtgccacttgccagaaatcagctgatacaaaagaaactggccgacatgctgacagaaattactttgggcctacacgcctgcctgcagttgggacgccttaaagatcaggataaggctgcacccgagatggtatcactgttgaaacgaaacaattgcggcaaagctctggacattgcacgccaggcccgcgacatgctggggggtaacggcatctcagatgagtaccacgttatccggcatgccatgaacttagaagccgttaacacgtacgagggcacgcacgacatacacgcccttatcctgggcagggcaatcactggcattcaagctttcaccgcttctaagtag

SEQ ID NO: 114406 - DNA, 918 bp, synthetic construct
  misc_feature 1..918: note = Description of Artificial Sequence: Synthetic coding sequence
  source 1..918: mol_type = other DNA
atgatcccacttctcctggctgcattgctgtgtgtcccggctggagctttgacatgctacggcgactcaggacagcccgtggattggttcgtagtgtacaagttgcctgctctccggggcagcggggaggccgcccaacgcgggctgcagtataagtatctggacgaatcctctggaggttggagggacggacgcgcactgatcaattccccagagggagcagtggggagaagcctgcaacctctttacagaagcaacacttctcaactcgctttcctcctgtacaatgaccagcctccacagccatccaaggcacaggattcctccatgcgaggccacaccaagggaaaacagttgacatacacttacccttgggtgtacaattaccagcttgaaggtattttcgctcaggagtttccagatctggagaatgtagtgaaaggccaccatgtgtctcaggaaccatggaactcaagcattactttaactagccaggctggcgcagtcttccagtcatttgcaaaattctccaagtttggcgatgacctttactccggctggctagcagctgccctgggaactaatttacaagtccagttttggcacaaaaccgttggtatactgcctagtaattgttccgatatctggcaagtgttgaatgtcaatcaaatcgcttttccggggcccgctgggcctagttttaacagtacggaagatcacagcaagtggtgtgtatcccctaagggcccatggacttgtgtgggggatatgaacaggaaccagggggaagagcagcgcggcggtggcaccctctgtgcacagttgccggctctctggaaggcgtttcagcctctggttaagaactatcagccatgcaacggcatggcaagaaagcccagccgggcatataagatctag

SEQ ID NO: 114407 - DNA, 909 bp, synthetic construct
  misc_feature 1..909: note = Description of Artificial Sequence: Synthetic coding sequence
  source 1..909: mol_type = other DNA
atgcattaccctaccgcgttgcttttcctgattctggcgaatggggctcaagctttcagaatttgtgcctttaatgcccagcgccttacgctggcaaaagttgcacgggaacaggtgatggacactcttgtgcgtatattggccagatgtgacatcatggttctccaggaggtggttgactctagcggaagtgccattcctctgctgctgcgtgagctgaatcggttcgatggatcaggcccctattctaccctctcttcccctcagctagggcgtagtacctacatggagacctatgtgtacttctacagaagccacaagacacaagtgctgtctagctacgtgtacaacgacgaggatgacgttttcgctcgtgagcctttcgtggcgcaattttctctgccttcgaacgttctccccagcctggttttggttccactgcacacaaccccaaaggcagtggagaaagaactgaatgccctgtatgacgttttcttagaggtgagccagcattggcaaagcaaggatgtaatcctgctcggagacttcaatgctgactgcgcttccctgacaaagaagcgacttgataagcttgagctgaggacagaacctggtttccattgggtgatcgcagacggggaagatacaacggtccgagcctccactcactgcacatacgacagagtcgttctacatggagagaggtgtcgctcgctgctgcacacggccgctgcttttgacttccccacttcatttcagctgactgaagaagaagccctcaacataagcgatcattatcccgttgaagtagaactcaagttgtctcaggcacactcggttcagcctctttcgctcaccgtgttgttactgttgagcctgttgagtccccagttatgccccgccgcctag

SEQ ID NO: 114408 - DNA, 909 bp, synthetic construct
  misc_feature 1..909: note = Description of Artificial Sequence: Synthetic coding sequence
  source 1..909: mol_type = other DNA
atgcactatccaaccgccctgctgttcttaattttggcaaacggagcccaggcctttcggatctgcgcttttaacgctcagagactcaccctggccaaagttgcgcgcgagcaggtgatggatactcttgtaaggattctagcgcggtgcgatattatggtgctccaggaggtcgttgactctagtggaagcgctattcccctgctcctcagggagctgaacagattcgatggaagtggcccctactccacactgagcagccctcaacttggacgaagcacttatatggagacttatgtgtacttctatcggagccataaaacccaggtactgtccagctatgtttacaacgatgaagacgatgtgttcgctagggagcctttcgttgcgcagttctctctgccatctaacgtcctaccctccctggtgctggttcccctgcacactaccccgaaggccgtcgaaaaagaattaaacgctttgtacgatgtgttcctggaggtatctcagcattggcagtcgaaggatgtcatactgctaggggacttcaacgccgactgtgcatccctgacaaagaaaaggctggataaacttgagttacgaaccgaaccaggcttccattgggtgattgcagacggcgaagacactacagttcgggctagcacccactgtacatacgatcgggtcgtgttacatggcgaaaggtgcagatctctgctccacaccgctgctgccttcgatttccccacctctttccagctcacagaagaggaagctctgaacatttccgatcactatccagtcgaggttgagttgaagctgtcccaagcgcactctgtgcagcctctgtcactgaccgtgctcctcctgctgagcttgctctcccctcagctctgccctgccgcctag

SEQ ID NO: 114409 - DNA, 909 bp, synthetic construct
  misc_feature 1..909: note = Description of Artificial Sequence: Synthetic coding sequence
  source 1..909: mol_type = other DNA
atgcattatcctaccgcactgttattcttaatcctggctaatggggcccaggcgttccggatctgtgcgttcaacgcacagcgactgacactagcgaaagtggcccgggagcaggtcatggataccctggtcaggatcctcgctcgttgtgacattatggtgctccaagaggtcgtggacagtagcggatccgcaattcccctactgcttagggagttgaataggtttgatggtagcggcccttatagcacgctgtcctccccgcagttgggcaggtctacatatatggagacctacgtctacttctaccggagtcacaaaactcaggtgctttcctcatacgtgtacaacgacgaggatgacgtctttgctcgagagcctttcgtggctcaattcagtctgccatcaaacgtgttgccatccttagtgctggtccccctgcacacaacgccaaaggcagtggaaaaggaacttaatgcgctctatgacgtattcctagaagtgagccagcactggcagagcaaggacgtgatcctgttgggtgacttcaacgcagattgcgcctcactgaccaagaaacggctggacaaactggagttaagaaccgagcctggattccactgggtgattgccgatggggaggatacgaccgttcgggctagcacccactgtacatatgatcgggtggtgctgcatggggaaagatgccgttcactgctacatacagccgccgcctttgattttccaactagctttcagctgacagaagaagaagcattgaacatttccgaccactatcctgtggaggtggaattaaagctgtcccaggcacactctgtgcaaccgctctccctaactgtgttgctgctcctgtctcttctgtctccccagctgtgtccagccgcctag

SEQ ID NO: 114410 - DNA, 909 bp, synthetic construct
  misc_feature 1..909: note = Description of Artificial Sequence: Synthetic coding sequence
  source 1..909: mol_type = other DNA
atgcactacccaactgccctgctgtttctgatattggccaacggagcgcaagcattcagaatctgtgcttttaacgcccagcgattaaccctcgccaaggtggcaagagaacaggttatggatacattggtgaggatcctcgcccgttgcgatatcatggttttgcaggaggtggtcgatagttcaggctccgcaattcctctgctgctgagggagcttaatcgtttcgacggtagcgggccatatagtactctgagcagtcctcagctcggacgatctacctacatggagacttacgtgtatttttaccgctcccacaaaacccaggtgctgagtagttacgtttataacgacgaggatgacgtctttgcgagggaaccgtttgtcgcccaatttagcctaccaagcaacgtcctcccatcactggttttggtgcccctgcatacaactcctaaagcagtggaaaaggagctgaacgccctctatgatgtcttcttggaggtgagtcaacactggcagagtaaagatgtcattctattgggcgacttcaacgccgactgcgctagtctgacaaagaagaggttggacaaactggagttacgaaccgaacccggctttcactgggttatcgctgatggggaggacaccaccgtgagagccagcacacactgcacttacgatagggtagttttacacggagagaggtgccgttccttgctgcacaccgccgctgctttcgacttccctacatcattccagctaaccgaagaagaggctcttaatatctcagatcactatcccgtcgaggtggaactgaagctttcacaggcccattccgtgcagcccttaagcctcacagtattgctactgctgagcctgctaagcccacagctgtgccccgccgcctag

SEQ ID NO: 114411 - DNA, 909 bp, synthetic construct
  misc_feature 1..909: note = Description of Artificial Sequence: Synthetic coding sequence
  source 1..909: mol_type = other DNA
atgcactatcctactgcactcttgtttctcatcttagcaaatggggcacaggcatttcgcatttgtgcgttcaacgctcagagactgactcttgccaaggtggcgagggaacaggtgatggacacccttgtgaggattcttgcccgatgcgacattatggtcctccaggaagtggtggatagcagcggcagtgctattcctttgctcctgcgggaactcaatcggtttgacggaagcgggccctattcgacccttagttcacctcagcttgggcggtctacgtatatggagacctacgtttatttttatcggtcccacaagactcaggtactttcttcctatgtctacaacgatgaagacgatgtattcgcccgtgaacctttcgttgctcaatttagcctcccaagtaatgtcctgcctagtctggttttagtcccgcttcatactacccccaaggccgtggaaaaggagcttaacgctttgtacgatgtgttcctcgaggtgtctcaacactggcagtctaaagatgtaatactgcttggcgattttaacgctgattgtgcctctctgactaaaaaaaggctggataagctggagcttcgcacagagccgggatttcactgggtgatcgccgatggagaggataccaccgtgagagcttcgacccattgcacatacgatcgcgtcgtgctgcacggtgagagatgtagaagtcttctgcacactgccgccgcgtttgactttccaactagttttcagctgacagaggaggaggctctgaatatctccgatcactatccagttgaagtggagctgaagctctcccaggcccactctgttcagcctttgtccctaaccgtgttgctcttactgtctctcctcagcccccagctctgccctgctgcatag

SEQ ID NO: 114412 - DNA, 909 bp, synthetic construct
  misc_feature 1..909: note = Description of Artificial Sequence: Synthetic coding sequence
  source 1..909: mol_type = other DNA
atgcattaccccacagctctgctgttccttatacttgccaacggcgcccaggcattccgaatttgcgctttcaatgctcagcgtctgaccctggcgaaggtggcgcgagagcaggtaatggacacccttgtgcgcattctcgctaggtgcgacattatggtgttgcaggaggtagtggattccagcggctccgcgattcccctgcttctgcgggagctgaaccgcttcgacgggtctgggccttacagcacactctctagccctcaactcggccgaagtacatatatggagacatatgtgtatttctacagatcccataagactcaggtgctatcttcttatgtgtacaacgacgaggacgacgtgttcgccagggaaccattcgtggcccagttttcattgcctagtaacgttcttccatcactcgtgctggtccctcttcatacaaccccgaaggctgttgagaaggagcttaacgcactgtatgacgtctttctggaggtctcacaacactggcaatcaaaagacgtgattcttttaggggattttaatgcagactgtgcttcactgaccaagaaacgcctcgacaagctcgaactgagaaccgagcccggatttcattgggtgatagcagatggggaagacacaaccgtaagagcctcaacccactgcacctacgaccgcgtcgtcctccacggggagcgatgccgttccctcctgcacaccgctgccgcctttgacttcccaacctctttccagctgaccgaagaggaggccctcaacatttccgaccattatcccgtggaagtggaactcaaactctctcaggcacattcagtgcagcctctatctctgaccgttttactgctgctctcgctgttgagtcctcagttatgtccagccgcctag

SEQ ID NO: 114413 - DNA, 315 bp, synthetic construct
  misc_feature 1..315: note = Description of Artificial Sequence: Synthetic coding sequence
  source 1..315: mol_type = other DNA
atgcactatccgaccgccctgcttttcctgatccttgctaacggggcgcaggcgttcagaatttgcgccttcaacgcccagcgcctgacactggccaaggtcgccagagaacaggtaatggacactctggtgcggattctggcacgctgcgacatcatggtactccaggaagtcgtggactccagtgggagcgccatccctttgttgctcagagaattgaaccggtttgatggatcaggcccatacagcaccctcagctctccacagctcggccgatccacctatatggagacctacgtgtatttttatagatag

SEQ ID NO: 114414 - DNA, 81 bp, synthetic construct
  misc_feature 1..81: note = Description of Artificial Sequence: Synthetic coding sequence
  source 1..81: mol_type = other DNA
atgcactacccgactgcactattgtttctgatcctggcgaacggcgcacaggcttttagaatctgtgctttcaatgcttag

SEQ ID NO: 114415 - DNA, 627 bp, synthetic construct
  misc_feature 1..627: note = Description of Artificial Sequence: Synthetic coding sequence
  source 1..627: mol_type = other DNA
atgcattacccaaccgccctgttgtttctgatcctcgccaatggagcccaggcatttcggatctgcgcttttaacgcacagaggctgaccctagctaaggtcgcaagggagcaggtaatggataccctggtgaggatccttgcaagatgcgatattatggttctccaggaggtggtggactcatccggatccgccattccccttcttttaagggaactgaatcgctttgatgggtccggcccgtactcaaccctgtcatctcctcagctcgggcggagtacctatatggagacttatgtgtatttctacagatcacacaagacacaggtcttgtcatcatacgtttacaatgatgaagatgatgttttcgctcgggagccttttgtcgcccagttcagtctcccaagcaacgtgctccctagcctggtgttggtgcctctccacactaccccaaaagcagtggaaaaggaactgaacgctctgtacgacgtatttctggaggtctctcagcattggcaaagtaaggacgttattctgttgggggacttcaacgccgattgtgccagccttacaaagaagcgcctcgacaaactcgaattgcgtaccgaacctggtttccattggtag

SEQ ID NO: 114416 - DNA, 918 bp, synthetic construct
  misc_feature 1..918: note = Description of Artificial Sequence: Synthetic coding sequence
  source 1..918: mol_type = other DNA
atgtctagggaactcgccccgctactgctcctgctactgagtatccactctgccctggctatgaggatttgcagctttaatgttcgtagctttggagagtcgaaacaagaagacaaaaatgctatggacgtgatagtgaaggtgataaagagatgcgatatcatccttgttatggagataaaggactcgaacaacagaatatgccccatcctgatggaaaagctgaaccgaaattcaaggcgcggcattacatataattacgtgatcagctccagattaggcagaaatacttataaagagcagtacgcctttctctacaaggagaagctagtgtccgtgaagcggagctatcattatcacgattatcaggatggtgatgctgacgtgttctcacgggagccctttgtagtctggtttcagagccctcataccgcagttaaagattttgtaattatccccctgcacaccacgcccgaaacgagtgttaaagagatcgatgaactagttgaagtctacaccgacgtgaaacacagatggaaggcggaaaacttcatattcatgggagacttcaacgcggggtgcagttatgtccctaagaaagcctggaagaacatccgcctgcgcacggatcctaggttcgtgtggcttataggtgaccaggaggacacaacggttaagaagtcgacaaattgcgcatatgatcggatcgtcctccggggtcaagagatcgtatccagtgtagttcctaagtccaactcggtctttgacttccaaaaagcttacaaacttaccgaagaggaagctctcgacgtcagcgatcactttccagtagagtttaagctgcagagctcacgagccttcaccaactccaaaaagagcgtaacattacgcaaaaagacaaaatctaaacgatcatag

SEQ ID NO: 114417 - DNA, 918 bp, synthetic construct
  misc_feature 1..918: note = Description of Artificial Sequence: Synthetic coding sequence
  source 1..918: mol_type = other DNA
atgtcgcgcgaactggcgcccttgcttctgcttctgttgtccatccacagcgctctggcaatgagaatttgcagctttaacgttcgctctttcggtgagtctaaacaggaggacaagaacgccatggatgtcattgttaaagtaatcaaaagatgtgacattatcctggttatggaaatcaaggatagcaataacagaatctgtccaatcctaatggaaaagctgaaccgcaactctcggcggggaatcacctacaactatgtgattagctcacgtctcggacggaatacgtataaagagcagtacgcctttctatataaggagaagcttgtgtctgtgaagcgaagctatcactatcacgactaccaagacggagacgcggacgtcttcagcagagaacctttcgtagtttggttccagagtccccacaccgccgttaaagattttgtgatcattccactacatactactccagagaccagtgtgaaggaaatcgacgagctggtggaggtatacacagacgtgaagcatagatggaaggccgagaacttcatcttcatgggagactttaatgcaggctgttcttatgtgcccaagaaggcatggaagaacatcagactccgaactgacccaagatttgtctggttgattggggaccaggaagatacaaccgtgaagaagtctaccaattgtgcttacgacagaatagtcctgcgggggcaggagattgttagctctgtagtgcccaagtccaactccgtctttgacttccagaaagcgtacaagctgactgaggaagaggcgctcgacgtctccgaccattttcccgtggagttcaaattacaatcaagccgtgcgttcacaaactccaagaagagcgttaccctacggaagaaaactaagagtaagcggtcctag

SEQ ID NO: 114418 - DNA, 867 bp, synthetic construct
  misc_feature 1..867: note = Description of Artificial Sequence: Synthetic coding sequence
  source 1..867: mol_type = other DNA
atgtcaagagagttagcccctctgctgttactactcctgagcatccatagcgcacttgctatgcggatctgttcgttcaatgtcagatcttttggcgaaagtaagcaggaggataaaaacgcgatggacgtaatagttaaagttatcaaaaggtgcgacatcattcttgttatggaaatcaaggacagcaataaccgaatctgcccaatattgatggaaaagttgaacaggaacagtcgaaggggcatcacctataactatgtgatctctagccgactgggcaggaatacatacaaggagcagtatgcctttctctataaagaaaaactggtgtcagtaaagcgttcataccactatcacgattaccaggacggagacgccgacgtgttcagtcgcgagccgttcgtagtgtggttccagtctccgcacactgccgtcaaagattttgtcattataccccttcacaccacccctgaaacaagcgtgaaggagatagatgagctcgttgaagtttatacagacgttaagcacaggtggaaggcggagaacttcatttttatgggcgattttaatgcggggtgctcttacgttccaaagaaggcgtggaagaacatcaggctgcgaactgatcctaggttcgtatggttaataggtgatcaagaggacaccacagtgaaaaaaagcacaaattgtgcttatgatcgtatagtcttaaggggccaggagatcgtcagctccgtggtgcctaaatcaaattctgtattcgattttcagaaggcgtacaaacttaccgaagaagaagtgcggctgccatcctgcctgtctatgcccttgtcttggaaagacgaactggcgtgggcaacttag

SEQ ID NO: 114419 - DNA, 303 bp, synthetic construct
  misc_feature 1..303: note = Description of Artificial Sequence: Synthetic coding sequence
  source 1..303: mol_type = other DNA
atgagcagagagctcgcgccactgttactgctcctgctgtcaatccattccgcactcgccatgaggatttgctcattcaacgtgcgatcatttggggaatcaaagcaggaggataaaaacgccatggatgtgatcgtgaaggtgattaaacgttgtgatatcattttagttatggagatcaaggactctaataatcgaatatgtcctatccttatggagaaattaaatcgtaattcccggcgaggtattacgtacaattatgtgatttctagcagactcgggagaaacacctataaagaatag

SEQ ID NO: 114420 - DNA, 828 bp, synthetic construct
  misc_feature 1..828: note = Description of Artificial Sequence: Synthetic coding sequence
  source 1..828: mol_type = other DNA
atgagcagagaactcgcccccctgctcctcctgctgctgtcaatccacagcgcgctggccatgcggatttgttctttcaacgtgcggtctttcggcgagtccaagcaagaggataagaacgccatggacgtgatcgtcaaggtgatcaaacgctgtgacatcatcctggtgatggaaataaaggactcaaacaatcgaatatgccctattttaatggaaaaattgaatcgagagaagttggtctccgtgaagagatcctatcattaccacgactaccaggacggggatgccgatgtgttctcacgagagcctttcgttgtgtggttccagtctccacataccgccgttaaggattttgtaattatacccctccatacaacaccggagacttccgtgaaagaaattgacgagctggtggaggtgtacaccgacgtgaagcaccggtggaaagctgagaattttatcttcatgggagatttcaacgctggctgctcctacgtccctaaaaaggcatggaagaacatccggctccggactgacccacggtttgtgtggctcattggtgatcaggaagacactaccgttaagaagtccacgaattgcgcctacgaccgaatcgtgctccgggggcaggagatagtttcctccgttgtacccaaatccaatagtgtcttcgactttcaaaaagcttacaagctcaccgaagaggaagccctggacgtttccgatcacttccccgtggagttcaaactgcagagctcccgtgcattcaccaactccaaaaagtcggttactttgcggaagaagaccaagagcaagcggagttag

SEQ ID NO: 114421 - DNA, 753 bp, synthetic construct
  misc_feature 1..753: note = Description of Artificial Sequence: Synthetic coding sequence
  source 1..753: mol_type = other DNA
atgaccccactgtgtccccgacccgctctctgctaccattttctgacatcactcctccgttctgccatgcagaacgcccgaacagcggagggcagaagccgtggtaccctccgggctcgtccagcccccagaccagccgcacagcacggcataccacgaccgctgagctccgctggccggttgtctcaaggatgccgaggagcatccacagtcggagccgctgggtggaagggagagcttcccaaggctggggggtcaccagccccgggccccgagaccccagctattagccccagcaaacgagcccggccagccgaagtaggagggatgcaactgaggtttgcgcggttgagcgagcatgctaccgccccaacccgaggttctgcccgggctgctgggtatgacctgtatagcgcttacgactatacaataccgccaatggagaaggctgtggtcaagactgatatccagattgcattgcccagtggctgctatggcagagtagccccgagatccgggttagctgccaaacattttatagatgtgggggcgggcgttattgatgaagactatcgcggaaatgtgggggtggtcctgttcaactttggaaaggagaaattcgaggttaagaaaggcgatcgcattgctcagctgatctgcgagagaatcttctaccccgaaatagaagaggtccaagccctggatgacacggagagaggctcgggtgggtttggttccactgggaagaattag

SEQ ID NO: 114422 - DNA, 759 bp, synthetic construct
  misc_feature 1..759: note = Description of Artificial Sequence: Synthetic coding sequence
  source 1..759: mol_type = other DNA
atgacaccgctttgtccccggcccgctctttgctatcacttccttacatcactactgaggtcagccatgcaaaacgcccggggcgctagacaacgtgccgaggcagccgtgctgtccgggcccgggccaccactgggacgcgctgcgcagcatgggataccacgtccactcagctccgccgggcgcttatcacagggatgccggggggcaagtaccgtcggggcagctggatggaaaggggagctgcccaaagcaggcggatcaccagcgcctgggcctgagacccctgccatttcccccagcaaacgcgccaggccagctgaagttggcggcatgcagctgcgttttgcccgcctgtctgagcacgccactgcacctaccagaggaagcgccagggccgcgggttacgacttgtactccgcctatgactacactatacctccaatggagaaagccgtggtgaaaaccgatattcagatcgctttgcctagcgggtgttacgggagagtcgccccccgttcgggattggccgccaagcattttatcgatgttggcgctggagtgatcgatgaagactacagaggtaacgtgggcgtcgtgcttttcaatttcggtaaggagaaatttgaagtgaagaaaggagaccgaatcgcgcagctgatttgcgagcggattttctaccctgaaattgaggaagtccaggctctcgatgacaccgaaagaggaagcggtggttttggaagcacgggtaaaaactag

SEQ ID NO: 114423 - DNA, 495 bp, synthetic construct
  misc_feature 1..495: note = Description of Artificial Sequence: Synthetic coding sequence
  source 1..495: mol_type = other DNA
atgccctgctccgaggaaacgcctgctattagcccctctaaaagagcgcggccggcagaagtcgggggaatgcagctcaggttcgcccgactgtcagaacacgcgacagctcccacccgtggcagtgctagggctgccggatatgacctgtactccgcttacgattatactattccccctatggagaaggccgtcgtgaaaactgatatccaaattgctcttcctagcggttgttatggtcgggtggcgccccgaagcggattagctgctaagcactttatagatgtaggggcaggcgtaattgacgaggattacaggggaaacgtcggcgtggtactattcaacttcgggaaagaaaagttcgaggttaaaaagggcgaccgaatcgcgcaactgatctgtgagaggatcttttaccccgaaatcgaggaagtgcaggctctggatgacaccgagcgcgggagcggcggctttggttcgaccggtaagaattag

SEQ ID NO: 114424 - DNA, 426 bp, synthetic construct
  misc_feature 1..426: note = Description of Artificial Sequence: Synthetic coding sequence
  source 1..426: mol_type = other DNA
atgcaactccgctttgctagactgagtgagcacgccacggcccctactcggggcagcgccagggcagcaggatacgacttatatagtgcgtatgactatacaattccacccatggaaaaggccgtcgtcaaaacagatatccaaattgctctcccctctggctgttacggcagggttgccccaagatccggcctggccgccaagcacttcattgacgtgggtgcaggagtaatcgatgaggactaccgtggaaatgttggggtcgtgctgttcaactttggaaaggaaaagtttgaggttaaaaaaggagatcgcatcgcacagctgatttgcgaacgtattttctaccccgaaattgaggaggttcaagctctcgatgatacggagaggggctccggggggttcgggagcaccggaaaaaactag

SEQ ID NO: 114425 - DNA, 1056 bp, synthetic construct
  misc_feature 1..1056: note = Description of Artificial Sequence: Synthetic coding sequence
  source 1..1056: mol_type = other DNA
atgccactgcgaaaacatcggcaacattttaagaagtatggcaactgctttaccgccggcgaggcagtggattggctgtacgacctgcttcggaacaactctaactttggacccgaggtgacccgtcagcagacaattcagctcctgaggaagtttctgaaaaatcatgtcatcgaggatatcaagggcagatggggttcagagaatgtcgacgacaacaatcaactcttccgattccctgctaccagccctcttaagactctccctaggcggaccccaaaacgccacggactgcaccttagccaggaaaacggagagaaaattaaacacgagattattaatgaagaccaggagaacgccatcgacaacagagagctgagccaggaggacgtggaagaagtctggagatacgtgattctgatatatctgcagactatactgggggtgccttcactcgaggaggtcatcaatccaaagcaggtgatccctcaatacatcatgtataatatggctaacactagcaagcgtggcgtggtgattctgcagaataaaagcgacgacctgccacattgggtgttgtctgccatgaaatgcttggcaaattggcccaggtctaatgacatgaataacccaacctatgtaggcttcgagcgcgatgtcttcagaacaattgcagactattttttggatctgcccgagccactgctgacttttgaatattacgaattattcgtaaacatactgggaaatttcaaagactttcggtcgtctatcccagtagtttgtggatatatcaccgtgtctgaccgctcttcgggaatccacaagatccaagatgatcctcagagcagcaaatttttgcatctaaacaatttaaactcttttaagagtaccgaatgcctcttgctgagtctgctgcacagggagaagaacaaggaggagtcagactcaactgagaggctgcagatctcgaaccccggctttcaggaaaggtgcgcaaagaaaatgcagttggtgaatctgcgaaatcgacgggcttgctgcaacctgatctag

SEQ ID NO: 114426 - DNA, 1584 bp, synthetic construct
  misc_feature 1..1584: note = Description of Artificial Sequence: Synthetic coding sequence
  source 1..1584: mol_type = other DNA
atggagtcccagggcgtcccgccgggaccataccgtgctactaaactctggaatgaggtgactacctcttttagagctggaatgcctttaagaaaacatagacagcactttaagaagtacggcaattgttttaccgctggcgaagcagtggattggctatatgatctgctcagaaataactcaaattttgggcctgaggtcacaagacagcaaacaattcaattgctacgcaagttcctgaagaatcatgtgattgaggatatcaaagggcgctgggggtctgaaaatgtggacgacaacaatcagctcttccgattccctgccacctctcccctaaaaactctaccgaggcggtacccggagctgagaaagaacaacattgagaatttctccaaggataaagattctatttttaagcttcgcaacttatctcggaggacccctaaaaggcacggcctacatctgtcccaagaaaatggcgaaaagatcaaacacgaaatcatcaacgaggaccaggagaacgccatcgacaatagggagctgtcccaggaggatgtcgaggaggtttggaggtacgtcatcctgatctatttacagactattctgggggtcccatcattagaggaggtgatcaatccaaagcaggtcatcccacaatacattatgtacaacatggccaacactagcaaaaggggcgtcgttattttacaaaataagtccgatgacctaccacactgggtcttgtctgcaatgaagtgcctcgctaactggcccaggtcaaacgatatgaacaaccctacctacgttggatttgagagggacgtctttagaactattgccgactactttctggacctgccagagccactactcacttttgagtattacgaattattcgttaatatcctggggctgctgcagcctcatttggagcgggtcgcaattgacgctctacaactgtgttgcctcttgctaccaccccccaacaggcggaagctgcaattgctgatgcgtatgatctcccgcatgtcccagaatgtggacatgcccaaattgcacgatgccatgggtactcgaagcctgatgatccacacattctctagatgcgtgctgtgctgcgcagaagaggttgatctcgacgaactgctggctgggcgattggtgtctttcctgatggatcatcaccaggaaatactgcaggtgcctagttacctgcagaccgccgtggaaaagcacttagattatttaaaaaaaggccacatcgaaaacccaggcgatggcttgtttgcgcctctgcctacttacagctactgcaaacagatcagcgcacaggaattcgacgagcaaaaagtgtctacgtcacaggcagctattgctgagctgctggagaatatcatcaagaaccgctctttgccactgaaggagaaaagaaagaagctaaaacagttccaaaaagaatatcctctgatataccagaaacggttccctactaccgaatctgaggccgctttgttcggtgataagccgaccatcaagcagcccatgcttattctacggaaaccaaaattccgcagcctgcgctag

SEQ ID NO: 114427 - DNA, 2436 bp, synthetic construct
  misc_feature 1..2436: note = Description of Artificial Sequence: Synthetic coding sequence
  source 1..2436: mol_type = other DNA
atggaaagccaaggagtgcctcccggcccttatagagctactaagctttggaacgaagtgaccaccagtttcagggccgggatgcccctccggaaacacagacagcacttcaagaagtacggaaattgctttactgcgggtgaagcggtggattggttgtacgatctgctccgaaataacagtaatttcggacccgaggttactagacagcagacaattcagcttctgcgtaaatttctgaagaaccacgtgatcgaagacataaagggcagatggggatcagaaaacgtggatgataataaccaactgttcagatttcccgcaacatcaccactcaagacgctgcccaggagatatcccgagctccgtaagaataatatagaaaatttctccaaagacaaggactcaattttcaaactccggaatctctcccggaggactccgaaaagacacggcctgcatctaagtcaggagaatggtgagaagattaaacatgaaattattaacgaggaccaggagaatgccatcgataacagggaactgagccaggaggatgtggaggaggtatggaggtacgttattctcatctaccttcagacaatccttggagtgccatcgctggaggaggtaatcaaccccaagcaggtgattccacagtatatcatgtataacatggcgaacacttctaaacggggcgttgtgattctgcagaataagagcgacgacctgccccattgggtcctgagcgccatgaaatgtctcgcaaactggcctagaagcaacgatatgaacaatcctacatacgtgggttttgagcgagatgtgttcaggaccatcgcagattacttcctagatctcccagagccactgctcacgtttgagtactacgaactctttgttaacatcctggttgtttgtggttacattacagtaagcgataggtctagcgggatccacaaaatacaggacgatccacaaagtagcaaattcctgcacttgaacaacctgaacagctttaagtctacagaatgccttcttctttcactgctccaccgtgagaaaaacaaagaggaaagtgactccacggagagactccaaatttccaaccccgggtttcaggagcgatgtgctaaaaaaatgcagcttgtgaatctcagaaaccgacgggtgagcgccaacgacataatggggggaagttgccataatctgatcggtttgtctaacatgcacgatctttcatcaaattccaagcctagatgttgttctctcgaaggcatagtggatgttccgggtaattccagcaaggaagcctcaagtgtcttccatcagtcgtttcctaacattgaaggccagaataacaagctgtttctggaatctaaacccaaacaagagtttctgttgaatttgcattctgaggaaaacattcaaaagcccttcagcgcaggctttaagaggacaagcactctgactgttcaggatcaggaagaactgtgcaacggaaaatgcaaaagcaagcaactgtgcaggtcccagagtctcttgttgcggtcatcgacccgccgaaattcttacattaacacacctgtcgccgaaattattatgaagcctaatgtgggtcagggctcaacatccgtccagaccgcaatggaaagcgagcttggagagagctccgccaccataaataagaggctctgcaaatcaacaatcgagctctccgagaattcactcctgccggcaagcagtatgctcaccggcacccagagcttgctgcaaccccatctcgaacgggtcgccatcgacgctctacagctgtgttgtttgctcttacccccacccaatcgaagaaagctccagctgctgatgagaatgatctctcgcatgagccagaacgttgatatgcctaagctccatgatgccatgggtacccgttcgctgatgatccacactttctcccgctgtgtcttgtgctgcgccgaggaagtggaccttgacgagctgttggcaggacggctggtcagcttccttatggatcatcaccaggagattctgcaggtgccatcatatctccagactgcggtggagaagcatctggattatctgaagaaaggacatattgaaaatccaggagatggcctctttgcgcctctgcctacatatagctattgcaagcagatctcagctcaggagttcgatgagcagaaagtcagcacaagtcaggcggccattgcagagctcctggagaatatcatcaagaatagatcactgcccttgaaggagaaaaggaagaaattgaaacagttccaaaaggagtatccactgatataccagaaacgttttcctaccacggagtccgaagctgccttgttcggggataagccaaccataaaacagcctatgcttatccttcggaagccaaaattccggagcttacgctag

SEQ ID NO: 114428 - DNA, 1590 bp, synthetic construct
  misc_feature 1..1590: note = Description of Artificial Sequence: Synthetic coding sequence
  source 1..1590: mol_type = other DNA
atggaacatcgaatcgtcggcccaggcccatatagagcaaccagactttggaatgagactgttgaactcttccgagccaagatgccattaaggaaacaccggtgtcggttcaagagttacgaacactgtttcacagcagcggaagctgttgattggctccacgaactgctgaggtgttcacagaacttcggccctgaggtgaccaggaagcagaccgtccaactgttaaagaaattcctgaagaaccacgtgatcgaagatatcaaggggaagtggggcgaagaagactttgaggataaccggcacttgtaccgatttccaccgagctctccactgaaaccgtatccgaagaagcctcccaaccagaaggacgtgatcaagtttccagagtggaatgacttgccaccaggtacaagtcaagagaacattccggtgaggccagtagtgatgaattcggagatgtggtacaaaagacacagcatagccatcggcgaggtgcctgcatgccgattagtacatcgcaggcaacttactgaggccaacgttgaagagatctggaaatccatgacactgtcatatctccagaaaattctgggactggacagccttgaggaagtgctggatgtgaagctggtgaactcaaaattcatcatacacaatgtctactctgtgagtaaacagggtgtggttatcctggacgacaagtccaaggagttaccgcattgggtcctgtctgccatgaagtgtctcgcaaactggcctaattgttctgacctcaaacagccaatgtatttgggattcgagaaagatgtgtttaaaacaattgccgattactacgggcacctcaaagagcccctgcttactttccatctatttgacgctttcgtttcagttctgggactgctacagaaagagaaggtcgctgtagaggccttccagatttgttgccttctgctcccacctgagaatagacgaaagctgcagcttctgatgcggatgatggcccgaatctgcctgaacaaggaaatgcctccactgtgcgacggcttcggaacaaggaccctcatggttcagactttttctcgctgtatcctctgtagtaaggacgaggtggatctcgatgagcttctcgctgccagactggtcaccttcttaatggacaactatcaagaaatcctcaaggttcctctagcgcttcagacctctattgaagaacgcgtggcccacctgcgcagggtgcagatcaagtacccaggggccgatatggatattaccctaagcgcgccatctttctgcaggcaaatctcaccagaggagttcgaataccagagaagttatggttcacaggaacccctggctgctttgctggaggaggtgatcacagacgctaagttatcgaacaaagagaaaaaaaagaagctcaaacagtttcaaaaatcctaccccgaggtatatcaggagagatttcccacccctgagtctgccgccctgctgttcccggaaaagccaaagccaaagccgcagctactgatgtgggcccttaaaaaacccttccagcccttccagcgcacccgttcttttcgaatgtag

SEQ ID NO: 114429 - DNA, 1404 bp, synthetic construct
  misc_feature 1..1404: note = Description of Artificial Sequence: Synthetic coding sequence
  source 1..1404: mol_type = other DNA
atggaacaccgaattgttgggccagggccctaccgggcaactcgcctgtggaatgaaactgtggagctgttccgtgcgaagatgccattgcgtaaacaccgttgcaggttcaagtcctacgagcactgttttactgcagcagaagcagtggactggctacatgagctgctgcgctgctcacagaacttcggacccgaggtcacccggaagcagactgtacaactgctgaaaaagttccttaaaaatcatgttatcgaagacattaaggggaaatggggggaagaggattttgaggacaacaggcacctgtacagattccccccttcaagccctcttaagccctatcccaaaaagccccccaatcagaaggacgtcattaaatttcctgagtggaatgatcttccccctggcactagccaggaaaatatcccagtgcggcccgttgtgatgaacagcgaaatgtggtataaaaggcactcaatagcaataggcgaggtgcccgcctgcaggctcgtacaccgcagacaacttacagaggccaacgtggaagaaatatggaaaagcatgacgctgtcatatcttcaaaaaatcctcggtcttgactctctggaagaggtcctggacgtaaaactggtgaatagtaagtttatcattcacaacgtgtactccgtctctaagcagggcgtggtcattctcgacgacaagagcaaggagttgccacactgggtgctgtccgccatgaagtgcttagccaattggcccaactgcagtgacctgaagcagccaatgtacctcggcttcgaaaaggatgtattcaaaacaattgctgactactatggccatctcaaggagcccttattaactttccatctgtttgatgcgttcgtatccgtgctcggcctgctgcagaaggaaaaggtggcggtggaggcgttccagatctgttgcttacttctgccacctgagaaccgcagaaagttacaattactaatgagaatgatggcgcgaatttgcctgaacaaagaaatgcctcccctatgcgatggctttggtacaagaacattaatggtgcagacgttcagcagatgcatattgtgtagcaaggacgaagtcgacctcgacgagctgctggctgccaggctcgtcactttcctcatggacaactaccaggaaatcctcaaagtgcccttagcactgcagacatccatcgaggagcgcgtggcgcacctccgccgcgtgcaattccaaaagtcttacccggaagtctatcaggagagattccccacacctgagtcggccgcactgttgtttcctgaaaagcctaaaccaaaaccacagctcttaatgtgggccctcaaaaaacctttccaacccttccagcgaacgcggtctttcaggatgtag

SEQ ID NO: 114430 - DNA, 1323 bp, synthetic construct
  misc_feature 1..1323: note = Description of Artificial Sequence: Synthetic coding sequence
  source 1..1323: mol_type = other DNA
atgcctttgagaaagcatagatgccgcttcaagagctatgaacactgcttcaccgccgcagaggcggtcgactggctccacgagctgttgcgctgctctcaaaattttggccctgaggtaacacgaaagcagaccgtgcagctgctgaaaaaattcctgaagaaccacgttattgaggatatcaaggggaagtggggcgaagaggatttcgaggataacagacacctttatcgctttccaccgtccagcccgctgaaaccatatcccaaaaaaccgccgaaccagaaagacgtcattaagtttccagaatggaacgatctgcccccaggaactagtcaagagaatattccagtccgacctgtagtgatgaacagtgagatgtggtataaaagacactctatagcaatcggggaggtgccggcctgtagactcgttcataggaggcagctcaccgaagccaacgtggaagaaatctggaaatccatgacgctgtcatacctgcagaaaatcttgggactggatagtctggaagaggttctggacgtcaagcttgttaactccaaatttatcatccataacgtgtactccgtcagcaaacagggtgtagttattctggacgacaaaagcaaggaactccctcactgggtcctctccgctatgaagtgccttgcaaattggccgaactgttcagacttgaaacagccaatgtatctcggctttgagaaagatgtcttcaagacaattgccgattactacggacatctgaaggaacccctgctgaccttccaccttttcgacgctttcgtgagcgtgctgggtctcctgcagaaagaaaaagtggcagtggaggccttccagatatgttgcctgctcctcccgccagagaatcgtagaaaactacagctgctgatgagaatgatggctcggatctgtctgaataaggaaatgcctcccctctgcgacgggtttggaaccaggacactgatggtccagacgttcagccgctgcatcctttgcagcaaagacgaagtcgatctcgacgaattgttggccgctcgccttgtgacattccttatggataactaccaagagatacttaaagtgcccctagccctccagacatctatcgaagaaagggtagcccaccttagaagagtccagttccagaagtcctatccagaagtgtaccaggaacgctttccaacccccgagagtgccgccctcctatttccagagaaacctaaacccaaacctcaactgctgatgtgggcattgaaaaaacccttccagccattccagcggaccagatctttccggatgtag

SEQ ID NO: 114431 - DNA, 4746 bp, synthetic construct
  misc_feature 1..4746: note = Description of Artificial Sequence: Synthetic coding sequence
  source 1..4746: mol_type = other DNA
atgaggaccaccaaagtgtataaactcgttatacataaaaaaggctttggtggatccgacgatgagttggttgtcaacccaaaggtgtttcctcacattaaattaggagacatcgtggaaattgcgcatcctaatgacgagtactccccgctcttactccaggtgaaaagtctaaaggaagatctgcagaaagaaacaatttcagtcgaccaaacagtcacgcaagtcttcagactgcggccataccaggacgtgtatgtgaatgtcgtagatcctaaagacgtgaccctcgatttagtggagttaactttcaaggatcagtatattggaagaggggacatgtggagactgaagaaaagcttggtgtccacctgtgcctatattacacaaaaggtggagtttgcagggatcagggcccaggccggcgagctgtgggttaagaacgagaaggtcatgtgcggctatatttcagaagatactcgtgtggtctttagatcaacttcagccatggtgtacatatttatccaaatgtcttgtgagatgtgggattttgatatctatggggatctatacttcgagaaagccgttaatggattcctggctgacctctttaccaaatggaaggaaaagaactgctctcatgaggtgaccgtcgtgctgttttcccggactttctacgatgccaagtctgttgacgaatttcccgagataaatcgcgcctccatcagacaggaccataagggtcgattctacgaggacttctacaaggttgtggtccagaatgaaagacgcgaggaatggacctccctgttagtcactatcaaaaagctgtttattcagtatcctgtgcttgtgaggctggaacaggccgagggctttccccagggggataatagcacctccgcacagggaaattatctggaagccattaacctcagtttcaatgtgttcgataagcattacatcaaccggaactttgacaggacaggtcaaatgtctgtggtcatcacgcctggcgtcggcgtgttcgaggtggataggttgcttatgatcttaaccaaacagcgaatgattgacaacgggatcggagtggacctcgtttgcatgggcgagcaacctctgcatgccgtcccactcttcaagctgcacaaccgcagcgcccctcgtgattcacgtctcggggacgattataatataccccattggattaaccattcattctacactagtaaatctcaactattctgcaatagcttcacccccagaatcaagttggccggtaagaagcccgcgtcagaaaaagccaagaatggcagggatacgtctttaggatccccaaaagagagcgaaaacgctctccctattcaggtagattacgacgcatacgacgcccaggtgttccgactccccggccctagtcgagcccaatgcctgactacttgccggtccgtgcgggagcgggagtcccatagcaggaaaagcgcttctagttgtgacgtgtcttcctctccctccctgccatcacgtacactgcctaccgaagaagttcggtcgcaggcaagcgacgacagctccctgggtaagagcgccaatatcttaatgatcccacacccacacctgcaccaatatgaggtttcgtcaagtttagggtatacaagcactcgagacgtgttggagaacatgatggaaccccctcagagggactcttctgcccctggcagattccatgttggatcagccgagtccatgctgcatgtgaggccaggtggttacacaccccagagggcattgatcaatcccttcgccccctccagaatgccaatgaaactgactagcaatcgacgtagatggatgcacaccttccccgttggacccagtggtgaggcaatccaaattcatcaccagacgcgacagaatatggctgagttacaggggagtgggcaaagagaccccacccactcatcagctgagctcctcgagttagcataccacgaagccgccggacggcacagcaactcaagacaacctggagatggcatgagtttcctgaatttctccggaactgaggagctgtctgtaggattgctttccaactctggagcgggtatgaacccacggacccagaataaagattctttggaagattccgtaagcacatccccagatcctatcctcacactgtccgcaccacccgtggtgcctgggttctgctgcaccgttggtgtggactggaaatcactgacaacccccgcatgtctcccactcacaaccgattatttccccgacaggcagggactgcaaaacgattacaccgagggctgctatgacctgctccctgaagccgatatcgatcggcgggacgaggacggtgtgcagatgactgcacagcaggtgtttgaggagttcatttgtcagagacttatgcaggggtaccagattattgttcagcccaagacccagaaacccaatcctgccgtgcctccaccactttcctccagccccctttatagccgcggattagtctctcggaatagacccgaggaggaagatcaatattggctatccatgggcaggacctttcacaaggtgacccttaaagacaaaatgattacagtcacgcgataccttcccaaatatccctacgagagtgctcaaatccattacacctactccctatgtccgagccacagcgattctgaatttgtctcctgctgggtggaattcagccacgagaggctggaggagtataagtggaattacctggaccagtacatttgttcagcgggctctgaagatttttccctgattgaatctctgaagttttggaggacaagatttctcctgttacccgcatgcgtgactgcaacaaagagaatcaccgagggggaagcccactgcgatatttatggtgatcgaccaagggctgacgaggatgagtggcagctgctcgacgggtttgtgaggttcgtggagggtctgaaccgtatcaggaggagacaccgaagcgatcgcatgatgcgtaagggaaccgcgatgaaaggtttacaaatgacgggaccaatttcaacgcacagtttagaatccactgctccacctgtggggaagaaaggcaccagcgcgctgtcagctctgcttgaaatggaagctagccagaagtgtctgggcgagcagcaggctgctgtccatgggggaaaatcgagtgcccagagcgctgagagcagctccgtggccatgaccccaacatatatggattctcctagaaaggtgtctgtggatcagaccgctacacctatgctggatggcacttctctgggcatttgcacagggcaatcgatggacaggggaaactctcagacattcggcaatagtcaaaatataggcgagcaagggtacagttccacgaatagctctgactcctcctcacagcaactcgtggcatcttcacttacctctagttctaccctgacggagattctcgaggccatgaaacaccccagcacaggagttcagctcctgtctgagcagaagggcttgagtccctattgttttatcagcgctgaggtcgtgcactggctcgtgaatcatgtagagggtattcaaacccaggctatggccatcgacataatgcaaaagatgcttgaagagcagctgatcacacacgccagcggcgaggcctggagaacattcatatatgggttttacttttacaagattgtgacagacaaggagcctgaccgtgtggcgatgcagcagcctgctaccacttggcataccgctggcgtggacgacttcgcctccttccagaggaaatggtttgaggttgcattcgtggccgaagaactcgtccacagcgagattccagccttcctgctgccttggctcccttcccggcctgccagctacgccagtagacacagcagcttcagcagatctttcggaggacggtcccaggccgccgcactcctcgctgccaccgtgcctgaacaacgaacagttacgcttgacgttgatgtgaacaatagaaccgacaggctggagtggtgctcgtgttattatcacggaaatttttcactgaatgccgcatttgagattaagctccattggatggccgtgactgccgctgtcctttttgagatggtccagggctggcatagaaaagcaacaagttgtggctttcttcttgtccccgttctagagggccccttcgccctgccatcgtacctgtacggggaccctttacgagcccaacttttcatccctttaaatatttcttgcttgttgaaagagggcagtgagcaccttttcgatagctttgaacccgaaacatattgggacagaatgcacctttttcaggaagctatcgcacaccggtttggtttcgttcaggacaaatactctgccagcgctttcaacttccctgccgagaacaagccccagtacattcacgtaaccggtactgttttcctgcagcttccatattccaagagaaaattctcaggacagcagcgaagacgcaggaatagcacatctagcaccaatcagaacatgttttgcgaagagcgtgttgggtataactgggcctataataccatgctgacgaagacctggcggagtagcgctaccggagatgaaaagtttgctgaccgccttctgaaagattttaccgatttctgcataaatagggataatagactcgtgactttctggaccagctgtctggagaagatgcacgcgtccgccccgtag

SEQ ID NO: 114432 - DNA, 3690 bp, synthetic construct
  misc_feature 1..3690: note = Description of Artificial Sequence: Synthetic coding sequence
  source 1..3690: mol_type = other DNA
atgcgcactaccaaagtttacaagcttgtgatccacaaaaaggggtttggcggatcagacgatgagctcgttgtgaacccgaaggtatttcctcacatcaagctgggagatatcgttgagatagctcatcctaacgatgagtacagtcctctgttgctccaggtgaagtcccttaaggaggaccttcagaaagaaactatctccgtagatcaaactgttacccaggtgttcagactgagaccctaccaggatgtgtacgtcaatgttgtggaccctaaggacgtcaccctagacctcgtggagctcacgtttaaagaccaatatattggccgaggcgacatgtggcggctcaaaaaatccttggtctccacatgcgcatacataacccagaaagtcgagttcgccggtattagagcccaggccggagagctgtgggtcaaaaatgagaaggtcatgtgcggatacatatcagaagatacccgggtggtgtttaggagtactagcgccatggtctacatcttcatccagatgtcctgtgaaatgtgggactttgatatatacggggacctgtatttcgagaaagccgtgaacgggtttttggctgatctcttcactaagtggaaagaaaagaactgttcccatgaagtcaccgtggttctcttcagccggactttttacgacgctaagagcgtggacgaatttccagaaatcaacagagctagcattagacaggaccacaaaggtaggttctatgaggatttctacaaagtcgtggtgcaaaatgagcggagagaggagtggactagcctccttgtcacgattaagaaactctttatccagtatcctgtcctggtaaggctggagcaggccgaaggatttccccagggtgacaattctacctcagcccagggcaactatctggaggctatcaacctttccttcaatgttttcgacaagcactatattaaccggaacttcgatcgcacaggccaaatgtccgtcgtgattacaccaggggtgggagtgttcgaggttgatcgactgctgatgattttaacaaagcagaggatgatcgataacggcataggggtggatctcgtctgtatgggggagcagcccctgcatgcagtgccgttgtttaagttacacaatcgctccgcacctagggacagccgtttaggcgacgattacaacattcctcattggatcaaccattccttctatacctcaaagtctcaattattttgtaattctttcactccgcgtattaaattggctgggaagaaaccagccagcgagaaggccaagaatggacgcgatacttcactgggcagcccaaaggagtccgagaacgcactccccattcaggtggactacgacgcctacgacgcacaggtctttcgcctgcctggcccttctcgggctcagtgcctaacaacatgtcgatcagttcgcgaacgcgaaagccatagtcgcaagtccgcaagctcgtgtgatgtgtcctcttctccgagccttccctcccgtaccctgcctacagaggaggttcggtctcaggccagtgatgactcttccctcggtaagtcagcaaatattctaatgataccacatccccatctgcaccagtatgaagtgagttcaagcctggggtacaccagtactcgcgatgtgctcgaaaacatgatggaaccccctcagcgggatagctcagcaccagggcggtttcatgtaggttcagcggagagcatgctccacgtgcgaccaggaggatatactccccagagggcactgattaaccctttcgcaccaagtcgaatgcctatgaaactgacatcaaatcgtcggagatggatgcacacttttcccgtggggatgaatcccagaacacaaaataaagattcgctggaagatagcgtgtcaacaagtcccgaccctattttgactctgtctgccccaccagtggtcccgggattttgctgtacagtcggtgtggactggaagtcactgacgacgcccgcgtgtctccctctgacgacagactatttccccgacaggcagggcctgcagaacgattacactgagggctgttacgacctgctgcccgaagccgacatcgatcggcgggatgaggacggagtgcagatgacagcacagcaagtctttgaagagttcatttgtcagcggctgatgcaagggtaccagattatcgtacagccaaagactcagaagcccaatccagccgtacctcctccactttctagctcgcctctctattctagggggctagtgagccgaaatcgccccgaggaagaggatcagtattggcttagcatgggccggacgtttcacaaggtgacactgaaggataaaatgatcaccgtgacacgctatctgcctaaatatccgtacgaatctgcccagattcactacacctattcactttgtcccagccactctgactctgagtttgttagctgctgggtcgaattcagtcacgagcgattggaagaatacaaatggaactaccttgatcaatacatatgttccgcaggatcagaagacttctctttaattgaatcactgaagttttggcgtacacggttcttactgctccccgcctgtgtaacagcaactaaaagaatcactgaaggggaggcgcattgcgatatttacggcgaccgcccacgagctgatgaagacgagtggcagctcctggatggcttcgtgaggtttgtcgagggcctgaacagaatcagaagaaggcacaggagtgatcgcatgatgaggaagggaaccgcaatgaaagggctgcaaatgacgggtccaataagcacccacagtttagagtcaactgcaccgcctgtgggaaagaagggcacctctgcattgagcgccttgttggaaatggaggcatctcagaagtgccttggggagcagcaggccgccgtccacggggggaaaagcagcgcgcaaagtgccgagagctcctctgtggctatgacccccacctacatggacagtccacgtaaggacggcgccttctttatggagttcgtgcgaagcccccgcaccgcgagttctgcattctaccctcaggtgtccgtggatcaaacagcgactcctatgctagacggaactagtctggggatatgcaccgggcagtcaatggatagggggaacagtcagacattcggcaatagccagaacatcggagagcaggggtattcatcaacaaactcttctgacagttcttcacagcagctggtggcctcatcgctaaccagtagtagcacgttaacagagatcttagaggcgatgaaacacccttctaccggggtccaactgcttagcgagcagaaagggttgtccccttactgtttcatttcggccgaagtcgtccattggcttgtcaaccacgttgagggaattcagacccaagcaatggcaatcgacataatgcagtggccttgctcatccccccccccgcctggcacacagcaggagtggacaacaagccctgcaagttctgcttccggactgcggtggccgctgtggcagaaatcttcctgcacgctcaggttcctgccgttctcatgcccaggttgcctggccggccagccgcctatgcaggtaggcaccgctcccctggcagaggtgctagaggatggcgcgagaagacagcatttctag

SEQ ID NO: 114433 - DNA, 4512 bp, synthetic construct
  misc_feature 1..4512: note = Description of Artificial Sequence: Synthetic coding sequence
  source 1..4512: mol_type = other DNA
atgaggaccactaaggtttacaagctggttattcacaaaaagggcttcggtggctctgacgacgaactggtcgtgaatcccaaggtgtttccccacatcaaactgggcgacatagtggagatcgctcaccccaatgacgagtatagccccctgttgctgcaggtaaaatcgttgaaggaagacctgcagaaagagactattagcgtagaccagaccgtgactcaagtttttcggctgcgtccctatcaggatgtgtatgtcaatgtcgtggatcccaaagatgtgacccttgatctggtggagctaacatttaaggatcagtacatcggacgtggcgatatgtggagactgaaaaaatcccttgtctcgacatgcgcttacattacacagaaggtcgagtttgccggaatccgtgctcaggcgggagagctgtgggtcaagaacgaaaaggtgatgtgcgggtatatttctgaggacaccagagttgtattccgaagcaccagcgccatggtgtacattttcattcaaatgagttgcgagatgtgggatttcgacatatacggagatctttatttcgagaaggccgtgaatggttttcttgccgacctgtttactaagtggaaggagaaaaattgctctcatgaagtgaccgtggtgctgttctcccgcaccttctatgatgctaaaagcgtggacgagttccccgaaattaatcgggcttctattcgccaagatcacaagggccgtttttacgaggatttttacaaggtggtggtacagaacgagagaagagaagaatggacaagccttctcgtgaccataaaaaagctgtttatccaatatcctgtactggtccgccttgagcaggcggagggcttcccgcaaggggataattccacatcagcccaagggaattatttggaagctatcaatttgtccttcaacgtgttcgataaacattatattaatcggaactttgaccgcactggccagatgtcggtggtgattacccctggcgtgggcgtgttcgaggtggacaggttacttatgatcctcactaaacagcgaatgatagacaatggcattggtgtcgacctggtttgcatgggcgaacagcccctccacgccgtccctctttttaagctccacaaccgctcagcccctcgtgactcacggctgggagatgattataatatcccccactggattaaccacagtttttatactagcaagtcccagcttttttgcaattcttttacaccacgcattaaactcgcaggtaaaaagccagcctcagagaaagccaaaaacggtagagacacttctctcggaagccccaaggagtcagaaaacgctctgccgattcaggttgactatgacgcctatgacgcccaagtgttcagattgcccggcccaagtagagcgcaatgcttgacaacatgtcggtccgtgcgggagcgcgagagtcattcccggaaatccgctagcagctgtgatgtctcctcttcaccttctctgcccagccggacactcccaaccgaggaggtgcgctctcaggcaagtgacgactcctcgctcggtaaaagcgcgaacattctgatgatcccacacccacacttacaccagtatgaagtatcaagtagcctgggttatacttcaactcgagacgtactggaaaatatgatggagccccctcagcgggacagctctgccccgggtcgattccatgtgggaagcgctgagagcatgctgcatgtgcgcccgggtggatacacgccacagcgcgctctcatcaaccctttcgcgcccagcaggatgcccatgaagctgaccagcaacagacgacgctggatgcatacatttcccgtcgagactagctgtttttatttaagcattggtatgaatcctcgcacccagaacaaagacagtttggaagatagcgtgtcaaccagtccagatcccatgccaggcttttgctgtaccgtgggcgttgactggaaatccctcactactccagcctgtctacccctgactacagactacttccccgatcgtcagggactccagaacgattataccgaaggttgctacgacctgttgccggaggccgatattgatcggcgggacgaagacggagtgcagatgaccgcccagcaagtgtttgaagaatttatttgtcagaggctgatgcagggctaccagattatcgtgcagccgaagacccagaagcccaaccctgccgttcctccacccctgtcctcttcaccgctctatagcaggggtctggtgtcccgtaatcgacctgaagaagaggatcagtattggttgagcatggggcgtaccttccataaagtcactctgaaagataaaatgattaccgtgacaaggtatctgcctaagtacccatatgagagtgcacaaattcattatacatactccttgtgcccatctcattccgatagtgagtttgttagttgctgggtcgagttctctcacgaacggctggaggagtacaagtggaattacctggatcagtacatctgttctgccggttctgaagacttcagcctgatcgagtccctaaagttttggcgcactcgattcctgcttttgccagcctgcgtgacagccactaaaaggataactgagggagaggcgcattgcgacatctacggtgacagacctagggctgatgaagacgagtggcagctcttagacgggttcgtacggtttgtggagggtctgaacagaatcagaaggcggcaccgctccgatcgcatgatgcggaaaggtactgccatgaaagggttacaaatgacgggccccatttcaacacactctctggagtccacggcccccccagtggggaaaaaaggcacgtctgccttaagcgcactgctggaaatggaagcgagccagaaatgtctgggcgaacaacaggccgccgtgcatgggggcaaaagttcggcccagtctgcagaaagctcttctgtggctatgacacctacctatatggactcaccccggaaggtaagcgtagaccagacagcgactccaatgttggacggtaccagtctcgggatatgcactggacagtcaatggatcgcggtaattctcagacctttggaaacagccaaaatattggcgaacagggatattctagtacaaactcctcagatagctcttcacaacagctggtggccagttcactgacctcctcgtcaacgttaaccgaaatcctcgaggcaatgaagcatccgtcgaccggagtccaattgttgtcagagcagaaaggactgagcccatactgtttcatcagcgccgaggtcgtacattggctggtgaaccatgtggagggcattcagactcaggctatggcgatcgatatcatgcagaagatgctggaggaacaactaattacgcacgcgtcaggggaagcttggaggacatttatatatggcttttatttctataagattgtcactgacaaagagccagacagagtcgcaatgcagcagccagcaaccacttggcatacagctggagtggatgatttcgccagctttcaaaggaaatggtttgaggtggccttcgttgccgaggagcttgtgcactcagaaatcccagcctttctcctgccatggctgccttcaaggcctgcttcttacgcatcccggcattcatcattctccagatcatttgggggacgatcacaggctgctgctctgctggccgccacggtgcctgagcaaaggaccgtcacactggacgtagatgtaaacaaccgcactgaccgcttggagtggtgttcttgttattaccatggaaatttcagcctcaacgctgcctttgaaatcaaactccactggatggccgttaccgccgcagttctgttcgaaatggtccagggatggcatagaaaggctacatcttgcggatttctgctggtcccagtgctggaaggccctttcgccctgccatcgtatctctatggggaccctctgagggctcagctgttcataccgcttaatatctcgtgtctgctgaaagaggggtcagagcatctgtttgattcatttgagcccgagacctactgggatcgcatgcacctgtttcaggaggccattgcccatcgctttggcttcgtccaagataagtactccgcttctgcttttaattttcccgctgagaataagccgcaatacatccacgtgacaggtacagttttcctgcaactgccctattctaagaggaaattttctggacagcagcggcgaaggcggaactctaccagtagcaccaatcagaatatgttttgcgaggagcgtgtcggatacaattgggcatataatacaatgctcaccaaaacatggaggtcttcagcaactggtgacgagaaatttgcagaccggttactgaaggattttacagacttctgcattaacagagacaatcgactggttacattctggaccagttgtcttgaaaagatgcacgcctcggccccctag

SEQ ID NO: 114434 - DNA, 1680 bp, synthetic construct
  misc_feature 1..1680: note = Description of Artificial Sequence: Synthetic coding sequence
  source 1..1680: mol_type = other DNA
atgcgaaccacgaaggtctataaactagtcattcataaaaaggggtttggaggcagtgacgatgagctggtggtaaaccccaaagtattcccacatatcaagcttggggatatagttgaaatcgcccaccctaacgacgagtattcacccttgctcctgcaggtaaagagcttgaaggaagatctgcaaaaggagactatctccgtcgaccaaaccgtgacgcaggtgtttcgcctccgcccataccaagacgtgtatgtgaatgtggtggaccctaaagacgttaccctggatctggtcgagctgaccttcaaggaccagtacattggtcgcggagatatgtggagattaaaaaaatccttagtttctacatgtgcgtatattacccagaaggtggaatttgcaggcatccgagcacaagctggtgagctctgggtgaagaacgagaaggttatgtgtgggtatatttccgaggatactagagtggtcttcaggtcgacctcagcgatggtgtacatattcatccagatgtcatgtgagatgtgggacttcgatatctacggagacctctattttgaaaaagccgtgaatggttttctggccgatctgttcaccaaatggaaagagaagaactgctcccacgaagtcaccgtggtactgttctctcgcaccttttacgacgccaaatctgtcgatgagttcccggaaatcaatagagccagtattcgccaagatcataaagggagattttatgaagatttctacaaagtggtggtccaaaatgaacgaagagaagagtggacttctttgttagtgactatcaaaaagctgtttattcagtacccagtcttggtgcgcctcgaacaggcagaagggtttccccagggggacaattcgacatcagcccaaggcaattacctcgaggcgatcaatctatccttcaacgttttcgataaacactatatcaacaggaattttgaccggactggacaaatgtctgtcgttatcactccaggggtgggggtctttgaggtggatcgcttattgatgatccttactaagcagcgcatgatcgacaacggcattggtgttgacctggtctgtatgggcgaacaacccctccacgctgttcccctctttaaactgcacaatcgatccgctcctcgcgattccagattgggggacgattacaatatcccccattggataaaccattccttctatacttctaaaagccagcttttctgcaactcttttacccccaggatcaaactggctggcaagaagcctgcgtccgaaaaggctaagaatggccgggatacgtcactgggcagtccaaaggagtcggagaatgcactgcccattcaggtggattatgacgcctacgacgcacaggtgtttcgcctaccaggccctagtagagcccagtgtctgaccacatgtcgcagtgtacgggagcgcgaaagccattcccggaaaagtgccagctcctgtgatgttagcagtagtccctcactgccctctagaactctcccaacggaggaggtgcgctcacaggcatcggatgatagctccctgggtaaaagcgccaatatccttatgatacctcacccccatctccatcaatatgaggtgagcagttctctgggttacacgtccactcgcgaacatctaggatag

SEQ ID NO: 114435 - DNA, 4659 bp, synthetic construct
  misc_feature 1..4659: note = Description of Artificial Sequence: Synthetic coding sequence
  source 1..4659: mol_type = other DNA
atgcggactactaaggtgtataaactggttattcacaagaagggattcggaggctccgatgatgaacttgttgtgaaccctaaagtcttcccccacattaagctgggcgacatcgtagagatcgctcacccaaatgacgagtattcacctctactcttgcaggtaaaaagcttgaaggaagatctccagaaagagactataagtgtggaccagactgtgacacaggtgttccggctgagaccttatcaagatgtctatgtgaatgtagttgatccaaaggacgtgacactggatctcgtagagcttactttcaaggatcagtacatcggccgcggagatatgtggcggcttaagaagtctctggtgagtacgtgtgcttacataacccagaaggtcgaatttgccggcattagggcacaggctggtgagctgtgggtgaaaaacgaaaaggttatgtgcggttacatttctgaggacactcgcgtggtgttccggtccaccagcgctatggtctacatctttatccagatgagttgcgagatgtgggactttgatatctacggtgacctgtactttgagaaagcggtcaacggtttcttggccgacctatttacaaaatggaaagagaaaaattgcagtcacgaggtgacggttgtcctattttctcggacgttttatgacgcaaagtccgtagacgagttcccagagattaacagggccagtatccgccaggaccacaagggtagattctacgaggacttttataaagtagtggtgcaaaacgagagacgcgaggaatggacctctctgctcgttacaattaagaagctgttcatccagtatccagtgcttgtaaggctggagcaagccgaggggttccctcagggtgataactcgacgtccgctcagggcaattaccttgaggcgattaacctgtctttcaatgtctttgataagcattacatcaaccggaacttcgatcggaccggccagatgtccgtcgtcatcaccccgggagttggcgtgttcgaagtggaccggctactaatgatcttgacaaaacagagaatgatagacaacgggatcggagtagatctggtttgcatgggcgagcagcctctgcacgccgttccactgtttaagcttcacaaccgttctgcacctagggattccaggctgggggatgattacaacattccccattggatcaaccattccttttatactagtaagagccaactcttttgcaattcctttacccctagaattaagcttgccggtaaaaagccggcaagcgaaaaggccaaaaacggcagagatacttccctggggagtcccaaggagagtgaaaatgccttgcctatccaagtggattacgacgcttatgacgcccaggtttttaggcttccagggccaagcagagcgcagtgtcttacaacttgcaggtcggtccgggaacgagagagtcactctagaaaatccgcctcatcctgcgatgtttcgtcctcaccctctttaccctcgagaaccctgccaaccgaagaggtgcgaagccaagcatccgacgatagctcccttggaaagtccgctaacattctgatgattcctcaccctcacttgcaccagtacgaagtctccagctcccttggctacaccagtactcgagacgtgctggagaacatgatggagcctccacagcgagactcgagcgctccaggtagatttcacgtcgggtccgccgaaagtatgctgcacgtgagacccgggggctacaccccccagcgggccttaataaatccatttgctccgagtcgtatgcccatgaaacttacctctaaccggcggaggtggatgcacacttttcccgtgggcccgagcggagaggctattcagatccaccatcaaaccagacagaacatggcagagttgcagggttcaggccagcgtgatcccactcactcatcggccgaactcttagaattagcttaccacgaggccgcggggcggcactctaactctaggcagccaggcgatgggatgtcctttcttaatttttccggcacagaggagctttctgtagggctactgagtaattccggagcaggcatgaatccacggacccagaataaggatagcctcgaggactctgtgtctacatccccagatccaatccttaccctgagcgcacctcctgttgtccccggtttctgctgtaccgttggggtggattggaagtcattgacaacacctgcttgtcttccgttgaccaccgactactttcctgacagacagggcttacaaaacgattacacagaggggtgttacgatctcctccctgaggccgacatagatcgccgcgacgaggatggggtgcagatgacagcccagcaggttttcgaagagttcatttgccagcggctgatgcagggctaccagatcatagtccaacccaagacccagaagccaaatccagcagtcccaccacccttgtcaagctctccactgtacagcaggggactcgtatctcggaataggcccgaggaggaagatcagtactggctttccatgggcagaacctttcacaaagttactctaaaagacaagatgatcacagtgaccagatacctgccgaaatacccttacgaatcagcccagatacattatacctactccctttgtccctcccacagtgactctgagttcgtgagctgctgggtggaattctcccacgagcgacttgaagagtacaaatggaattatctggatcagtatatatgctcagctgggagcgaagatttctcattgatagaatctctgaagttctggaggaccaggttcttgctccttcccgcctgtgttaccgcgaccaaacggatcactgagggagaagcacactgcgacatttacggagatcgcccaagggccgatgaggatgagtggcagttgctagacggctttgttcgcttcgtcgagggactcaatcgaattcggagacgccatagaagcgataggatgatgcgcaagggtacggccatgaagggtctgcagatgaccggtcctatatccacacactctttagaatcaaccgcaccaccggtgggcaagaaaggaacgtccgccctctctgctttgttagagatggaggcctctcagaagtgtctgggagaacagcaggcggcggtgcatggagggaagagtagtgcccaaagtgctgaatcaagctccgtagccatgactcccacctatatggattcccccaggaaagatggagcctttttcatggagttcgtccgtagcccaaggacggccagttccgctttttatccccaggtgagcgttgaccagaccgctacaccaatgctcgacggaacgtctctgggcatctgtaccggccagtcaatggaccgtggtaactcgcagacttttggaaacagtcagaatatcggcgaacaaggttactcatcaacaaactccagcgatagttcaagccaacaactagtggcctcgagcttgaccagctcctccacgctgactgaaatcctagaagctatgaagcatccctcaaccggagttcagcttctgtccgagcagaaaggactttctccttattgtttcatctctgccgaggtggtgcactggctggtaaatcacgtcgaaggcatccagacccaagcgatggcgatcgacattatgcagaagatgctcgaagaacagttgatcacacacgccagtggagaggcctggcgaaccttcatctacggcttctatttttacaaaattgtcacagacaaagagccagacagagttgcgatgcagcaaccagccactacttggcatacagccggagttgacgatttcgcctctttccagaggaagtggtttgaggtggctttcgttgcagaggagctggtacactcagaaataccggcattcctgctcccctggctgccaagcagaccagcaagctatgcatcccgacacagctcatttagtcggagcttcggcggacgttctcaggcggcagccctgcttgccgccaccgttcctgaacagagaaccgttaccttggacgtggacgtgaacaatcgaacagaccgactggaatggtgcagctgctattaccacgggaacttctctctaaatgctgcttttgagattaagctgcactggatggccgtcacagcagcggtcctgtttgagatggtccaggggtggcatcgcaaggcgacgagttgtgggtttctattagtaccagtgcttgagggccccttcgccctgcccagttatttgtacggagatcctttaagggctcagctctttatccctttaaatatctcatgcctcctgaaagaaggatctgaacatcttttcgattctttgggactttacaagatcaacatattgcctctgctgcttacctcccttctgagaacatctctgagcatcagcacattgcaggaacaatgcttctgttcatgtcctaccccctccgcttcctcccaggggtcatctggcggcggcggcacgccccctgctccacccactagaacatgtagtgctcggagcgggagcgctacgacaggccccaccaccccttgttctccaaaacatggggcgcccgccccccagggcatgaagtccctgttgattggatgctag

SEQ ID NO: 114436 - DNA, 4719 bp, synthetic construct
  misc_feature 1..4719: note = Description of Artificial Sequence: Synthetic coding sequence
  source 1..4719: mol_type = other DNA
atgaggacaaccaaggtctacaagttggtgatccataagaaaggcttcggaggctcagatgatgaacttgtggtaaatccaaaagtgttccctcacataaagttaggagatattgtcgagattgcccatcctaatgatgaatattctcccctgctgctgcaagtaaagagtctgaaggaggatcttcaaaaagagacaatctctgttgaccagaccgtcacccaggtttttcgtctgcggccttatcaggatgtttacgtaaatgttgtggacccgaaggatgtaaccctggacttagttgaactgacttttaaggaccagtatatcgggcggggagacatgtggcgactgaagaaatctctggtcagcacatgtgcttacatcacccaaaaagtagagtttgctggaatcagggcgcaggcaggtgaactgtgggtgaagaatgagaaggtgatgtgtggatatatctccgaggacacccgggttgtctttaggagtacctctgctatggtttatatcttcatccagatgagctgcgagatgtgggattttgacatctatggtgacttgtacttcgaaaaggccgtcaacggcttcctcgctgacctgttcactaaatggaaagaaaagaactgttcacacgaggtgacggtggtgctctttagccgtacattctatgacgccaaatccgtcgatgagtttccggagatcaatagggctagcatacgacaagaccataagggaaggttttacgaagatttctacaaggtggttgtgcagaatgaacgaagggaggagtggacttccctgttagtgaccattaagaagctgttcatacagtatcctgtgctggtgcggttagagcaagctgagggatttccgcagggagacaattccacctcggcgcaggggaattacttggaagctattaatctatcgttcaatgtctttgataaacactacatcaatcgtaacttcgatagaaccggccagatgtcagtggtaataacccccggggtcggggtcttcgaggtggaccgactgctgatgattctgacaaaacaacggatgatcgacaacgggatcggcgtcgatctcgtctgcatgggcgaacagccactccacgcagtaccactcttcaagttgcataaccgatccgccccccgggactcaagactcggagatgactacaatatcccacactggataaaccactccttctatacttccaagagtcagctgttttgcaactcttttacaccacggattaagctggctggaaagaagcccgcctcagagaaagcaaagaatggaagagatacctctctgggctctcccaaagagtcggagaacgctcttcccatacaggtggattatgacgcgtatgatgcccaggtgttccggctccctgggcccagccgggcgcaatgcctcaccacgtgtaggtcagtgcgtgaacgggagagccactcaaggaagagtgcatctagctgcgatgtgtcatccagtccttctttaccttcccgcacactccctactgaggaggtgcggtctcaggcatccgacgattcttcactcgggaagtccgccaacatcctcatgataccccatccacacctccatcagtatgaagtgtcttcaagcctgggctatacctctacacgcgacgtcttggaaaacatgatggagccccctcaaagagactcttctgcacctggaaggttccacgttggcagcgcagagtcgatgctgcacgtgagacccggcgggtatacaccccagcgtgccctgatcaatccattcgcccctagcagaatgccaatgaaattaaccagcaaccgccgccgatggatgcacacctttcccgttggaccttctggagaggccattcaaatccatcaccagacccggcagaatatggctgagttgcaaggaagcgggcagcgggatcccactcacagttcggccgagctcctcgagctcgcttatcacgaggcggctggccgccacagcaattccagacagccaggagacggcatgagttttctcaacttcagcggaactgaggaattgtcagtcgggctgcttagtaattctggtgccggcatgaacccaaggactcagaacaaagattccctcgaagatagcgtctccacctcccccgacccgatgcccggattttgctgcactgttggcgtggactggaaatccctcacaactccggcttgtctgccgctgacgacggattattttcccgataggcaaggcttacaaaacgactacactgaaggttgctacgacttgctcccggaggccgatatcgaccggagggacgaggacggggtccagatgaccgcccagcaggtttttgaggagttcatatgtcagcgcttgatgcaaggatatcagatcatcgtccaacccaagactcagaagcccaacccagccgttccaccccccctgtccagctcaccactgtattctcgggggctagtgagtaggaatagaccagaggaggaggatcagtattggttatctatgggtcggacgttccataaggtgactttgaaggataaaatgatcaccgtgactcggtacctgccaaagtacccctacgagtccgcccaaattcattacacctacagtctatgtccaagccacagcgattccgaattcgtgtcatgctgggtcgaattttcccacgaacgattggaagagtataagtggaattacctggaccagtatatctgcagtgccgggagtgaggatttttccctgatcgagtcattgaaattttggcgaacaagatttctgctgctccctgcttgcgtaacagctacgaaaagaattacagagggggaagcccactgcgatatttatggagaccgacctcgcgcagatgaggacgaatggcaacttcttgacggttttgttagatttgtagagggattgaatcgaattcgaagaagacacagatccgatcggatgatgaggaagggaacggctatgaagggactgcagatgaccggacccatcagtactcacagtctggagagtactgcgccacctgtggggaaaaaaggcacttccgccctgtccgccttactggagatggaagcatctcaaaagtgcctgggagagcaacaggctgccgtgcatggcggcaaatcctccgcccagtctgccgagtcttcatctgtggctatgacaccgacctatatggattcaccaagaaaagtttcagttgatcagacagccactcccatgttagatggcaccagtctgggtatctgtaccgggcaaagcatggacaggggtaattcacagactttcgggaacagtcagaatatcggagaacagggatatagctccactaacagcagcgattcctccagccagcaactggtcgcctcttcgcttacgtcaagctccactctgaccgagatcctagaagcaatgaagcatccttccaccggcgtgcaactgctttccgaacagaagggcctgtccccctactgtttcatttccgccgaggtggtccattggctggttaatcatgtggaagggatacaaacccaggcaatggcaatcgatataatgcagaagatgctcgaagagcagttgattacccatgcatccggagaggcttggcgaacgtttatctatggcttctatttttacaagattgtcacagacaaagagccggaccgggtggcgatgcagcagccagccactacttggcacaccgccggggtggacgattttgccagctttcagagaaaatggttcgaggtcgcattcgtggccgaagagttggttcatagcgaaattccggcgttcctgctaccttggttacccagtaggccagcgagctacgcatctagacattcctccttcagcaggtccttcggcggcaggagccaagcggcagcattgctggctgcaacggttccagaacaacgtacagtgactctggacgtagacgttaacaatagaacggaccggcttgaatggtgctcttgctattaccatgggaacttcagcctgaatgcagccttcgagattaagctccactggatggccgtgactgccgcggtgttgttcgagatggtgcaagggtggcaccgaaaagccaccagctgcggattcctactggtgcctgttttggaaggccccttcgctcttccctcttacctctatggagatcctctccgagcacagctgtttataccattgaacataagctgcctgcttaaggagggatcggagcacttattcgatagcttcgaaccagaaacttattgggacaggatgcatctctttcaggaggccatcgcccacagattcggctttgtccaggacaagtatagcgcatccgcctttaattttcccgcagagaataagccacagtacatccacgtgaccggcacggtctttttgcagctcccttatagcaagcggaaatttagcggacagcagcggcgtcggcggaactccacatcctcaacaaatcagaatatgttctgcgaagagagggtcggttataactgggcatataatactatgttgaccaagacctggagatcatcagcaacaggggacgagaagttcgcagatcgacttctcaaagattttactgatttctgcatcaatagggataaccgtctcgtgactttctggacttcctgtctggaaaaaatgcacgccagtgccccctag

SEQ ID NO: 114437 - DNA, 4719 bp, synthetic construct
  misc_feature 1..4719: note = Description of Artificial Sequence: Synthetic coding sequence
  source 1..4719: mol_type = other DNA
atgcgaactaccaaagtttataagctcgtgatccataagaagggttttggcggtagcgatgacgagcttgtcgtcaacccgaaagtgttcccacacatcaaactgggcgacatcgtcgagatcgcacacccaaacgacgaatacagcccccttctccttcaggtgaagagcctgaaggaagatctacagaaggagacaatctctgtggatcagacagtcactcaggttttcagactgaggccataccaggacgtgtacgtcaacgttgtggaccctaaggatgtcaccctggacctggtcgagctgacattcaaagatcagtacatcggccggggggacatgtggagactgaagaagtccctggtttcaacttgcgcgtatattactcaaaaagtcgagtttgctggcatcagagcacaggccggggagttgtgggtgaagaacgagaaggtcatgtgcggctacatttctgaggacacaagggtcgtttttaggagtacatccgcgatggtgtatattttcatccaaatgagctgtgaaatgtgggactttgacatttacggggacttgtactttgagaaagctgtgaatggcttcctggcagatctgtttactaagtggaaagaaaagaattgtagccacgaggtcacagtggttctcttctccagaacattttatgacgccaagtcggttgatgagtttcccgaaatcaacagagcaagcattcgccaggatcataagggtcgcttctacgaagatttctacaaagtggtggtacagaacgaaaggagagaggaatggacctctctgctggtgaccattaaaaagctgtttatccaatatcccgtcctcgttcgcttagagcaggccgaagggtttccacagggggataactccacatccgcacagggtaactacctcgaggccataaatttgtcgtttaatgttttcgataagcactacatcaacaggaacttcgacagaaccggccagatgtccgtcgtgataacccccggggtgggtgtgttcgaggtggataggcttctcatgattctgacgaagcaacggatgatcgacaacggaatcggagtcgatctggtctgcatgggcgagcaacctctgcacgccgtacccctgtttaaactccacaacagaagcgccccaagagattctcgactgggggatgattataatattccacattggatcaaccatagcttctacaccagtaagagtcagctcttttgtaactcctttactcctagaatcaagctcgctggaaaaaagcctgctagtgaaaaagcaaaaaacggccgggatacctccctcggctctccaaaggaaagtgagaacgcactgcctatacaggtggattacgatgcctatgatgcgcaggtgttccggctgcccggcccttcacgggctcagtgcctgactacgtgccgcagcgtcagagagagggaatcacactcccgaaaaagcgcttcttcatgcgacgtgtcaagtagtccatctcttccatcccggaccctaccgactgaggaggtgcgttcacaggcttccgatgacagctcattgggaaagagtgctaacatactgatgattccccatcctcacctccaccagtatgaagtaagctcaagcctgggatatacaagcactcgggacgtgctagaaaacatgatggaacctccacagcgagactcttctgctccgggcaggtttcatgtcggtagtgctgagtctatgctacatgtccgacctggaggatatacaccccagagagccctaatcaatccatttgcaccctccagaatgcctatgaagctgacttccaatagaagacgctggatgcacacattcccagtggggccgagtggagaagccattcagatccatcaccagactagacaaaacatggccgaactacagggcagcggacagagagatccaacgcacagctcggctgagttattagaactcgcttaccatgaggccgccggcagacactcaaacagcagacaaccaggcgatgggatgagctttctcaactttagtggaaccgaagagctgagtgttgggctcttaagtaactctggggctggtatgaatcctcgtactcagaacaaggactcattggaagactctgtaagcactagccctgatcctatgcctggattctgctgtaccgttggggtggattggaaatccctcactacaccggcctgtttaccccttactacagattatttcccagatcgccaaggattacaaaatgactacactgaaggttgctatgatctactcccagaggctgacattgaccgccgtgatgaggacggcgttcagatgaccgcacagcaagtgttcgaagaatttatttgtcaaaggctcatgcaggggtaccagattatcgtgcagcctaagacccaaaagcctaatcccgccgtaccccctcccctgagctctagtccgctctattctagggggctggtatcccgtaaccgacccgaggaagaagatcaatattggcttagcatggggcggacgtttcataaagtcacactaaaggataaaatgatcacagtgacaagatacttacctaagtacccctatgagtccgcacaaattcattatacatacagcctctgtccgtcgcatagcgacagtgagttcgtatcttgttgggtggaattttcacatgagaggctggaagaatacaaatggaactatctggaccagtatatttgcagcgcagggtcagaggacttttctctcatcgagagcctgaagttttggagaacccgtttccttttgcttccagcctgcgttaccgccactaaacggatcacagagggggaagctcactgtgatatctatggcgataggcccagggcggatgaagatgagtggcagcttctcgatggctttgtgaggtttgttgaaggtcttaacaggatcagaaggcgacatcgctctgaccgcatgatgcggaaggggactgctatgaagggcttacagatgaccgggcccatatctactcacagtcttgagtccaccgcccctccagtaggcaagaagggtacaagcgccctcagtgcgctgctcgagatggaggcaagccagaagtgcttgggtgagcaacaagctgcggtccacggaggaaaatccagcgcacagagcgccgaaagttccagcgtcgcaatgacaccaacctatatggatagtcccaggaaggtgtccgttgaccagacggccacgccaatgctcgacgggacaagcctcggcatctgcactggccagagcatggaccgtggaaattcacagacattcggcaacagccaaaacattggtgagcaaggatactcatctactaatagtagcgattcctccagtcagcagcttgttgcctcaagtctgaccagctcatccaccttgactgaaatcctggaggccatgaaacaccccagtaccggcgtgcagttattgtcagagcagaagggattgtctccctactgctttatcagtgctgaagttgtccattggctggttaaccatgtggaggggattcagacacaagccatggccattgatatcatgcagaagatgctagaagaacaattaatcactcacgctagcggggaggcatggagaaccttcatctatggattctatttttacaaaatagtcaccgacaaggaacccgatagggtggcaatgcaacagccagctacaacatggcatacagcaggggtggatgacttcgcctcctttcagaggaaatggtttgaagtggccttcgtggccgaagaacttgtccatagcgaaatccctgcttttctcttgccatggctgcctagccggcctgcctcttacgcatcgagacacagctcctttagtcgcagcttcggcggtcggagccaggctgccgcccttctggccgcaactgttccagaacaaaggacggttacattggacgtcgatgtgaataatagaaccgataggctggagtggtgttcctgttattaccatggcaatttctcattaaatgcagctttcgagatcaagctgcattggatggcagtcaccgccgccgttctttttgagatggtgcaaggttggcaccgcaaggcgaccagctgtgggttcctacttgttccagtgctggagggccccttcgccctccccagttacctatacggggatcctctgagagcccagttgtttatcccactgaatatcagctgtctattgaaggaagggagcgaacacctctttgattcgttcgagccggaaacctactgggacaggatgcatctcttccaggaagcaattgctcaccggttcggcttcgtgcaggacaaatatagcgctagcgcatttaacttccccgcggagaataagccacagtacatccacgtgaccggcacagtttttctgcaactgccgtattctaagaggaagttcagcggacaacaacgccggcgccgtaattccacatcctctacaaatcagaacatgttctgtgaggagagggtgggttacaactgggcctacaatacaatgttaaccaagacatggaggagcagcgccacgggggacgagaaattcgccgaccgcctgctgaaggatttcaccgatttctgcattaaccgcgacaatagattagtgactttttggaccagttgcctggaaaagatgcacgcaagcgctccctag

SEQ ID NO: 114438 - DNA, 138 bp, synthetic construct
  misc_feature 1..138: note = Description of Artificial Sequence: Synthetic coding sequence
  source 1..138: mol_type = other DNA
atgagaacaactaaggtttataagctggtcatacacaaaaagggtttcggcggtagcgatgatgagcttgtggtgaaccccaaggtcttcccccacatcaaactgggagatatcgttgagattgctcacccgaattag

SEQ ID NO: 114439 - DNA, 4512 bp, synthetic construct
  misc_feature 1..4512: note = Description of Artificial Sequence: Synthetic coding sequence
  source 1..4512: mol_type = other DNA
atgaggactactaaggtgtataagctggtcatccataagaaagggtttggaggttctgacgacgagctcgtggtgaacccaaaagtgtttccccacatcaagctgggggatattgtggagattgctcatcccaatgatgagtatagcccactgctgctccaagtcaaaagtcttaaggaggatttgcagaaagaaacaatctccgtggatcaaacagtgacacaggtgtttcgtctgaggccctatcaggacgtgtacgtaaacgtcgtggaccctaaagacgtgactctggaccttgtggaactcactttcaaggatcagtacattggcagaggggacatgtggcgactgaagaagtccctggtctctacttgcgcctatattacgcaaaaagtggaatttgccggaattcgcgctcaggccggcgagctgtgggttaaaaatgagaaagtgatgtgcggttacattagcgaagacacacgagttgtgttccgatctaccagcgccatggtttacatattcatccagatgtcatgcgaaatgtgggattttgatatttacggagacttgtacttcgaaaaagcagtgaatggtttcttggccgacctgttcacgaagtggaaggaaaagaattgttcacacgaagtcaccgttgtgttgttctcgagaacgttttacgatgcaaagtccgtggacgaatttccagaaataaaccgagcttctatcaggcaagatcataaaggtagattctacgaagatttttataaagttgttgtgcagaatgagcgccgcgaggagtggacatccctgttggtcaccatcaaaaagctgttcattcagtatcccgtgctggtgcggctcgaacaggccgagggcttcccacagggggataattctaccagtgcacaggggaattatctggaagctatcaacctgagttttaacgtgtttgacaaacattacatcaataggaactttgacaggaccggacaaatgtccgtggtgatcacccctggggtgggagtgtttgaagtagatcgtcttctaatgatccttacgaaacagaggatgattgataacggtatcggtgtagacctcgtttgtatgggtgagcaacccctccacgcggtccccctgttcaagctgcacaacagatcagccccaagggactcacgtttaggggatgattacaacataccccattggatcaatcacagcttctacacctcaaaaagtcagctcttctgcaatagtttcacacctaggattaaactggcgggaaagaagcctgcttccgaaaaggctaagaatggaagagataccagtctgggctcccctaaggagtctgagaacgcactgccaatacaggtggattatgatgcttatgatgctcaggtgttcaggctgcctgggcccagtagggcccagtgtctaacaacttgcagaagcgtgcgcgagcgggagagtcattcccgcaagagtgccagcagctgtgacgtgtcctcttccccatccctcccctcacggaccctgccgaccgaagaggtcagatcacaagcatcagacgattcctccttgggcaagtcggcaaatattttaatgattccccaccctcacctccaccagtatgaggtctcgagtagcctgggctacactagcactagggatgtgctcgagaatatgatggaaccaccacagagggactctagtgctcctggccggttccatgtggggtccgctgaaagtatgctgcacgttcggcccggaggatacactcctcaacgagcccttatcaacccctttgcacctagtaggatgccaatgaaactgacatccaataggagaaggtggatgcacacctttccagtgggcatgaatcctcgtacccagaataaagactcacttgaggactccgtctcaacctcgcctgacccaatcctcactctgagcgccccccccgtagtacctggattttgttgtaccgttggtgttgactggaaaagcttgaccactccagcttgcttacccctcacgacggactattttcctgataggcagggattacagaacgactataccgaaggatgctacgacctcctgcccgaggcagacatcgacagaagggatgaggacggcgtgcagatgactgcccagcaggtgttcgaggagtttatttgtcagcgcttgatgcagggttatcagatcatagtgcagcccaaaacacagaaacccaatcctgcggtgccaccgcctctgtcgtcttctccattgtactctaggggcctggtgtcacggaacaggccagaggaagaggaccagtactggttgagtatgggcaggacttttcataaggtgactcttaaggacaagatgattacagtgactaggtacctgcccaaatacccttacgagtccgcgcagatacactacacttatagtttgtgccccagccacagtgattcggagttcgttagctgctgggtggagtttagtcacgaaaggcttgaggaatataaatggaactatcttgaccagtatatctgtagcgctggctcagaagatttcagcctcatcgaatccctcaaattttggcgcacccgcttcctcttactaccggcctgcgtgactgctaccaaacgtatcaccgaaggagaggcacattgcgatatctatggcgaccggcctcgggccgatgaggacgaatggcagttgctggacggatttgttaggtttgtagagggtttgaaccgtatacgtcggcgacaccgaagtgaccggatgatgaggaagggcactgcgatgaagggactgcagatgaccggaccgatctcaactcatagccttgagtctaccgccccaccagtcggaaagaaaggtacgtctgcgctgtcagcactgctagagatggaggcttcacaaaagtgcttgggagagcagcaggctgctgtgcatgggggcaagtcctccgcccagagtgccgagagctcttccgtggcgatgacacccacatacatggattcgccacgaaaggtatcggtggaccagactgccacccctatgctggatgggacatcactgggaatttgcaccgggcaaagtatggatcgaggaaacagtcagacattcggtaactcccaaaatatcggtgagcagggatattcatccacaaattcttctgactcttcctcccagcagttggtggcctctagtctcactagcagctccacattgacagaaatcctggaggccatgaagcacccctccaccggcgtgcaactcctctccgaacaaaaagggctctccccctactgcttcatttcagcggaggtcgtgcactggctggttaaccatgtggagggcatccagacacaagcgatggccatcgacattatgcagaagatgctcgaagaacagcttataacccatgcttctggtgaagcttggagaaccttcatttacggtttttatttctacaagatcgtcacagacaaagaacctgaccgggttgccatgcagcagcctgccaccacttggcataccgccggggtggatgacttcgcatccttccaaaggaaatggttcgaggtggcgtttgtcgcagaggagctggtgcatagtgaaattcctgcttttctcctcccatggctaccgtcacggcccgccagctatgcctctcggcactcaagcttctcacgatctttcggtggtaggagccaggctgccgcactgctggccgcaactgtgccagaacagagaaccgttaccctcgacgttgacgtgaataatcgtaccgaccgattagaatggtgtagctgttattaccatggaaacttcagtctgaacgctgccttcgagatcaagctgcactggatggccgttacggccgccgtgctgttcgagatggtgcaggggtggcatcgcaaggccacttcatgcggatttcttctggtccctgtccttgaggggccttttgcgctgccctcctatttgtatggcgatccgttgcgcgcccagctgtttatccctctcaatatcagctgtttactcaaggagggctccgagcacttgttcgattccttcgaacccgaaacttattgggataggatgcaccttttccaagaggcaatcgcccatcgctttggatttgtgcaggacaaatactcagcatcggccttcaactttcccgccgaaaacaaaccacagtacatccacgtgaccggcacagtgttcctccagctgccctatagcaaaagaaaattctccgggcagcagcgacggaggcggaatagcacttccagcaccaaccaaaacatgttttgcgaggagcgtgtgggatacaactgggcttataacacaatgctcactaaaacctggaggagtagcgctacaggcgatgagaagttcgcagatagattactgaaggactttaccgatttctgtattaatcgggacaacagactggttaccttctggacctcttgcctggaaaagatgcatgcgtctgctccgtag

SEQ ID NO: 114440 - DNA, 1995 bp, synthetic construct
  misc_feature 1..1995: note = Description of Artificial Sequence: Synthetic coding sequence
  source 1..1995: mol_type = other DNA
atgcgcactacaaaggtctataagctcgtgattcataagaagggcttcggaggaagcgacgacgaactggtagttaaccccaaagtgttcccccacatcaagctcggtgatatagtggagatcgcacatccgaacgacgagtactctccgctcctgctgcaggtgaagtcactcaaagaggatcttcagaaggaaacgatctcggtcgatcaaaccgtgactcaggtgtttcgtctgaggccatatcaggacgtttatgtgaacgtggtggaccccaaggttagtacctgcgcctatatcacgcaaaaggtagagtttgctggcataagggctcaagccggtgaactgtgggtcaaaaatgagaaggtcatgtgcggttacatctcagaagatactagggtcgtattccgctctactagcgccatggtctacatttttatccagatgtcttgcgagatgtgggattttgacatctacggcgacctttattttgaaaaggccgtcaatggctttctcgccgacctgtttaccaaatggaaggagaagaattgtagccacgaagttacagtggtattattctcccggaccttctatgacgctaaaagtgtggatgaattccccgagatcaatagggcgagcattcgccaggatcacaagggacgattttacgaagatttttataaagtggtcgtccagaatgagaggagagaggagtggaccagtctgcttgttactatcaagaaactgtttatccaatatccagtcctggtccgtcttgagcaagccgaaggtttcccacagggcgataacagcacatccgcccagggtaattaccttgaggccatcaaccttagttttaatgtgttcgataagcactatattaatagaaatttcgataggactgggcaaatgtcagtcgttatcactcccggcgtgggagtttttgaagtggacagactactgatgattctaacaaagcaaagaatgatcgataatggcatcggtgttgatctggtgtgtatgggggaacagccattgcatgccgtgcccttgtttaagctgcacaacaggtccgctccccgggatagtagactcggtgacgattataatatcccacactggattaatcactctttctatacttctaaaagccaactcttctgtaatagcttcacccctcgaatcaagcttgcaggcaagaagcccgcatcagaaaaagccaagaacggccgagacacatccttgggcagtccaaaggagtccgaaaacgccttacccattcaagtagactacgatgcttacgacgcacaggtattccgcctgccaggcccatccagagcacagtgccttaccacatgccggagtgtgcgagagcgagagagtcacagtcgcaagtccgcttcctcctgcgacgtgtctagcagcccctccctgcccagcagaactctgcctacagaagaggtgcggtcacaggcatctgacgactccagtctcggaaaatcagccaatattctgatgattccacacccccatctgcaccaatatgaagtgagtagctcactaggatatacgagcacgcgcgatgtgcttgagaatatgatggagcccccacagagggattcctcagctccaggaaggttccacgtcggcagtgcggaaagtatgttacatgtaaggcctggcgggtacaccccccaacgggccttaatcaatccttttgcgccctcccgcatgcccatgaaacttacctccaatcgaaggcggtggatgcatacctttcccgttggcatgaaccctagaactcaaaacaaggactcactcgaggattcagtgtctacctcccctgacccatctaagaggggacagctgaccggagagaggggtcgtcaaggtgtgtggggaggccagagtatgaggaaacaagaggaagcactgtgggaagtttcggggcctgaggttcacatccctttggggtatggtaaggctatgtggtag

SEQ ID NO: 114441 - DNA, 1263 bp, synthetic construct
  misc_feature 1..1263: note = Description of Artificial Sequence: Synthetic coding sequence
  source 1..1263: mol_type = other DNA
atgaagcatcctagcaccggtgttcagctcctgagcgagcagaagggtctgtccccatactgtttcattagcgccgaagtggtacactggctggtgaaccacgtcgagggcatccagacccaggcaatggcgatagacattatgcagaagatgctggaggaacagctgatcacacatgcgagcggcgaggcctggaggacatttatctatggattctacttttacaagatagtgaccgataaagaaccagatcgagtggccatgcagcaaccagcaacaacatggcatactgcaggcgtcgatgatttcgcctcttttcagcggaaatggtttgaagtggcttttgttgctgaagaacttgtgcactcagagattccagctttcttactcccgtggctgccatcccgacctgcttcctatgcgtctcgacactccagctttagtcgaagcttcggcggcagaagccaggccgccgcactgttagcagctacagtccccgaacagcggaccgtcaccctggatgtcgatgtaaacaacaggaccgatcggctcgagtggtgttcctgctactaccacggcaacttttctctgaacgctgcctttgaaataaaactacactggatggctgtgactgcagcagtgcttttcgagatggtgcaggggtggcaccggaaggcaacctcttgcggattcctgctcgtccccgtccttgaaggcccatttgctctgccaagctatctctacggggatcccctcagggcccagttgttcatccccttgaatatatcctgcctgctcaaggaaggaagcgaacatctcttcgacagcttcgagccagagacctactgggaccgcatgcatctgtttcaggaagccattgcccatagattcggctttgtccaggataagtattctgcctccgccttcaattttccagcggagaataagccccagtacatacatgtgaccggaacagtatttctccagttaccttactctaagcgcaagtttagcggacagcagcgcagacgaagaaacagtactagttccaccaaccagaatatgttttgtgaggagcgcgtcgggtacaactgggcttataacacaatgctgacaaagacctggcgatcctctgccactggagacgaaaaatttgccgaccggttactaaaagactttaccgacttctgcattaaccgagataatcgactggtgaccttctggacctcgtgtctggagaagatgcacgcttccgccccgtag

SEQ ID NO: 114442 - DNA, 4785 bp, synthetic construct
  misc_feature 1..4785: note = Description of Artificial Sequence: Synthetic coding sequence
  source 1..4785: mol_type = other DNA
atgaggaccacaaaggtttacaagcttgttatccataagaaagggttcggaggcagcgacgacgaattggtcgtcaatccaaaggtgttcccacacattaagctgggggacatcgtggaaattgcacaccccaacgacgaatactcacctctgctgcttcaagtgaagtctttgaaggaagacctgcagaaagagacaatctccgtggatcagaccgtaacacaggtctttaggctgaggccctatcaggatgtgtacgttaatgtggttgacccaaaggacgtcaccctcgacctagtcgagctgaccttcaaggatcaatacatcggtcggggcgatatgtggcggctcaagaaatcactggtttcaacttgcgcatacatcacacaaaaagtggagttcgcagggatacgtgctcaggccggagagctctgggttaagaatgagaaagtcatgtgtggatatatcagcgaggacacccgtgtagttttcaggtcaacttccgctatggtctatatatttattcagatgtcttgtgagatgtgggactttgacatctatggtgacctttatttcgaaaaagccgtgaacgggttcttagctgatttgtttacaaagtggaaagaaaaaaattgtagtcacgaagtaaccgttgtgctttttagtcggactttttacgatgctaagagcgtagacgaattccctgagattaatcgtgcaagtattaggcaggatcataagggtagattttatgaggacttttacaaagtcgttgtgcagaacgaaaggcgcgaggagtggactagcctgttggttaccattaaaaaactttttatacagtacccggtattagttcgcctggaacaggccgagggatttcctcaaggagacaactccacttccgctcaggggaactaccttgaagcaatcaacttgagcttcaacgttttcgataaacactacatcaacaggaatttcgatcgcacagggcagatgtccgtcgtgattacccccggagtcggtgtcttcgaggtggatcggctgcttatgattctcacaaagcagcgaatgatcgacaacgggattggtgtggatctggtgtgtatgggtgagcagccactgcatgccgtacccttgtttaagttacacaatagatccgcaccaagggacagtagacttggagacgattacaatatcccacactggatcaaccatagcttttatactagtaagtcccaactgttctgtaactccttcacaccccgaatcaaacttgccggcaagaagcccgcatctgagaaagctaaaaatggcagggatacatccttggggtcacccaaagagtctgagaacgctctccccatccaggtagactacgatgcttatgatgctcaagttttccgcttgccaggcccctcacgtgctcagtgtctcacgacctgtagatccgtacgcgaacgtgaatcgcactctagaaagtccgcctccagctgcgacgtgagttcatctccgtcccttccaagtcgcacccttcctacggaggaagtccggtctcaggccagcgacgacagttctcttgggaagagcgctaacatcctaatgatcccccatccccatcttcatcagtatgaagtttcgtcaagccttggatatacatccaccagggatgtgctggagaatatgatggaaccccctcagagagacagtagcgcacccggacggtttcacgtagggagtgctgaatctatgctgcatgtccgccccggtggatacacgccccagcgcgccttaatcaatccattcgcaccaagccgcatgcctatgaaactcacgtccaaccgcagaagatggatgcacactttcccagtcggaccaagcggcgaggctattcagattcaccatcagacacgccagaacatggctgaactccaagggtctgggcagcgggaccctacccactcctcagccgagttgctggaactggcttatcacgaagccgcaggacgccacagcaacagtcgtcagcctggcgacggtatgtctttcttgaactttagcggcactgaggagttgtcagtgggtctcctctcaaattctggggcgggaatgaacccccgcactcagaacaaagattctctcgaggactcagtgtcaaccagccccgacccaatgcctggcttttgttgcaccgtcggcgtagattggaaatcgctaactacccccgcctgtttgcctctaaccaccgattatttccctgaccgccaaggcttgcagaatgactatacagaagggtgttacgatctactgcctgaagctgatattgataggcgtgacgaagacggagtgcagatgacagcccaacaggtgtttgaggagtttatttgtcaacgcctgatgcagggctaccaaataatcgtgcagccaaaaacacagaaaccaaacccagccgtaccacctcccctgtcgtcatctcccctgtattccagaggtcttgtaagtcgaaatagacccgaagaggaggaccagtattggctatcgatggggcgtacatttcacaaggttacgctaaaggataaaatgattacagtgacaaggtaccttcctaagtacccatatgagagcgcccaaattcactatacatatagcctgtgcccctcccattccgactccgaattcgtgtcatgttgggttgagttcagtcatgagagactcgaggagtacaaatggaactacttggaccaatacatctgttctgctggctctgaggatttctctctgatcgagagcctcaaattttggaggacccgcttcttactcctgcccgcttgtgtgactgctacaaaaaggatcacggagggagaagctcactgcgatatctatggtgatcggcccagagccgatgaggacgagtggcagctcctcgatggatttgtgagatttgtggagggactgaaccgcatccgccggagacacaggtcagacaggatgatgaggaagggtaccgcgatgaagggacttcagatgacgggccccatttcaacccactcgctggagtctaccgctccaccagtgggcaagaaggggacctccgctctgagcgccctattggagatggaagcatcacagaagtgcttaggtgagcagcaggcagctgtccatggcgggaaaagcagtgctcagtctgcagaatcctcctcagtggctatgacgcctacatacatggattcaccacgtaaagatggcgcattcttcatggaattcgtgcgctcgccacgcaccgcctccagtgccttctacccacaggtgagcgtcgaccagactgcgacaccaatgctggacggtacaagccttggaatctgcaccggacagagcatggaccggggcaactctcagacattcggcaactctcagaatatcggcgagcagggatacagcagtactaattcatctgattctagctcccaacagctcgtggcatctagtctcacaagctcttctaccctgactgagattttggaggcaatgaaacatccctctacaggagtccaactactgtcagaacagaagggtctctcgccatactgcttcattagcgcagaggtcgtgcattggcttgtgaaccacgtagaggggatccagacacaggctatggctatcgatatcatgcagaaaatgctggaggagcaattgatcactcacgcctctggagaggcttggagaacatttatttatggattttacttctacaaaatagtaacagacaaagagccagatcgggttgccatgcaacagcccgcaaccacgtggcacaccgccggcgttgacgactttgcttccttccagcgcaaatggtttgaagttgcatttgtcgcagaggagcttgtgcatagtgaaatcccagcattcctgcttccgtggttaccatcccgcccagcatcctatgcctctagacactcctctttttcaagaagctttgggggacgatcccaagcagctgccttgctggccgccaccgtgccggagcagcgcaccgtgaccctcgatgtggatgtcaataaccgtacagatcgccttgaatggtgcagttgttactaccacggcaacttctcgctcaacgctgccttcgaaatcaagctgcactggatggccgtgactgctgccgtactgtttgagatggtccagggatggcaccggaaggctacatcttgcggctttctgctggtacccgtgttggaaggcccttttgcacttccctcgtacctctacggcgaccctctgcgcgctcagctttttattcctttgaacatttcgtgcctactgaaggaaggtagcgaacatctcttcgactcgttcgagccggagacatactgggatcgaatgcacctgttccaagaggctatagcccaccggttcggcttcgtccaggataagtactctgctagcgccttcaattttcctgcagagaataagccgcagtacatccatgtcacaggcacagtgttcctacaactgccttattccaaaagaaagttttctggccagcagcgacgccgcaggaatagcacctcctctactaaccagaatatgttctgtgaggaaagagtggggtacaactgggcctacaacaccatgctcactaagacctggaggagcagcgcaacaggagatgaaaagttcgcagacaggctgctaaaagatttcaccgacttttgcatcaatcgagacaacaggctagtgactttttggacttcatgtctggagaagatgcacgcttcagccccctag

SEQ ID NO: 114443 - DNA, 1536 bp, synthetic construct
  misc_feature 1..1536: note = Description of Artificial Sequence: Synthetic coding sequence
  source 1..1536: mol_type = other DNA
atggctacggtgcaggaaaaagctgctgccctgaacttaagcgcactccatagccccgcccacaggccacccggatttagtgtggcccagaagccctttggggctacctacgtgtggagttcaattattaatacactgcagacccaggtcgaagttaaaaagcgcaggcatcgtctgaaaaggcacaacgactgcttcgtcggctctgaagctgtggatgttatcttctcacatttaattcagaataaatacttcggcgacgtagatatccctagggcgaaagtggtacgagtatgccaggcactcatggactacaaggtgttcgaagcagtccctaccaaagtttttggcaaggataagaagcccacgtttgaggattcctcttgtagcctgtaccggtttacaactattcccaatcaggattcgcagctaggaaaggaaaacaagttgtattcccccgctcgatacgctgacgctctgttcaaatcttccgatattcgtagcgccagtctggaagacttatgggagaatttaagccttaaaccagccaactctccccacgtcaatatatcagcgactctgtcaccccaggttatcaatgaggtctggcaggaggagacaattggcagactcctccagctggtagacctgcccctcctggattctcttctgaagcagcaggaagctgtcccaaagatcccacagcctaagagacagtcaaccatggtgaattcctctaattatcttgatcgaggaatcttgaaagcatatagcgatagccaggaagatgaatggctttccgcggctatcgactgcttagagtacttgcctgaccagatggtcgtggaaatctctcggtcattccccgagcagcctgaccgaacagaccttgtcaaagagctactgttcgacgcaattggacggtactattcgtccagggagcccctgttaaatcacctgagtgatgtccacaacggaatcgccgagctgctagtgaatgggaaaactgagatcgcactagaggccacccagctcctgcttaaactgttggactttcagaaccgggaagaattccggaggctactgtactttatggccgtggccgccaacccatctgagtttaagctgcaaaaggagtcggataaccgtatggtcgtcaagcggatttttagtaaggcaattgtggataataaaaacctgtccaaaggtaaaactgaccttttggtcctgtttttgatggaccaccagaaagacgtttttaagataccaggcaccttgcataagatcgtaagcgtgaaactgatggccatccagaacggtagggatcccaatcgcgatgccggctacatctattgccagcgtattgaccaacgtgactactcaaacaacaccgaaaaaacaactaaagatgagctgctgaatctccttaaaacgctcgacgaagactcaaaactgtcggctaaggagaaaaagaaacttctcgggcaattttacaaatgccaccccgacatcttcattgaacatttcggcgattag

SEQ ID NO: 114444 - DNA, 1509 bp, synthetic construct
  misc_feature 1..1509: note = Description of Artificial Sequence: Synthetic coding sequence
  source 1..1509: mol_type = other DNA
atgcgaggcttatgtgaattctactggcaagagtttggaatcaagggattcagtgttgctcagaagcctttcggtgctacatacgtctggagcagcatcatcaatacgctacagacccaggtggaggttaagaaaaggcggcataggcttaagagacacaatgactgcttcgtcgggtccgaagcagtggatgtcatcttcagccatctcattcagaataaatacttcggcgatgtagacatcccaagggcaaaggtggtgagagtgtgtcaggccctcatggactacaaggttttcgaagcagtgccaactaaggtttttggcaaagataagaaacctacgttcgaggattcatcctgtagtttgtatagattcactactatccccaaccaggatagccaacttgggaaggagaataaattatattcccctgctcgctacgccgacgccttattcaagagcagcgatatcaggtccgcttctctggaggatttgtgggaaaatctgtcactgaagccggccaattcgccacatgtgaacatttccgcaacactgagtcctcaggtcattaatgaggtgtggcaggaggaaactataggtagactgctacagttggtcgatctgccgctgctagattctctactcaagcagcaagaggccgtgccgaagatacctcagcccaaaaggcagagcacaatggtgaattcaagcaattatctcgatcgcgggattctcaaagcgtactcggattcacaagaagacgagtggctctctgcagccatagattgcctagagtatctgcccgatcagatggtcgttgagatcagccggtctttcccagagcagccggataggactgatctggtcaaggagctgctcttcgatgcgattggacggtattactcatctcgtgagcccttactgaaccacctgtccgacgtgcataatgggatagcggaactgttggtgaacggcaagaccgaaatcgcactagaggccacccagctgctactgaagcttttggacttccagaacagagaggagttccgcagactgctgtactttatggcagtcgctgccaatccctccgaattcaaactgcaaaaggagtctgacaatcgaatggtggttaaaagaatattttccaaagccatagtggacaacaagaacctttcaaaaggaaagaccgatctgttagtgctcttcctgatggatcatcagaaagacgtttttaaaatacctggcacacttcacaaaatcgtctccgtgaagctcatggccattcagaatggtagagatcctaacagggatgccggatatatatattgtcaacggattgatcagcgggattatagcaataatactgagaaaaccactaaggacgaacttctgaaccttctgaagaccctcgacgaggacagcaagctatcagctaaggagaagaagaagctgttgggacaattttataagtgccaccctgacatcttcattgaacattttggagactag

SEQ ID NO: 114445 - DNA, 1230 bp, synthetic construct
  misc_feature 1..1230: note = Description of Artificial Sequence: Synthetic coding sequence
  source 1..1230: mol_type = other DNA
atggaagaggggggcagtactgggtctgcgggaagcgactcttctacttcagggtccggtggtgcccagcagcgcgaactggaacgaatggctgaggtcttggtgaccggggaacaactgcgcctgaggctgcatgaggagaaggtgatcaaggacagacgccaccacctgaaaacgtatccgaactgctttgtggcgaaggagctgatagactggctcattgaacataaggaggcctcggatagagaaaccgccatcaagctcatgcagaagcttgctgataggggcattattcaccatgtgtgcgatgagcacaaggagttcaaggatgtcaaactcttctatcgctttagaaaagatgacggcaccttccctctggacaacgaggtcaaggcattcatgagaggccagaggttgtacgagaagctcatgtctcccgaaaacaccttgctgcagccacgggaagaggagggggtcaagtacgagcgcactttcatggctagcgaatttctggactggctggtacaggagggggaggctacaactaggaaggaagcagagcaattatgtcacaggctcatggaacatggaatcatccagcacgtgagcaacaagcacccattcgtagactccaaccttttatatcagtttcggatgaattttagaaggcgtcgcagactcatggaactccttaacgagaagtcccctagcagccaggagacacacgatagcccattttgcctccgaaagcagagccatgacaacagaaaaagcactagtttcatgtccgtgtcgccctccaaagaaatcaaaatagtgtctgctgtccgcagatctagcatgtcatcctgcgggtcttccggctacttcagcagttcccccaccctttctagcagcccacccgtgctatgtaatcctaagagcgttctaaagagacccgtaacaagtgaagaacttctgacacctggagctccctacgctcggaaaacatttactattgtaggagatgctgtagggtggggatttgtagtacgaggttctaagccttgtcatattcaggctgtagacccctccgggccagctgccgctgctgggatgaaggtctgccagtttgtagtgagtgtcaacgggcttaatgtccttcacgtggactatcggacggtaagcaacctcatccttaccgggccaagaaccatcgtaatggaagtgatggaagaattagagtgttag

SEQ ID NO: 114446 - DNA, 2877 bp, synthetic construct
  misc_feature 1..2877: note = Description of Artificial Sequence: Synthetic coding sequence
  source 1..2877: mol_type = other DNA
atgaggacgcatacaagaggggcgcctagcgtgtttttcatatacctcctttgctttgtatcagcctatatcaccgacgagaatcctgaggtgatgatccccttcacaaatgctaactacgactcacatccgatgctgtacttctcgcgggcagaggtggcggagttacagttgagagccgctagctcacatgagcacattgctgcccggttgaccgaagccgttcacaccatgctgtccagtccactcgagtacctccctccctgggaccctaaagactattccgctcgctggaatgaaatttttggcaacaaccttggagcactggctatgttctgcgtgctctaccccgaaaatatcgaggctcgggacatggccaaggactacatggaaagaatggccgctcagccttcatggctcgtcaaagacgcaccctgggatgaagtgcccctggcacactctctggttggtttcgccacagcctacgatttcttgtacaactacctctccaagactcagcaggaaaagttcctggaggtgatagccaacgcaagtggctacatgtatgagaccagctaccgccgcgggtggggcttccagtatctgcataaccatcagccaacaaattgcatggctcttttgaccggctcactggtgctgatgaatcagggctacctgcaggaagcttacctttggactaaacaggtgttaacaatcatggaaaagtccctggttctcctgcgggaagtcactgatggctcactgtacgagggggtagcctatggctcctacaccacccgcagtctttttcagtatatgttcctggtgcagcgtcatttcaatattaatcactttggacacccctggctgaagcagcacttcgccttcatgtatagaaccattctgcccggcttccaacgcacggtagcaattgctgattcaaattataattggttttacggtcccgagagtcaactggtgttcctggacaagttcgtgatgaggaatggttccggaaattggctcgccgaccagatacgccgaaatcgcgttgtcgaaggccccggcacaccatccaagggtcagaggtggtgtacacttcatacagagttcctttggtacgatggcagcctgaagtccgtgccccctccggattttggaacccccaccctgcattacttcgaagactggggagttgtaacatacggatctgcgctcccggccgagatcaacagatcctttctgagttttaagagcggcaagctgggtggcagagcaatatatgatatcgtgcatcggaataagtataaggactggattaaaggatggagaaatttcaacgcgggccacgagcaccctgatcagaatagttttacctttgctcccaatggggtgcctttcatcacagaggccctctatggccccaagtacaccttttttaacaatgtgttgatgttcagtcctgcagtgtccaaatcctgcttcagcccttgggtgggccaggtgacagaagattgctcctctaagtggtccaaatacaaacatgatctcgcagcctcttgccagggtcgtgtcgtcgctgctgaggaaaagaatggagtggttttcatccggggcgaaggcgtcggcgcttataatcctcagctcaacctgaagaacgtccagcggaatctcattctgctccatccccagcttctcctgctcgttgatcaaatccacctaggcgaagagtcgcctctggagactgctgctagcttttttcacaatgtagatgtgcccttcgaagaaacagttgttgatggggtgcacggagcttttatcagacagcgcgatggcctatataagatgtactggatggacgataccggctacagtgagaaggccacatttgcttccgtcacttatccacgtgggtacccttataacgggaccaattatgtcaacgtgacaatgcatctgcggtctcccattacccgggcggcctatctgttcataggcccgagcatcgacgtgcagtcctttactgttcacggggatagccagcagctggacgtcttcatcgccacatcaaagcacgcgtatgctacatacctgtggactggtgaagccactggtcagtccgcatttgcccaagttattgcagaccgccacaagatactttttgacaggaactccgccataaaaagctccatagtccccgaggtcaaggactacgccgctattgttgagcagaatctgcagcactttaagcccgtctttcagttactagaaaagcagattctctcaagagttcgtaacaccgcaagcttccgaaagactgccgagagacttctccggttctctgataaacgtcagacggaggaggctatcgataggatattcgcaatctcccagcaacagcagcaacagtccaaatccaaaaaaaaccggagggccggaaagagatataagtttgttgatgccgtgccggacattttcgctcagatcgaagtgaacgagaaaaaaatcagacaaaaagcccaaattctggcacagaaagaattacccatagatgaggacgaagagatgaaagacctgctggatttcgccgacgttacctacgaaaaacataagaatggcgggctgatcaaggggagattcggccaggcaaggatggtgacaactacccacagccgggcacccagcttaagtgcctcctacacccgattgttcctaattctcaatatagctattttttttgtgatgctagccatgcagctgacttactttcagcgagcacaaagtctccacgggcagcgatgcctgtatgctgttctcctgatcgactcatgtatcttactctggctgtacagctcctgctcccagtcccagtgctag

SEQ ID NO: 114447 - DNA, 2877 bp, synthetic construct
  misc_feature 1..2877: note = Description of Artificial Sequence: Synthetic coding sequence
  source 1..2877: mol_type = other DNA
atgcggacccatacacgcggagcgccctcggtcttcttcatctatctcctttgttttgtgagcgcctacattaccgatgagaatcctgaagtgatgatcccgttcacaaatgctaactacgacagccatcccatgctgtacttctctagagcagaggttgccgaacttcagctgagggcggcttcaagccacgagcacatcgcggcgcgccttaccgaagccgtgcacaccatgctctcgtcccctctcgaatacttgcccccctgggaccccaaggattactcggctcggtggaacgaaatattcggaaataatctgggcgcgctagccatgttctgcgtcctgtaccccgagaatatcgaggccagggatatggccaaagattacatggagagaatggccgcgcagccctcttggctggtgaaggacgccccttgggacgaggtgccgctggcacatagtctggtgggctttgcaaccgcctatgattttctatacaattatctttcgaagacccagcaagagaaattccttgaggtaatcgctaatgcatctggttatatgtacgaaacgtcgtaccgccgcggatggggcttccaatatcttcacaatcatcaaccgactaactgtatggctttgctgaccggtagccttgtgctaatgaatcagggctacctgcaagaggcgtatctttggactaaacaggtcctgaccatcatggaaaagagtctggtactactgcgagaggtcacagacggctccctctacgagggagtcgcttatggaagttacacaacgcgtagcttgtttcagtacatgtttctggtacagcgccattttaacattaaccatttcggacatccatggctgaagcagcatttcgccttcatgtaccgtaccattctcccaggattccagcgcaccgtggcgattgctgattctaattacaattggttttatggacctgagagccagctggtattcctcgacaagttcgtgatgaggaacggttccggcaactggttggctgatcagataagacgcaatagagtcgtggagggtccaggcacaccctctaaggggcagcggtggtgtacactgcacactgagttcctctggtacgatggatctctgaagagcgttccacctcccgattttggcacacccactctgcactacttcgaggactggggcgtcgtaacctacgggtcagcactccctgccgaaatcaaccgatccttcctatcattcaaaagtgggaagctggggggcagggctatttatgacatagtgcacagaaacaaatataaggattggataaaggggtggcggaattttaatgccggacatgagcacccagaccagaacagcttcaccttcgcccctaatggagtcccatttattacagaagccctgtacgggccaaagtacacgtttttcaataacgtgttgatgttctccccagccgtttcgaaaagttgcttcagcccttgggtgggtcaggtgacggaagactgcagcagcaaatggagcaagtacaaacatgatctcgccgcctcgtgtcagggacgagtggtggcagccgaagaaaaaaacggagtagtcttcatacgtggcgagggcgtgggagcttacaacccccagctgaatttgaaaaatgtacagaggaacttaattctcttgcacccccagctgctcctgctcgtcgatcaaattcatctgggtgaagagagtcctctggagacagccgcctcttttttccataatgtggacgtcccattcgaggagaccgttgtggatggtgtccatggagccttcatccgtcaacgtgatgggttatataaaatgtactggatggatgacaccggatatagcgaaaaggcaacgtttgcctccgtgacctatccgcgtggctatccatacaacgggacaaattacgtgaatgtaaccatgcacctgcggtctcctatcactcgagcagcctatctcttcatcggtccctccattgacgtgcaaagcttcacagtccacggggactcccagcagctcgatgttttcatcgctacttcaaaacacgcctacgccacatacctgtggactggagaggcaacggggcagagcgcgttcgctcaggtcatcgccgacaggcacaaaatcctgttcgatcggaattctgccatcaaatcttctatcgtccccgaggtcaaagactacgccgccatagtggagcaaaatctgcagcattttaagcctgtgtttcagcttctggagaagcagatcctttcacgggtgaggaataccgccagcttccgcaaaacagcagagaggttgctgcggtttagcgataaacgtcagaccgaggaagccatagacagaatattcgctatatcccagcagcaacagcagcagagtaaaagcaagaagaaccgccgtgccggcaagcggtataaatttgtggacgctgtaccggacatcttcgctcagatcgaagtcaatgaaaaaaaaatccgacagaaggcacagatattggctcaaaaggagctccccattgacgaagatgaggaaatgaaggatctgctggattttgcagatgtgacatacgaaaagcacaaaaacggcggcctcataaaagggcgttttggccaagccaggatggtgacgactacgcacagtagagcgccaagcttaagcgccagttacacccggcttttcctcatactaaacattgctatcttttttgtgatgctggcaatgcagttaacatatttccagagggcccagtcattgcatggccagaggtgtttatacgccgtgcttttgattgattcttgtatccttctgtggctttatagctcctgctcacagagtcaatgctag

SEQ ID NO: 114448 - DNA, 501 bp, synthetic construct
  misc_feature 1..501: note = Description of Artificial Sequence: Synthetic coding sequence
  source 1..501: mol_type = other DNA
atgcgaacccacactcgcggtgctccaagcgtgtttttcatctaccttttgtgtttcgtgagcgcttacattaccgacgaaaatccagaagtgatgattcccttcacaaacgccaattatgatagccatcccatgttgtactttagtcgggctgaagtggccgagctgcaactcagggccgccagttcccatgagcatatagcagcccgattgaccgaggccgtccataccatgttgagctcccctttggaatacctcccaccttgggatcctaaggactacagcgccaggtggaatgagatctttggaaacaacttgggcgctcttgctatgttctgtgtgctctacccagagaacatcgaggcgagggacatggctaaagattacatggagcgtatggcagcacagcccagttggctggtgaaggacgccccctgggacgaggttcctctagcacacagcctcgtggggtttgcaacggcatacgactttctttactag

SEQ ID NO: 114449 - DNA, 2877 bp, synthetic construct
  misc_feature 1..2877: note = Description of Artificial Sequence: Synthetic coding sequence
  source 1..2877: mol_type = other DNA
atgagaacccacactaggggcgctccatcagttttttttatctacctattgtgttttgtgtctgcctatatcacagacgagaaccccgaggtaatgattccatttaccaacgccaattatgacagtcaccccatgctgtatttttcaagggcagaagtggccgagctccagctcagggcagcatcatcccacgagcacattgccgctcggctgactgaagcggtacacacaatgctgtcttcgccattggaatatttgcctccctgggatccaaaggattactctgcacgctggaatgaaatttttggcaataatctgggagccctggccatgttctgtgttctgtaccccgaaaatattgaggcacgggacatggccaaggactatatggaaaggatggccgcacagccgagctggttggtcaaggatgcaccatgggacgaggtcccactggcccacagcctggtagggtttgccacggcatatgattttctttataattacctgtcgaaaactcaacaggagaaattcctggaagtgatagcgaacgcctccggatacatgtatgagacttcctatagacgcgggtggggcttccagtatctgcataatcatcagcctaccaactgtatggccctcctgactgggagtttggttctcatgaaccagggttacctacaggaggcatatctatggactaagcaggtgttgaccattatggaaaaaagccttgtgctgctgcgagaagtaactgatggatccttgtatgagggggtcgcctacggatcttatactacacgcagcctgttccagtacatgttcctggtgcagcgccactttaacatcaaccacttcggtcacccttggctgaagcaacactttgcctttatgtacagaaccattttaccgggcttccagcgcacggtggccatcgccgactccaattacaactggttctacgggcccgagtcccagctggtgtttctggataaattcgtgatgagaaacggttctgggaactggctggctgaccaaatcaggcggaacagggttgttgaagggccaggcacccccagcaagggccaaaggtggtgcacactccataccgagtttctgtggtacgatgggtctctgaagtccgtgccaccgcccgacttcggaactcccaccctacattacttcgaagactggggcgtggttacttacggttccgcccttccagcggagatcaaccgatcattccttagcttcaagtctggcaagctcggcggacgcgccatttatgatattgtacaccgaaacaagtataaagattggattaagggatggagaaactttaatgctggccacgagcatccagaccagaattcttttacgtttgcaccaaatggtgtcccctttataactgaggccctgtatggcccgaagtatacattctttaacaatgtgctcatgttctcccctgccgtctctaaaagctgtttttccccctgggtggggcaggtgacggaagattgtagctctaaatggtccaagtataagcacgacctggctgcaagctgtcagggcagagtggttgccgccgaagagaaaaacggtgtggtgtttattcgaggagagggggttggcgcctataatcctcaacttaacctcaagaacgtacaaagaaacttgatcctactgcaccctcagctgctcctcctggttgatcagattcaccttggcgaagagtctcctctggagacagccgccagttttttccacaacgtcgacgtgccttttgaggaaacggtggtagacggagtacatggagcattcattaggcaaagggatggattgtataaaatgtactggatggatgacacaggctactctgagaaagccacttttgcctctgtcacttatccccgggggtacccctataacggtaccaactacgtgaacgtcacaatgcatctgaggtcgcccattaccagggctgcatacctgttcataggcccctccattgatgttcagtccttcactgttcacggcgactctcagcagctagatgtctttatagcaacctcaaagcacgcctatgcaacatatctatggaccggggaggccaccggacagagtgcattcgcgcaggtaatcgctgacaggcataagatactgtttgatcggaactccgctattaagagttccattgtgcctgaggttaaggactatgcagccatcgtcgagcagaatttacagcattttaaacctgtgtttcagctcctggaaaagcagattctatcacgggtgcgcaacactgcttccttccgtaagacggcggagagactgctacgcttcagtgataaacggcagacagaggaagccatagatcgcatttttgctataagccagcagcaacagcagcagagtaaatcaaagaaaaatcgtcgagctggtaaaagatacaagttcgtagacgcagtgcctgacatttttgctcagattgaagtgaacgagaagaaaattaggcaaaaggcccagatcctcgctcagaaggaactcccgatagatgaagatgaggaaatgaaggacctgctagattttgcagatgtcacctacgagaaacataagaacggtggacttattaaagggaggttcggtcaggccaggatggtaaccactactcattccagggccccttccttgtcggcatcatacaccagactgtttctgattcttaatatcgccatattctttgttatgctggcaatgcagttgacctatttccagcgagcacagagcctacacggtcagagatgcttgtatgcggttttgttgatcgactcctgtatcctgctttggctgtattcctcatgttcacagtctcaatgctag

SEQ ID NO: 114450 - DNA, 2934 bp, synthetic construct
  misc_feature 1..2934: note = Description of Artificial Sequence: Synthetic coding sequence
  source 1..2934: mol_type = other DNA
atgggctcctttgaagacggactagccgctctggaaatttggcggtccgacgctactatgcgcacacacaccaggggcgccccgtccgtatttttcatttaccttctgtgttttgtatccgcgtatataactgacgagaacccagaggtcatgatcccattcacaaatgccaattacgactctcacccaatgctatatttcagcagggcagaggttgccgagctgcaacttagagcagcttcctcacacgaacacattgcggcaagactgactgaagcggtccacactatgctaagctcccccttggaatatctccctccatgggatccaaaggactattctgccaggtggaacgagattttcgggaataatctcggtgcactggcaatgttctgtgtgttgtaccccgaaaacatcgaggcccgggatatggccaaggactatatggagcgaatggccgctcagccgtcctggttggtgaaggatgccccctgggacgaagtccccctagcccactcactagtcgggttcgcaactgcgtacgacttcctatataattatctaagcaagacgcagcaggaaaagttcttggaggtgattgctaatgccagcgggtacatgtacgagacctcctatcggcggggctggggattccaatacttacacaaccatcaaccaacaaactgcatggccttgctgacagggagccttgtcctgatgaatcaagggtacctgcaggaagcatacctgtggactaaacaggttttaaccattatggagaagtctctagtgctgttacgtgaggtgacagatgggtctctttacgaaggtgtggcatatggcagctacactactcgaagtctgttccaatacatgttcctagtacagcgccattttaatatcaatcatttcgggcacccttggttgaagcaacattttgcattcatgtaccgcaccattctccctggatttcagcggacagtggccattgccgattccaactacaattggttctatggcccagaatcacagctggtgttccttgacaagttcgtgatgaggaacggctctggtaactggctggccgaccaaattagacggaaccgtgtcgtagagggacccggaactccaagcaaggggcagagatggtgtaccctgcacaccgagttcctatggtacgacggatctctcaagtctgtccccccccccgactttgggactcccacattgcactactttgaggactggggagtggtaacttacggtagcgctctgccagctgaaatcaatcggagtttcctgtcgttcaagtctggcaagctgggcggcagagcaatctacgacattgttcatagaaataaatacaaagactggataaagggatggagaaatttcaatgcaggccacgagcatccagaccagaatagttttaccttcgcacctaatggggttcctttcattactgaagcactgtacggtcccaaatacaccttctttaataacgtgctgatgttttccccagccgtatccaagtcttgtttcagtccctgggtagggcaggtgacggaggactgctcaagcaaatggtctaagtataagcacgacctggctgcatcctgtcagggccgggtggttgctgcggaggagaagaacggggtagtgttcattagaggagagggtgtcggtgcatataatccacagctgaacctgaaaaacgtgcagcggaacctcattcttctacacccccagctgctactgctggtcgaccagatccacctgggagaggaaagtccactcgagaccgccgccagcttttttcacaatgtcgacgtgcccttcgaagaaactgtcgtggacggagtgcacggcgccttcatcagacaaagagatggactgtataagatgtactggatggatgatacagggtatagcgaaaaagccacctttgctagcgtcacgtatccaagaggctacccctacaatgggactaattacgtcaacgtgactatgcatcttcgtagtcccattacgcgtgcggcgtacctattcatcgggccgagtatcgacgttcagtcttttaccgttcacggtgactcccagcaactagatgtgtttatagctacctctaagcacgcctacgcaacttacttgtggaccggtgaagcaacggggcagagcgctttcgctcaagtcatcgccgaccgccacaagatcctattcgatcggaattccgctataaagtcaagcatcgtgcctgaggtgaaagattatgctgctattgtcgagcagaatctgcaacattttaagccagtattccagcttctggagaagcagattctaagtcgcgtcaggaatacggcatcatttcgcaagacagccgaaagactattgcgtttttctgacaagaggcagactgaggaagccatcgataggatcttcgccattagtcagcaacagcagcagcaaagcaaatctaaaaagaaccggagggctgggaagcggtacaagttcgtcgatgccgttcccgacatcttcgcccagattgaagtaaacgaaaaaaagatacgacaaaaagcccagatcttggcacaaaaggaattgccgattgacgaagatgaggagatgaaggatcttttggatttcgcggatgttacttatgagaaacacaaaaatggaggcttgattaaaggacgtttcggccaagctagaatggtaactactacccattcccgggccccgtctctcagcgcttcctataccaggctgtttctgatcctgaatatagcaatcttcttcgttatgttggccatgcagttaacgtactttcagcgtgctcagagtctgcacgggcagcgatgcctttatgcagtgctgttgatagattcttgtatcctgctgtggctttatagcagctgctcacagagccaatgctag

SEQ ID NO: 114451 - DNA, 570 bp, synthetic construct
  misc_feature 1..570: note = Description of Artificial Sequence: Synthetic coding sequence
  source 1..570: mol_type = other DNA
atggcagcactcaagggcaggcaggtgtattgggcgacagcgggcaagatctctggatggacttggcctcatgcaccccgcaggccgcacgtcctgttacttaatggaatcggggtaggaggcgctttgggatccattgatgagctactctgtcaggctttgagcaatgggctcaatgtgccagaggggagcctcaccagcacctgcgcccagcagcccgacggccttatccatacagccaagtgggggcacgtccatagtctcagttcccactctccaggagcccccaatgcctgcggtgtgttgccaggaacaacggttgatgatggcgtccaccaggacttgcaaagggtactggcttgtgaacaggtttacgacctggagggcatgctggatgatgctcattcccacgaactcctggcagtcgtggctgcggtacaccatcacggggttagcaaggcccttcacaacggcactctcagcttcgttgaagccttcggtggtatccccccttgcaccgtccggattttccgcagatggttcggctgcctcggcgatctggagatctag

SEQ ID NO: 114452 - DNA, 3669 bp, synthetic construct
  misc_feature 1..3669: note = Description of Artificial Sequence: Synthetic coding sequence
  source 1..3669: mol_type = other DNA
atgcctaaaggaggagcacccccatggatcatggcactgatgttcaccggccatctattgttcctggctctcttgatgtttgccttttccacttttgaggaatccgtgtctaattattcagaatgggccgttttcaccgatgatatcgaccagttcaagacccagaaagtacaagattttcggccaaaccagaagctgaagaagagcatgctgcacccttcattgtacttcgacgctggagagatccaggccatgagacagaaatcccgggcctcacatttgcacctgtttagagccatacggtcagctgttaccgtgatgctttccaatcctacttattaccttcccccacctaagcatgcagacttcgctgctaaatggaacgagatttacggtaacaatctccctccactcgcactgtattgtcttctttgcccagaggacaaggttgcttttgaatttgtgttggaatacatggaccgaatggtcggttataaggactggctagtggaaaacgctcccggtgatgaggttccaatcggtcactcactcacaggatttgccaccgcattcgatttcctttataatctactggacaatcatcgccgccagaaatatttggagaagatttgggttattacagaggagatgtatgaatacagtaaagttaggtcatggggtaaacagcttctgcataaccatcaggccactaatatgattgccctgttaactggggcacttgtgaccggcgtggataagggctccaaggcaaatatctggaagcaggcagtggtcgacgtgatggagaaaactatgtttttattgaaccacatagtggacggatccctagacgaaggcgttgcttacgggtcatataccgcgaagtccgtcacacagtacgtctttcttgctcagcgccatttcaatatcaacaacctcgataataattggctgaagatgcacttttggttttactacgccacactcctgcccggatttcagcgcaccgtgggtattgccgacagcaattacaattggttctatggccccgaaagccagctggtctttctggataagttcatattaaaaaacggagcaggcaattggctagcacagcaaatccgcaagcataggcctaaagacggtcctatggtcccaagcactgcacagcgatggagcacactgcacactgaatatatttggtacgaccctcagttgacgccccagccgcccgcagactacgggacagccaaaatccatacctttccgaattggggggttgtcacgtatggagcaggactacctaatacccagaccaacacttttgtttccttcaagagcggtaagctcggaggacgagcagtgtacgacatcgtgcattttcagccttactcctggattgacggatggaggtctttcaacccgggtcacgaacatcctgaccagaattcattcactttcgcccctaatggccaggtgttcgtgtctgaggcgctctacggccccaaactgtcccatttgaacaatgtcctggtgttcgcccccagcccttcctcccaatgtaataaaccttgggagggccagctgggcgagtgtgctcagtggctgaagtggacaggagaagaggtgggagacgccgcgggagagattatcacagcgagccagcacggggagatggtgttcgtgagcggggaggccgtcagcgcatattccagtgcaatgcgcctgaaatccgtgtaccgcgcattgctgctgttaaatagtcagacattgctggttgtggatcacatcgagaggcaggaggattcaccgatcaacagcgtctctgcgttttttcacaaccttgatatagatttcaaatacattccctataagtttatgaatcgctacaatggtgccatgatggacgtttgggatgctcattacaagatgttttggtttgatcatcacggtaacagcccaatggcgtccattcaagaggctgaacaggcggccgagttcaagaaacgctggacccagttcgttaatgtgacctttcagatggaacctacaatcacacgaatcgcatatgttttttacggaccatatatcaatgtatcttcatgtcgcttcatcgactcctctaatcctgggctgcagatcagtctgaatgtcaataacaccgaacatgtggtttccatcgtgaccgactaccacaacctgaaaacgcgatttaattatctgggctttggcgggttcgcttcggtggccgaccaggggcagattacccggttcggactgggtacccaggccattgtgaagcctgtcaggcatgacaggatcattttccccttcggcttcaagtttaatatcgcagttgggctgattctatgtatttccctcgtgatcctgaccttccaatggagattctacttgtcatttagaaagctgatgagatggatcttaattctggtgatcgcactctggttcattgaactcctagatgtgtggagtacttgttcccaaccaatctgcgccaaatggacacggacagaagccgaggggagcaaaaagagcctgtccagtgaaggccaccacatggatcttcctgatgtggtcattaccagcctcccagggtcaggagcggagatcctgaagcaactctttttcaattcatcagacttcctttatattagggtaccaacagcctacattgatatccccgagacagagctggaaatcgactcattcgtggatgcatgtgagtggaaggtgagtgatatccggagcggacactttagattgctccgtggctggcttcaatcactggttcaggacaccaagcttcatttacagaatatccacctccacgaaccgaaccggggaaaactcgctcaatattttgccatgaataaagacaaaaaacgcaaattcaagaggagggaatcattgccagaacagcgctctcagatgaagggagcgttcgacagagatgctgagtacatcagagccctgaggcggcacctggtgtattacccttccgcacgcccagtcctcagcctgagcagcgggtcatggacattgaaactgcattttttccaggaggtgctaggggcctccatgagagctttgtacattgttagggacccgcgggcttggatctatagcatgttgtataactccaagccctccctttattccctgaagaacgttcctgaacacctcgctaaactgtttaaaatagaagggggaaagggaaaatgtaatttaaactccggctacgcatttgaatatgagccgttaagaaaagaactgtcgaagagtaaaagtaacgccgtcagcttgctgagtcacctgtggctcgcaaataccgccgccgccctcagaatcaacactgacctattgcccacttcctatcaactagtaaagtttgaagacatcgtgcacttccctcagaagactacagagagaatcttcgccttcctggggatccccctttccccagcctccctcaatcagatcctctttgctaccagcaccaatctgttttatctcccctacgagggggagataagcccgaccaacaccaatgtgtggaagcagaatttgccaagggatgagatcaaactgatcgaaaacatctgttggacattaatggaccgtcttggatacccaaaatttatggactag

SEQ ID NO: 114453 - DNA, 3639 bp, synthetic construct
  misc_feature 1..3639: note = Description of Artificial Sequence: Synthetic coding sequence
  source 1..3639: mol_type = other DNA
atggcccttatgttcacagggcatctcctgttcctcgctctgctgatgtttgctttctctacctttgaagagagtgtctcaaactatagcgaatgggctgtatttacggacgatatcgaccagtttaagacccaaaaggtgcaggatttccgtccaaaccagaaactgaagaaatcgatgttgcatccgtctctttactttgatgcaggcgagattcaggctatgcgccagaagtccagggcctctcatctgcatctgttccgggcgataagaagtgccgtaaccgtgatgttgagtaacccgacttactacctccctccgcctaaacatgccgatttcgccgctaagtggaacgagatctacggaaacaacttgccccctctcgcgctgtactgcctattgtgtcccgaggacaaagtggccttcgagtttgtgttggaatacatggacaggatggtcggctataaagattggctggtggaaaacgcgcccggggacgaagtgccaatcggccactctctaacagggttcgctaccgctttcgatttcctatacaacctactggataatcaccggagacagaagtatttggagaagatatgggtgatcaccgaagagatgtatgaatattccaaagtgaggagttgggggaagcagctgctgcataatcaccaggccacaaacatgattgctctattgaccggtgctctagtcacaggtgtagataagggcagcaaggccaacatatggaagcaggcagtggtcgatgtgatggaaaaaactatgtttctgctgaaccacatagtcgacgggagcctggacgaaggagttgcctacggatcttacaccgccaaaagcgtgacacaatacgtctttctggcccagaggcactttaatatcaacaaccttgacaacaattggcttaagatgcatttctggttctattatgctactctcctccctggattccagcgaacagtggggattgccgattctaactacaactggttctacggtcctgaatctcagcttgtgtttctggacaagttcatactcaaaaatggggctggcaattggctagcgcagcagatcagaaagcatagacctaaagacgggcctatggtgcctagcactgctcagaggtggtccacactccacacagagtatatatggtacgaccctcagctgaccccacagccccccgccgattatggaaccgccaaaattcacacgtttccaaattggggagtggtaacttacggcgcagggttaccaaacacacaaaccaatacattcgtgtccttcaaatcgggcaaactgggaggccgagcagtttatgacatcgtgcattttcaaccttactcttggattgatgggtggcgctcctttaaccctggccatgaacaccctgatcagaatagtttcactttcgcaccgaatggtcaagtctttgtgtcagaagccctctacggccccaaattaagtcatctgaataacgtactagtgttcgccccgtctccttctagccaatgtaataaaccttgggaaggccaactcggtgaatgtgcccagtggctgaaatggactggcgaggaagtgggggatgcagccggtgagatcattacagctagtcaacatggtgagatggtgttcgtctctggtgaggccgtcagcgcctattcatctgctatgcggctgaagtcggtctacagggccctcctgcttctaaattcgcaaaccttgttggtcgtggatcatatcgaaagacaggaagattctccaataaatagtgtgtctgcgttctttcataacctagatattgacttcaaatacatcccctataagttcatgaacaggtataacggagcaatgatggatgtgtgggatgctcattacaagatgttctggttcgaccaccatgggaattcccccatggcctctattcaggaggcggaacaagcagccgagttcaaaaagcggtggactcagtttgtgaatgtgacttttcagatggagcccactattacccgaatagcctatgtgttctacggaccttacattaacgtgagcagctgtcggttcatcgactccagcaatcctggactgcaaatttctctcaatgtaaataacacagaacacgtcgtttcaatcgtgacggactaccacaacctaaagactcggtttaattaccttggttttggggggtttgctagtgtggcagatcagggccaaattacacggttcggcctggggacgcaggcgatcgtcaagcccgtgaggcatgatcggataattttcccattcgggttcaagttcaatatagcggtgggtctgatcctttgtatctctctggtgattctgaccttccagtggcggttttacctgtcctttaggaagctcatgcgttggatcttaatcctcgtcatcgcactgtggttcatcgaactgctggatgtctggtccacgtgttcacaacctatctgcgcgaagtggactcggaccgaagctgagggcagcaagaaaagcctgagttctgagggacaccatatggacctccccgatgtcgtaataacctccttaccgggttctggcgccgagattttgaagcagctgttcttcaattccagcgatttcctgtacatcagggttccgaccgcatatatagatataccagaaacagagctggagatcgacagctttgtagatgcttgcgagtggaaggttagcgacattcggtcaggacacttccgtttgctacgagggtggctgcagtcgctagtgcaggacacgaagttgcacctgcaaaacattcacttgcacgagcccaatagaggtaagctggcacaatacttcgccatgaacaaagacaaaaagcgcaagtttaaacgtagggagtcactgccggagcagcgatcacagatgaagggcgcctttgatcgtgatgctgaatatatccgcgccctgcggcggcatttagtgtattacccatctgctcgcccagtgttgtcccttagtagcgggtcctggacactgaagctacattttttccaagaggtactgggcgccagcatgcgagctctgtacatcgtgcgcgaccctagagcttggatttattctatgctgtataattccaagcctagtctttactccttgaagaacgtgccagagcacttggcaaagctgtttaagattgaaggagggaaggggaagtgcaacctgaactcgggatacgcctttgagtacgaaccgctgagaaaagagctctctaagagcaaatcaaacgcggtttccctcctgagccatctgtggctggcaaacacggcggccgccctgcgtattaatacagatctcctgcccaccagctatcagctagtgaagtttgaagacattgtgcatttcccccaaaagacgactgaaagaattttcgcattcctgggcattcctctgagtcccgcaagcttgaaccaaatcctgttcgctacatcaacaaatctcttctatctaccctacgaaggggaaatctcacccactaataccaatgtgtggaaacagaacctcccaagggacgagattaaactcattgagaacatttgctggaccctgatggatcgcttaggatatccgaagttcatggactag

SEQ ID NO: 114454 - DNA, 606 bp, synthetic construct
  misc_feature 1..606: note = Description of Artificial Sequence: Synthetic coding sequence
  source 1..606: mol_type = other DNA
atggacctaagtctgctgtgggtgctgctgccgctcgtgacaatggcctggggccagtacggagattacggatacccatatcagcagtaccacgattactccgacgacgggtgggtgaatctgaatagacagggcttctcttatcaatgtcctcaaggccaagtgatagttgccgttcggtcaattttcagcaagaaggaggggtctgaccgccaatggaattacgcctgcatgcctacaccacagagcctgggcgagcccactgagtgctggtgggaggagattaaccgagcaggaatggaatggtaccagacctgttcgaacaacggcctggtggctggctttcagtctcgttactttgaatcagtgcttgaccgcgaatggcagttctattgctgtcgttacagcaagcggtgcccctattcctgttggctgacaaccgaataccccggccactatggagaggagatggacatgatcagctataattatgactactacatcaggggagctacgactacattttccgcagttgagagagatcgtcagtggaagtttatcatgtgccgcatgacagaatacgattgcgagtttgcaaacgtttag

SEQ ID NO: 114455 - DNA, 333 bp, synthetic construct
  misc_feature 1..333: note = Description of Artificial Sequence: Synthetic coding sequence
  source 1..333: mol_type = other DNA
atgcggtttatgacactgctgtttttaactgccctagcaggagctctcgtttgtgcatatgatccagaagctgcaagtgctcctgggtccggcaacccttgtcacgaagcttcagccgcacagaaggaaaacgctggcgaggatcctggcctggctcgccaagccccaaagcctagaaagcagcgttcctcactgctggagaagggccttgatggggcgaaaaaagccgttgggggactcggaaaactgggcaaagacgccgtggaggacctggaatccgtcgggaagggtgcagtccacgacgttaaggacgtgctggattccgtactttag

SEQ ID NO: 114456 - DNA, 1191 bp, synthetic construct
  misc_feature 1..1191: note = Description of Artificial Sequence: Synthetic coding sequence
  source 1..1191: mol_type = other DNA
atggctctccttacaaatctgctgcccttgtgttgtctagcgctactggcactacccgctcagagctgcgggcctgggcgcggtcccgtcggtcggaggaggtacgccagaaaacaacttgttcccctcctgtataagcagttcgtgcccggcgtgcccgagagaaccctaggagcaagcggaccagctgagggccgggtggcccgtggttcagaacggtttagggatctggttccaaattataatccagacattatctttaaggatgaggaaaactctggggcagatcgcttgatgacagagaggtgtaaagagagggttaatgccctggctatcgccgtgatgaacatgtggcctggcgttcgcctgcgcgtaacagaagggtgggacgaggatggacatcacgcacaggattctcttcattacgaggggagagctttggacattactacaagtgacagagatcgtaataagtacggcctgcttgcacggttggccgttgaggctggctttgactgggtctactacgaatcacgtaaccatgtgcatgtaagtgtcaaagccgacaacagcctggccgtgcgtgctggaggatgttttccagggaatgccaccgtgcgcctgtggagcggcgagcgtaaaggactgcgcgagctgcataggggggactgggtgcttgccgctgacgcttcaggccgcgttgttccgacacctgtgttgctgtttctcgatagggacctacagagacgggcctcctttgttgccgtggagacagagtggccgccgagaaagttgcttctgactccatggcacctggtcttcgccgctcggggccctgcccccgcaccgggcgacttcgcccccgtattcgccagacggctaagggcgggtgactccgtgctggcccccgggggcgacgcgctgaggcctgcacgggtggcacgggtcgcaagggaagaagccgtgggggtctttgccccactgacagctcatggtactctgctcgtcaatgacgtgctcgccagctgttatgccgtgttagagtcccaccagtgggctcacagagcatttgctccacttcgtctcctgcacgcgctcggggctcttctgccaggaggagctgtgcagcctacggggatgcactggtattccagactgttgtacaggctggcggaggagctgctcggctag

SEQ ID NO: 114457 - DNA, 1413 bp, synthetic construct
  misc_feature 1..1413: note = Description of Artificial Sequence: Synthetic coding sequence
  source 1..1413: mol_type = other DNA
atgagccaggcttacagttcctctcagagagtttcgagttacaggagaactttcggcggggctcccgggttccctttaggctccccgctcagtagtccagtttttccacgagctgggtttggctcaaaagggtcttcttcctctgttacaagtcgggtgtaccaggtctcccggaccagcgggggagctggaggccttgggtctctgcgcgcctcacggttaggtactactcgcacaccgtcctcctacggcgccggagagctcctggattttagtttggccgacgccgtcaatcaagaattcctgaccacacgtactaatgaaaaggtcgaacttcaagaactgaacgacagattcgcaaattacattgaaaaggtgcggttcctggagcagcagaacgcagctcttgctgccgaagtgaatagactgaaaggcagggaaccaacccgggtggcagagctgtacgaggaagagctgcgcgagctgcgtcgtcaggtggaggtgcttaccaatcagagggctcgagtggatgttgaaagggataacctgttggacgacctgcagcggctaaaagctaagcttcaggaagagattcagctcaaggaggaagccgagaataatttggccgcctttagggccgacgtcgatgcagccacattggcccggattgacctcgagcgtcgcattgagtcactaaacgaggaaatcgccttcttgaagaaggtgcacgaggaagagattcgggaactgcaggcacagctccaagaacagcaagttcaagtagaaatggacatgtccaagcccgacctcaccgcagccctcagggacatccgggctcagtacgaaactatcgctgccaagaatattagtgaggccgaggagtggtataaatccaaggtgtcagatttgactcaagccgcgaataagaacaatgacgccctgaggcaggcgaaacaggagatgatggagtaccggcaccagatccagagctatacgtgtgaaatcgacgctctcaagggcaccaatgatagtttgatgaggcagatgagagagctggaggataggtttgcctctgaggcaagcggctatcaggataacatcgcacgcctggaagaagagataaggcatctaaaggacgaaatggcacggcacctgagagagtatcaagacttattgaatgtgaagatggccctcgatgttgagattgccacatatcggaaactgctcgagggggaagagtcacgcatcaatttaccaatacagacctactccgcactgaacttcagagagacctcgccagaacaacgcggcagtgaggttcataccaaaaagaccgtgatgatcaagacaattgaaaccagagatggggaggtcgtctctgaagccacccagcagcaacacgaggtgctgtag

SEQ ID NO: 114458 - DNA, 2523 bp, synthetic construct
  misc_feature 1..2523: note = Description of Artificial Sequence: Synthetic coding sequence
  source 1..2523: mol_type = other DNA
atggctctggctagcgcagcccccgggtctattttctgcaagcaattactctttagcctccttgtgctgaccctcctgtgcgacgcctgccagaaggtatacctacgggtgccaagtcatctgcaggccgagaccctcgttggtaaggtgaacctcgaagaatgtttgaagtcagctagcctgattaggtcctccgaccccgccttccgtatcctggaagatggctctatctacactacgcacgatttgattctgagcagtgagagaaagtccttctcgatctttctctctgatggccagagacgcgaacaacaagagatcaaagtagtgctgagcgcccgagagaacaagagtcctaaaaagcgccacaccaaagatactgccttaaaacgctcaaagaggcgttgggccccgatacctgcctccctgatggagaacagcctgggaccattcccacagcatgtgcagcagattcagagtgatgctgcccaaaattataccattttctattccatctctggtcctggcgtcgataaagagccgttcaatctgttctacattgagaaggacacaggagatatattttgcacacggtccatagatcgcgagaaatatgagcaattcgcgctttacggatatgccaccaccgctgacggctacgccccggaatacccactgcccctgattattaaaattgaagacgacaacgacaatgccccttattttgaacatcgtgtgacgatctttactgttcccgagaactgccgctcagggacttcggtggggaaggtgacggctacagacctcgatgaaccggacactctccataccagactgaaatataagatattgcaacagatccctgatcacccgaagcacttctctattcacccagacacaggagtgatcacaaccacaaccccctttctagaccgtgaaaagtgtgacacgtaccaactcattatggaggtgcgggacatgggaggccaaccctttggtctcttcaacacaggcacgatcactatctccttggaggatgaaaacgacaacccaccctcctttacagagacttcctatgtaacggaggtggaagagaaccggatcgatgtggagatcttgcggatgaaggtgcaggaccaggatctgcctaacacgccgcatagcaaagcagtttataaaatcctacagggaaacgaaaacggaaacttcataatctccacagatccgaacactaacgagggcgtcctctgtgtggtgaagccgttaaactatgaagtaaaccgtcaggtcatactccaggtgggcgtgatcaatgaggcgcagttctcaaaagccgcatcctctcagaccccgacaatgtgcactacaactgtgacagtgaaaatcatcgatagtgacgaggggccagagtgtcaccctcccgtgaaggtgatacaatcacaggatgggtttcccgccggacaggagctgctgggatacaaggcactggaccccgagattagctccggagagggattacgctatcaaaagcttggggatgaggataactggttcgaaattaatcaacacaccggagatttaagaacactcaaggtccttgaccgagagtcgaagttcgtaaagaacaatcagtataacatttcagtggtagccgtagacgccgtgggcagaagttgcaccgggactctcgtcgtccatctggacgattacaacgatcatgctccacagatcgataaagaagtgacgatctgtcaaaataacgaagacttcgccgtcctaaagccggtcgatcctgatggcccagagaatggccccccgtttcagttctttctcgacaatagtgcatctaagaattggaacatcgaggagaaggatgggaagaccgccatattaagacagagacagaatctcgactataactattatagtgttccaattcagataaaggatagacacgggctggtggcaactcacatgttgacagtcagagtgtgtgactgctctacgccctccgaatgcaggatgaaggataaatccactagagacgtgcgcccaaatgttatattggggcggtgggccattctcgctatggtattaggaagcgtactgttgctgtgtattctcttcacctgcttttgcgtcactgccaaaagaaccgtgaaaaaatgttttcccgaggacatcgctcagcagaatctcattgtgagcaatacggagggacctggggaggaggttactgaggccaacatccggctccccatgcagacttccaatatctgcgatacttctatgagcgtgggcaccgtgggaggccaggggataaagacccagcagtcttttgagatggtgaaaggaggctatactctggattcaaacaaaggcggcggtcaccagacccttgagagcgtgaagggcgtgggccaaggggataccggacgatatgcctatacggattggcaatctttcacacagcctagactgggcgaggaatcaatccgtggccacacactgattaagaactag

SEQ ID NO: 114459 - DNA, 2685 bp, synthetic construct
  misc_feature 1..2685: note = Description of Artificial Sequence: Synthetic coding sequence
  source 1..2685: mol_type = other DNA
atggcactggcatctgctgcccccggtagcattttttgcaagcagctgctattctccctcttagtcctgactctgctctgtgatgcctgtcagaaggtgtatcttagggtgccaagtcaccttcaggctgagactttagtgggcaaggtgaacctcgaggagtgcctaaagtccgcctctctcatccgctctagcgaccctgctttccggatacttgaagatgggtccatatataccacacacgaccttattctgtcaagcgaaagaaagagcttttcaattttcttatctgacggtcagcgccgcgaacagcaggagataaaggtcgttttatctgcgcgagaaaacaaatctcctaagaagcggcacacaaaagacacagcactaaaacgtagcaagcggaggtgggcccctattccagcttctttgatggagaattcactgggcccattcccccagcacgtccagcaaattcaaagcgacgccgcccaaaattataccatcttctatagcatctcaggaccgggcgttgataaggagccatttaacctcttctatattgaaaaggatacgggagacatcttctgcacaagaagcatcgatcgggagaagtacgaacagttcgccctgtacggctacgctacaactgctgatggatacgcccctgaataccctctaccccttataattaaaattgaagatgataacgacaatgccccttatttcgaacatagagtcacaatctttaccgtcccagagaactgtcgctctggcacttcagtggggaaggtgaccgctacagatctcgatgaacctgacaccctgcatacgaggctgaagtacaagattttacaacaaatccctgatcacccgaagcacttcagcattcatcccgacaccggcgtgattaccacaactacaccattcctggacagagagaaatgtgacacctaccagcttataatggaagtgcgggatatgggcggccagccattcggcttgttcaacaccgggacaataactataagcttagaggatgagaacgacaatccaccttcttttaccgaaacttcctacgtaacagaggtcgaggagaaccggatcgacgttgaaatcctcagaatgaaggtgcaggaccaagacttgccaaacaccccacacagtaaggctgtgtataagatcctccaaggaaacgaaaacgggaatttcattatctccacagaccctaacaccaatgaaggtgtgctgtgcgtggtgaaacctttgaactacgaagtgaaccgacaggttatcctacaagttggcgtgatcaatgaggcacagttttctaaagctgcctcttctcagaccccaacaatgtgtaccactaccgtgacagtcaaaattatcgactcggacgagggcccggagtgtcacccaccagtgaaggttatccagtctcaggatgggtttccagccggacaggagctcctggggtataaggccctggaccccgagattagctccggtgaggggttacggtaccagaagctaggagacgaggacaactggtttgaaatcaatcagcacacaggcgacctgcgaaccctcaaggtgctggacagagaaagcaaattcgtgaagaataatcaatataatataagcgttgtcgccgtcgatgcggtcgggagaagctgcaccggcacactggtggtccaccttgacgactacaacgatcacgcacctcagatagacaaggaggtaactatttgccagaacaatgaggactttgccgtattaaagcccgttgatccagacggaccagaaaacggcccacctttccagttttttctggataattccgcctcaaaaaactggaacatcgaggagaaggacgggaagacagccatattgcggcaacgtcagaacttggactacaattactattccgtgcccattcaaattaaagacaggcatgggcttgtcgccacacatatgctgaccgttcgtgtctgtgactgctctacaccatcagaatgccggatgaaggataagtccactagagatgtgcggcctaacgtgattctgggaaggtgggctatattagcaatggtcttaggatcagtgctgctgctgtgtattttgttcacctgtttctgcgtgaccgctaagcgcaccgtcaaaaaatgcttcccagaagacatcgcccagcaaaatcttattgtgtccaataccgaggggcctggcgaagaagtgactgaggctaacattcggttaccaatgcaaacttctaacatctgcgacactagcatgtcagtgggaaccgttgggggtcaggggattaagacccagcagagtttcgagatggtcaagggaggttacaccctggattccaacaaaggcggggggcaccagacgctggagagcgtgaagggagtcgggcagggcgacacagggcggtatgcctacactgactggcaaagtttcacccagccacgtctgggggagaaggtctacctctgcgggcaggatgaagaacataaacactgcgaggactatgtgtgttcatacaactacgaggggaaaggctcattagcaggctccgtgggctgctgttctgaccgtcaggaggaggaaggtctggagttcttagaccacctagaaccaaagtttagaacacttgctaaaacgtgtatcaagaaatag

SEQ ID NO: 114460 - DNA, 2691 bp, synthetic construct
  misc_feature 1..2691: note = Description of Artificial Sequence: Synthetic coding sequence
  source 1..2691: mol_type = other DNA
atggcagcagccgggcccaggaggtccgtgagaggtgctgtgtgtctgcacctgctgctcaccctggtcatattttcccgtgcaggggaggcatgtaaaaaagtgatattgaatgtaccctctaagctcgaagccgataagataatcgggagagttaatttagaggaatgttttagaagcgccgatttgattcggagctccgacccagatttcagggtgctgaatgatggtagcgtctacactgctcgcgcagtggctctctccgataagaaacgcagtttcacgatctggctgagtgacaagcggaaacagactcagaaggaggttaccgtccttctggagcaccagaaaaaagtttcaaagacccgacacacacgggaaacagtgctgaggagagctaaacggagatgggctcctattccttgcagtatgcaggaaaattctctcggacctttccccctctttttgcagcaggtggaatccgacgctgcacagaactacaccgtattctacagcatctcaggcagaggcgtcgacaaggaacccctcaatctgttctacatagaaagggacaccgggaatctcttttgcactaggcccgtcgatcgggaggagtacgacgtgttcgatctaatcgcttatgctagcaccgctgacggttatagcgccgacctgccattgccccttcccattcgagtggaggatgagaatgacaaccacccagtgttcacagaagcaatctacaactttgaagtattggagtcctctaggcctggcaccactgtcggcgtggtctgcgctactgatagggacgagccggacactatgcacactaggttaaagtattcgatcctgcagcagacaccaaggtcaccagggttgtttagtgtgcacccttctactggagtgattacaacggtgtctcattacttagacagagaggtggtggataagtatagtctcataatgaaagtacaagacatggatggacagtttttcgggctcatcggaacaagcacgtgcatcatcactgtgactgatagcaacgataatgcaccaacattccgccagaatgcatacgaagcctttgtagaagaaaacgccttcaatgtcgagattctgcggatccccatcgaagacaaagacctgatcaacactgcaaactggcgcgtgaacttcactattctgaagggcaatgagaacggtcacttcaagattagcactgacaaggagactaacgagggcgtcctgtcagttgtgaaacctctcaactacgaggagaaccgtcaggtgaatctggagattggggtgaataacgaggctccattcgcccgagacattcccagggtgacagcactgaatcgggctttagttactgtgcacgtgcgcgatctagatgaaggtcctgaatgcaccccagcagcacagtacgtgaggattaaagaaaacctggccgttgggagtaagattaacggttacaaagcatatgatcccgaaaaccggaatggcaacggcctcaggtacaaaaaattacatgaccccaaaggatggataacgattgacgagatttccggatcaatcatcacgtccaagatactcgacagagaggtcgagaccccaaagaatgaactctataatataaccgtgctcgccatagataaggatgacagatcctgcaccgggacccttgctgtcaacatcgaagacgtcaacgacaacccaccagagattctgcaggagtatgtcgtaatctgtaaaccaaaaatggggtacactgatatattagccgtggacccagatgagcccgtccacggggcaccattctattttagcctgccgaataccagccctgaaatttcgcgcttgtggagcctaacgaaggtgaatgacacagcagctcggctgagctatcagaaaaacgctggattccaagagtatacaattcctataactgtcaaggatcgcgcaggacaagccgctactaaattactccgcgttaacctgtgcgagtgcacccaccccacccagtgtcgggctactagccggagtacaggggtgatcctgggcaaatgggccatccttgccatactgctgggcatagcactcctcttttcagtactcctgactctggtatgtggcgtgttcggcgccaccaagggaaaaagattccccgaagatttggcacaacagaatctcataatatcaaacacagaggccccaggcgatgatcgggtgtgcagtgcaaacgggttcatgactcagactactaacaactcttcacaggggttctgcggcacaatggggagtggcatgaagaacggtgggcaagagacaattgagatgatgaagggaggaaatcaaactctcgagtcttgtcggggcgcagggcaccaccataccctggacagctgccgtggcggccatacagaggtggacaattgcaggtatacttattccgagtggcactcatttactcagccccgtttaggagagaagctgcatagatgtaatcaaaatgaggataggatgccctcacaggattacgttctgacgtacaactacgaggggaggggctcccccgcggggagcgtgggctgttgctccgaaaaacaggaagaggacggcctggatttcctcaacaatctggagcctaagttcatcacacttgccgaggcatgtaccaaacgctag

SEQ ID NO: 114461 - DNA, 2520 bp, synthetic construct
  misc_feature 1..2520: note = Description of Artificial Sequence: Synthetic coding sequence
  source 1..2520: mol_type = other DNA
atggcggctgcaggccctcgtcgttctgtgcgcggtgcagtgtgcctgcacttacttctgacactggttatctttagtcgagccggcgaggcttgtaaaaaggtaattcttaacgttccatccaagttggaagccgacaaaatcattggccgagtgaacctggaagagtgctttagaagcgctgacctgattcggtcatcagatccagacttccgggttctgaatgacggctccgtgtacaccgcccgtgccgttgctctctctgacaagaagcggagtttcaccatttggttgtcagacaaacgtaagcaaacacagaaggaggtgactgtgcttcttgaacaccaaaagaaggtttcaaagactaggcacacccgagagacggttttgagaagagccaaaagacggtgggcccccatcccgtgtagcatgcaggaaaatagtctgggcccattcccccttttcctccagcaggtggagtcagacgcagcacaaaactacacggtgttttactccatctcgggcagaggagtcgataaagagccactcaatctcttctatatcgagcgggacacagggaacctcttctgcacacgccctgtggacagagaggagtatgatgtttttgacttaatcgcgtacgccagcaccgccgatggttacagtgccgacctgcctcttccgctgcccatacgtgtggaggatgaaaatgacaatcaccccgtgtttaccgaggccatatacaatttcgaagtgttggagagctctaggcctggcactaccgtcggagtcgtgtgcgcgacagaccgcgatgaaccagatacgatgcacacaagactaaagtactctattcttcagcaaactccaagatccccaggactgttcagtgtgcatcctagcacaggagttattacaacagttagccactacctagaccgtgaagtggtggacaaatattcactgattatgaaagtccaggacatggatggtcaattcttcgggctgatcgggacatctacgtgtatcattacagtgacggactcaaatgataatgccccaacattccggcaaaacgcgtacgaggcattcgtcgaggagaacgcctttaacgtggaaatacttcgaattccaattgaagacaaggatctgatcaacaccgccaactggcgcgttaacttcaccattctgaaggggaatgaaaacggccatttcaaaatcagtaccgacaaggagactaacgagggggttctgtccgtagtgaagccacttaattatgaagagaatcgacaggtgaacctggaaatcggagttaataatgaggcccctttcgccagagacattccaagggtgaccgctctcaatagggcattggttacagtccacgtgcgggatctggatgaggggccagaatgcacacctgcagcccagtatgtgagaatcaaggagaaccttgctgtggggtccaagattaacggctacaaagcatacgatccggaaaaccgaaacggaaacggcctgaggtacaagaagctccacgaccccaaaggctggatcactatcgacgagatatcaggatccataatcacaagcaagatattagaccgcgaggtggagacccctaaaaatgaattatataatatcacggtgttagctattgacaaggacgataggtcatgcacaggcaccctggcagtcaacatcgaagatgtaaacgacaatccacctgagattctacaagagtatgtcgtcatctgtaaaccaaaaatgggctatactgacatactggccgtcgaccccgacgaacctgtacacggggctcccttctacttctcactccccaatactagccctgaaatatctaggctgtggtctctcacaaaggtgaacgacaccgccgctcgtctgagctatcaaaagaacgccggtttccaggagtacactatccccattactgtgaaggaccgcgcgggacaggctgctaccaagctgctgcgcgtaaatttgtgtgagtgcacccacccaactcagtgtcgggccacaagcagatcgacgggcgtcatattgggaaaatgggcaatccttgcaatcttgctgggtattgccctattattctctgtgctcttgacactcgtatgcggtgtcttcggcgctaccaagggcaagaggttcccagaagacctagcacaacagaacctgatcatatcaaacaccgaggctccgggcgatgacagggtttgctccgcgaatgggttcatgacccaaaccaccaacaatagcagccagggcttctgtggaactatgggctctgggatgaaaaacggtggtcaagagacgatcgagatgatgaaaggtggaaaccagaccttggagagttgtaggggggcagggcatcatcacaccttggactcgtgccgcggggggcacactgaggtggataattgcagatacacttactcagagtggcactcctttacacagcctcggctgggggaggaaagtattcggggccacaccggatag

SEQ ID NO: 114462 - DNA, 3150 bp, synthetic construct
  misc_feature 1..3150: note = Description of Artificial Sequence: Synthetic coding sequence
  source 1..3150: mol_type = other DNA
atggactggtccttctttcgggtcgtggccatgctgtttattttcttggtggtggtggaggtgaatagtgagttccgcatccaggttcgcgactataataccaagaatggcacaatcaagtggcattccatacggagacagaagagggagtggattaagtttgcagcggcatgcagggaaggcgaagataacagcaagcgcaaccccattgcaaaaattcactccgactgtgctgcaaatcagcaagtcacgtaccggatctctggcgtgggcatcgatcagccaccatatggaatattcgtaattaaccagaagaccggggagatcaacataacgtctattgtagaccgagaggtgacccccttcttcatcatttactgtcgggccctcaattctatgggccaggacctggagcgccccttagagctgcgtgttcgagttctcgacatcaatgacaatccccccgtgttttcaatggccacgtttgcaggacagatcgaagagaattctaatgctaatacacttgtcatgatcctgaatgccaccgatgctgacgagcctaacaatctgaattcaaagattgccttcaaaatcattcggcaggagccctccgactcacctatgttcattattaatcgaaacaccggagagatcaggacaatgaacaattttctggaccgggaacagtatgggcagtacgccctggcagtgcggggaagtgatcgggacggcggcgcagacggcatgtctgcagagtgtgagtgtaacattaaaatcctggatgtcaacgataacattccttatatggaacaatccagctataccatcgagatacaggagaacaccttgaactctaatctgctggagatccgcgtcatcgatctggacgaggaattctccgctaattggatggctgtgatttttttcatctccggcaacgagggaaactggtttgaaattgagatgaacgagcgcactaacgtgggcatattaaaagtcgtaaaaccacttgattatgaagctatgcagtcccttcagcttagcatcggggttcgaaacaaggctgaatttcatcacagcattatgagccagtataagctcaaagctagtgcaataagtgtaaccgtgctgaatgttatcgagggacctgtttttaggcctgggtcaaaaacatatgtagttaccggcaacatggggtccaacgataaagtgggggactttgtagccacagacctcgatacaggacggccaagcaccaccgttagatatgtgatggggaataatccggcggacctcctggccgtcgattctcgaacggggaagcttacactcaagaacaaagtgactaaggagcagtacaacatgctgggcggaaagtaccaaggcactattctaagcatcgacgacaaccttcaacggacctgcaccggaaccatcaacatcaacattcaatcttttggcaatgacgaccgcactaatacagagcctaataccaaaatcaccaccaatactggtcgacaggagtccacttcctccaccaactacgatacaagcacaaccagtacagatagtagccaagtctactctagtgagccaggcaatggtgcaaaggacctcttgagtgacaacgttcacttcggccccgctggaatcggcttgttgatcatgggctttctcgtccttggactggtcccatttctcatgatctgctgtgactgcggcggggccccacgaagcgccgcgggattcgaacccgttcctgagtgcagcgacggcgcaattcattcttgggcagtggaggggccacagcccgaaccaagagacattactactgtcattccacagatcccccctgacaacgccaacatcatcgaatgtatagacaactcgggtgtgtacaccaatgagtatggggggcgagagatgcaggacctcggtggaggagagcgaatgacgggttttgaactgacagagggtgtcaaaacaagtggaatgcccgaaatctgccaggagtactcggggactcttaggcggaatagcatgcgagagtgcagagagggtgggctcaacatgaacttcatggagtcatacttttgtcagaaagcatatgcatacgccgacgaggacgagggccggccttctaatgattgtctgctcatctatgatatagaaggggtgggcagcccagccggcagtgtgggatgctgtagcttcataggggaggacctcgatgactctttcctcgacacgctgggcccaaagttcaagaagttggctgatatttccctgggtaaggagtcctacccagatttggatcccagctggccgccccagtctacagagcctgtttgcctccctcaggagacagagcccgtggtctcaggtcatcctccgatttcaccacacttcggaacaaccactgtaatctcagagtcaacctacccttctggaccaggagttctgcatcctaaacccatactcgacccccttgggtacggtaatgtaacagttaccgagagctataccacctcggacacactgaaaccttcagtccacgtacacgacaacagaccagcgagcaatgtggttgtgactgaaagagtggtgggaccaatctcaggggctgacttgcacgggatgctggagatgcccgatttgagagatggctctaatgtgattgtcactgaaagagtcatcgctccctcctctagtcttcccacatcgctgaccatccatcacccccgtgagtcttccaacgtggtggtgaccgaacgagtgattcagcccacgtctgggatgatcggatctctcagtatgcatccagagctggcgaacgctcataatgtaatcgtaacggaacgagtggtttcaggcgccggagtaacaggaatcagtggtacgacgggaatcagcgggggcatcgggtcttctgggctcgttggcacaagcatgggtgctggaagtggagcccttagtggagcaggaatatctggaggcggaatcggcctgagctcactgggtgggaccgcatccatagggcacatgaggtcatcaagcgaccaccacttcaatcagacgatcggaagtgcctcaccaagtacagccagaagccgcataacaaagtacagcactgttcagtacagcaagtag

SEQ ID NO: 114463 - DNA, 3357 bp, synthetic construct
  misc_feature 1..3357: note = Description of Artificial Sequence: Synthetic coding sequence
  source 1..3357: mol_type = other DNA
atggcgaggagccctgggagggcctatgcactcttactactgttgatatgttttaatgtggggtccgggctccatttacaggtcctgtccacgcgcaatgaaaacaaactcctcccaaagcaccctcacctagtgcgccaaaagcgggcttggatcaccgcccccgtcgctctccgggagggagaagatttgtccaaaaaaaaccctatcgccaaaatacacagcgaccttgcagaagaacgaggattgaagattacctataagtataccggcaaggggattaccgagcctcctttcgggattttcgtgttcaacaaagacactggtgagctgaatgttacctctatattggaccgggaggaaacacctttttttctgcttacaggctacgcactggatgcacggggcaacaacgttgagaagcctttggagctccggataaaagtgctcgatatcaatgacaatgaaccagtctttacccaggatgtgttcgtggggagcgtggaagaactgtctgctgcacataccctcgtgatgaagatcaatgccacagacgcagatgaacccaataccttgaattctaagatttcctaccgaatcgtctcgctggagcccgcttacccaccagtgttctatctgaataaggacaccggcgaaatatacactacatccgtgaccctggatcgcgaggagcatagttcttacacgcttaccgtggaggccagggatgggaacggggaggtgaccgataaacctgtgaagcaggctcaggtgcagatcagaatattggacgtgaatgacaacatacctgtagtggaaaacaaagtgctggagggtatggtcgaggaaaatcaggtgaatgtcgaggtgaccagaatcaaggtcttcgacgccgatgagatcggcagcgataattggttagcaaactttactttcgctagcgggaacgaggggggttattttcacatcgaaactgacgcacagaccaatgagggtattgtcacgttaataaaggaggtagactacgaagaaatgaaaaatctggatttttcggtaatcgtggccaacaaagcagctttccataaaagcatccggagtaaatataagcccactcccattccgatcaaggttaaggtcaagaatgtgaaggaagggatccatttcaaatctagcgtgatcagtatatacgtgtctgagagcatggacaggagttctaagggacagatcatcgggaactttcaggccttcgatgaagacaccggcctacccgcccatgcccgatacgtgaagttggaggatagggacaattggatctccgtggactccgttacatcggaaattaagctcgctaaattgcctgactttgagtctagatacgtccagaacgggacatacactgttaagatcgtagcgatttccgaggactacccaaggaaaacaattactggaactgtcctaatcaatgtggaggacatcaatgacaactgtccaacgctgatcgagcctgttcagacgatttgccatgacgctgaatacgtgaatgttacagcagaagacttggacgggcatccgaactcggggcccttttcttttagcgtgattgacaagcctccgggaatggccgagaaatggaaaatagccagacaagaatccacctctgttctcctccagcagagtgaaaaaaagctcggcagatctgaaattcaatttctgatctccgacaatcaaggattcagttgcccagaaaaacaagtgctgaccttgaccgtgtgtgaatgcctccatggttccggatgccgagaggcgcaacatgactcctacgtgggcctgggtcccgcagcaatcgcgctcatgatcttggcatttctacttctgctgctggttccgctgttgcttttgatgtgtcattgcgggaagggagctaaagggtttacaccaatccccggaacgatagaaatgctccacccctggaacaacgagggggctccgcctgaagacaaggtggtaccctcatttctgcctgtcgatcaaggaggcagcttggtgggacggaatggggtgggaggaatggccaaggaggcaaccatgaaaggtagtagctccgcatctatcgtgaagggccaacacgagatgtcagaaatggatggtagatgggaggaacatcgttcactcctcagcggaagagctactcagtttacaggagccacgggggctattatgactacagaaactaccaaaaccgcccgcgcaacgggagcctccagggatatggcgggcgcccaagctgccgccgtggccctgaacgaggagtttcttcggaattattttactgacaaggctgcttcctataccgaagaggacgaaaaccacacagctaaggattgcctgctggtgtattcccaggaggaaactgagtctcttaatgcctccattggctgctgttcatttattgaaggggagctggatgacaggtttctggacgacctgggtcttaagttcaaaacactggcagaagtatgcctgggacagaagattgatattaataaggagattgagcaaaggcagaaacctgctaccgagaccagcatgaacaccgctagtcacagcttgtgcgagcaaacaatggttaactctgagaatacttacagtagtgggtcctcatttcccgtcccaaagtctttgcaagaagcaaacgccgaaaaagtcactcaagagatcgtcaccgagcgcagcgtgagttcccgccaagcacagaaggtggcaaccccgctcccagaccccatggcaagtagaaatgttatcgctaccgaaacatcctacgtaacagggagcaccatgccacccactaccgtgatactgggtccgtcccaaccccaatctctgatagtgacagaacgagtctacgctcccgcttctactctggtggatcaaccctatgccaacgaaggcaccgtggttgtcacggagcgggtgatccaaccgcacgggggaggaagtaaccctttagaaggcactcaacacctgcaggatgtgccatatgtcatggtccgggagagggaaagctttctggccccgagtagtggcgtccagcccactttagctatgccgaacatcgcggtgggacagaatgtcactgtgacagaacgcgtactggctcccgcgagtacattgcagtcatcttaccagattcctaccgaaaattctatgacggcgcggaacacgactgtttctggcgctggcgtacctgggcctctgcccgacttcggccttgaggagagcggacactcgaacagcacgataacaacttcttctacacgggtcaccaagcactccaccgttcagcactcctattcttag

SEQ ID NO: 114464 - DNA, 3123 bp, synthetic construct
  misc_feature 1..3123: note = Description of Artificial Sequence: Synthetic coding sequence
  source 1..3123: mol_type = other DNA
atggattggcttttcttccgtaacatatgcctgcttataatcctgatggttgtgatggaagtgaattccgaattcattgtcgaagtgaaagagttcgatatcgagaacggtaccactaaatggcagactgtgcgtaggcagaagcgggaatggattaaatttgcagcagcatgtcgtgagggcgaggacaactcgaaacggaatcccattgctaaaatccgaagcgactgcgaatccaaccagaaaatcacctatcgcataagcggggtaggcattgaccggccgccttacggggtctttacgatcaacccgcgcacgggtgagatcaacatcaccagtgtggtagatcgcgagatcacccccctttttctcatatactgccgggccctgaactccaggggggaagacctggagagacccctggagttgcgagtcaaggtgatggatattaatgataacgcccctgtgttttcgcagagcgtctacacagcctcgattgaagagaactccgacgcaaataccctggttgtaaaactctgcgctacagatgctgatgaggagaatcaccttaattcaaaaatcgcttacaaaatcgtttcacaggagccttctggcgcccctatgttcatattaaatcggtataccggggaagtttgcactatgtcctcatttctggatcgcgagcaacacagtatgtataacttggtagtacgcggctccgaccgagatggcgctgcggatggcctgtccagcgaatgcgactgccgcattaaggtgctcgacgtcaacgataatttccccacactcgagaaaacatcttactccgcctccatcgaggagaactgcttatcctccgaacttatcagactacaggccatcgatctggacgaagaaggtacagataattggctggcccagtacttgattctcagtggtaacgatggaaattggtttgacattcaaaccgatccacagaccaacgaggggatactaaaggtggtgaaaatgctggactatgagcaggccccaaacattcagctgtccattggcgtgaagaaccaagcagattttcattatagcgtggctagccagttccagatgcacccaacccccgtgaggatccaagtcgtggacgtgagagaagggccagccttccatcctagcaccatggccttctcagtgagagaggggataaaggggtcgagcttattaaactatgtgttgggcacttatacagcaatcgaccttgacaccggtaatccggcaacggacgtgcgatatataatcggccatgacgcaggatcatggctaaaaatcgactcacggaccggagagatccagtttagtcgtgagttcgataaaaaatcaaagtatataatcaatggaatttatactgctgagattctagccatcgacgacggtagcggcaagactgctactggcactatctgtatagaggtccctgacattaatgattactgtccaaacatctttcctgagagaaggacaatctgcattgactccccaagcgtgttgatctctgtcaacgaacacagttacggttcccctttcactttttgtgtagttgatgagccccccggaatagctgacatgtgggacgtccggtctaccaatgcaacttctgctatcctgactgctaagcaggtgctgtccccaggcttctacgagatacctatattggtgaaggatagttacaacagggcgtgtgaactggcccaaatggtacaactgtacgcgtgcgattgtgatgacaaccatatgtgtcttgattcaggcgctgccggcatctataccgaagatatcaccggagatacctacggacccgtgacagaggatcaggccggcgtgtcaaatgtgggcctcggccctgctgggatcggcatgatggttctggggatcttgttgctgatattggctcctctgcttctgctgctttgttgctgtaagcagcgtcagcccgagggactgggaacccgctttgcccctgtgcctgaggggggggagggagtgatgcagagctggaggatcgaaggcgcgcatcctgaagaccgagatgtgtccaacatttgcgcccccatgacagcttctaacacccaggatcggatggattccagcgagatatataccaacacgtacgctgctgggggaactgtggaaggcggcgtaagcggagtcgagctgaacacaggaatgggcacggctgtggggcttatggcagccggggctgcaggagcttctggtgcagcccggaagaggtcgtcaactatgggcaccctcagggattacgcagacgccgatatcaacatggccttcctcgattcctacttttctgaaaaagcatacgcatacgccgatgaagatgagggaaggccggctaacgactgccttttgatctacgatcacgaaggtgtcggttctcccgttggaagcattggttgctgctcctggattgtcgacgatctcgatgagtcctgcatggagactttggatcccaagttcaggacacttgcagaaatctgtctaaataccgagattgagcccttcccttcacaccaggcctgtattcccatttccactgatctgcctctgcttgggccaaactatttcgtcaacgaatcgtccgggctcactccctccgaagtggagttccaggaggaaatggcagcctccgagccagtagtgcacggcgacattattgtcacagaaacctatgggaatgccgatccgtgcgtgcagcccaccacaataattttcgaccctcaactcgcccctaatgttgtcgtaacagaggctgtgatggctcccgtatatgacatccaagggaacatctgtgtccctgctgagcttgccgactacaacaacgttatctacgccgaacgcgtgctagctagcccaggggtgcccgatatgagcaattcatcaaccactgagggctgtatgggcccagtgatgagcgggaatatcttagtaggtccagagattcaggtcatgcaaatgatgagcccggatctgcctatcgggcagaccgtggggtcgacttccccaatgacgagtaggcatagagtcacgaggtacagtaacattcactatacccagcagtag

SEQ ID NO: 114465 - DNA, 3180 bp, synthetic construct
  misc_feature 1..3180: note = Description of Artificial Sequence: Synthetic coding sequence
  source 1..3180: mol_type = other DNA
atggattggctcttctttagaaatatatgcctcctcattatacttatggttgtgatggaagtgaacagtgaatttattgttgaagtcaaagagttcgatatcgaaaacggcactaccaagtggcagaccgttcgaaggcaaaaaagggaatggatcaagtttgctgcagcctgcagggagggggaggataactccaaacgcaatcctatcgccaaaattcggagtgattgtgagagtaaccagaagatcacgtaccgaatcagcggcgtggggatcgacagacccccgtacggagtctttaccatcaatccgcggacaggggagatcaacattacctcagttgtcgatcgagagatcacaccattgtttcttatctactgcagagcacttaatagtcggggggaagacttggaaaggccactggagttgcgagttaaagtaatggatataaacgacaacgcacccgtcttctcccaatcggtctataccgcctccattgaggagaattccgacgccaacaccttggtggtgaaactgtgtgcgacagacgcggatgaggaaaatcatctgaacagcaagatagcctacaaaattgtctcccaggaaccatccggcgctccaatgtttatccttaatcgatacactggggaagtttgtaccatgagcagttttcttgatcgggaacagcactccatgtacaatcttgtcgtccgtgggtcagaccgagacggggccgctgacggactctcgtcagaatgtgactgtaggattaaggtgttggacgtgaatgataactttcctacacttgagaagacctcttattctgctagtatcgaggagaactgcctatcctcggagttgattcgtttgcaggcgatcgatttagacgaagagggcacggataactggctggcgcagtatttgattctgtcaggaaacgacgggaactggtttgacatccaaaccgacccacagacgaatgagggtattctgaaggtcgtgaaaatgctggattatgaacaagctccaaacatccaactatccattggagttaagaatcaggcagacttccattactccgtagcttctcagttccagatgcacccaacccctgtgcggatccaggtcgtcgacgtaagagaagggcccgcttttcacccttccacaatggcttttagcgtccgggagggtattaaaggttccagtctgcttaattatgtgcttggaacctacactgcaatcgatctcgacacaggaaacccagccaccgacgtgcgttacatcatcgggcatgacgccggctcttggcttaaaatagattctagaactggagaaattcagttctcccgggaattcgataaaaagtccaagtacatcatcaatgggatctatactgcagagattctcgccatagacgatggaagcgggaaaacggccacgggcacaatctgcattgaggttccagacataaacgattactgccctaacattttccctgagcgcagaactatatgtattgattcacctagcgtcctgatctctgtcaatgaacactcgtacggctcaccctttacattctgtgtcgttgatgaaccaccggggatcgcagatatgtgggatgtaagatccacaaatgccacctcagcaattctgactgccaagcaagtgctctccccagggttttacgagattcccatccttgtgaaggattcctataatcgagcttgcgaactcgcccagatggttcagctgtacgcctgtgactgcgacgataaccacatgtgcctggactccggagcggcagggatatacaccgaggacatcaccggcgacacgtacggtccagtgactgaggatcaggcaggagtgtctaatgtgggactgggacctgctggcataggcatgatggtcctggggatccttctgcttatcctcgcccccctccttctgctgctatgttgttgcaaacagcggcagcccgaggggctcggcactagatttgctcccgtgcctgaaggcggagagggggtgatgcagtcctggaggatagagggcgcccatccagaggaccgcctgttctctgcctatgcactacccggcggcggcgggaccgcagacgggggtggctcagtgctcgggagatgtgctttgcaggccaccccagcccttctcaaccagcacccacccttctctgagatctataccaatacatacgcagccggcggtactgtggaaggtggggtgagcggcgtggagttaaatacaggcatgggcacagccgtggggttgatggctgccggtgcagccggagctagcggcgctgcccgaaagcgctcctctacaatggggacattacgcgattacgcagacgctgacataaacatggcttttctggacagctacttttctgagaaagcctacgcctacgctgacgaggacgaagggaggccagcaaacgactgcttgctaatatacgatcatgaaggggtgggcagtcctgtcggcagcattggctgctgttcttggatcgtggatgacctcgacgaaagctgcatggagactcttgatcctaaatttagaactctcgcagagatctgtctgaacaccgagatagagccttttccttcacatcaggcctgtattcccattagtaccgacttacccctgctgggcccgaactatttcgtgaatgagtcttctggtcttactcctagcgaagtagagttccaagaggagatggctgcctcggagcccgtcgtgcatggggacatcatcgttactgagacgtacggcaatgcggacccatgtgtgcagccaaccacgattatttttgacccacaactggccccaaacgtggtggtaacagaagccgtgatggcccccgtctatgacatccaaggaaatatatgtgttccagcagaacttgccgactacaacaacgtgatatatgccgagcgcgtcctggcgtcacctggtgtcccagacatgagtaattccagtactacagagggctgtatgggaccggtaatgtccggaaacatcctggtgggtccggagattcaggtaatgcagatgatgtctcccgatcttcctattggacagactgtgggcagcacatcccctatgacatcgagacacagggtcactaggtactcaaatatccattacactcagcagtag

SEQ ID NO: 114466 - DNA, 498 bp, synthetic construct
  misc_feature 1..498: note = Description of Artificial Sequence: Synthetic coding sequence
  source 1..498: mol_type = other DNA
atggcctcaggggtccaggtcgccgatgaggtttgccggatcttctacgacatgaaagttcgaaaatgttcaacccccgaagaaattaagaagaggaaaaaggccgtgattttttgtctttcagccgataagaagtgcatcattgtggaggaagggaaagagattctcgtcggggatgtcggcgtgaccattacagaccccttcaagcattttgttggaatgctgccggagaaagattgccgctacgctctgtatgacgcaagcttcgagacaaaggaatcacgtaaggaagaattgatgttctttctgtgggcccccgagcttgcccctctgaagtcaaagatgatctacgccagttctaaggacgctattaagaagaagttccaggggattaagcatgagtgccaagcgaatgggcccgaggacttaaatagggcctgtatcgccgagaaattggggggtagcctgattgtggcttttgaaggctgtccagtctag

SEQ ID NO: 114467 - DNA, 447 bp, synthetic construct
  misc_feature 1..447: note = Description of Artificial Sequence: Synthetic coding sequence
  source 1..447: mol_type = other DNA
atgaaagtgcgcaaatgctcaacccccgaggagatcaagaagagaaaaaaagcggttatattctgcctatccgcagacaagaaatgtatcattgtcgaagaggggaaggaaattctagtgggggatgtgggagtgaccatcaccgacccgttcaagcactttgtgggaatgctaccggagaaagactgtcgatacgccctgtacgatgcctcattcgaaacgaaagagagtagaaaggaggaactaatgttcttcttgtgggcaccggaactggcaccattaaagtctaagatgatctacgcctcctctaaggatgcgatcaagaaaaaatttcagggcatcaaacacgaatgtcaggccaatggcccagaagatctcaatagggcctgtattgccgaaaagctcggcggtagcctgatagtggctttcgaaggatgcccagtctag

SEQ ID NO: 114468 - DNA, 897 bp, synthetic construct
  misc_feature 1..897: note = Description of Artificial Sequence: Synthetic coding sequence
  source 1..897: mol_type = other DNA
atgtctgacgcaaatttggatagctcaaagaagaactttctggaaggggaagtggacgatgaggagtctgtgatactcacgctcgtgccggtgaaggacgacgcaaatatggagcaaatggaaccgtcagtgtccagtactagcgatgtcaagttggaaaagcccaaaaagtacaacccaggccacctcctccagacaaatgaacagttcaccgcgccccagaaggcaaggtgcaagatacctgcattgcctcttccaacaattctgccgccaatcaataaggtttgcagggataccctgagggattggtgccagcaactgggactgtcgactaatggaaaaaagattgaagtctacctgagactacaccgccatgcttaccctgaacagcggcaggatatgcctgaaatgtctcaggagactcggctccagcggtgcagcagaaagcggaaggccgtgactaaaagggcgcggctccagcggagttacgaaatgaacgagcgtgccgaagagaccaataccgtggaagtgattacatccgctcctggggcaatgttggcaagctgggctaggattgcggcacgcgccgtccaacccaaggcactgaattcatgttcaatccctgtcagcgtggaggcttttctgatgcaagcatccggtgtgcgctggtgcgtggttcatggtcgcctgctaagcgccgacacaaaaggctgggttagactgcaattccatgctgggcaggcgtgggttcctactacccacagaaggatgatctcattgttcttactgcctgcctgtatcttcccctcgcccggcatcgaggataacatgctgtgtcctgattgcgccaaacgcaataagaaaatgatgaaaaggctgatgactgtggagaagtag

SEQ ID NO: 114469 - DNA, 480 bp, synthetic construct
  misc_feature 1..480: note = Description of Artificial Sequence: Synthetic coding sequence
  source 1..480: mol_type = other DNA
atggacccttcccagtttaatcctacatacattcccgggtctcctcaaatgctgactgaggaaaactcccgcgacgatagcggagcctcccaaatcagttccgaaacgctcatcaagaacctgagcaacttgacaatcaatgcttcttccgagtccgttagcccactgtccgaggctctcctgagacgcgaaagcgttggagccgccgttctgagggagatcgaagacgaatggttatactcacgcagaggggttcgcacattactgtccgtgcagagagagaaaatggctaggctgcgttatatgttgctcgggggggtgagaacccacgagagaaggcctacaaacaaggagcccaagggtgtgaaaaaagagtcaagacctttcaagtgcccatgtagtttttgcgtgagcaatggctgggatcccagcgaaaacgcaaggattgggaaccaggacaccaagcctctccagccatag

SEQ ID NO: 114470 - DNA, 915 bp, synthetic construct
  misc_feature 1..915: note = Description of Artificial Sequence: Synthetic coding sequence
  source 1..915: mol_type = other DNA
atgcttcggggatcagccagcagtacaagtatggagaaagcaaagggaaaggaatggacatccacagaaaaatcccgggaggaggaccagcaggctagtaatcagccaaattcaatcgccctcccgggaacaagcgccaaaagaactaaagaaaagatgagtattaagggctccaaagtgttatgtcctaaaaagaaggccgagcataccgacaatccacggccgcagaagaagatacccataccgcctctcccgtctaagctgccccccgtgaatctgattcatcgggatatcctcagagcctggtgtcagcagctgaagttgtcaagcaagggacagaagctggatgcctacaagaggctctgtgccttcgcttatcccaaccagaaggattttccgagcacggccaaagaagccaaaattcgaaagagtttacagaaaaaacttaaggtcgaaaagggtgagaccagtctgcaaagctccgagactcaccccccagaggttgcccttccacccgtgggggagccccctgcactagaaaactccaccgccctccttgaaggagtgaatactgtcgtcgtcaccacatccgctcctgaggcccttctggcctcatgggcccgcatctcagcacgcgctcgcacaccagaggcggttgaaagtcctcaggaggctagtggcgtgaggtggtgcgtagttcatggtaagtcactgcccgctgacaccgatggctgggttcacctgcagttccacgccggtcaggcctgggtacccgagaaacaagagggaagagtgtcggcccttttcctactgcctgcgagcaatttcccccccccgcacctggaagacaacatgctctgtcccaaatgcgttcaccgaaataaagtgctgataaagtccctgcagtgggagtag

SEQ ID NO: 114471 - DNA, 351 bp, synthetic construct
  misc_feature 1..351: note = Description of Artificial Sequence: Synthetic coding sequence
  source 1..351: mol_type = other DNA
atggggacactgcccgcccgccgtcacattccaccttgggtgaaggtacccgaagacctgaaggatccagaggtgtttcaggtgcaaacccgactgcttaaagcaatcttcggacctgacggctcccggatcccatacattgaacaggtatccaaggctatgttggagttgaaagccctggaatcttctgacctgacagaggtggtggtgtacggtagttacctctataagttaaggaccaaatggatgctgcagagtatggctgaatggcatcgccaaaggcaggagcggggcatgctgaagttggccgaagctatgaacgcccttgagcttggaccctggatgaagtag

SEQ ID NO: 114472 - DNA, 1104 bp, synthetic construct
  misc_feature 1..1104: note = Description of Artificial Sequence: Synthetic coding sequence
  source 1..1104: mol_type = other DNA
atgagcagtaccctggctaagatcgccgagatagaagccgagatggcccgcacgcagaaaaataaggccactgcccatcatctggggctcctgaaggcacggttggccaaactccggcgagagctgatcacaccaaagggcggtggggggggggggcctggtgaagggttcgatgttgcaaagaccggcgatgcccggatcggtttcgttgggttcccatctgtgggtaagagtacgttactttctaatctcgcaggggtgtactccgaggtcgccgcctatgagtttaccacactcactacagtccccggtgtgatacgctataaaggggctaagattcagctactggatctgcctggaataattgagggagccaaagacggaaagggcaggggccgacaagtgattgcagttgctagaacttgcaacctgattctgatcgtgttagatgttttaaagcccctcggtcacaaaaagattatcgaaaatgaactggagggctttgggattcgcctcaactccaagcctcctaatatcgggttcaaaaaaaaggataaagggggtattaacctcactgccacttgtccccagtccgagctggacgcggaaaccgttaagagcatcctcgcagagtacaaaatacataatgccgatgtaacactccgttccgacgctacggccgacgacctaatagatgtggttgagggaaaccgggtttacattccctgtatttatgtactgaataagatagatcagatcagtatagaagagcttgacattatctacaaagtgcctcactgcgtgccaatatctgcccaccataggtggaattttgacgacctcttggagaagatttgggattatttgaaactggttcgaatctacaccaagcccaaaggccagcttcccgactacacttcaccggtcgttctaccctattctagaacaactgtggaagacttttgtatgaaaattcacaagaatcttattaaggaattcaaatatgcgctggtctgggggctgagcgtcaaacacaatccgcagaaagtagggaaagatcacacactcgaagacgaagacgtgattcaaatcgtaaaaaaatag

SEQ ID NO: 114473 - DNA, 396 bp, synthetic construct
  misc_feature 1..396: note = Description of Artificial Sequence: Synthetic coding sequence
  source 1..396: mol_type = other DNA
atggccgcagcggtagcaatggagacggacgacgccgggaataggttgagattccagctggagctggagtttgttcagtgccttgccaatcccaactatctgaatttcctcgctcaaaggggttatttcaaagacaaggccttcgtaaactacttaaagtatctcctgtattggaaagatcccgagtatgccaagtacctgaagtacccccagtgtctgcacatgcttgaattacttcagtatgaacacttccggaaggagttagtgaatgcgcagtgcgctaaattcattgacgaacaacaaattctgcattggcagcactactccaggaaacgcatgcgattgcaacaagcattagctgaacagcagcaacagaacaacacttctggtaagtag

SEQ ID NO: 114474 - DNA, 1032 bp, synthetic construct
  misc_feature 1..1032: note = Description of Artificial Sequence: Synthetic coding sequence
  source 1..1032: mol_type = other DNA
atggggatcctcgagaagatttcagaaattgagaaagagatcgcgaggactcaaaagaataaagccacagagtatcacctggggctcctaaaggctaaattggccaaatatcgtgcacagttgctggagccttccaaatctgcctcttcaaaaggcgaaggctttgatgtcatgaagagtggagacgctcgggtcgcgctcatcggcttccctagcgtgggtaagtcgacctttctgtcattaatgactagtacggcgtcggaggccgctagttatgagttcacaacgctgacctgtattcctggtgtaatcgagtacaaaggagcaaacatccagcttttggatctgcccggcatcatagaaggagcagcccaggggaaaggacgagggcgccaagtcatcgctgtcgcccggacagccgatgtgattattatgatgctcgatgcaacgaagggggaggttcagaggtcgctgctcgagaaagaactggagtcagtcggaatacgcctgaacaaacacaaacctaatatctatttcaagcctaagaaagggggcgggatctcgtttaattcgacagtcacactcactcagtgttctgagaagcttgtccagctgattctgcatgagtacaaaatcttcaacgccgaagtcctttttagggaggactgcagtcccgacgagttcattgatgtcattgttggtaaccgcgtttacatgccatgcctctatgtctacaataagatcgaccagatcagcatggaggaagtggacagactcgcgcggaaacccaattccgtggtgatcagctgcggcatgaagctgaatctggattaccttttggaaatgctgtgggagtacctggccctcacctgcatctatactaagaagcggggccagaggcctgactttaccgatgccatcatactgagaaaaggcgccagtgtagagcatgtttgtcaccggatccaccggagcctggcttctcagtttaaagcgccagcaccatcaaccgttaggagcggttgggcttag

SEQ ID NO: 114475 - DNA, 2037 bp, synthetic construct
  misc_feature 1..2037: note = Description of Artificial Sequence: Synthetic coding sequence
  source 1..2037: mol_type = other DNA
atggagctgaggtcctaccagtgggaggtaatcatgccagctcttgaggggaagaacatcataatctggctgcccacaggcgccggaaaaacacgcgcagccgcttacgtcgccaagaggcaccttgaaaccgtggatggggcgaaggtggtcgttctggtaaatagggtgcacctagttacccaacatggcgaagagtttaggcgcatgcttgatggtcggtggactgtgactaccctgagtggagatatgggacccagagcgggatttggccacctggcacgttgtcacgatctcctcatttgtacggccgagcttttacagatggccctcacatctcctgaggaggaagagcacgtggagctgacagtcttctcgctcatcgtggtggacgagtgccaccatacccacaaagacactgtttataatgtgatcatgtcccaatatcttgaactgaaactgcagcgggcccagccattgcctcaggtccttggtctgaccgcttcaccaggtaccggcggagcctctaagctcgacggagccattaaccatgtgttgcaactttgtgcaaacttggacacctggtgcataatgtccccccagaattgttgtccgcagctgcaggagcattcacagcagccttgcaagcagtataacctatgccatcgcaggagtcaggacccatttggtgacttgctaaagaaacttatggaccagattcatgatcatctggagatgcctgagctgagccgtaaattcggaacgcagatgtacgagcagcaagtcgtgaagttgtcagaagctgctgcgctagctggactgcaggagcagcgcgtctatgcacttcaccttagacggtataatgatgctcttttgatccatgacacagtcagggcagtggatgccctggcagcgttgcaggatttctatcatcgagaacacgtgaccaagactcagatcttgtgcgccgagagacggctgctggcactgtttgacgaccgcaagaacgagctcgctcaccttgccacccatggccctgaaaacccgaagcttgagatgttggagaagatcctgcagaggcaattcagttcttcaaactcaccgcgaggcataatattcacgcgaacacgacagagcgctcattctctgctactatggctacagcagcagcaggggcttcagacagtggatatcagggctcaactgctcattggagctgggaactcttcccagagcacacatatgacccagcgggaccagcaggaagtgatacaaaagtttcaagacggtaccctgaatcttctggtggcgacttccgtggccgaagaaggtctggatataccccattgcaatgtggtggtacgctacggtctgctgaccaatgagatcagcatggtgcaagcaaggggcagagcacgcgcggaccagagtgtgtatgcttttgtggccacagaaggctccagagagttaaagcgtgagcttatcaacgaggctctggagacgctgatggagcaagccgtcgcagcagttcaaaaaatggaccaggccgaatatcaggcaaaaatccgggacctgcagcaagcagcgttgaccaaaagggctgctcaggcagcgcagcgcgagaatcagcgacaacaatttccagtcgaacatgtgcagctgctatgcatcaactgtatggtggcagtaggacacggctctgaccttcgaaaggtggaaggcacgcaccacgttaacgttaatcctaacttcagcaattattacaacgtgtctagagatcccgtagtgataaacaaagtattcaaggattggaaacccggaggcgtaatctcctgccgcaactgtggcgaggtttggggtctgcagatgatttacaagtcagtgaaactgcctgtgcttaaggtgcgaagcatgttgttagagacgccacaggggcggatccaagctaaaaagtggtcacgcgtgccattcagtgtgcctgattttgactttttgcagcattgtgccgagaatctctcggacctgagcctagattag

SEQ ID NO: 114476 - DNA, 909 bp, synthetic construct
  misc_feature 1..909: note = Description of Artificial Sequence: Synthetic coding sequence
  source 1..909: mol_type = other DNA
atggaactccggtcctaccagtgggaagttattatgcccgctctcgaaggcaagaatattattatctggctacccaccggagccggaaagactcgtgccgctgcttatgtcgctaaacggcacctcgaaaccgtggacggcgccaaggtcgtggtgctggttaatcgggtgcacctcgtcacgcagcacggggaagagttcaggcggatgctggacggccgatggactgtgaccactctgagcggcgacatggggcctcgggcgggttttggtcatttagcacgctgccacgatcttttaatttgcacagccgaacttctccagatggcacttactagcccggaagaggaggaacacgtcgaactcactgtcttctcattgatagttgtagatgagtgccatcacacacacaaggacacggtgtataatgtaatcatgtctcagtatctcgaattgaagctgcagcgggcccagcccctcccccaggttctcgggctgaccgccagcccgggcactggaggagcctccaagttagatggtgcaattaaccacgtcctccagctctgtgctaatctcgatacgtggtgcatcatgtccccccagaattgttgtccacaactgcaggagcacagtcagcagccttgcaagcagtataatctttgtcaccgccggtctcaggatccctttggagaccttctcaagaaactgatggaccaaatacacgaccatttggagatgcccgagttaagccggaagttcggtactcaaatgtatgagcaacaagtggtgaaactgtcggaggcagctgcgctggcgggtcttcaggaacagagagtgtatgcattgcatctgcgacgatataacgacgcccttctcatccatgacaccgtcagagcagtggatgcttag

SEQ ID NO: 114477 - DNA, 1464 bp, synthetic construct
  misc_feature 1..1464: note = Description of Artificial Sequence: Synthetic coding sequence
  source 1..1464: mol_type = other DNA
atggaactgcggagttaccaatgggaggtcattatgcctgctttggagggtaaaaacattattatctggctgccaacaggcgccggcaaaacgcgggcggcagcctacgtggccaaaaggcacctggagacagtcgatggtgcaaaggtggtcgtactagtgaacagagtgcatttagtgacccaacacggcgaggaattccggcggatgctagacggcaggtggaccgtaactactctcagtggagacatgggaccaagagccggtttcggtcacctcgcaaggtgccatcatacacataaggatacagtctacaacgttatcatgagccagtaccttgaattgaaactccagcgggctcaaccactcccccaggtcctggggttgactgcctcaccaggtaccggcggtgcatctaagttggatggtgctatcaatcatgtcctgcagctgtgtgctaatctggatacatggtgcatcatgtctccacagaattgctgtccccagctccaggaacactcacaacagccctgcaaacagtacaacctctgccacaggagaagccaggatcctttcggagacctcctgaaaaagttgatggaccagatacatgatcacctggagatgccagaactctctcgaaagtttggtacccagatgtatgaacaacaggtggtgaagctgagcgaagcagccgccttggctggcttacaggaacagagggtatatgcactgcatctaagacggtacaatgacgccttactcatccatgataccgtacgggccgtggatgcactcgcggcgctccaggatttttatcacagggaacacgtcacaaaaacccagatcttgtgcgcggagcgcaggcttctagcactgttcgatgatcgaaagaatgagctggcacatctcgccactcacggccccgaaaatcctaagctggagatgctggaaaagattttacagcgacagttttcctcttctaacagtcccagaggaatcatatttactcggaccagacagtctgcccattctctgttactatggcttcaacagcaacaagggttgcagaccgtggacataagagctcaattactgataggcgcaggaaattccagccagagcacccacatgactcaacgcgaccagcaggaagtgattcagaagtttcaggatgggacattaaatctcctggtggcaaccagcgtcgccgaagagggtctggatatcccccactgcaacgtcgttgtgagatacggtctattgacgaatgagatctccatggttcaggctaggggcagggcacgcgccgatcagtctgtttacgctttcgtggcaacagagggaagccgcgagctcaagagagagcttataaacgaagccctagagactctgatggagcaggccgtggctgctgtgcaaaagatggaccaggctgaataccaagccaaagagcttctatag

SEQ ID NO: 114478 - DNA, 471 bp, synthetic construct
  misc_feature 1..471: note = Description of Artificial Sequence: Synthetic coding sequence
  source 1..471: mol_type = other DNA
atggaactgcgatcctaccagtgggaggtgatcatgcccgcactggagggcaaaaatattattatctggctcccaactggagcagggaaaacgagggccgcagcttacgtggccaaaagacacctggaaactgttgacggggctaaagtggttgtcttggtgaatagagtgcatctggtgacccaacatggagaagaatttaggagaatgcttgatgggcggtggacggttacgacattgtcaggagacatggggcccagagcaggcttcggccacctcgcgcgctgccatgacttgctcatatgtaccgccgaactgctccagatggcgctgacatcccccgaggaagaagaacatgttgagctgaccgtctttagccttattgtggttgacgagtgccaccacacacacaaagataccgtgtacaatgtcattatgtcccagtatctggagttgaagttgcagcggtag

SEQ ID NO: 114479 - DNA, 2208 bp, synthetic construct
  misc_feature 1..2208: note = Description of Artificial Sequence: Synthetic coding sequence
  source 1..2208: mol_type = other DNA
atggcaaaagagcgaggcctgatctcaccctcagatttcgcacagctgcaaaagtatatggagtattctacgaaaaaggtaagcgatgtcctcaagctgttcgaggatggggagatggcaaagtacgtacaaggagacgccatcggttatgaagggttccaacagtttctaaagatttatctggaggtagataacgtgccgagacatctctccctcgcactatttcagtcctttgagaccgggcattgtttgaacgagaccaatgtcacaaaggacgtggtttgtctgaacgatgttagctgctacttcagcctcctcgaaggagggcggccagaagacaaactcgaattcacattcaagttgtatgacactgaccggaacgggattctggacagctctgaagtggataagattattttgcagatgatgagggtggctgagtatttggattgggatgtgtccgagctgagacctattttgcaagagatgatgaaagagatcgactacgacggctcagggtctgtgtcccaggcggagtgggtgcgtgccggcgctactactgttcccctgctcgtcctacttgggctggagatgaccctgaaggacgatggccaacatatgtggaggcctaagcggttccctagacctgtatattgtaacctgtgtgaatcaagcatcgggctcggcaagcaaggactatcctgcaacctatgcaaatacaccgtacatgatcagtgtgccatgaaagccttgccctgcgaagtgtccacctacgccaaaagcagaaaggatatcggggtccaaagccatgtctgggttcgaggcggttgtgagtcaggaagatgtgacaggtgccaaaagaaaattcgaatctatcacagcttgaccggcctgcattgtgtgtggtgccatctggagattcacgacgactgtctgcaggccgtcggacacgaatgcgactgtgggctccttagagatcacattctgcctccttcctccatatacccctccgtcctggcgagtggaccagacaggaagaactccaagacctctcaaaaaaccatggacgacttgaacctctcgacctcagaagcccttcgaatcgaccccgttccaaacactcacccactcctggtttttgtcaaccctaaaagcgggggcaagcaaggccagagagttctgtggaagttccagtatatcctcaatcctaggcaagtgttcaatctgctgaaagatggcccagaaatcggactcagactgtttaaggatgtcccagacagccgcattttggtctgcggcggcgacgggactgtgggctggatcctggagacaattgacaaggccaatctgcccgtgttacccccagtggctgtcttgccgctcggcacaggcaacgacctcgccagatgcctcaggtggggcggagggtatgagggacagaacctcgcaaagattctgaaggatctagagatgagcaaggtggtgcacatggatcgctggagtgtcgaagtcataccacagcagacggaggagaagagtgaccctgtgcctttccagatcataaacaactattttagcataggtgtggatgcaagtattgcacacagatttcacatcatgagggaaaagtaccccgagaaatttaactcacggatgaaaaacaaactctggtattttgaattcgcgacatcggaaagcattttctcgacctgcaagaagctggaggagtcgttaactgttgaaatctgtggcaaaccactggacctctccaacctaagcctggaaggcattgcggtgctcaacatccccagtatgcacggtggatccaatctatggggtgataccagacggccacacggtgacatttacggtattaatcaggctttgggcgcaacagctaaagtgatcaccgaccctgacatcttaaaaacgtgtgtgccagatctctcagataaaagactagaggtcgtggggctcgaaggcgccattgaaatgggtcagatctataccaagttgaagaacgccgggagacgactggctaaatgttcagaaatcactttccacaccaccaagaccctgcccatgcagatcgatggcgagccttggatgcagacaccttgtaccatcaagatcacacataagaaccaaatgccaatgctgatgggtccacctccacgaagtactaatttttttggattcctgagttag

SEQ ID NO: 114480 - DNA, 2208 bp, synthetic construct
  misc_feature 1..2208: note = Description of Artificial Sequence: Synthetic coding sequence
  source 1..2208: mol_type = other DNA
atggcaaaagaacgagggctcatttccccctccgacttcgcccagctgcagaagtacatggagtactctaccaagaaagtctctgacgtcctcaagctgtttgaagatggggagatggctaaatacgtgcagggagacgcaattgggtacgagggctttcaacagtttctaaagatctacttagaggtagacaatgtcccaagacatctgagcctggctcttttccagtcttttgaaactgggcactgcctgaacgaaacgaatgtgacaaaggatgtggtctgcctcaacgacgtttcctgttatttttccctgctcgaaggcggccgccctgaggataaattggagttcactttcaaattatacgataccgacagaaacggtatactcgacagcagtgaagtagacaagattatcctacagatgatgcgagtggccgaataccttgactgggacgtaagtgagctgagacctatcctccaagagatgatgaaagaaatagattacgacggatccgggtcagtatcgcaggctgagtgggtccgcgctggggccaccaccgtgccgcttctagtcctgctcggattagagatgaccctgaaggatgatggccagcacatgtggagaccaaaaaggtttcctcgtcccgtttactgtaatctgtgcgaaagttccattgggctgggcaagcaggggcttagttgtaatctgtgcaagtacaccgtccatgaccaatgcgcaatgaaagcccttccctgtgaggtgtctacttacgctaaatctcggaaggacataggagtacaatctcatgtgtgggttagaggggggtgtgagtctggaagatgcgatcgatgccaaaagaagataagaatctatcactcgctgaccggactgcactgcgtgtggtgtcatctggagatccacgacgactgcctccaggcggttggacacgaatgtgactgcggcttgctccgagatcacattctgccacccagcagcatttacccaagcgtcctagctagtggccctgacagaaagaactctaaaacgtctcagaaaactatggatgatttgaacctgtccacatccgaagccttgcgtatcgatcctgtacctaacacccaccccctcctggtgttcgtgaatccgaaatctggcggaaagcaaggccagagagtgctatggaaattccaatatattctcaatccccgacaggtgttcaacttgcttaaagatggccctgagattgggctgcgacttttcaaggatgtccccgattcccggatactcgtatgcggtggagatggtacagtgggttggatcttagagaccatcgataaagctaatctgccagttttgcctcctgtggcggtcttgcctcttggcacaggtaacgaccttgcacggtgcctgagatgggggggaggatatgaagggcagaatctggccaagatcctgaaggacctggagatgtcaaaggtggttcacatggatcgatggtctgtggaggttattcctcagcagacggaggagaaaagcgatcctgttcctttccagatcattaacaactacttttctatcggcgtggatgctagtatcgcccatcgcttccatattatgagagaaaagtatcccgagaaatttaatagccgcatgaagaacaaactgtggtatttcgagttcgctactagtgagagcatcttttctacttgcaagaaactggaagaatccctgaccgtggagatctgcgggaaacctttggatctgtctaacctcagccttgagggaattgctgtgctgaacattcctagtatgcacgggggtagtaatctgtggggagatactagaagaccccatggagacatctacggaataaaccaggccttaggggcgaccgccaaggtcatcactgatcctgacatccttaagacatgcgtgcctgacctctcagataagcgcctcgaagtcgtggggcttgagggagctattgaaatgggccagatatatacaaaattgaaaaatgctggacggagactcgccaagtgtagcgaaatcacctttcacaccacaaagaccctacccatgcagattgatggcgagccgtggatgcagacaccgtgtacaatcaagataacccataagaaccagatgcctatgttaatggggccgcctcccagaagcaccaacttttttgggtttctttcgtag

SEQ ID NO: 114481 - DNA, 744 bp, synthetic construct
  misc_feature 1..744: note = Description of Artificial Sequence: Synthetic coding sequence
  source 1..744: mol_type = other DNA
atggctaaggaacgggggctgatctctccctccgatttcgcccagctgcagaagtatatggagtactctactaaaaaggtatcagatgttctgaaattgtttgaagatggagagatggcaaagtacgtgcaaggcgacgccatcggctacgaaggatttcagcagttccttaagatctacctagaggtggataatgtaccaaggcatttatcattggctctgttccagtccttcgaaaccggacactgcttgaatgagaccaatgtaaccaaagatgtggtgtgtcttaatgatgtgtcttgctactttagtctcttagaaggcggcagaccagaagataagcttgagttcacatttaagctgtacgacaccgaccgaaatggaatccttgactcttccgaagtcgacaagatcatcctgcagatgatgcgtgttgcagaataccttgactgggatgtctctgagctgcgaccaattcttcaagaaatgatgaaagagatcgactacgacggctccgggagcgtgagccaggcggaatgggtccgagccggggccactaccgtgcccctcctggtcctcctgggtcttgaaatgacactgaaggatgacgggcaacatatgtggcgtcccaagagattcccgagaccagtgtattgtaacctgtgcgagtcgagtatcggcctgggcaaacaaggtctgtcatgtaaccgtcctatcacatgcgtgggcgcaagacggctgtag

SEQ ID NO: 114482 - DNA, 351 bp, synthetic construct
  misc_feature 1..351: note = Description of Artificial Sequence: Synthetic coding sequence
  source 1..351: mol_type = other DNA
atggctaaagagcggggcctgatttctccctctgattttgcacaactgcagaagtatatggagtattccacaaaaaaagtgtccgatgttctgaagctgttcgaggatggcgaaatggcaaagtacgtgcagggagacgctatcggttacgagggttttcagcagtttctcaagatttacctggaagtggacaatgtcccccgccatttaagcctcgcgctgttccagtcgtttgagaccggtcactgtctaaacgagactaacgtcactaaggacgtcgtctgtctaaacgatgtctcctgttatttcagtctgttggaaggcggtcggccggaggataagctcgagtag

SEQ ID NO: 114483 - DNA, 177 bp, synthetic construct
  misc_feature 1..177: note = Description of Artificial Sequence: Synthetic coding sequence
  source 1..177: mol_type = other DNA
atggctaaggagcgtgggttaatcagcccatctgacttcgcccaactccagaaatacatggaatacagcacaaaaaaggtgtccgacgtactcaagttattcgaagatggggaaatggccaagtacgttcagggtgatgccataggctatgaaggcttccagcagtttctaaaatag

SEQ ID NO: 114484 - DNA, 66 bp, synthetic construct
  misc_feature 1..66: note = Description of Artificial Sequence: Synthetic coding sequence
  source 1..66: mol_type = other DNA
atggctaaggagagggggcttatttctcctagtgattttgcccaactacagaagtacatggagtag

SEQ ID NO: 114485 - DNA, 444 bp, synthetic construct
  misc_feature 1..444: note = Description of Artificial Sequence: Synthetic coding sequence
  source 1..444: mol_type = other DNA
atggctaaagagagaggcctgatttcccctagcgatttcgcccaacttcagaagtatatggaatattctaccaaaaaagtgagcgacgtactcaaattgtttgaggatggagagatggcaaaatacgttcagggggacgctattggctatgagggattccagcagtttctcaagatttacctcgaggtagataacgtgcctcggcacctttccctggctctgttccagagttttgagacgggacattgtcttaatgaaaccaacgtcaccaaggatgtggtctgtttgaacgatgtctcttgttacttctctctcctcgaaggcgggcgacctgaggataagttggaatttactttcaaactctatgacacggaccggaatggaatcctggattcttcagaggtcgataagattatcctgcagatgatgcgggtggctgagtag

SEQ ID NO: 114486 - DNA, 2208 bp, synthetic construct
  misc_feature 1..2208: note = Description of Artificial Sequence: Synthetic coding sequence
  source 1..2208: mol_type = other DNA
atggcgaaggaacgtggccttatctcaccctctgatttcgctcagctgcagaaatatatggaatatagcaccaaaaaagtttccgacgtgttgaagttgttcgaggacggggagatggctaaatatgttcagggcgacgctattggatatgagggttttcaacagtttcttaagatctacctcgaagtcgacaatgtaccccgccacttatccctggctttgttccagagtttcgagacagggcattgtctgaacgagaccaatgttaccaaggacgtggtgtgcctcaacgatgtgagctgttatttctccctgctcgaagggggcagacccgaggataaactggaattcacattcaagctatacgatacagatagaaacggtatcttagattccagcgaggttgacaagatcatcctgcagatgatgcgcgtagcagagtatctggattgggatgtgtcagagctacgccccattctacaggaaatgatgaaggaaatcgattacgatggctcagggtctgtcagccaggctgagtgggtgcgcgccggtgcaaccaccgtgcctttactggtactgctgggactggaaatgaccctcaaggatgacggccaacatatgtggcgacccaagcgattcccaaggccggtgtactgtaacctttgcgaatctagcatcggtcttggtaaacaaggcctctcctgtaatctgtgcaaatatacggtacatgatcagtgcgcaatgaaagccctgccatgtgaggttagcacttatgctaagagtaggaaggacattggggtgcagtcccacgtgtgggttagaggcggctgcgagtccggccgatgtgatagatgccagaagaagatccgcatttatcacagtctgaccggcctccattgtgtctggtgccacctggaaatccatgacgattgcctgcaagctgtgggacacgagtgcgattgcggtttgctgagggatcatatacttccaccctcctcgatttacccatcagtcctggcctccgggccagaccgtaagaatagcaagacatcgcagaagaccatggatgatttgaacctttctactagtgaggccctacgaatcgatcctgtacccaatacccacccacttctggtcttcgtgaaccctaagtcaggcggtaaacaggggcagagggttctgtggaagtttcagtatatcttgaaccctcggcaggtcttcaatcttttaaaagacggcccggagattgggctgagattatttaaggatgtgccggacagccgcattctggtttgcgggggagacggaacagtagggtggatcctggagacaattgataaagcaaatctacctgtgctgccccccgtcgctgtactgccgctggggaccggaaatgacctcgccaggtgtctgagatggggcgggggatacgaagggcagaatctggccaagatcctcaaggatttggaaatgtctaaggtggtccatatggataggtggtccgtcgaagtaatccctcagcagaccgaggagaagagtgaccctgttcccttccagatcatcaacaattacttttcaattggtgtcgacgcatctatcgcccacagattccacataatgagagagaagtaccccgaaaagtttaacagccgcatgaaaaataagttgtggtactttgagttcgctacgtctgagtcaatcttctcaacgtgcaagaaactggaggagagcctgaccgtagagatctgtgggaaacctcttgatctatccaatttgagcctggaaggcatcgctgtgcttaatatcccgagcatgcatggggggtctaatctgtggggggacactaggcggccacacggggacatctatggcattaaccaggccttgggcgctacggctaaggttattacagacccagacatcctgaagacttgcgttcctgatctctccgataagcgccttgaggtggtcggcctagagggagccattgaaatgggtcagatttacacgaagcttaaaaatgcgggtcggcgcctcgccaagtgttccgagattaccttccacacaaccaaaaccctgcccatgcagattgacggggaaccctggatgcagaccccgtgtaccatcaagataacacacaaaaatcagatgcctatgctaatggggccaccgcctagatccactaatttttttgggttcctgtcctag

SEQ ID NO: 114487 - DNA, 402 bp, synthetic construct
  misc_feature 1..402: note = Description of Artificial Sequence: Synthetic coding sequence
  source 1..402: mol_type = other DNA
atggcaaaggagagaggcttaattagtccctctgactttgctcagttgcaaaagtacatggaatactccacaaaaaaggtctccgatgtcctgaaactgttcgaggacggcgagatggctaagtacgtgcagggagatgctatagggtacgagggttttcaacagttcttgaagatctatctagaagttgataatgtcccccggcacttaagtttggctctattccagtcttttgaaactgggcattgtttaaatgaaaccaacgtgaccaaagatgtggtctgcttaaatgatgtcagctgttatttcagtttactggaaggcggtaggccggaggataaacttgagttcactttcaagctgtatgatacagaccggaacggtattcttgactcgagctag

SEQ ID NO: 114488 - DNA, 324 bp, synthetic construct
  misc_feature 1..324: note = Description of Artificial Sequence: Synthetic coding sequence
  source 1..324: mol_type = other DNA
atggccaaagagaggggtctgatatccccaagtgatttcgcccaactgcagaaatatatggagtactccactaaaaaggtgtccgacgtcctcaagctgtttgaagatggagagatggcgaagtatgtccaaggcgacgctatcggatacgaaggatttcagcagttccttaagatttatttagaagtagacaacgtccccagacacttatccctggcactgttccaatcattcgaaaccggccactgtcttaatgaaactaatgtaacgaaggatgttgtttgcctgaacgatgtgagctgttacttttctctgctcgaatag

SEQ ID NO: 114489 - DNA, 135 bp, synthetic construct
  misc_feature 1..135: note = Description of Artificial Sequence: Synthetic coding sequence
  source 1..135: mol_type = other DNA
atggcgaaggagcgtggattaatctcaccttccgattttgcccagctccaaaagtacatggaatactctacaaaaaaggtgtctgacgttctaaagctctttgaagatggggagatggcgaaatatgtacagtag

SEQ ID NO: 114490 - DNA, 135 bp, synthetic construct
  misc_feature 1..135: note = Description of Artificial Sequence: Synthetic coding sequence
  source 1..135: mol_type = other DNA
atggcaaaggaacgcggcctgatttcacccagcgactttgcccagctccagaagtatatggaatacagcacaaaaaaggtgtccgacgtgctaaagttgtttgaagatggcgagatggctaagtacgtgcagtag

SEQ ID NO: 114491 - DNA, 402 bp, synthetic construct
  misc_feature 1..402: note = Description of Artificial Sequence: Synthetic coding sequence
  source 1..402: mol_type = other DNA
atggccaaggagcggggcctcattagtcccagtgattttgcccaactccagaaatatatggaatacagcacaaagaaagtgagcgatgtgctcaagctattcgaagatggggagatggccaaatacgtgcagggagacgctatcggatacgaaggcttccaacaattcctgaagatatacctggaggttgacaatgtgccaagacacctgtcgcttgccttgtttcaatcttttgaaactggacactgtctgaacgaaactaacgtcacaaaggacgtagtgtgcctaaacgacgtatcttgctatttctcgctcctcgaaggcggcaggcccgaggacaagctggagtttacgtttaaactgtacgataccgatagaaacggtattcttgacagcagctag

SEQ ID NO: 114492 - DNA, 135 bp, synthetic construct
  misc_feature 1..135: note = Description of Artificial Sequence: Synthetic coding sequence
  source 1..135: mol_type = other DNA
atggcgaaagaaagggggcttatctctcccagtgatttcgcgcagcttcagaagtacatggaatatagcaccaagaaggtgtccgatgtccttaaactttttgaggatggcgagatggccaaatacgtgcagtag

SEQ ID NO: 114493 - DNA, 2415 bp, synthetic construct
  misc_feature 1..2415: note = Description of Artificial Sequence: Synthetic coding sequence
  source 1..2415: mol_type = other DNA
atgactaaccaggagaaatgggcccatttatccccttccgagttttcacagctacaaaaatatgcagagtacagcacgaagaaactgaaggacgttttagaggagttccatggcaacggggtgctagccaagtacaacccagagggcaagctggtcgtgctggggaacacaatagacttcgaggggtttaaactatttatgaaaacttttctggaggcagagttaccggatgactttacggcacacctgtttatgtcattctcaaataagttccctcactcctctcctatggttaaaagtaagcctgccctcctctctggaggtctacgtatgaacaagggcgccatcactccaccccggactacaagtcccgctaatacgtgtagccccgaggtgattcatcttaaggacatagtatgttacctctcactcctagaacgcgggcgtccagaggataagctagaattcatgttcaggctttatgatactgatggcaatggtttcctcgacagcagtgagctcgaaaatattatttctcaaatgatgcacgtcgccgaatatctcgaatgggacgtgacagagctgaatcccattctgcatgaaatgatggaggagatcgactacgaccatgacggaaccgtctccctcgaggagtggatacagggtggaatgaccactataccactgctagtcctcttaggcctcgagaataacgtcaaggacgacggacagcatgtgtggaggttgaaacatttcaacaaacccgcttattgtaacctgtgcctgaatatgctcattggcgtcgggaagcagggcctctgttgtagtttctgcaaatacacagtgcacgagcgttgcgtcgcacgagcccccccaagctgcatcaaaacttacgtcaaatcaaaacgcaacaccgacgtgatgcatcattactgggtcgaaggaaattgtcctaccaagtgtgacaagtgccacaaaaccgtgaagtgctaccagggtctaaccggactgcattgcgtatggtgtcaaataaccctgcataacaaatgcgcctcgcatttaaagcccgagtgtgactgtgggcccctgaaagatcatatactcccaccgaccaccatatgcccagtggtgcttcaaaccttaccaaccagcggcgttagtgtgccagaggagagacagtcaacggttaagaaagaaaagagcggttcccagcagcctaacaaggtaattgacaagaataagatgcagagagccaacagtgtgaccgtggatggacaaggattacaggtaacaccagtgcctggaacccaccccctcctggttttcgtgaaccctaagtccggaggcaagcagggagagcgtatctatagaaagtttcaatatctgttgaaccccaggcaggtctactctctgagcggcaacggaccaatgcccggcttgaacttctttcgggacgtgccggactttcgtgtgcttgcctgtgggggcgatggaacagttggctgggtcctggattgcatcgaaaaggctaacgtggggaagcatcctcctgtggctatactgccactcgggacaggtaatgacctggcccgatgtctgcgatggggcggtggctacgaaggcgagaacctgatgaaaatcctgaaagatatagagaacagcactgagattatgcttgatcggtggaaatttgaggttatacctaatgacaaagacgaaaagggtgacccggttccttactctatcattaacaactatttcagcataggagtggatgcttctatcgcacataggtttcatattatgagagaaaagcatccagagaagtttaactcccgcatgaagaataagttttggtatttcgagtttgggacctccgaaacattttctgccacttgcaaaaagctccacgagtcggtggagatcgagtgcgatggcgtccagatcgatctgatcaatatcagtctggagggcattgcgattctcaatatcccaagtatgcatggcggctcaaacctgtggggagagtctaaaaagaggcggtcacaccgaaggatagaaaagaaggggtcagacaagcgaacaacggtgactgatgcgaaggaactcaagttcgcctcccaagacttgtcagatcagttgttagaagtggtgggattagaaggtgcgatggaaatgggccagatctacaccgggctgaaatctgccggacggaggcttgcccaatgctcatgtgtcgttattcggacatccaaaagtctccccatgcagatagacggagagccatggatgcagaccccatgtactatcaaaattactcacaagaaccaggctccaatgctgatgggtccacctcccaagaccggacttttctgttccctggttaaacgcacccgtaacaggtctaaagagtag

SEQ ID NO: 114494 - DNA, 2415 bp, synthetic construct
  misc_feature 1..2415: note = Description of Artificial Sequence: Synthetic coding sequence
  source 1..2415: mol_type = other DNA
atgacaaaccaggagaaatgggctcacctgagcccgagtgaattcagtcaacttcagaaatacgcagaatactccactaaaaagctgaaagatgtgctggaggaattccacggtaacggtgttcttgctaaatataaccccgagggcaaacaggacatcctgaatcagacgatagactttgagggttttaagctctttatgaagacctttctcgaggctgaactcccagatgacttcaccgcccatttgtttatgtcgtttagcaacaagttcccccactcttcacctatggtgaagagtaaaccagcgctgctgtccgggggcctaaggatgaataaaggggccataacgccccccaggactactagccccgccaatacatgcagcccagaggttattcacctgaaggatatagtatgctatctctctttattagaaaggggccgtcctgaagataagctggaatttatgtttcggttatacgatactgacggaaatggtttcctggacagcagcgagctggaaaacattatttcacagatgatgcacgtggccgagtacctagaatgggacgtgaccgagctgaaccccatccttcacgagatgatggaggagatcgattacgatcacgatggtaccgtttcactggaggagtggatccagggaggtatgacaacaatccccctgctggtattgctcggcctggagaacaatgtcaaagacgatgggcagcacgtgtggagattgaaacacttcaacaagcctgcatattgcaacctgtgtctcaatatgctgatcggggtggggaaacagggactctgttgttcattctgtaaatataccgtgcatgagcgctgtgtcgccagggcccccccaagctgcataaagacttacgttaaatccaagaggaataccgatgtgatgcaccactactgggtagaaggcaactgccccacgaaatgcgataagtgccataagacagttaaatgttaccagggccttacagggctacattgtgtctggtgtcagattaccctccacaataagtgcgctagccaccttaaacccgagtgtgattgcgggcccctcaaggaccacatccttccacctacaacaatttgccctgtcgtgctccagacgctgcccacctcaggagtgagcgtgcccgaggaacgccagtctaccgtgaagaaagaaaaatccgggtcccagcagccaaacaaagtaattgataagaataaaatgcagagggcaaatagcgtgacagtggatgggcaggggctccaggttactcctgttccagggacccaccccctcctggtgttcgtgaatcctaaatcaggaggtaaacaaggagagcgcatttatcgcaagtttcaatacctcttgaaccctcgtcaggtctacagtttatcaggcaatgggccgatgcccggcttgaactttttccgggacgtgcctgacttccgtgtgctcgcatgtggaggggacggcacagtgggatgggtgctggattgcattgagaaggctaacgtgggcaagcaccctcctgtggcaatcctcccattgggtactggaaatgacctagcgaggtgtctgcggtggggcgggggctacgagggggagaacctgatgaaaatcctcaaagacatagagaacagtactgagatcatgttggatcgctggaagtttgaggtgatacctaacgataaggatgagaagggagatccagtaccctacagtattattaacaactacttttctatcggggtggacgcaagcattgcacatcgctttcatatcatgcgggaaaagcacccggaaaaattcaatagccggatgaagaacaagttctggtattttgaatttggaacatcagaaaccttttctgccacctgcaagaaactccacgagtctgtggagattgaatgtgatggggtgcaaatcgatctgattaacatttccctggagggtatcgctattctaaatattcctagtatgcacggcggttctaacctgtggggagaaagtaagaagagacgttcccatcgacggattgagaaaaaaggcagcgataaacggacgacagtgacggatgcaaaggagctgaagttcgcatctcaggatctttcagatcagctactagaggtcgttggactagagggtgcgatggaaatgggccagatctacactggtctcaagtccgcaggcaggagattagctcagtgttcttgcgtggttattcggacttcaaagtccctgcctatgcagatcgacggagaaccatggatgcagacaccctgcactattaaaattactcacaagaaccaagccccgatgctcatgggaccaccaccaaagactggactattctgcagcttagtcaagaggacccgcaatcgctccaaggagtag

SEQ ID NO: 114495 - DNA, 2412 bp, synthetic construct
  misc_feature 1..2412: note = Description of Artificial Sequence: Synthetic coding sequence
  source 1..2412: mol_type = other DNA
atgaccaatcaggagaaatgggctcacctctcgccttccgagttcagtcagctccaaaagtatgctgaatattctactaagaagctcaaggatgtcctcgaggagttccacggaaacggagtgctggctaaatacaatccagaggggaagcaggacatcttgaaccagacaattgattttgaggggtttaagctgtttatgaagaccttccttgaagctgaacttcctgatgatttcacggcacatttattcatgtctttttccaataaattccctcatagctctcccatggttaagtctaagccagcacttcttagcggaggcctccgaatgaacaaaggcgcgatcacaccacccaggactactagccccgctaacacctgcagcccggaggtcattcacctgaaagatattgtgtgctacctgtctcttctcgaacggggccgtccagaggataagttggagtttatgtttcgtctctacgacaccgatgggaacgggtttttggacagcagtgaacttgagaatatcatatcccagatgatgcacgtcgccgaataccttgagtgggacgttactgagctcaatcctatactgcacgagatgatggaggagattgattacgaccacgatggaaccgtgagtctggaggagtggatccagggaggcatgacaacaatccccttgctggtgctgctcggactggagaataacgtaaaagatgacggtcagcatgtctggagactgaagcactttaataaacccgcttactgtaatttatgtctcaacatgcttattggtgtcggcaaacagggcctgtgctgcagcttctgtaagtataccgtccacgagcgctgcgtggcccgcgcccctcccagctgcatcaaaacttatgtcaagagcaagcgtaatacggatgtaatgcaccattactgggtggaaggcaactgtccgacaaagtgtgacaaatgtcataaaactgtgaaatgctaccagggtctgactggcctccactgcgtgtggtgtcaaataactttacataataaatgtgcctcacatctaaagcccgaatgcgattgtggcccacttaaggaccatatcctcccccctaccaccatctgtcccgtagtcttgacgttacccacgtccggagttagtgtgcctgaggagaggcaatcgacggtgaagaaagagaaatccggcagccaacaaccgaataaggtcattgataaaaacaaaatgcagagagcgaattctgtgaccgtggatggccagggcctgcaggtgaccccagtgccagggacccatccacttctggtgttcgttaacccgaaatcaggcggcaaacagggggaacgcatctacagaaagttccaatacttactgaacccgcgacaggtgtattccctctctggtaacggtccgatgcctggcctgaatttttttcgtgacgttcccgacttccgggttctggcatgtggaggcgacggcacggtgggctgggtgctggattgcatcgagaaagctaatgtggggaagcacccgccagtcgctatcctcccattgggtaccggcaatgacctcgccagatgtctgcgctggggcgggggctatgaaggggaaaaccttatgaaaattctgaaggatattgaaaatagcactgaaattatgctcgatcggtggaaattcgaagtaatccccaatgataaagacgaaaagggcgacccagtgccttatagtatcatcaacaattatttcagtattggggtggatgccagtattgctcatcgattccacatcatgcgcgagaagcatcccgaaaagttcaacagcagaatgaaaaacaaattttggtacttcgagttcggaacatcagagactttttctgccacctgcaagaagctgcacgaaagcgtggagattgagtgtgacggggttcagatcgacctgatcaatatctcccttgaaggcattgcaattctcaatatcccgtcaatgcacggagggtcaaacctctggggcgagagcaaaaaaagaaggtcacatcgccggattgagaaaaaaggctcagataagagaacaacagtgacagacgcgaaagaactgaaatttgcttcccaggacctgagcgatcaactgctagaagtggtcggactggaaggcgctatggaaatggggcagatctacaccggtctgaagtccgccgggcggaggctggcacagtgttcctgcgtggtgattagaaccagtaagagcttgcccatgcagattgatggcgaaccttggatgcagaccccttgcacaattaagatcacgcataagaaccaggcacccatgcttatgggccctcctccaaaaacaggccttttttgctcgttagtcaaacgcactcgtaatcgcagcaaggagtag

SEQ ID NO: 114496 - DNA, 2415 bp, synthetic construct
  misc_feature 1..2415: note = Description of Artificial Sequence: Synthetic coding sequence
  source 1..2415: mol_type = other DNA
atgacgaaccaagaaaagtgggctcatctgtctccctcagaatttagccagctgcagaaatacgctgaatattccaccaagaaactgaaggatgtcctggaggagttccatggaaatggagttttagccaagtataatcctgaagggaagcaggatattctgaatcagacaattgactttgagggattcaagttgtttatgaagacatttctggaggcagagttaccagacgattttactgcacacctgtttatgagtttcagcaataagttcccccactccagccccatggtgaagtcaaagcccgcactgctgagtgggggcttaaggatgaataagggcgccataacacctcctcgtaccactagcccggcaaatacatgctcacccgaagtgatacaccttaaagacattgtctgttacttgagtctgctcgagaggggcagacctgaagataaacttgagtttatgtttagactttatgataccgatgggaacggattcctggactcttctgaattggagaatatcatttctcaaatgatgcatgttgccgagtacctggagtgggatgtgaccgagcttaacccaatcctccacgaaatgatggaagagatagactacgaccacgacgggactgtgagtctggaggagtggatccagggcggaatgacaacaattcccctactggttctcctgggcttggagaacaatgtgaaagacgatggtcagcacgtgtggcgactgaagcatttcaacaaaccagcatactgcaacctgtgcctgaacatgctaatcggggtgggtaaacagggtctctgttgctcattctgtaagtacactgtgcatgaaagatgtgtggcgagggcacccccgagctgtataaaaacctatgtaaagagcaaaagaaatacagacgtgatgcaccattattgggtggaggggaattgtcccactaagtgtgacaagtgccataagacagtgaaatgttaccagggcctcacggggctccattgtgtatggtgtcagattacactgcacaacaaatgcgcttctcacctgaaacccgagtgtgattgcggacctctcaaagatcatatccttcctcctaccaccatctgccccgtggtgctgcagactctgccgacatcgggcgtaagtgtgccggaagaaagacagtccaccgtgaaaaaagaaaagagcgggtcccagcaacccaacaaagtcatcgataagaacaaaatgcagagggcaaactctgtgactgttgacggtcaaggcctacaggtgaccccagtacccggcacgcacccattactcgttttcgttaatccaaagtcgggcgggaagcagggggagaggatttataggaaatttcaatacttgctcaatcctaggcaggtctactctctgtcaggtaatggccccatgcctggcctcaattttttccgagatgtgccagatttccgggttcttgcatgcggaggagacggtacggttggttgggtcctcgactgcattgagaaagccaacgtggggaaacacccaccggtcgccattctccctttaggaactggcaacgacctggcacgttgcttgcggtgggggggtggttatgagggagaaaacctcatgaagatactgaaggatattgagaattcaacagagattatgctggacaggtggaaattcgaggtgatccccaacgacaaggatgaaaaaggagacccagtgccttacagcatcatcaataactacttctctatcggggtggatgccagcattgctcatcgcttccacattatgcgagaaaagcatcccgagaaatttaacagtcgcatgaagaacaagttctggtattttgagtttggcacatctgagacattctccgctacatgcaaaaagttgcacgagtcggtggagatagagtgcgacggggtacagatcgacttgatcaatatttccctggagggaattgctattctgaatatcccgagtatgcacggaggctccaacctctggggagagtccaagaaacgccggagtcaccgtaggatcgagaagaagggatccgataagaggacgacagtcacagacgccaaagaactcaagtttgccagccaggacctgtcagatcagttactggaggttgtcggtctggaaggggccatggagatgggccagatatacacaggactcaaaagtgccgggagaagactggcccagtgctcctgtgtggtgattaggacttccaaatcactccccatgcagatagacggggagccatggatgcagaccccatgtacaattaagattacccacaagaatcaggcccctatgttaatggggccacctcccaaaaccggcctgttttgcagcctggtcaaaaggactcgcaaccggtcgaaggaatag

SEQ ID NO: 114497 - DNA, 2322 bp, synthetic construct
  misc_feature 1..2322: note = Description of Artificial Sequence: Synthetic coding sequence
  source 1..2322: mol_type = other DNA
atgacaaaccaggaaaagtgggcgcatttgtcaccaagcgaattcagtcaactgcagaagtacgctgaatacagtacgaaaaagctgaaagatgtgctggaagaattccatggaaacggggtgctggctaagtacaaccctgaaggtaaacaggacattctgaaccagacgatagacttcgaaggatttaagctgttcatgaagacctttctggaggccgaactgcccgacgacttcaccgcgcatctgttcatgagcttttcaaacaaattccctcactcatctcctatggtgaaaagcaagcctgctctcctgtcaggaggtctgcgtatgaacaagggcgctatcaccccccctagaaccacatctccggcaaatacctgtagtcctgaggtgattcatctcaaggacatcgtctgttatttaagtctgctcgaaaggggtaggcccgaggacaagctggagttcatgttccgcctttacgacactgacggcaatggctttctggattcatctgagctggaaaatattatatctcagatgatgcacgttgccgaatatcttgaatgggacgtcaccgagctcaacccaattctccatgaaatgatggaagaaatcgactatgaccacgacggaacagtgagcttggaggaatggatacagggaggcatgacaactatcccgttgcttgtcctgcttggcctcgaaaataatgttaaggatgacgggcagcatgtttggcgacttaagcactttaataaaccagcttattgcaatctgtgtctcaacatgcttatcggcgtgggcaaacaggggctctgttgcagcttctgtaagtatacagttcacgaacggtgtgtggcccgtgcccccccttcctgtataaagacctatgtgaaaagcaagaggaacacggatgtgatgcatcactattgggtcgagggcaactgtcctaccaagtgtgacaagtgccacaagaccgtgaaatgttatcaggggctgactggactgcactgcgtgtggtgccagatcaccctgcacaacaagtgcgcttcccatcttaaaccagagtgtgattgtggtccacttaaggaccacattcttcctcccactacgatttgtccagtggttctccaaacccttccaacctctggggtgtccgtgcccgaggagcggcaatccacagttaagaaagaaaaatctggcagtcaacagccaaataaggtgatcgacaagaataagatgcaaagagccaattccgttacagtagacggccagggactgcaggtgacgcctgttcccggcactcatccactactggtgttcgttaacccaaaatctggggggaaacagggagaacgaatttataggaaattccagtacttactcaaccctcgccaggtttattcattgagtggtaatggcccaatgcctggtctaaacttcttcagggatgtccctgacttcagagtactggcctgcgggggcgatggtacggtgggctgggttctagattgcatcgagaaggccaacgtggggaaacatcctcccgtggcgatcctccccttagggaccggcaacgacctggctagatgcttgcggtgggggggaggttacgaaggcgaaaatctgatgaagatcctgaaggacatcgaaaatagcacagagatcatgttagacaggtggaagttcgaggtaatcccaaatgataaagacgagaaaggggaccccgtcccatactctattataaacaattatttttccatcggagttgatgcctctatcgctcatcgcttccacatcatgagagagaagcatcctgagaagttcaatagtcgcatgaaaaataaattctggtacttcgagttcggtacatcagagaccttctcagcaacctgcaaaaagctgcacgagtctgtggaaatcgagtgtgacggcgttcagattgatttaatcaatatctcactcgaaggcatcgccattctcaatattcccagcatgcacggcggctcgaacctctggggtgagtcaaaaaaacgaagaagtcacaggcggatcgagaaaaagggatcagacaaacggacgactgtcacggatgctaaagagcttaaattcgcaagccaggatttatcggatcagctcttagaagtcgtgggcctcgaaggggccatggagatgggccagatatacactggactgaaaagcgccgggcggcgtctggcacagtgttcgtgtgttgttatccgcactagtaaaagcctgccgatgcagattgatggggagccgtggatgcagactccgtgcacagtctccaccgagtag

SEQ ID NO: 114498 - DNA, 2391 bp, synthetic construct
  misc_feature 1..2391: note = Description of Artificial Sequence: Synthetic coding sequence
  source 1..2391: mol_type = other DNA
atgacgaaccaggaaaaatgggcgcatctgtcaccatccgaattctcccagcttcagaaatatgccgagtattctactaaaaagctcaaggacgtgcttgaggagttccatggtaatggcgttctcgctaagtataaccccgagggcaccatcgactttgaaggatttaagctgttcatgaagacattcctagaggccgagctgccggatgactttacggcccatctgttcatgtcattctctaacaagtttccccactcttctcccatggtgaaatcaaagcccgccctgctctcaggggggctccgcatgaacaagggcgccattactcccccacggactacaagtccagctaatacttgttccccggaggtgatccacctgaaagacatagtctgctatttgagcctccttgagcggggtagaccagaagacaaattggaattcatgtttaggttgtacgatacagatgggaatggcttcttagattcttccgagctcgagaatattattagccagatgatgcacgtagctgagtatctcgaatgggacgttaccgagcttaacccaatcctgcatgaaatgatggaggaaattgattacgaccatgatggaaccgtatcactggaggagtggatccagggtggaatgacaactatccccctccttgtgctgctgggtctagagaacaacgtcaaggacgacggccaacacgtgtggcgcctgaaacactttaataaacccgcatattgcaacttgtgtcttaacatgctgattggagttggcaaacagggtctgtgctgtagcttctgtaagtacacagttcacgaacgatgtgttgcccgcgccccccctagctgtataaagacttatgtcaagagcaagaggaataccgacgtgatgcatcactattgggtggaggggaactgccccaccaaatgcgataaatgccacaagaccgtcaagtgctaccaggggttaactggcctgcactgtgtatggtgtcagattacccttcacaacaagtgcgccagccacctgaagcctgaatgcgactgcggccctctgaaagatcacatcttaccacctaccaccatatgccctgtggtccttacactccctacctccggcgttagtgtgccagaggagaggcagtcaacagtgaaaaaggagaagtcagggtctcagcaacccaacaaggttattgacaaaaataagatgcagagagcgaatagcgttacagtcgatggacaggggctccaagtcacccctgtgcccgggacccatccactgttggtgttcgtcaatcctaagtccggaggcaaacagggggagagaatctacagaaaattccagtacctccttaacccccggcaagtgtactccctgtctggtaatggcccaatgcctgggctgaacttttttagagatgtgccggactttagggtgttggcctgtgggggagatgggacagtcgggtgggttctcgattgtatagagaaggcgaatgttggaaaacaccctcccgtcgctatacttcctctagggactggtaatgatctggcccggtgcctcagatggggggggggatacgagggcgaaaatcttatgaagatcctgaaggacatcgaaaattcaaccgagatcatgttagatcgatggaagtttgaggtaatcccgaacgataaggatgaaaagggtgaccccgtgccttactctataattaacaattacttcagcatcggagtcgatgcaagcatcgcccatcgttttcatattatgcgagagaaacatcctgagaaattcaattctcgcatgaagaataaattttggtacttcgagttcggcacttccgagactttttccgctacttgtaagaaactgcatgaatccgtcgaaatcgaatgcgacggcgtccaaattgacttgataaacatttcacttgaggggatagccattctgaacataccctcgatgcacgggggatccaatctgtggggtgagtctaagaaaaggaggagtcacagacggatcgaaaagaagggaagcgataagagaactacagtgactgacgccaaagagctaaaatttgcatcccaagatctctccgatcagctccttgaggttgtgggtctcgagggggccatggagatggggcagatctacaccggccttaagtcggccggcaggagattagcacagtgtagctgcgtagtcattaggacgtctaagtctctgccgatgcagattgacggagaaccctggatgcaaaccccatgtaccataaagattactcacaagaaccaagcccccatgctgatggggccaccaccaaaaacaggcctcttttgttctctggtgaaacgcacccggaatagatccaaggaatag

SEQ ID NO: 114499 - DNA, 228 bp, synthetic construct
  misc_feature 1..228: note = Description of Artificial Sequence: Synthetic coding sequence
  source 1..228: mol_type = other DNA
atgaccaatcaggagaagtgggcccatcttagtccgtcagagttttcccagctgcagaaatacgctgagtactcgactaaaaaactgaaagacgtgctggaggagttccatgggaacggggtgttggccaaatacaatccagagggcaagcaggatattctgaatcagactatcgatttcgagggctttaagctgtttatgaagacctttctggaagcagagttgtag

SEQ ID NO: 114500 - DNA, 2358 bp, synthetic construct
  misc_feature 1..2358: note = Description of Artificial Sequence: Synthetic coding sequence
  source 1..2358: mol_type = other DNA
atgacaaaccaagagaaatgggctcatctgtcaccgtctgaattcagtcaactgcaaaagtatgctgagtactcaacaaaaaaactgaaagatgtactggaggaattccacggcaatggagtgttggcaaagtacaatcctgaaggcacaatcgatttcgagggatttaagctgttcatgaagacctttctggaagcggagcttcccgatgacttcactgcccatctgtttatgtctttttccaacaaattcccgcacagcagtcccatggtgaaatccaagcccgctcttctgagtgggggactaaggatgaataaaggggcaatcacgccacctcgtaccacgtcgcccgccaacacctgttcccctgaagttattcacctgaaggacatagtgtgttacctatccctccttgagcggggccggcccgaggacaagctggaatttatgtttcggttgtacgacactgacggaaatggatttctggactcttcggaattagaaaacatcatatcccagatgatgcatgtagctgaatacctggaatgggacgtgactgaactgaaccctatcctgcacgaaatgatggaagagatcgactacgaccacgatggaaccgtgtctctggaggaatggattcagggcgggatgacgacaatcccgctcctcgtgctcctgggattggaaaacaacgtgaaggatgatggccagcatgtctggcgattaaaacatttcaataagcccgcgtactgtaatttgtgcctgaatatgctgattggcgtggggaagcaggggctttgttgtagcttttgcaagtatacagtccacgagcggtgcgtagccagagcccctccatcctgcatcaagacctacgtgaaatctaaacggaacaccgacgtaatgcaccactactgggttgagggaaattgccccactaaatgcgataagtgccacaaaactgttaagtgctaccaggggctgacaggacttcattgtgtgtggtgccagatcacactccataacaaatgtgccagtcacctgaagccggagtgtgattgcggccccctcaaagatcacattctgccccccactaccatatgtcccgtcgtgcttgagcgccaatcaaccgtgaagaaggaaaagtcgggatcccaacagcctaacaaggtcatagacaaaaacaagatgcagcgagcaaattccgttacggtggatggacaagggctgcaggttactcctgtgcccggaacgcatcctctgctggtcttcgtcaatcccaagtctgggggcaagcagggggaacgtatctataggaagtttcagtacctgctcaatcctcgccaggtctatagcctgtctggcaatggccccatgcctggcctgaacttctttagggacgtccctgacttccgcgtactggcatgcgggggcgatgggactgtcgggtgggtgctggattgtatagagaaagcaaacgtaggcaagcaccccccagtggcaatcctccccctgggaacaggcaatgacctggctcgatgcctgcggtggggaggggggtacgaaggagagaacctgatgaagattttaaaagacatcgaaaattccacggagatcatgctggacaggtggaaattcgaagtgatcccgaatgataaagacgagaaaggtgacccggtgccgtattctattataaataattacttctctattggcgttgacgcaagcatcgcccacaggttccacattatgagggagaaacaccctgagaagttcaatagcaggatgaaaaataagttctggtatttcgaatttgggacctccgagacgttcagcgctacatgcaagaagttacatgagtcggtggagattgaatgtgacggtgtccagatagacctgatcaatattagcctggagggcatcgccattctgaatatcccatccatgcacggcgggagtaatctctggggtgagagcaaaaaaagacggtcgcatcgacgtatcgagaagaagggcagcgacaagcgtactacggttactgatgcaaaggagctgaaatttgcgtcacaagatctttccgaccagcttctggaggtagtaggtctggagggggcaatggagatggggcaaatatacacagggctcaaatccgccgggaggcgactggcacaatgctcctgcgtggttattcgaacgagcaagtccctgccaatgcaaattgatggtgaaccctggatgcagactccttgcaccatcaaaattacccacaaaaaccaggcccccatgctgatggggcctcccccaaaaactgggctgttttgctcgctggtcaaacgtacaaggaaccggtcaaaggaatag

SEQ ID NO: 114501 - DNA, 3645 bp, synthetic construct
  misc_feature 1..3645: note = Description of Artificial Sequence: Synthetic coding sequence
  source 1..3645: mol_type = other DNA
atggccgcagctgccggcgccccacctcccggacccccccagccaccaccgcctccaccacctgaagagtcttcggattctgagccagaagcggagccagggagcccacaaaagcttatccggaaggtttccacctcaggacagatccgccaaaagacgataatcaaggagggtatgttgaccaagcaaaataattccttccagcgatctaaaagaagatatttcaagctgcgcggccgcactctctactacgcaaagacggcgaaatcgatcatatttgacgaggtagacctgacggacgcttccgtagcagaatcctctacgaagaatgtcaacaactctttcaccgtcatcacgccttgccggaaactgatactttgtgccgacaaccgcaaagaaatggaggactggatcgcagccctgaagacagtccaaaatcgcgaacatttcgagcctacccagtacagtatggaccattttagtggcatgcacaactggtatgcatgtagccacgctcggccaacatattgtaacgtgtgcagagaagctctgagcggagtgacaagccacgggctgagctgtgaggtttgcaaattcaaggcccacaagcgatgcgctgtgcgggcaaccaataactgcaagtggacaacactagcctctattggcaaggacattattgaggatgccgatggaatagccatgccacaccagtggctggaagggaatttgcctgtttccgccaaatgcactgtgtgcgataagacttgtgggagcgtgctaaggcttcaagattggcgatgtctttggtgcaaggccatggttcacacgagttgcaaagaaagtctgctaacaaaatgcccgctgggtttgtgtaaagtgagtgttatcccccctaccgcgctgaatagtatcgattccgatgggttttggaaggccagctgtcccccatcttgtaccagccctctgctggtctttgtcaactcgaaatctggcgacaaccaaggcgtgaaatttttacgccggttcaagcaactgttgaatccggctcaggtgttcgatctgatgaatggtgggccgcatctcggcctaaggctcttccagaagtttgatacattcaggatactggtgtgtggcggtgatggtagtgtggggtgggtactgtccgaaattgattctttgaacctgcacaagcaatgccagctaggcgtgctgccgctcggaacggggaacgacctggctagagttcttggctggggaagtgcatgtgacgatgatacacaactgccccagatattagaaaagctggaacgagcctccaccaaaatgctcgaccggtggtcagtaatggcatacgaagctaaactgccacgacaggctagctcttccaccgtcaccgaagacttttccgaggacagcgaagttcagcagatcctgttctacgaagactcagtggcagcccatctcagcaagatcttgacttctgatcagcatagcgtggtgatttcctctgccaaggtgctgtgcgagacagtaaaggactttgtcgccagggtggggaaagcctatgagaagaccaccgaaagctctgaagagtccgaagtcatggccaaaaagtgtagtgtgcttaaggaaaagctggatagtctgttaaaaactctggacgacgagagccaggcttcatcaagcctccccaatccaccaccaacgattgctgaggaagccgaggatggagacggctctggttcgatttgtggttccacgggggatagacttgtggcctcagcgtgcccagctagaccccagatttttaggccacgggagcaattgatgctccgggcgaattctctgaagaaggccattagacaaattatagaacatactgaaaaggccgtcgatgaacagaacgcccaaacacaggagcaggagggcttcgtgctcggcttgtccgagtccgaggaaaagatggatcaccgcgtgtgccccccactatcacactcagagagctttggggtgcccaagggcagatcgcaaaggaaagtaagcaaatctccttgtgaaaagctcatttcaaaaggatcccttagcctcggcagctcagcttcattgcctccacagccaggctcccgggatgggcttcctgccctgaacacaaaaatcctgtaccctaatgtccgcgccggcatgtccgggtcgctgccaggagggtccgtcatatcacgcctcctgattaacgcagatcctttcaactctgaacccgaaaccctcgagtactacaccgagaaatgcgtgatgaacaactactttggcatcggcttagacgcaaagatatcccttgatttcaataataaaagggacgaacatccagaaaagtgtagaagcaggacaaaaaatatgatgtggtatggcgtgctgggcacaaaagaacttcttcaccgaacttacaagaacctagagcagaaagtgctgctggagtgtgatggtcggccaatccccctgccctccctccagggcatagctgtgcttaatatccctagctacgccggcggtaccaacttctggggtggtactaaagaggacgatacctttgccgccccaagtttcgatgacaagattctggaagtcgtggctgtatttggtagtatgcagatggcagtgagccgggtgatcagattacagcaccaccgtatagcccagtgtaggaccgtcaagatttctattctgggcgacgaaggggtacccgtgcaggtggatggagaggcatgggtgcagccaccagggtacatcagaatcgtgcacaagaacagggcacaaaccctcacacgcgatagagcttttgagagtaccctaaagtcatgggaagataagcagaagtgtgaacttcctaggcccccgtcatgcagcctgcacccagagatgctgtctgaagaggaagcaacccagatggaccagtttggacaggcggccggggtactgatccactccattcgcgaaattgctcagtcgcaccgagatatggagcaagaactggcccacgccgtcaatgcctctagcaagtccatggacagagtgtacggtaaacctcggacaacagaggggctaaactgctcgttcgtcctggagatggtgaataatttcagagctctccggagtgagacagaattgctcctgagcggtaagatggcactgcaactagacccaccccagaaagagcagctgggatcagccctggccgagatggaccgccaactgcgccgcctggctgatacaccctggctgtgtcagtccgccgaaccgggagacgaggagtcagtgatgttagatctggcgaagcgctcgcgcagcggcaagttcaggctagtaaccaaattcaaaaaagagaagaacaacaagaataaggaggcccacagtagtctcggggctcctgtacacctgtggggaaccgaagaggtggcggcctggctcgagcacttatccctgtgcgagtataaggatatttttacaagacacgacatcagggggagcgaactgctccacctggagcggagggacctcaaagacttaggtgtgacaaaggtaggacatatgaaaagaatactttgcgggattaaggaactgtcacggtctgccccagctgtcgaagcctag

SEQ ID NO: 114502 - DNA, 3513 bp, synthetic construct
  misc_feature 1..3513: note = Description of Artificial Sequence: Synthetic coding sequence
  source 1..3513: mol_type = other DNA
atgaacatgtttctttattttcagaccatcataaaggaagggatgctgaccaagcagaataatagttttcagaggtctaaacgacgctatttcaagctgcgtgggaggacattatactacgcaaagaccgctaaatccattatcttcgatgaagtcgatcttactgacgcaagcgtcgcggaatcaagcacaaagaatgtaaataattcctttactgttattactccgtgtaggaagctaattctctgtgctgacaacaggaaggagatggaggactggatcgcggcgctgaaaacagttcaaaatcgcgagcattttgagcctacacagtatagcatggatcatttttccggcatgcacaactggtacgcctgtagtcacgctcggcccacttactgtaatgtatgcagggaggctctgtcaggggtgacctcccatggcctgtcctgtgaggtctgtaaatttaaggcccacaagcgctgcgccgtgagagccaccaacaattgcaagtggactacgttggcgtcgatcggcaaggacattatagaggatgcggatggtattgcaatgccccaccagtggttggaagggaacttgcccgtgtcggcaaaatgcacggtctgtgataaaacttgtggatccgtgctgcggcttcaggactggcgctgcctatggtgcaaagccatggtgcacacttcctgcaaggaatcgctccttacgaagtgccctttaggcctgtgcaaagttagtgtaatcccccctacggccttgaactctatcgattccgacggcttctggaaggcaagctgtccgccaagttgtacttctcccctgttagtatttgtaaacagcaagtccggcgataatcagggagtaaagttcctccggcgtttcaagcagctgttgaaccctgcccaggtgtttgatttgatgaatggcggaccccatttaggcttaagactgttccagaagtttgataccttccgcattttggtttgtggaggggatggctcagtcggctgggtgctgtctgagatcgacagtctcaacttacataaacagtgtcagctgggcgtgctccctctcggaactggtaacgacctggctcgtgtcctggggtggggctccgcttgtgacgacgatacccagttgccccaaatccttgagaagcttgaacgggcctcaactaaaatgttggaccgttggagcgtcatggcatacgaagcaaagctgcctaggcaagccagtagtagcaccgtaactgaggacttcagcgaggattccgaggtccagcaaatcctgttttacgaagattccgtggccgcacacctgtctaaaatcttgacgtcagaccagcatagtgtggttatttcctctgctaaggtcctgtgtgagacagtgaaagatttcgtggctcgagttggaaaggcgtatgagaagactactgaatcatctgaggagagtgaagtgatggctaaaaagtgctcagtactgaaagagaaactggattctttattgaagacgttggatgacgagtctcaggcaagctcctccctcccgaatccgcctcctaccatcgctgaagaggcagaggatggggatggctcaggctccatctgtggatccaccggggatcgtttggttgcgtccgcttgtcctgcacgccctcagatattcaggcctagagaacagcttatgcttcgcgccaattctctaaagaaggctatacggcaaattattgagcacacagaaaaagccgtggacgaacagaatgcccagactcaagagcaggaaggcttcgtcctgggactgagcgagtccgaagaaaagatggatcacagagtgtgtcctcccctgagtcattctgaaagtttcggcgttcccaaaggcagaagtcaaagaaaggtgagcaagtccccctgtgaaaagctgattagcaagggatcattgtctctggggtcctccgccagcctgccgccccagcccggcagtagagacgggttacccgcactgaacacaaaaatcctctatcctaatgtcagggccgggatgagtggaagtttgccgggcggctccgttatcagcaggcttctgattaatgccgatccattcaacagcgagcccgaaactttagaatattacaccgagaagtgcgtcatgaataattatttcggcatcggactggatgcaaaaatctctttagatttcaacaacaaacgcgacgaacacccagaaaagtgtcgttctcggacaaaaaacatgatgtggtacggggtgcttggcacaaaggaacttctgcaccggacttacaaaaatctagagcagaaggtgttactcgagtgtgatggaaggcccataccacttcctagcctccagggtatcgcagttttgaatattcctagttacgctgggggcaccaacttctggggaggcacaaaggaggatgacaccttcgcagctccttccttcgacgacaagatcttggaagttgtcgccgttttcggctccatgcagatggcagtttcaagggtgatcaggctccagcaccaccgtatcgcacagtgccgtacggttaaaatttccattttaggtgacgagggagtgcctgtgcaggtggatggtgaggcgtgggtgcagcccccaggctacattcgcattgtgcacaagaatcgagctcaaactctcactagagaccgggccttcgaatccaccctgaagagttgggaggacaagcagaaatgcgagttgcctcgtcccccatcttgctccctgcaccctgaaatgctaagcgaggaggaggcgacacagatggaccagtttgggcaagctgcgggagtgttgatccactcaatcagagagatcgcccagtcccatcgcgacatggaacaagagctggctcacgcagtgaacgccagcagtaaatcaatggatcgagtgtacggtaaaccgagaactacagaaggcctgaattgcagtttcgtgttggaaatggtgaataactttcgagcgctgcggtccgagactgagctcctactgtctggaaaaatggcactgcaattggatccccctcagaaagaacagcttggctccgcactcgcagaaatggaccgccagcttcggcgcctcgcagacacaccatggctgtgccaaagcgcggagcccggggacgaagagagtgtcatgttggatcttgctaaaaggagccggagcggaaagttccgactagtgaccaagttcaagaaggagaaaaacaacaaaaacaaggaagcacactcaagcctaggcgcaccagtgcatctgtggggcacggaggaagtggcagcctggcttgaacatctgtccctgtgcgagtataaagatatcttcacgcggcacgatatacgaggtagcgaactgttacacctggagagaagggacctgaaagatctgggagtgacaaaagttgggcatatgaagagaatcctgtgcggtatcaaagagctgtcccggtcagcccctgctgtggaagcttag

SEQ ID NO: 114503 - DNA, 1704 bp, synthetic construct
  misc_feature 1..1704: note = Description of Artificial Sequence: Synthetic coding sequence
  source 1..1704: mol_type = other DNA
atggaggccgagagaaggcccgcccccggctcaccgagtgagggtctgttcgcggacggacatcttatcctctggacattatgctctgtactgctccccgtgttcatcaccttctggtgttcgctacagcgatcaaggcgccagctgcatcggcgcgacatttttcggaagtctaagcacggctggagagatacggacctgttttctcagcctacttattgttgcgtttgcgcccaacacatcttgcagggagccttctgcgattgctgcggactgagagtcgatgagggctgtctgagaaaggcagataaaagattccaatgcaaagaaattatgctgaagaatgatactaaagtgctggacgctatgccacatcactggatacgcggcaatgttcccctgtgctcttattgtatggtctgcaaacagcagtgtggatgtcaacctaaattatgcgattaccgatgcatctggtgccagaagactgtgcatgacgagtgtatgaaaaacagtctcaaaaacgaaaagtgcgactttggcgagtttaagaatctgattatccccccaagctatctgacttctatcaaccagatgcgcaaagacaagaaaacagactatgaagtgctagcctcgaagctaggcaagcagtggacccccctgattatattggctaactctaggagcgggacgaacatgggagaaggactgttaggtgaatttcgtatccttcttaatcccgtgcaggtcttcgacgtgaccaagacacctccaatcaaggccctgcagctctgtaccttgttaccatactactccgctcgcgtgctggtgtgcggaggagatgggaccgtgggttgggttctggatgccgtagacgacatgaagattaaaggccaagagaagtacattccacaagtcgccgttctgcctctgggtaccggcaacgacctgagtaacactttgggatggggcactggttacgccggcgagattccagtagcacaggtactcagaaatgtgatggaagccgacggtatcaagttggaccgctggaaggtgcaggttaccaataaagggtattacaatctgagaaaaccgaaagaattcaccatgaataactatttctccgtgggaccagacgcactcatggccctcaatttccatgctcaccgggagaaagccccctcccttttttcgagccggattctgaacaaggccgtttacctgttttatgggaccaaggactgcctggtgcaggagtgtaaagatctcaataagaaggtggagctcgagctcgacggagagcgagtggccttgccctccctggaggggatcatcgtgctaaacattggttactggggaggggggtgtcgattgtgggagggaatgggtgatgagacttatccattggcccggcacgacgacggactgttagaggttgtcggcgtctatggctcctttcactgtgcccaaattcaggtcaagctggcaaacccttttcggatcggtcaggctcacacagtcaggctgatccttaagtgttccatgatgccaatgcaggttgatggtgagccatgggctcaggggccatgcacagtgactataacccataaaactcacgcgatgatgttgtatttttccggggagcagaccgacgatgatatctccagtacaagtgatcaagaggacatcaaggctacagaatag

SEQ ID NO: 114504 - DNA, 2376 bp, synthetic construct
  misc_feature 1..2376: note = Description of Artificial Sequence: Synthetic coding sequence
  source 1..2376: mol_type = other DNA
atgggagaggagaggtgggtgtcactgactccagaggagttcgaccagctgcaaaagtatagtgaatattcttctaaaaaaatcaaggacgctcttacggagttcaacgaaggggggagcctaaaacagtatgatccccatgagccaattagctacgacgtttttaaactgttcatgcgcgcctacctggaggtcgatctgcctcagcccttgagcacccacctgttcttagctttctcacaaaaaccaaggcatgaaacaagcgatcaccctactgaaggtgcttcaaacagtgaggccaatagcgctgataccaatatccagaatgctgataatgcgaccaaggccgacgaggcctgcgcccccgatactgagtctaacatggctgagaaacaggccccggcagaggatcaggtagctgccacgccattggagcctcctgttcctcgttctagttccagtgaatcaccggtcgtatatctcaaggatgtggtctgctatctctcactcctcgagactggacggccccaagacaagctagaattcatgtttagactgtatgacagtgatgagaatggcctgttagaccaagctgagatggattgcattgtcaatcaaatgctgcacatagcacagtacctagagtgggacccgaccgagttgcggccgatcctgaaagagatgctccaaggaatggactatgatcgggacggctttgtaagtttgcaggagtgggtgcatgggggaatgacgactattccacttctggttctcttgggaatggatgacagcggttccaaaggcgatgggagacatgcttggacaatgaaacattttaaaaaacccacctattgcaatttctgtcacataatgcttatgggggttaggaaacaaggcctatgctgcacctattgtaaatacactgtgcacgaaagatgtgtgtcacggaacattccaggttgcgtgaaaacgtacagcaaagccaagaggtccggtgaagtgatgcagcacgcttgggtcgaaggaaactcaagcgtgaagtgcgataggtgtcataagagcataaagtgttatcagagtgtaactgcaaggcactgtgtctggtgtaggatgacattccaccgtaagtgcgaactaagcactctctgcgacggaggtgaactgcgagatcacattctgttgcctacctccatctgcccgattactcgcgaccggcctggggaaaaaagcgacgggtgcgtcagcgctaagggcgaattagtgatgcagtacaaaattattcctacacccggcacgcatccactgctcgtgctcgtgaaccctaaatcaggggggagacagggggagcggatcctgcgaaagtttcactacctgctcaatccaaagcaggttttcaacttagataacggtggacccacacccgggctgaatttcttccgtgacactcctgatttccgcgtccttgcttgcgggggggatgggaccgtggggtggatactcgactgcattgacaaagccaacttcgctaagcacccccccgtggccgttctgcctcttggaactggaaatgacctcgcacggtgtctgcgttggggcggcgggtacgagggcggaagcctaacgaagattctgaaggacatcgaacagagtccattagtaatgctagatcgctggcaccttgaggtgataccaagagaggaggtagagaatggtgatcaggtcccatattctatcatgaacaactatttctctattggagtggacgccagtatagcacacaggttccacgtcatgagagaaaaacatccagagaagtttaattctcggatgaaaaataagctgtggtactttgaatttggcaccagtgaaaccttcgcggccacctgtaaaaagcttcacgaccacattgagcttgaatgtgatggtgtcggagttgatcttagcaacattttcctggaagggatagcgatccttaatatcccttcaatgtacggaggtaccaatctctggggcgagaataagaaaaatagagctgtgattcgcgagtcccgcaagggcgtaactgaccccaaggaactcaagttttgtgttcaagacctttcggatcaactgcttgaggtggtggggctcgagggagccatggaaatgggacagatatacacaggactgaagagtgccggacggcgcttagctcaatgcgcctcagtcaccatcagaactaacaaattattacccatgcaggtggacggcgagccctggatgcagccctgctgcacaatcaaaattactcataagaaccaagctcccatgatgatgggtcctcctcaaaaatcctcattcttcagcctcaggagaaagtcgcggagtaaggactag

SEQ ID NO: 114505 - DNA, 2301 bp, synthetic construct
  misc_feature 1..2301: note = Description of Artificial Sequence: Synthetic coding sequence
  source 1..2301: mol_type = other DNA
atgggcgaggagcgttgggtcagcctgacccccgaggagttcgatcaactgcagaagtacagcgaatattcatccaaaaaaatcaaggacgctctgaccgagtttaacgagggagggtccctgaagcagtatgacccgcatgagcccataagctatgatgtatttaaactttttatgcgcgcatatctggaagtggacctccctcaaccactgagtacacatcttttcttagctttctcccagaagcctcggcacgaaacttcagatcatccaactgagggtgcatctaacagcgaagccaactccgcggatactaatatacaaaatgccgacaacgcaaccaaggctgacgaagcgtgtgcccctgacacagaaagtaacatggccgagaagcaggcccccgcggaagatcaagtggctgccactccattggaacctcccgtaccacgttctagttcttcagagagccctgtagtgtacctcaaggacgttgtgtgctatctctctctgttagaaacggggcgccctcaggataaactggaatttatgttcagactgtacgatagcgacgaaaatggcttgctggaccaagccgagatggattgcatcgttaatcagatgctgcacatcgcccaatacctggagtgggatccaaccgaacttcgacccattttgaaagagatgctgcaagggatggattacgatcgagatggctttgttagcctccaggaatgggtgcacggcgggatgaccactatcccattgctagtgctgctgggaatggacgatagcgggagcaagggcgatggaaggcacgcatggactatgaagcatttcaagaagcctacatattgtaacttttgtcacattatgctaatgggcgtccgaaagcagggactttgttgcacttattgcaagtacacagtccacgaaagatgtgttagccggaacatccccggatgcgtgaagacatacagtaaggcgaagcggagcggggaggttatgcaacacgcatgggtcgagggcaattctagtgtaaaatgcgacaggtgccataaatcaatcaaatgctatcagagcgtgaccgctaggcattgcgtgtggtgcaggatgacattccatcgaaaatgcgaactcagtactttgtgtgacggaggggaactcagggatcatatcctcctcccgacctcaatctgccccattacccgcgaccgcccaggggaaaagtcagacggatgcgtttccgctaagggcgagctggtaatgcaatacaagataatccctacccctggaacacatccattgttggtcttagttaatccaaagagcggtggtaggcagggcgaaaggctcaacttcttccgggacacccctgacttcagggtcttggcctgcggcggtgacggaaccgtgggatggattctagattgtatcgacaaggccaattttgctaaacaccctcccgtcgccgtgctccccctgggtaccggtaacgatctggccagatgcctgagatggggtggcggctacgagggggggtctttgactaagatattgaaggatattgagcagagtcccctggtgatgttagataggtggcacctggaagtcattccccgcgaggaagtcgaaaacggtgatcaggtgccttacagcataatgaacaactacttttcaataggggttgacgcatcgattgcccataggttccatgtcatgcgagagaagcatccagaaaagtttaactctagaatgaagaacaaactttggtatttcgagtttggcacctccgaaacctttgctgcaacctgtaagaaactgcacgaccacatcgagctggaatgcgacggcgtcggagtggatcttagcaatatatttctggaaggtatcgcaattctgaatatcccgagcatgtacggcggcaccaatctctggggggagaacaagaagaaccgggccgttatcagggagagccggaaaggtgtaactgatcccaaggagctgaaattctgtgtgcaggacttatcggatcagctgctcgaggtggtgggcctggagggagctatggagatgggccagatctacaccgggctgaaatccgcagggcgaagactggcccaatgtgcatcagtgacaatccgaaccaataaactgctgccaatgcaagtggatggagagccttggatgcagccctgttgtacaatcaaaataacccacaaaaaccaggcaccaatgatgatgggccctccgcagaagagctcttttttctccctgcggcgcaagtcccgatctaaagattag

SEQ ID NO: 114506 - DNA, 2259 bp, synthetic construct
  misc_feature 1..2259: note = Description of Artificial Sequence: Synthetic coding sequence
  source 1..2259: mol_type = other DNA
atgggagaagagagatgggtctcacttacccccgaagaatttgatcagctacagaagtactcagaatattcatcaaagaagatcaaagacgcattgactgagtttaacgaggggggcagcttaaaacagtatgacccgcatgagccaatatcctacgatgtcttcaaattatttatgcgcgcatacttagaagttgatctgcctcagccactgtccactcaccttttcctggccttcagccagaagccacgtcacgagacaagcgaccaccctacagagggcgcctcaaatagtgaagccaattccgctgacacaaatatacagaatgcagataacgccactaaggccgatgaggcctgtgcgcctgatactgagtcgaatatggcggagaaacaggcccccgccgaagaccaggttgccgcaactcccctggagcctcctgttccccggagctcatcttctgaatctcctgtcgtttatctcaaggacgtggtgtgctatctgtcgctgcttgagactggtaggccacaggataagctcgaatttatgtttcgactgtacgactctgatgagaacgggctgctggatcaggccgaaatggactgcatcgtgaaccagatgcttcacatcgcacagtatttagaatgggaccccaccgagcttcgccccatcctgaaggagatgctccagggcatggactatgaccgcgacggttttgtgagcttacaggaatgggttcatggggggatgacgactattcccctccttgttctgctggggatggatgatagcgggtctaaaggcgatggtagacatgcctggaccatgaagcacttcaagaaaccaacctattgtaatttttgtcacatcatgctaatgggcgtgaggaaacaagggttatgttgtacctactgcaaatatacggtgcatgaaagatgtgtgagtcggaacattccaggctgtgttaagacctactcgaaggcgaaaaggtctggagaatttcaccgcaaatgtgagctctctacactgtgcgacgggggcgagttgcgggaccacattctgctgccaacctctatttgtccgatcacccgcgatcggcccggcgagaaatctgatggctgtgtctctgctaagggagagctcgtgatgcaatacaagattatccctactccaggaacccatccccttcttgtgttggtcaaccccaaaagcgggggtagacagggagagaggatactgaggaagttccactacttattaaaccctaaacaggtctttaatctcgataacggcgggcccacacctggtctcaacttcttccgagacacgccagactttcgggtgttagcttgtggtggagacggaacagtcgggtggatcttagattgcatcgacaaagcgaacttcgccaagcatccccccgtggcagtgctgcccttaggaacaggtaacgatttggccaggtgtctgagatggggaggagggtacgagggaggtagcctgactaagattctgaaagatatcgagcaatcaccactggtcatgcttgatcgttggcacctcgaggtgatcccacgggaagaagtggagaatggggatcaggtaccctatagcattatgaataattactttagcattggtgtggatgcatctatagcacatcgcttccacgttatgcgcgagaagcacccagagaagtttaactctaggatgaaaaataaactctggtactttgaattcggaacatccgaaacattcgccgcaacatgtaaaaaactccatgaccacatagagctggaatgcgacggggtaggagttgacctctccaacatcttcctggagggtatcgcaattctcaacatacccagcatgtacggcggtactaatctttggggagagaataaaaaaaacagggccgtgatccgcgagagccggaaaggcgtaaccgaccccaaggagctgaaattctgcgtgcaggatcttagcgaccagttgcttgaggtggttggccttgaaggggccatggagatgggacagatttacaccgggctcaaatctgccgggcgaaggcttgcccagtgcgccagcgtcacaatcaggaccaacaagcttctgccaatgcaggtggacggcgaaccatggatgcagccatgctgcactataaagatcactcataagaaccaagcccccatgatgatgggtccccctcaaaaatcaagcttctttagtctgaggcggaaaagcagatccaaggattag

SEQ ID NO: 114507 - DNA, 1818 bp, synthetic construct
  misc_feature 1..1818: note = Description of Artificial Sequence: Synthetic coding sequence
  source 1..1818: mol_type = other DNA
agtttgaagatgggggaggagcggtgggtaagcctaactccagaggagtttgatcaactccaaaagtatagtgaatattcctcaaaaaaaatcaaggacgcccttacagaatttaacgagggaggctctctgaagcagtatgacccacatgaacctatttcctacgatgtctttaagctctttatgcgtgcatacttggaagtagacctgcctcagcctcttagcacgcatctgttcctggcctttagccaaaaaccccgccacgaaacctccgaccatccgacagaaggggcatctaacagcgaggccaactcagctgacacaaacatacaaaacgcggataacgcaacaaaggctgatgaagcatgtgccccggacacagagtctaatatggccgaaaagcaagcaccggcagaagatcaggttgcagctacgcccttagaaccacctgtgccgcggtcttccagcagcgagagcccagtagtgtatcttaaggacgtggtgtgttacctgtcacttttagagacggggcgaccccaggataaactggagtttatgttcagactgtacgatagtgacgagaacggactcttggatcaagcagaaatggattgtatagtaaatcaaatgctgcacatcgcgcaatatctggaatgggatccgaccgaacttagacctatccttaaggagatgcttcagggcatggattacgaccgtgacggctttgtgtcattacaggaatgggtgcatgggggcatgactactattcccttgctggtgctgctcggtatggatgacagcggttccaagggtgatgggcgtcacgcctggacgatgaaacattttaaaaaaccaacctactgcaatttctgccatatcatgctgatgggtgtgaggaaacaggggctgtgctgtacgtactgcaagtatactgtgcacgaaagatgcgtctccagaaatattcctggctgtgtgaaaacatactctaaggcaaagagatcaggggagttccatcggaaatgtgagctctccaccctttgcgatggcggtgagctgcgggatcacattcttctacctacatcaatttgtccaatcacccgggacaggccaggtgaaaaatccgacgggtgtgtgagcgcaaagggggaattagtgatgcaatacaaaatcattcccacccccggtacccacccattactagtgttagttaatccaaaatctggtggtaggcagggagagagaattctgcgaaagttccattacctcttaaaccctaaacaggtattcaacctcgataacggcgggcccactcctggattgaactttttcagggacactcctgattttcgggttctggcttgcggaggcgacgggaccgtcggctggattcttgactgcatcgacaaggctaactttgccaagcaccctccagttgcagtgctgccactggggaccggcaatgatctggccaggtgtctgcgttggggaggtggatatgaaggggggtcgcttaccaaaatcctgaaggatattgagcagtccccactcgtgatgctggacaggtggcatctcgaagttataccacgcgaagaggtggagaacggagaccaggttccttatagcatcatgaacaattacttctccattggcgttgatgccagcatagctcaccggttccacgtgatgcgtgagaagcatcccgaaaagtttaacagccgcatgaaaaataaactgtggtatttcgagttcggaacttctgaaacatttgccgcgacttgcaaaaaattacatgatcacatcgagctggagtggtgttag

SEQ ID NO: 114508 - DNA, 2199 bp, synthetic construct
  misc_feature 1..2199: note = Description of Artificial Sequence: Synthetic coding sequence
  source 1..2199: mol_type = other DNA
atgggcgaagaacgctgggtcagtttaactccggaggaattcgaccagcttcagaaatatagtgagtattcttcgaaaaagataaaagacgcgctcacggaattcaacgaaggcggttcactcaagcagtacgatcctcatgagcccatctcttacgacgtctttaaactgttcatgcgcgcctatcttgaagttgatctcccacagcctctgtctacacatctgtttttagctttttctcagaagcctaggcatgaaacatccgaccacccaactgaaggggcgtctaacagcgaagcaaacagcgccgatacaaatatacagaatgccgacaatgctaccaaggccgatgaggcgtgcgctcccgataccgagtcgaacatggccgagaaacaggccccggccgaggaccaagtggctgctacgccattggaacctccagtgcccaggtcctcgagcagcgaatcccccgttgtttatttgaaggacgtggtgtgctacctaagcctcctagagactggacgtcctcaggacaaattagagtttatgttccgcctctatgatagtgacgagaatgggctgctggatcaggcggaaatggactgtattgtgaaccaaatgttgcacatcgcacagtacctggaatgggacccaaccgagctgcggcccattctaaaggagatgctacaggggatggattacgatcgtgatggattcgtgtccctgcaagaatgggtgcatggtggaatgacaaccatccctttgttagtgctgttaggtatggacgactccggcagcaagggtgacggcaggcatgcatggactatgaaacactttaaaaagccaacttattgcaacttctgtcacataatgctgatgggcgttcgaaagcagggactgtgttgcacttattgcaagtacaccgtgcacgaaaggtgcgtgagtcggaacatcccaggctgcgtcaagacttattccaaagcaaagcggtctggcgaattccatcggaaatgtgaactctccactttatgcgacggcggagaactgagggaccacattcttctgccaactagcatttgcccaattacccgttacaagatcattcctactcctgggacccaccccctgttggtcctcgttaatcccaagagtggcggccgacagggtgaaagaatactgcggaagtttcactacctgctgaaccccaaacaggtttttaacttagacaatggaggcccaaccccaggattaaacttctttagagacactccagatttccgagtcctggcttgcgggggtgacgggaccgtggggtggattctggactgcatcgataaagcaaacttcgccaaacaccccccggtggcagtgcttcccttaggaactggtaatgacttagcccggtgcctgcgatggggtggcgggtacgaggggggatctctcacaaagatattgaaggatattgaacagtccccccttgtgatgctggacagatggcacctggaggtgatcccacgtgaagaggtcgaaaatggggaccaagtgccttacagcataatgaacaactatttcagcattggtgtggacgcgtccattgctcaccgatttcacgtcatgcgcgaaaagcatcctgaaaagttcaactctcggatgaagaacaagttgtggtattttgaattcggaacatctgagacttttgccgccacatgtaagaaacttcatgaccacatcgagttagaatgcgacggggtcggggtggacctgagcaatatttttctggagggaattgccatcctgaatatacctagcatgtatggcggaaccaatctgtggggggagaacaagaagaatcgcgcggtgatcagagaatctcgcaagggcgtgactgatccgaaggaactgaagttttgtgtgcaggatctgtctgaccagctactggaagtggtgggtctcgagggggcgatggaaatggggcagatttacaccgggttaaagtcagctggacgaaggttagcccaatgcgcctctgtaactatccgcacaaacaagcttttgccaatgcaggttgacggtgaaccctggatgcagccttgctgcacaatcaagatcacccacaagaaccaggcacccatgatgatggggccaccccagaaatcttcgttcttctcactgcgtagaaagtcaagaagtaaggattag

SEQ ID NO: 114509 - DNA, 3198 bp, synthetic construct
  misc_feature 1..3198: note = Description of Artificial Sequence: Synthetic coding sequence
  source 1..3198: mol_type = other DNA
atggatgccgcaggccgagggtgccaccttcttccactccccgccgctcgagggcctgcccgtgctcccgcagctgcagccgccgctgcggcgagcccacctggaccttgcagcggcgcagcatgtgcaccaagcgccgctgcgggggctggggccatgaatccatcttctagcgctggagaagagaaaggcgcaacaggggggtcgtcgtctagtgggtccggagccgggtcctgctgtctaggcgctgaaggtggcgccgatcctcggggagcggggtccgcagctgctgcaggggccgcagccttggatgaaccagctgctgctgggcagaaggagaaggatgaggccttggaagagaaactccggaatctgacctttcgaaagcaggtgtcatatcgcaaggctatcagccgcgccggattacagcacctagctcctgctcaccctctgtctttgcctgtagccaatgggcctgctaaggaacctcgcgctacactcgattggagcgaaaacgctgtaaatggagaacatctgtggcttgagacaaatgttagtggggacttatgctatctgggagaagagaattgccaggtccgcttcgcaaagtcagctctgcgcagaaagtgcgctgtctgtaaaattgtcgtgcataccgcctgcatcgaacagctcgaaaagatcaatttcaggtgtaagcctacatttcgtgagggggggagccgttcccctcgggagaatttcgtacggcaccactgggtccaccgcaggcggcaggagggtaaatgcaagcaatgtggtaaagggtttcagcagaaattctcctttcattccaaagaaatcgtggccatcagctgcagttggtgtaagcaggccttccataacaaggttacttgttttatgctgcaccacatcgaggaaccttgctccctaggtgcacacgccgccgtcatagttcctcccacctggatcataaaagttaagaagccccagaactctctcaaggccagcaatcgaaagaagaaaagaacttcattcaagcgaaaggcctctaaacggggcatggagcaggaaaacaagggccgacccttcgtgatcaagcccataagtagcccactcatgaagcctctactcgtgtttgtgaacccgaagtccggtggaaaccagggcacgaaggttctccagatgttcatgtggtacctgaatcctagacaggtctttgacctgtcccaggagggtcctaaggatgcactggagctttatcgaaaagtgcctaatctgcgcattctggcctgcggcggggacggtacagtgggatggatactcagcattttggacgaactgcagctgtcgccacagcctcccgtcggggtccttcccttgggaaccggcaatgatctggcccggaccctgaattggggaggggggtacaccgacgaaccggtgtccaagatcctttgtcaggtggaggatgggacagtggtccaattagatcgttggaacctgcacgtggaacgtaaccccgaccttcccccagaagagctcgaggacggcgtttgcaagctgcccctgaatgtcttcaataactatttctctttggggttcgatgctcatgtgacattagagtttcacgagagtcgcgaggccaatccagaaaaattcaattcacggtttcgcaataagatgttttacgcaggagctgccttcagtgacttcctacagagatctagccgcgacctatcgaagcatgtgaaggtggtttgcgacggcaccgatctcacaccaaagattcaggaacttaagtttcagtgtatcgtcttcttgaatatacccaggtactgtgcgggaacgatgccgtggggcaaccctggggatcaccacgattttgagcctcagcgtcatgatgacggctacatcgaggtcattggctttacaatggctagtctggcagccctgcaggtgggtggccacggcgaaaggcttcatcagtgccgggaggtgatgcttctgacatacaagtcaatcccaatgcaagttgacggggaaccctgtcgacttgctccggccatgattcggatttcgctcaggaatcaggccaatatggtgcagaaatctaagcggcggacctcgatgccgttgctcaacgaccctcagtctgtgcccgacagactgagaatacgcgtgaacaaaattagtctccaggattacgaaggattccactatgataaggagaagcttcgcgaggcaagtatttcggattggctcagaaccatcgccggggaattggtgcaatcctttggggctataccactcggcattctggtagtgagaggggattgtgaccttgaaacctgtcgtatgtacatagacaggttgcaggaagatctccagagcgttagtagcgggagccagagagttcactaccaggaccacgagactagctttcctcgcgccttgtctgcccaacgcctgagcccaaggtggtgctttctcgatgacagaagccaggagcatttgcacttcgtcatggaaatctcccaggacgagatattcatcctggatcctgatatggtggtgagtcaacccgcgggaacgcctcccggcatgccggatctagtggtagaacaggcgtccgggattagcgattggtggaatccagctctgagaaaacggatgctgagtgactccggcctgggaatgattgcaccttactacgaggattccgatctcaaggatctgtctcattccagagtattacagtcgcccgtaagctctgaggatcatgccatcctccaggcagtcatcgccggtgatctgatgaaattgatcgagtcatacaagaacggcggcagcctgctgatccaaggcccagaccattgttccctcttacattacgcagccaaaactgggaacggagaaatcgtgaagtacatcctcgatcacggtccaagcgaattactggacatggccgacagcgaaacaggagagaccgccctgcataaagcggcctgtcagaggaatcgagctgtgtgtcagctgctcgtggatgctggcgcgagtctcaggaaaaccgatagtaagggcaaaacaccacaggagcgcgcacagcaagcgggagatcctgacctggccgcatatttggaatcccggcagaactataaggttatcggtcatgaagatctagagacagcggtgtag

SEQ ID NO: 114510 - DNA, 3207 bp, synthetic construct
  misc_feature 1..3207: note = Description of Artificial Sequence: Synthetic coding sequence
  source 1..3207: mol_type = other DNA
atggacgcagccggccggggatgtcacttgcttcccttgccagcagctcggggcccagccagagcccctgccgccgctgctgcggccgccgccagcccgcccgggccgtgctccggcgccgcctgcgctccatccgccgctgccggcgcaggcgctatgaacccctcttcttctgcaggagaagaaaagggggccacggggggatcttcatccagcggctccggcgccggcagctgttgtctgggcgccgaaggcggtgctgatccacggggcgctggaagcgccgctgccgctggggccgccgctctcgatgagccggccgcggcgggacagaaagaaaaggacgaggcgctagaggaaaagcttaggaacttaacttttaggaagcaggtgtcctatcggaaagccatatctagagcagggctgcagcacctggctccagcccaccctttatcactcccggtcgcgaatgggcctgcaaaagagcccagagccaccttggattggtccgagaatgcagtgaatggagagcacctgtggctcgagaccaacgtcagtggggatttgtgttatcttggggaggagaattgtcaggtacggttcgcgaaatccgccctgcgacggaaatgcgctgtgtgtaaaatcgtcgtgcacaccgcctgtattgagcagctagaaaaaattaactttcgctgtaaacccacatttagagaaggtggcagtcggtcacccagggaaaactttgtacgacatcactgggtacataggagaagacaagaggggaagtgcaagcagtgcgggaaaggattccaacagaaattctcatttcattctaaagagatagtagccatctcttgctcatggtgtaaacaggcgtttcacaataaagtgacatgcttcatgttgcaccacatcgaagagccgtgcagtttgggcgcccacgccgctgtgattgtcccccccacatggatcattaaagttaagaagccacagaacagcttgaaggcttcgaatcgcaagaaaaagagaacctccttcaagcgaaaggccagcaagcgggggatggaacaggagaataaaggtagacccttcgttatcaagcccatttcttcgcccctcatgaagcctctgcttgtgttcgtgaaccctaaatccggtggaaatcagggtacaaaggtcctgcagatgttcatgtggtatctgaatcctcgccaggtcttcgatctcagtcaggaggggcccaaggacgccctagaactgtaccgtaaggttccaaatctacggatactagcttgcggcggcgacggcactgttggttggattctgagcatactggatgaactgcagttgtctcctcagccaccagtcggagttctgccactggggacagggaatgacttagccaggaccctaaactgggggggcggatatacggacgagccagtgtctaaaatcctgtgccaagtggaggacgggaccgtggtgcaacttgataggtggaacctgcacgttgagcgaaaccccgaccttcccccagaagagttggaggatggcgtgtgcaaactcccattaaacgtctttaacaactacttttcactgggatttgacgcccacgtcaccttggagtttcacgagagccgcgaggctaaccctgaaaagttcaacagccggtttcgtaataaaatgttctacgcgggagccgccttcagcgattttctgcagcgcagttcaagggatctgagtaagcatgtcaaggtagtgtgtgacggcaccgatctgacgcctaaaatccaagaattgaagttccagtgcattgtcttcctgaatattccacgctattgcgccggcaccatgccttggggcaaccctggtgaccatcatgatttcgaaccacaacggcacgacgatggctacattgaggtcattgggttcacaatggcatctctcgctgccctgcaggtggggggacacggcgagaggctgcaccaatgtcgcgaagtgatgttgctaacctataagagcataccaatgcaggtggacggcgagccatgcagactcgctcccgccatgatccggatttccttgcgaaaccaagctaatatggtgcaaaagtctaaacgtagaacaagcatgcccctgctcaacgatattcatcaggttcagacagccgatttgagacgggtgtcagccccacctgggtcgtttactatcccccagtctgtcccggaccggctgagaatccgggtaaataaaataagcctacaagattatgagggattccactacgataaggagaagctgcgagaggcaagcattcctctcggcattctggtggtgaggggcgattgtgacctggagacttgtagaatgtatattgataggctgcaggaggacctgcagtccgtaagtagtgggagtcaaagggtgcactaccaggaccacgagactagtttcccgcgagcattaagcgcccaacgattgagcccgcgatggtgttttctggatgaccgaagccaggaacatttacactttgtcatggaaattagtcaggacgaaatcttcattctcgatcccgatatggtagtgtcgcagccagccggcactcctcctggcatgcctgatttggtggtggagcaagcttcaggcatatctgattggtggaacccagccttgagaaagcgaatgttgagcgattccggccttgggatgatagccccatactatgaggatagtgacctcaaagacctttctcacagccgtgtgttgcagtccccagttagctctgaagaccacgctatcctacaagccgtgatcgccggtgatctgatgaagctgatcgagagctacaagaatggtggatctctgctcattcagggccccgaccactgttctttacttcactatgcagccaagaccggcaacggagagattgtcaaatacattctagaccacggtccttcagagctcctggacatggccgacagtgaaaccggggagactgccctgcataaggcagcctgccaaagaaatagagctgtgtgccagctcctggtggatgctggcgcctccttacggaagacagattctaagggaaagactcctcaagaaagggcacagcaggcaggtgaccctgatctcgcagcttatcttgagtctaggcagaactataaagtgatcggacatgaggatcttgaaactgcggtctag

SEQ ID NO: 114511 - DNA, 2949 bp, synthetic construct
  misc_feature 1..2949: note = Description of Artificial Sequence: Synthetic coding sequence
  source 1..2949: mol_type = other DNA
atgaacccttccagttctgccggagaagaaaagggggccaccgggggatcaagcagctccggatctggagccgggtcatgctgcctgggtgctgaggggggggctgatccacggggtgccggatcagcagctgctgccggggctgctgctttggacgagccagccgcagccggccagaaggaaaaggacgaagctctcgaagaaaaacttcgcaatctgacattcaggaaacaagtatcgtaccggaaagccattagcagggccggcctgcaacatttggcccctgctcaccctctttctctgcctgtggctaatgggcccgccaaagagccccgggccacactcgattggagcgagaacgcagtgaatggtgagcatctgtggttggaaaccaacgtgagcggcgatctgtgctatctgggggaagagaactgtcaggtacgtttcgctaagagcgcgctgcggcgtaaatgtgccgtttgcaaaatcgtagtgcatacagcctgcatcgagcagctggaaaagatcaattttcgctgcaagccaacctttagggaaggggggagcaggagcccccgcgaaaacttcgtgcgccaccattgggtgcaccgccgacggcaggaggggaaatgcaaacaatgtggaaagggattccagcagaaattcagcttccactctaaggagatcgttgctattagctgctcctggtgtaaacaggctttccacaacaaggtcacctgctttatgctgcaccacatagaggaaccctgtagtctcggagcccacgctgccgtgatcgttcctcccacctggatcattaaagtaaagaaacctcaaaactccttgaaagcttccaatagaaagaagaaacggacctccttcaagaggaaagcatctaaaaggggcatggaacaggagaataaaggcaggccattcgtgatcaagccgatctcttccccccttatgaaacctctgttggtctttgtgaatcccaaaagcggaggaaaccagggaacgaaagtacttcagatgtttatgtggtatctgaacccacggcaggtcttcgatctttcccaggaggggcccaaggacgcattggaattatacaggaaagtgccaaacctacgtattctcgcctgtggcggcgatggaaccgtcgggtggatccttagcattctcgatgagctccagttgtcaccacagccacctgtgggagtgcttccattggggacagggaatgatttagctcgcactctcaattggggaggtgggtacacagatgaaccggtatccaagattctgtgccaggtagaagatggaacagtcgtgcagctggatagatggaatctacatgttgagagaaatcctgaccttccgcctgaagaattggaggatggggtttgcaagctgccattgaacgtttttaacaattattttagcctgggcttcgacgcccatgtgacattggagttccacgagagtcgtgaggcaaatcccgaaaagttcaacagtcgatttcgtaataagatgttctatgcaggggctgcattttccgactttctgcagagatcctctagagacctcagcaagcatgtgaaagtcgtctgcgatggaactgaccttacacccaaaatccaggagcttaagttccagtgcatagtgtttctaaacatcccccggtactgtgccgggactatgccatgggggaatcctggcgaccaccacgatttcgaacctcagagacatgacgacggatacattgaagtgattggattcacgatggcctccctcgctgcgctgcaggtgggcggacacggcgagcgtctgcaccagtgccgagaagtcatgcttctgacgtataaatcaatcccaatgcaagtggacggtgagccttgtcggctggcaccagccatgatccgaatcagcttacgcaatcaggcaaatatggtccaaaagtctaaaaggcgcacttccatgcctctgctgaatgacccacagagcgtccctgatcggctacggattagggtgaacaagatctccttgcaggactacgagggattccattacgacaaggagaagctgagagaggccagcatctccgattggctgcgtacgattgcaggtgaactcgtccagtcctttggcgccatcccgcttgggattttggtcgtccgtggtgattgtgacctggagacttgtcgcatgtatatagaccgtttgcaagaggatctccagagcgtgtcatcggggagtcagcgcgtgcattatcaagatcacgaaacatcatttccgcgcgctttgagcgcccagcgacttagcccaaggtggtgcttcctggacgcaaccagtgcagataggttttataggatcgataggagtcaagagcacctgcattttgtgatggaaatttcccaggacgagatttttatcctggatcccgatatggtggtaagccagccagcaggcaccccacctgggatgccagatctagttgtggagcaggcctctggatcccctgtgtcatccgaagatcatgctattcttcaggctgtaatagcaggagacctcatgaagttgatcgaatcctacaagaacggcggtagtctgttaatacaaggacctgaccactgctctcttctacattatgccgccaaaactggcaatggagaaatcgtgaaatatattctggaccacggcccctctgaactactggacatggccgatagtgagacgggtgaaacagctctccataaggctgcttgccagcggaaccgagcggtctgtcagttgctggtcgacgcgggagcttctctgaggaagactgacagtaaaggtaagacacctcaggagcgggcacagcaagcaggtgacccggacctggctgcctatctcgaatccaggcagaactacaaagtgatcggtcacgaggacctggaaaccgccgtctag

SEQ ID NO: 114512 - DNA, 2829 bp, synthetic construct
  misc_feature 1..2829: note = Description of Artificial Sequence: Synthetic coding sequence
  source 1..2829: mol_type = other DNA
atggctgctgccgctgagcccggggctcgagcctggctggggggcggatctccaagacctggctctcccgcatgtagtccagtgctcgggagcggagggcgggcccgaccaggacctggtcccgggcctggaccggagagagccggggtacgcgcacccggacccgcagcagcacctgggcactcatttagaaaggttacactgacaaagccgaccttctgccacttatgctcggattttatctggggcctcgccggcttcttgtgcgacgtctgtaacttcatgtctcacgagaaatgtctaaagcacgtgcgaatcccctgtacctccgtggccccgagcctggtgagggtgcccgtggctcactgcttcggtccccggggcctgcataagagaaaattctgcgctgtatgcaggaaagtcctcgaagcgccagctctgcactgcgaggtgtgcgagctccacttgcatcctgactgtgtgccctttgcttgcagcgattgtagacagtgtcatcaagatgggcatcaggaccatgatactcatcaccatcattggcgcgaaggcaaccttcctagcggggccaggtgtgaagtctgtcggaagacttgcgggtctagcgacgtccttgcaggcgtccgttgtgaatggtgtggagtccaggcccattcattatgttcggccgctctggctccagagtgtggatttggcaggctgagatccttagtcctgccgcctgcttgtgttcgattactgccggggggcttttctaaaacccagagcttcaggattgtagaggctgccgagccgggtgaaggcggggacggtgcggacggttccgctgccgtgggtccagggcgggaaacccaggccacacccgagtcgggtaagcagaccctgaagatttttgacggagatgacgcagttaggagatctcagttcagattggtgaccgtgtccaggctggccggcgcggaagaggtgctggaagcggcccttcgcgctcatcatattcctgaagaccccgggcacctggaactctgccggctacctcctagctctcaagcctgcgacgcttgggcgggggggaaggcggggtctgctgttatttccgaagagggacggagccccggctccggcgaggcaaccccggaggcatgggtcattagggccctacccagggcacaggaggtcctcaaaatttaccctggatggctcaaggtaggcgtcgcatacgttagcgtgagggtgacgccgaagagtactgcccggagcgttgtcctcgaggtgctaccccttctcggacgtcaggctgagtcacccgaatctttccaactggtggaagtggccatgggctgccggcatgttcagcgcactatgctcatggatgagcagccattactggatagactgcaggacattaggcagatgagtgtgcgtcaggtgagccaaacaaggttttatgtcgcagagagtcgcgatgttgctccccatgtgtcgctgtttgtggggggactcccaccgggcctctccccggaggagtactcatccctgctgcatgaggcgggcgcaaccaaggccaccgtcgtttccgtgagtcatatatatagctcccagggagccgtcgtcctagatgtcgcttgtttcgcagaggcagaacgcttatatatgctactcaaggatatggcggtccgcgggcggctcttgactgccctggtcttgcctgatttgcttcacgctaaactcccccctgactcatgtccccttttagtctttgtgaaccccaagtccggcggacttaaaggtcgtgacctcctatgttcgtttaggaaactcctcaatccacaccaagtttttgacttgaccaacggcggacctcttcctggattacatttgttctcacaagtcccctgttttagggtcctcgtttgtggcggggatggaaccgtaggctgggttcttggagccctagaggaaacacgctacagacttgcgtgtcctgaaccatccgttgctatacttccactcggcaccggaaacgacctcgggagagtgctacgatggggtgcgggctattccggagaggaccccttttcagtgttactcagcgtggatgaggcagatgcagtcctcatggacagatggaccatactgctggacgcgcacgaggccggaagcgctgagaacgatacagccgacgctgaacctcctaagattgtacagatgagcaattattgcggtataggcatcgatgccgagctcagtctggactttcatcaggcgagagaggaggaacctggcaaatttacctcacgtctccacaacaaaggggtgtacgtgcgggttggcctgcagaaaattagtcacagcaggtccctgcacaaacagatccggctccaggtagaacggcaggaggtcgagcttccctctatcgagggcctgatttttatcaacattccttcatgggggtctggagcagacctatggggctccgattccgacacacgcttcgagaagccccgaatggatgatggcctcctcgaagtggtcggtgtgacaggcgtagtgcacatgggacaggttcagggtggcctcaggtccggcattcgcattgcgcagggatcgtactttcgggtgactctactgaaggccactccggtacaggtagacggcgaaccatgggtccaggcaccaggtcatatgatcatctctgcagctggccccaaggtgcacatgctcagaaaggctaagcagaaaccacgccgcgcaggcactaccagagacgccagggctgatgctgctccggccccggagagcgatccacgctag

SEQ ID NO: 114513 - DNA, 1632 bp, synthetic construct
  misc_feature 1..1632: note = Description of Artificial Sequence: Synthetic coding sequence
  source 1..1632: mol_type = other DNA
atgccagggatggtgctctttggtcgacgttgggcaatagcaagcgacgacctggtattccccgggttctttgaactggtagtccgggtgctctggtggattgggatcctcacattgtacctgatgcatcgcgggaaactcgattgtgctggcggggctctgcttagctcatacctaattgtccttatgattctcttagcggttgtgatatgcacagtcagcgcaattatgtgtgtgagcatgaggggtaccatttgcaacccagggccgaggaaaagcatgtcaaaactgctgtacattcgactggctctattctttccagaaatggtgtgggcctccctcggcgctgcatgggttgccgatggtgtgcagtgcgaccgaacggtcgtaaacggcatcattgccacggtggtcgtccgcacacaaatttggtgcccagcaactctgaggagggcgagcccttgtttcatctctaatcgcacaattagcggtaccacgaagtctctgcctcgctggtccgctatgccccagggggcaccgagttgtcggagcagaactaccgattatgacttggttggaggcgatcagttaaactgccacttcggctctatcctccacactaccggtctgcaatatagggacttcattcacgtctcctttcacgacaaggtgtatgagcttccgtttctcgtcgctctcgaccatcgaaaagaatctgtggtggtcgccgtgaggggcacgatgtcgctacaggatgtacttacggatcttagcgctgaatcagaggtcctcgacgtggagtgcgaagtacaagacagattggcacataaggggatttcccaagctgcccggtacgtgtaccaacggctcattaacgatggcatcctgagtcaggccttctctattgcccccgagtaccggctggtgattgtgggacatagtttaggcggcggtgcagcggcccttttggccaccatgctgcgcgcggcctacccgcaggttcgctgttatgcgtttagtcctccacgaggactgtggagtaaggctctgcaggagtactctcagtcttttatcgtgagccttgtgctgggcaaggatgttattccccgtttgagcgtaacaaacctggaggatctgaagaggcgtatcctgagggttgtggcccattgcaataaaccaaaatataaaattcttttgcacggtctctggtacgagctgttcggcggcaacccaaataatttaccaacggaacttgacggaggcgatcaggaggtccttacacaacctttactgggggaacagtcactgctgactcgttggtccccagcctactcctttagttcagattcccccctggattcttctcccaaatacccccctctatatccccccggtcggattattcatctgcaggaggagggagcatccggccggtttggatgctgttcagccgcacactactccgccaagtggtcacacgaggctgagttcagcaagatcctcatcggccctaagatgctgacagatcacatgcccgacattctcatgcgcgcactcgacagcgtcgtctcagaccgcgctgcttgcgtttcttgtcctgcccagggcgtcagctctgttgatgtcgcctag

SEQ ID NO: 114514 - DNA, 3129 bp, synthetic construct
  misc_feature 1..3129: note = Description of Artificial Sequence: Synthetic coding sequence
  source 1..3129: mol_type = other DNA
atgcccggtattgtggtgttcaggaggagatggtctgtgggttccgacgacttggtacttcctgctatctttttgttcttgttacataccacgtggttcgtgattctgagtgtcgtgctatttggattggtctacaacccccatgaagcttgttctctgaatctggtggatcacggccggggctaccttgggatccttctctcgtgcatgatagcggagatggcaatcatttggcttagtatgaggggaggaatattgtataccgaacctcgggattcaatgcagtacgtcctgtatgtccgtctggcaatcctggtgatcgagttcatctatgctatagtggggattgtgtggctgacccagtattacacctcttgcaatgatctcacagccaagaatgttaccctcggcatggtagtgtgtaattgggtggtcattcttagtgtctgtatcaccgtgctctgtgtgtttgaccccacaggcagaacatttgtcaagctgcgtgcgaccaagaggcggcagcgcaatctccggacatataatctcaggcatcgcctagaggaaggccaagcaacttcctggagtcgacggctcaaggtgtttctctgctgcacacggactaaggacagtcaatcagatgcctacagcgagatcgcgtatctttttgcagaatttttcagggacttagacatcgtgccatccgatatcatcgctgggctagtgctgcttcgtcagcggcaaagggccaaacgtaatgccgtgctcgacgaggctaacaatgacatcctggcttttttgtccggaatgccagtgactaggaacactaaatacctcgacctcaaaaattctcaagaaatgttgcgctataaagaggtctgctactacatgctattcgcccttgctgcctacggctggcccatgtatttaatgaggaagcccgcatgcgggctgtgtcagctagccaggtcttgttcttgctgcctgtgcccagccagaccacgcttcgccccaggtgtgacaattgaagaggataattgttgtggctgcaatgctatcgcgataaggcgccatttcctggacgagaacatgactgccgtagacatagtttacacttcatgccacgatgccgtgtatgaaacccctttttatgtggccgtcgaccacgacaaaaaaaaagtagtaatcagcataagggggactctctctcccaaggatgctctgactgacctcacaggcgacgctgagcgcctgccagtagaaggccaccatggcacatggctgggtcacaagggcatggtcctttctgcagagtacattaagaaaaagctagaacaggagatggtcctgtcccaagccttcggacgggatctggggagggggactaagcactacggtctgatcgtagttggacattccctgggggctggcactgccgccattctgagctttctattaaggccgcagtaccctactctgaagtgttttgcatacagccctcctggcggtctactgtctgaggatgcaatggagtattcaaaggaatttgttacagccgtggtcctcggaaaagacctggtgcctaggattggtctgagtcagctcgaggggttccgcagacagttgctcgacgtgcttcagcggagcacaaagcctaaatggcggatcattgttggtgccacaaaatgcatcccaaagtctgagctgcctgaagaggttgaggttaccacactggcttccacccggttatggacgcacccttctgatctgaccatcgcactgtctgcctctacccccctttacccaccagggcggattattcatgtcgtgcataatcacccagccgaacagtgttgctgctgtgagcaggaagagcccacctatttcgccatctggggcgacaacaaggcatttaatgaggtgatcatcagcccagcaatgctgcatgaacacttaccttacgtagttatggaaggcctcaataaggtcttggagaattacaacaagggcaaaaccgcgttactttctgccgccaaggtgatggtctcacctacggaagttgatttgaccccggagctcatcttccaacagcagcccctccctaccggcccgcctatgcctacaggcctggccctcgagctgcccacagctgatcaccggaattcaagtgtgaggtcgaagtcacagagcgaaatgtccctagagggtttcagcgaaggcagattgctgtcccctgttgtggccgccgcggccaggcaggaccctgtggaattgcttctgttatcaacccaggaacggctcgccgccgaactgcaggcaagacgagccccccttgcgaccatggagagtctgagcgacaccgagagtctgtacagcttcgacagcaggaggtccagcggcttccgctcaattcgggggagtccaagtctccatgccgtgctcgaaagggacgagggacatctattctacattgaccctgctatccctgaggaaaacccaagcttgagcagtcgcacagaacttctcgctgccgactcactgtcgaagcattcccaggacacacagccgctggaggccgctttaggcagtgggggcgtcacaccggaacgccctcctagtgcagctgccaacgacgaggaggaggaagtgggggggggagggggaggaccggcttcacgaggggagttagccctccacaacggcaggctgggtgactcacccagtccacaggtcctggagttcgccgaattcattgatagtctgttcaacctagacagcaagtcttcctcttttcaagacctttattgcatggtcgttcctgaatcccctacatcagactacgctgagggtcctaagtctcccagccaacaagagatactgctgcgggcccagttcgagcccaatctggtccccaagccccctcggctgtttgcgggctctgcggaccccagttcaggtatatccctcagccccagctttcctttatcctcgtccggcgagctgatggacctcacacccaccggtcttagcagtcaggaatgtctcgctgcagacaaaatccgaacgtccactcccacaggtcatggcgcgtctccagccaaacaagacgagctggtcatcagtgcacgatag

SEQ ID NO: 114515 - DNA, 2019 bp, synthetic construct
  misc_feature 1..2019: note = Description of Artificial Sequence: Synthetic coding sequence
  source 1..2019: mol_type = other DNA
atgcctggtatggtgctgtttggccggcgctgggccatcgcttccgatgatctcgtctttcccgggtttttcgagctggtcgtgagagtactctggtggatcggaattcttaccctgtatctcatgcaccgcggcaaactggactgtgctgggggggcactgttgtcttcatatctgatagtacttatgatcctcctggcagttgtcatctgcactgtcagcgccatcatgtgtgtatcaatgcgaggcacaatttgtaaccctggcccacggaagagcatgagcaaactgctgtatattcgccttgccttgtttttccccgagatggtgtgggcatccttaggcgccgcctgggtggctgacggcgtgcagtgcgaccgcaccgtcgtcaatggcattatcgccacagtcgtcgtgtcttggattatcatcgcagccacagtagtgtcaatcataatagtgttcgaccccctggggggcaaaatggccccttactcctccgctggaccctctcacctcgactctcatgactcttctcaactgttaaatggactcaaaactgcagccacttccgtgtgggagaccagaatcaaactcctatgttgttgcattgggaaagatgatcatactagggtcgctttttcatccactgccgagctttttagtacctacttctcagacacagacctcgtcccctctgacattgcagcaggcttggctctgttacaccagcaacaagacaacattcgcaataaccaggagccagcccaggttgtgtgtcacgctcctgggtcatcccaggaggcagatctggacgccgaactggagaactgccatcactacatgcagttcgctgcagccgcctacggctggccactttacatttacagaaaccccttaactgggttatgtcgcattgggggggactgctgtcggtcacggacaacagactacgacctggtgggaggggaccagttgaactgccactttggtagcattctgcacacaacgggtttgcaatatagagattttatccatgtctctttccacgacaaggtgtacgaactaccattcttggttgccttagatcacagaaaagaatccgttgttgttgccgtccgagggaccatgagcctgcaggacgtgcttactgatttgagcgccgagtcagaggtgctggatgtggagtgtgaggtgcaggataggctggcccacaaggggatctcacaagccgctcggtacgtttatcagagactgatcaatgacgggattttatctcaagcctttagcatcgccccggagtaccgcctcgtcatcgtaggccattcactgggcggtggtgctgctgccctgcttgctaccatgcttagggccgcctacccacaagtgagatgttatgcgttctccccccctagaggcttgtggtctaaggctcttcaggagtattctcagtcattcattgtatctcttgtgctgggcaaggatgtgattcctaggctaagcgttactaatctggaggatctcaaacgcagaatcctgagagttgtagcccactgcaacaagcccaagtacaagatactcctccacggactatggtacgagctgttcggtggtaatcctaataacctgccaacagaactcgacggcggggatcaggaggtgctaacccagcctctgctcggcgaacagtctctcctgactcggtggtcacccgcctacagcttcagcagcgattccccactggactcctctcccaaatatcccccactgtacccccccggtagaatcatccatctgcaggaagagggagcctccggaagatttggttgttgctctgccgctcattattcagccaaatggtcccatgaggcggagttcagcaagatcttgattggacccaagatgctaactgatcacatgccagatatcctcatgcgggcccttgacagtgtggtcagcgacagagctgcctgcgtgtcatgccctgctcaaggcgtgtcatcagtggacgtcgcatag

SEQ ID NO: 114516 - DNA, 663 bp, synthetic construct
  misc_feature 1..663: note = Description of Artificial Sequence: Synthetic coding sequence
  source 1..663: mol_type = other DNA
atgtattgcgtgagccatcacgtttgccagcacgaaaggacacagatctggtgcccagcaaccctgcggagagccagtccatgcttcatctctaaccgtacaatttccggaactactaagagccttccacggtggtcagcaatgccgcaaggagccccatcctgtcggtcccggacaacagattacgatcttgtgggcggcgatcagctgaattgccacttcggctcgatcctgcataccaccggtcttcagtatcgcgacttcatccatgtctcgttccacgacaaagtgtacgaactcccatttctggtggccttagaccacaggaaggagtctgtggtcgtagcagtcagaggcacaatgtctctgcaagacgtgctaactgacctaagcgcagagagcgaagttctggatgttgagtgcgaggtccaggatcgactcgctcataaaggcatttcacaggctgcgaggtatgtttatcaaagacttattaatgacggcattctatcacaagcattcagcatcgctcctgaatatcgcctagttatagtgggccattcattgggcggaggagctgccgccttactggcgaccatgctgagagcggcctatcctcaagtgagatgttacgctttcagccctccgcgggggctgtggcgttag

SEQ ID NO: 114517 - DNA, 1140 bp, synthetic construct
  misc_feature 1..1140: note = Description of Artificial Sequence: Synthetic coding sequence
  source 1..1140: mol_type = other DNA
atgtattgcgtgagccaccatgtgtgtcagcatgagtcctggatcatcatcgctgcgactgtggtgtcgataatcattgtgttcgatccattaggtgggaaaatggctccatattcatccgcgggaccgagtcatcttgatagtcatgactcctcccagctgctgaacggacttaaaacagctgctacatccgtctgggagactaggatcaaactcctatgctgctgcataggcaaggacgatcacactagggtagctttttccagtaccgctgaactgttcagcacctacttctctgacaccgacctcgtgcctagcgatatcgctgcaggcctggcacttttgcaccagcagcaggataacatcaggaacaaccaagaacctgcgcaggtagtatgtcatgctccaggcagctcacaggaagccgacctagatgccgaactcgagaattgtcaccactacatgcagttcgcggctgctgcctacggttggcctctctacatctaccgcaaccctctgactggcctctgtcgcattggcggggactgctgtagaagccggaccacagactatgacctggtggggggcgatcagctgaattgtcacttcggcagcattcttcataccacaggactgcagtaccgggacttcattcatgtgagttttcacgataaggtctacgaacttcctttccttgtcgctttggatcaccggaaagagtctgtcgtcgtcgctgtccgggggacaatgagtctccaggatgtgctgaccgatttgagtgccgaaagcgaagttctggatgttgagtgtgaggtgcaggataggctggcacataagggcattagtcaagcagccaggtatgtgtaccaacggcttatcaatgatggcattctgagtcaagcattttccatagctcccgagtaccgcctcgtcatagtaggtcactccttgggaggtggagccgcagctttactggccaccatgctgagggcagcctaccctcaacagtcatctgctggcatcttctctgagctccaccgggtgacacgcccaggcgaagggtgcgatagccaggctcaatgcgaccagcttggacgttctgaggaaaagaatcttgcatcaggacgggcgctccagtag

SEQ ID NO: 114518 - DNA, 804 bp, synthetic construct
  misc_feature 1..804: note = Description of Artificial Sequence: Synthetic coding sequence
  source 1..804: mol_type = other DNA
atgccaggcatggtactgttcggaaggaggtgggccatagcaagcgacgatctggtcttccctggcttcttcgaattggtggttcgtgtcttatggtggattggtatcctcactctctatctcatgcatcgaggcaaactggattgcgctggcggagcgctgctgagctcttacttaattgtgctgatgatattgcttgccgtcgtgatttgcaccgttagcgcaattatgtgtgtctccatgcgcggaactatttgcaaccccgggcccagaaagtccatgtctaagttgctgtatatacgtcttgctctgttcttccccgagatggtgtgggcttccctgggagccgcctgggtggcagatggtgtgcagtgtgaccgcactgtcgtcaatgggattattgccaccgtggtcgtctcctggatcatcatcgctgctactgtcgtttcgattataatagtattcgatcctttgggggggaagatggccccatactcaagcgctggcccttctcatcttgacagtcacgactcctctcaactgcttaacggcctgaagactgcagcaacttcagtgtgggaaactcgcatcaaactactttgctgttgcatcggcaaggacgaccatactcgtgtcgcgttctctagtaccgctgagcttttttctacctacttctccgatacagacttggtgccaagcgatattgcggctggacttgcccttctgcaccagcaacaggacaacactcgcgccacaggcaattgtcccaggaatgatggtcttactctgctctccctgaactag

SEQ ID NO: 114519 - DNA, 1467 bp, synthetic construct
  misc_feature 1..1467: note = Description of Artificial Sequence: Synthetic coding sequence
  source 1..1467: mol_type = other DNA
atgggagaccgggggagtagccgcaggagacgaacgggctcccgtccgtcatcccacggcggagggggcccagcagccgcagaagaggaagtcagggacgcagccgccgggcccgatgtcggtgcggccggagatgctcctgcccctgccccaaataaggacggggacgccggagttgggtcgggtcattgggagctcaggtgtcatcgccttcaagactccctctttagctcagatagcggattcagcaattacagagggatcttaaactggtgcgttgtgatgctgattctttctaacgccaggctgttcctggaaaacttaattaagtacggcattttggtggaccctatacaagtggtgagtttgtttctgaaggatccatactcatggcccgctccatgcctggtgatagccgctaatgtatttgcagtggccgccttccaggtggaaaagagacttgctgtgggggccctgacagaacaggccgggcttctcctgcatgtggctaacttagctacaatactgtgtttccctgccgcagttgtgctgttggtggaatctattactcccgttgggtccttactcgccctaatggcacatacaattctctttcttaaactgttttcttaccgagatgtgaacagctggtgccgtagggctcgcgctaaagcagcttctgctgggaagaaggcttcatctgcagcagccccccatacagtgtcctaccctgacaatctcacttacagagacctctattactttctgtttgcccccaccttgtgttatgagctgaactttcccagatctccccgaattaggaagaggttcctcttgcgacgaattcttgaaatgctcttttttacccagctgcaggttggactaatccagcagtggatggtgccgactattcaaaattccatgaagccttttaaggacatggattacagcaggatcatcgaaagattgctgaagctggctgtgcccaaccacttaatctggctgatttttttctactggctattccactcatgtctgaacgctgtcgctgagttaatgcagtttggagaccgggagttctatagagattggtggaactcagagtccgttacatatttttggcagaactggaacattcccgtgcacaagtggtgcatcaggcatttctacaaaccaatgctgagaaggggatctagcaaatggatggcccgtacaggcgtatttctagcgtcagcattctttcatgagtacctcgttagcgtgccgctccgaatgtttagactttgggcatttaccggcatgatggctcagattccccttgcctggtttgtgggtcgcttcttccaaggcaactatggaaacgctgccgtgtggctctcactcatcattggacagccgattgccgtgctgatgtatgttcatgactactacgtccttaattatgaagcgccagccgcggaggcatag

SEQ ID NO: 114520 - DNA, 282 bp, synthetic construct
  misc_feature 1..282: note = Description of Artificial Sequence: Synthetic coding sequence
  source 1..282: mol_type = other DNA
atgaagctcttgatggtgctgatgctggctgccctgtcccagcattgctacgctggctccgggtgtccactgctggaaaacgttattagcaagaccataaatccacaggtctcaaagacagaatataaggagttactccaagagttcattgatgataatgcgacaacgaatgccattgacgagctgaaagagtgttttctgaaccagaccgatgagacactatccaatgtcgaggtgttcatgcagcttatctacgatagttcactgtgcgatctgttctag

SEQ ID NO: 114521 - DNA, 1038 bp, synthetic construct
  misc_feature 1..1038: note = Description of Artificial Sequence: Synthetic coding sequence
  source 1..1038: mol_type = other DNA
atgaaaaccttaatcgcggcatatagcggcgtcctgaggggtgaaagacaagcagaagcagatcgctcccagcgatcccatgggggtcccgcactttcccgggaagggagtggtagatggggtgtggcctgttcagctatcctgatgtacatcttctgtacagactgctggctgatagccgtgttatacttcacctggctcgtctttgattggaatacgcccaaaaaagggggtcgccgttctcagtgggtacgcaattgggctgtctggcggtactttcgggactattttccaatacagctggtgaaaactcataatctgctgacaacgcgcaactacatctttggctatcacccacacggtatcatgggcctgggggctttctgtaactttagcactgaggcgactgaagtcagtaagaaattccccggtattcgcccatacctggctactcttgccggcaatttcagaatgcctgtgctgcgggaatacttgatgagcggaggcatctgcccagtaagtagggataccattgactacctgctgtccaagaacggcagcggcaatgcaattataatcgtggtgggcggggccgccgaaagcttgtctagcatgcctggtaaaaacgcggtgacgctgaggaatcgcaaggggtttgtcaagctggctctccgacatggagccgatctggtgccgatctattcttttggcgagaacgaagtgtataaacaggtcatttttgaggaaggcagctggggccgttgggtccagaagaaattccaaaaatatattggatttgccccctgcatatttcacggccgggggctattctctagcgatacatgggggctcgtgccttatagcaaaccaattaccactgtggtcggagagcctataaccattccaaaactggagcaccctactcagcaggatattgatttatatcacactatgtacatggaggccctggttaaactgttcgataagcacaagaccaagttcggcctcccagagaccgaagtgttggaagtgaactag

SEQ ID NO: 114522 - DNA, 3306 bp, synthetic construct
  misc_feature 1..3306: note = Description of Artificial Sequence: Synthetic coding sequence
  source 1..3306: mol_type = other DNA
atggaacaacctggcgctgcagcgtcgggagctggtggtggtagtgaagagccaggaggcgggcggagtaacaaacggtccgctggcaatagagctgctaacgaagaggagactaagaacaaaccgaaattgaatattcagataaaaaccctggcggatgatgtacgagacaggatcacttcttttcgcaaatcaacagtgaaaaaggagaaacccttgatccaacatccgattgactcccaggttgctatgagtgagttcccagctgcccaaccactttacgacgaaagatcactgaatctgtcggaaaaagaggttctggatttattcgagaaaatgatggaagatatgaatcttaacgaagagaagaaggccccacttaggaacaaggatttcacaaccaaaagggaaatggtggtccaatatatcagtgcgaccgccaaaagcgggggcctgaaaaattctaagcacgagtgcacgctatcttcacaggagtatgtgcacgaactcaggtccggtatctccgacgaaaagttgctgaattgtcttgagtccctgcgggtgtctctaacatcaaatccggtcagttgggtgaacaattttggccacgaaggcttaggcttacttctcgatgaactggagaaactgctggacaaaaagcaacaagaaaatattgacaagaagaaccagtacaaattgattcaatgtctgaaggcgtttatgaacaataagtttgggctgcagagaattctcggcgacgagcggtccctgcttctgctcgctcgcgcaattgatccgaaacagcctaacatgatgacggagatcgtcaaaattttgtccgccatatgcatagtaggggaggaaaatatcctggataaactgttaggtgcgattactaccgcagccgagcgcaacaacagggagaggttctccccaatcgtcgaagggctcgagaatcaggaggctttgcaactacaggtagcctgtatgcaatttataaacgctctggtgacaagcccttatgaactggacttcagaattcatttgcgaaatgaatttctccggagtggtctgaagacaatgctgcccgacctgaaagaaaaagaaaacgatgaattagacattcagctgaaagtcttcgacgagaacaaagaagatgatctaaccgaactgtcgcatcgattaaacgacattagagccgaaatggacgatatgaacgaggtttaccacctgctgtacaacatgctcaaagatactgcggccgagaattactttctttcaatcctccagcacttcctcttaatcaggaatgattactacatccgcccccaatactacaaaataatcgaggagtgcgtgtcacagatcgtgcttcactgctccggcatggatcccgatttcaagtaccgccagagactggatattgatctgactcaccttattgatagctgcgtgaacaaggcaaaagttgaggagtctgaacagaaagccgccgaattcagtaaaaagtttgacgaagagtttactgctcggcaggaggctcaagccgagttgcagaaacgtgacgagaagatcaaggagctagaggccgagatacaacagctgcggactcaggctcaggttttgtcctccagcagtgggatccctggccctccagctgctcccccgctgcccggggtggggcccccccccccaccacctgctccacctcttcccggcggggcacctttaccaccccctccccctcctctgcctgggatgatggggattcctcccccaccacccccccctctgcttttcggcggaccccctccaccaccaccactgggaggagtgccacctcccccaggtatctcactgaatctcccctatggtatgaagcagaaaaaaatgtacaagcctgaggtgagtatgaagaggataaattggtctaaaattgaacctaccgagctgagcgaaaattgtttctggctgcgcgttaaagaggataaatttgaaaatcccgacctattcgcgaaactggcactgaatttcgcaacgcagatcaaggttcagaagaacgcagaggctctggaagaaaaaaagacagggcccacaaaaaagaaagtgaaggagcttaggatcctggatccaaagacagctcagaacctgagcatcttcctgggcagctatcgtatgccatacgaagatattcgaaatgttatcctggaagtaaacgaggatatgctatccgaagccctcattcagaacctcgttaagcacctgccggaacagaaaattctgaatgagctggccgagctcaagaacgaatatgacgatctgtgcgagcctgagcaattcggcgtggttatgtcctctgtcaagatgcttcagccaaggctgtccagtatcctgttcaagctgactttcgaggagcatataaacaacataaagccctctatcatcgctgtaacactagcctgcgaagaactgaaaaaatctgagtcctttaatcgacttttagagctggtgctactagttggcaactatatgaattccggaagccgtaatgcccaatctctgggattcaaaataaacttcctatgcaaaatacgcgacaccaagtctgcagaccagaaaacgactctgctgcattttatagccgatatctgcgaagagaagtatagggacatcctaaagtttcccgaagagttggagcacgttgaaagcgcaagcaaagtttcagcgcagatcctgaaaagcaatctggcaagtatggagcagcagattgtgcaccttgagagggacataaaaaagttcccacaagcagaaaatcagcatgacaagtttgtggagaagatgacctcttttacgaagacagcccgcgaacagtacgaaaaactaagtaccatgcataacaacatgatgaagctctacgaaaacctaggcgagtatttcatcttcgatagcaagacagtgtctatagaagagttttttggggacctgaataattttcgcacactgttcttagaggcggtcagggagaacaacaaaaggagagagatggaggaaaagacaagacgggctaaacttgcaaaggagaaggccgagcaggagaaactggagagacagaagaagaaaaagcaactgatagacatcaataaggagggagacgaaactggcgtgatggataacttgcttgaagcactgcagagcggcgctgcttttagagacagaaggaagaggatccctcgcaatcctgataaccgcagagtgcctctggaacgtagcaggtcgcgtcacaatggagccatctcaagcaaatag

SEQ ID NO: 114523 - DNA, 3291 bp, synthetic construct
  misc_feature 1..3291: note = Description of Artificial Sequence: Synthetic coding sequence
  source 1..3291: mol_type = other DNA
atggagcagcctggcgcagcagccagcggagccggcggcggaagcgaggagcccggtggcggaagaagtaacaaacgaagtgcagggaatagggcagccaacgaggaagagaccaagaacaaacctaaactaaatattcagatcaaaacactcgccgatgatgttcgggatagaatcaccagctttaggaaaagtactgtcaaaaaagaaaaacccttgatccagcatccaatcgatagccaggtggcgatgtccgagttcccagccgcccagccactttacgacgaaaggtcactaaatctcagcgagaaggaggtgctggacctgttcgagaagatgatggaagacatgaacctgaatgaggagaagaaagccccattaaggaacaaggacttcactacgaagcgggagatggtcgtgcagtatatctccgcaacagccaagtctggaggcctgaaaaactccaagcatgaatgcacattaagttcccaggagtacgtccacgaattgcgatcaggaatatctgatgaaaaactcttaaattgcttggagtccctgcgggtatctctcacttcaaatcccgtcagctgggttaataatttcggacatgagggattgggactgctgctagacgagctcgagaaattgctagacaagaaacaacaagagaacatcgacaagaaaaatcaatacaagctgatccagtgcctgaaggcgttcatgaataacaagtttggactccagagaatcctgggagacgaacgcagcttgctgcttttggcccgcgctatcgaccctaagcagcccaacatgatgacagagatcgtcaagattctgagcgccatttgtatagtgggagaggaaaacattttagacaaactgctcggtgccattactaccgcggcggagcgaaacaatagggagaggttttcccctatagtggaaggcttagagaatcaagaggctcttcaactacaggtggcttgcatgcagtttatcaacgccctggttacttccccttacgaactggacttcagaatccatcttaggaatgagtttctcagaagcggcctgaaaacaatgctgcctgaccttaaggagaaggaaaatgatgagctcgatatacagctcaaggtttttgacgagaacaaggaggatgatctcaccgagctgagccaccgcttgaatgacattcgggccgaaatggacgacatgaacgaggtttaccacctgttatataacatgcttaaagacaccgccgccgagaactattttctgtcaatcctgcagcacttcctgctgattcggaatgattactatatacgtccccagtactataaaataatcgaggagtgcgtctctcaaatcgtgctccactgtagtgggatggaccccgacttcaaatacaggcagagactggatattgatctcacacatttgattgattcctgcgttaacaaagcgaaggttgaagagagtgagcagaaggcagccgaattctccaagaaattcgacgaggaattcacagctagacaagaagcacaggcggagcttcagaaaagagatgagaagattaaggagctggaggcagaaattcagcaactgcggacgcaagcccaggtgctcagctctagctctgggatccctggccctcctgccgcaccaccactccccggtgtgggccccccaccacctccaccggcccctcccctgccggggggcgcccctcttccacctcccccgcctcctctgcccggtatgatgggaatccctcctccgcctccaccacctctgctgtttgggggcccacctcctcctcccccactcggtggcgtgcctccaccacctggaatatcactcaacctgccctacgggatgaaacaaaaaaagatgtacaaaccagaagtgtctatgaagagaattaattggtcgaaaatcgaacctacagaattgagtgagaattgcttctggctccgagttaaagaagacaagttcgaaaaccccgacctgttcgctaaactcgctctgaactttgcaacacaaattaaggtgcagaagaatgccgaggccctggaggagaagaagacaggcccaacaaagaagaaagtcaaggaactgcggatcctggatccaaagacagcccagaatctatccatctttctggggagttaccgcatgccatacgaggacatacgtaacgtgatcctggaagtcaatgaggacatgctctccgaggccctcatacagaatctcgtgaagcacctgcccgagcagaagatattgaatgaactcgccgagcttaaaaatgaatacgatgatctatgtgaaccagagcagtttggcgtggtgatgtcatcggttaagatgctccagccgcgcttaagcagtatcctctttaaactcaccttcgaagagcatattaacaatattaagcctagcattatcgcagttacactggcttgcgaggagttgaagaagagtgagtcatttaatcgcctgctggagcttgtgctcctcgttggcaactatatgaacagtggaagccgaaatgcacaatctcttgggttcaagattaactttctgtgtaagatacgggacacaaagagcgcagatcagaaaacaacccttttgcattttattgccgatatatgcgaggagaaatatagggatatccttaaatttccagaggagcttgagcatgttgaatcagcttcaaaagtgagtgcgcagattctcaagtctaacctggccagtatggagcaacagatcgttcatctggaaagagacatcaagaaatttcctcaggccgaaaatcagcatgacaaattcgttgagaaaatgacgatctttaccaagacagcgagggaacagtacgagaagctgagtaccatgcataacaacatgatgaaattgtatgaaaacctcggcgagtactttatttttgattctaagacagtgagcattgaagagttctttggcgacctgaacaactttcgaaccctgttcctggaagcggtacgggaaaataacaagcggagagagatggaagaaaaaacacgccgcgcaaagctggctaaggaaaaagcagagcaagagaaactggaacggcaaaaaaagaaaaaacagcttatcgacatcaataaggaaggagatgaaacaggagtcatggataatctgctagaggccctacagtcaggggctgcgtttagggaccgacgcaagaggattccaaggaacccagtcgtgaaccatccctgcgccacccgggccaatcctcgctctgctacttag

SEQ ID NO: 114524 - DNA, 3291 bp, synthetic construct
  misc_feature 1..3291: note = Description of Artificial Sequence: Synthetic coding sequence
  source 1..3291: mol_type = other DNA
atggaacagcccggggccgcagctagcggcgcaggcggaggaagtgaggagcccggaggtgggagaagtaacaagcggtcagccgggaatagagctgctaatgaagaagagacgaagaacaaacccaaacttaacatccagatcaaaaccctcgccgacgacgtgagagatagaattacatcttttcgcaaatctactgtgaagaaagagaaacccctgattcagcaccctatcgatagccaggtggcaatgagtgagttccccgccgctcagcccctgtacgacgagagaagtcttaacctgtccgagaaagaggttctggatttgtttgaaaaaatgatggaagacatgaacctaaatgaggaaaagaaggcccccctgcgaaataaagatttcacgaccaagcgggaaatggttgttcagtatatttccgccacagctaaatccggcgggctgaagaatagtaagcatgagtgtaccctaagctctcaggaatacgtccacgaactccgttctgggatctctgatgaaaagcttctgaactgtcttgaatcactgcgcgtcagcctaacgtcgaatcctgtgagctgggtaaacaactttggccatgaaggcttggggctgttgctcgacgaactggaaaaactgctcgacaaaaaacagcaggaaaatatagataaaaagaatcaatataagttgattcagtgtctgaaggcattcatgaataataagtttggccttcaaaggatcttaggtgacgagcgctctctgctgttactcgctagggcaattgatccaaagcagcccaatatgatgacagaaatcgtgaaaatcctgtcagccatttgtattgtgggggaggagaacattttggacaaattgcttggagcaataactaccgcagctgagaggaataacagggagagattttctccaatagtggaggggctcgagaaccaagaggccctgcaactgcaggtggcatgtatgcagtttattaacgctctggtcaccagtccctacgagcttgattttcgaatccatctccgaaacgagtttctgaggagtggcctgaagacaatgcttcccgacctgaaagagaaggagaatgatgaactggatattcagcttaaggtgtttgacgagaataaagaggacgacctcactgagctcagccatcggctgaacgatattcgagctgagatggacgatatgaacgaagtctatcacctactctacaatatgctcaaagataccgctgccgaaaattatttcctctccatcttgcaacacttcttgttgataaggaacgattactacattcgaccacagtactacaaaattatcgaagagtgcgtttctcagatcgtcttgcattgttccggcatggacccagacttcaaatacagacagcgcctcgatatagatctcacacatctcatcgactcttgcgtcaacaaggcgaaagtggaggaaagtgagcagaaagctgctgagttttccaagaaattcgacgaggaattcactgctaggcaagaggcccaggctgagctacagaagagagacgagaaaattaaagagctcgaggccgaaattcagcagctgcgaacacaggcgcaggtactgagctcatcctcgggcattccaggtccgccggccgcaccccccctgccaggtgtgggcccacctccaccaccacccgcaccccccctgcctggcggcgcccctctgccgccaccacctcccccccttcccggcatgatggggatccctccaccacctccaccaccactgctgtttggtggtcctcccccacctccccccctgggcggggtgcccccaccacccggcatctccttgaacttaccttatggaatgaagcagaaaaagatgtataagcccgaggtgtccatgaaaagaatcaattggtctaagatcgagcctaccgagctatccgagaactgcttctggcttagagttaaggaggataaattcgagaacccggatttgtttgcgaagcttgctctcaattttgccactcagatcaaggtacagaagaatgccgaagctctggaggaaaagaaaacagggcccactaaaaagaaggtcaaagaattgcgtatccttgaccctaagaccgcccagaacctgagtatcttccttgggtcttaccgtatgccttatgaggatatccgcaacgtcatcttggaggttaacgaggacatgctctccgaagcgctgatccagaatctcgtaaagcacctgccggaacagaagattttgaatgaattggccgaacttaaaaatgaatatgatgacctgtgcgagcctgagcaatttggagtggtgatgtcaagcgtgaagatgcttcagcctcgactttcttcaattctgtttaagctgacattcgaagagcacatcaacaatattaaaccaagcataattgccgtcacactggcatgcgaagaactgaaaaagtcagagtcctttaatagactcctggagctcgtgctgctcgtggggaactatatgaattctggaagccgaaacgcccagagtttaggcttcaagataaattttctgtgcaaaattcgcgataccaagtctgccgatcagaaaacaactctcctgcatttcatcgccgacatctgtgaagaaaagtaccgcgatatactgaaattcccagaggagcttgagcacgttgaaagcgcctccaaggtgtctgcccagattctgaagagtaatctcgcatcaatggagcagcagatcgtgcaccttgagagggatattaagaagtttccccaggctgagaaccagcacgacaagtttgtagagaagatgaccagctttacgaaaaccgctcgagaacagtacgaaaagctttccaccatgcacaacaatatgatgaaactttacgaaaatctgggcgagtattttatttttgactccaaaacggtcagtatcgaagaatttttcggagacttgaacaattttcgcaccctcttcctggaagctgttagggaaaacaacaaaagacgcgaaatggaagagaagactaggagggccaaactggccaaggagaaagcggagcaggaaaaattagagcggcaaaaaaagaagaagcagctgattgacatcaacaaagagggagatgagactggcgtaatggataatttactagaagcgctgcaaagtggcgccgcctttagagatcggcgcaaacggatccctaggaaccctgtggttaaccacccctgtgcaacccgggcaaatcctaggtccgcgacatag

SEQ ID NO: 114525 - DNA, 3294 bp, synthetic construct
  misc_feature 1..3294: note = Description of Artificial Sequence: Synthetic coding sequence
  source 1..3294: mol_type = other DNA
atggaacagccgggtgcagcagccagcggcgcaggcggcgggtcggaggagcctggcggggggcggtctaataagcgatcagctggtaaccgggccgcaaacgaggaagaaacaaagaataaacccaagctgagggaccgaatcacctcttttagaaaatccaccgttaaaaaggagaaaccgctgatccagcaccccatcgattcccaagttgccatgagcgaattccccgctgcacagccgctctacgacgaacgcagcctgaacctgagcgagaaggaggtcctagatctgttcgaaaaaatgatggaggatatgaatctgaacgaggaaaagaaggcaccactgcgcaacaaagatttcactactaagcgggagatggtcgtccaatatatcagtgccacggctaagtcagtgattagtagccacatcaaggggggtctgaagaacagcaagcacgaatgtaccctgtcatcgcaagagtatgtccatgaacttcgctctgggatttccgacgagaaactgctgaactgcctggaatctttaagagtgtcactcacttctaaccctgtgagttgggtcaacaatttcgggcacgaaggcctcgggctcctccttgacgagctggaaaagctattggacaaaaagcagcaagaaaacatcgataaaaagaatcagtacaagctgattcagtgcctgaaagcgttcatgaataacaagtttggcttacaacgtattctgggggacgagcgcagccttctgctgctggcgcgggccatagaccccaaacaacctaatatgatgacagagatcgtaaaaattctgtccgcgatctgcatcgttggggaggaaaacatcttagataagttactcggtgccattactactgcagccgagaggaacaatcgggaacgctttagccccattgtagagggacttgaaaaccaggaggctctgcagctccaggtcgcctgcatgcaatttatcaatgcactggtgacatcaccatacgaactcgacttccgtattcaccttcggaatgaattcctccgaagtggccttaaaactatgttacccgatctgaaggagaaggaaaatgacgaactcgatatccagctcaaggtctttgatgaaaacaaagaggatgacctgacggaactgagccatcgtttaaacgacatacgcgctgagatggacgatatgaacgaggtgtaccatttgctttataatatgctaaaggacaccgccgctgagaattacttcctgtctatcctccagcattttcttctaattcggaatgattattacatccggccacagtattacaagattatagaagaatgcgtttcccagatcgtgctgcactgttcggggatggaccccgacttcaagtatcggcaaagacttgacatcgacctcacacacttgattgacagctgcgtgaataaagccaaagtcgaggagtccgagcagaaggctgctgaattttcaaaaaaatttgacgaggagttcaccgcgagacaggaagcgcaagccgagctccagaagcgggatgagaaaatcaaggagttggaagccgagatacagcaattgcggacccaggcccaggttttatcgagctcatccggaattccagggccgccagcagccccccctttgcctggcgtgggtcctccacccccccccccagcccctccactgccaggaggggcacctctgcctccccctcctccacccttgccaggcatgatgggcattcctccacctcccccaccccctctcctgttcggcggaccaccccccccgcctccattaggaggtgtcccccccccccctggtatctctctcaatcttccatacggaatgaaacagaaaaaaatgtataaaccagaggtgtcaatgaagagaatcaattggtctaagattgaacccaccgaactaagcgaaaactgtttttggctgagagtgaaggaagataaatttgaaaacccagacttgttcgccaaactggctttaaactttgcgacccagatcaaggtgcagaaaaatgccgaggctctcgaagaaaaaaaaaccggccctacaaagaagaaagtgaaagagctgcgcatcctcgatccaaagaccgcccagaaccttagcatatttctgggcagctaccgaatgccatacgaggacataagaaatgtaatcctggaggtcaacgaagacatgctcagcgaggcccttatccagaacttggttaaacacctgccagaacagaagattttaaatgaacttgccgagctgaaaaacgagtatgatgatctttgtgaaccagagcaattcggggtggtgatgagcagcgtgaaaatgttgcagcccagactatcgtccatactgttcaaacttactttcgaagagcatatcaacaatatcaagcctagtatcattgctgtgactctggcctgtgaagagcttaagaaatctgaatctttcaaccgcctgcttgagttggttctgctggtgggcaactatatgaactctggatctaggaacgcgcaatctcttggtttcaagatcaacttcctgtgtaagatcagagatacgaagagcgccgatcagaagacaacactgctgcactttatcgcagacatctgcgaagagaaatacagggatatcctgaagttcccagaagaactcgaacatgtggagagtgcaagcaaagttagtgcccagattttgaagtccaaccttgccagtatggaacagcagatcgtacacctggagcgggatatcaaaaaatttcctcaggctgagaaccagcatgacaaattcgtggagaaaatgaccatcttcactaagaccgccagggaacagtatgaaaaattatctacaatgcataataacatgatgaaactgtatgaaaatctgggggagtattttatctttgactctaagacagtctctatcgaggagttcttcggggatctgaataacttcaggacgctgtttctagaagccgtgagggaaaataacaagaggcgagagatggaggaaaaaaccagaagggccaaactggcgaaagaaaaggccgagcaggagaaactggaacggcagaagaagaagaagcagctcattgatatcaacaaggaaggtgacgagaccggcgtaatggataacttattggaagccctgcaaagtggcgccgccttcagagaccgtagaaaacgaattccccggaatcccgacaatcggcgggtgccgctggaacggtctaggagccgtcataatggggccattagttccaagtag

SEQ ID NO: 114526 - DNA, 3306 bp, synthetic construct
  misc_feature 1..3306: note = Description of Artificial Sequence: Synthetic coding sequence
  source 1..3306: mol_type = other DNA
atggagcagccgggcgctgccgcatctggggctgggggcggaagcgaggaacctggggggggccgttcaaacaagcgttctgctggaaatcgcgcagctaacgaagaggaaaccaaaaacaaaccaaaactgaacattcaaataaagacattggccgacgatgtgcgcgatcgtattacgagtttcagaaagagcaccgtcaagaaggagaagcccctcattcaacatccaattgattcccaagtagccatgagcgagtttccagccgctcagccactctacgacgaacgtagccttaacctcagtgagaaagaggtgcttgacctcttcgaaaagatgatggaagatatgaatcttaatgaggagaagaaggccccactgcggaataaagactttactacgaagcgtgaaatggtcgtccagtacattagcgcaacggccaaaagcggcggcctgaaaaattcaaagcacgaatgcaccctgtctagccaggagtacgtgcacgaactgagatctggcatctcagacgaaaagcttttgaattgcctcgagtctctgagggtgtctcttacctctaaccccgtctcgtgggtaaacaacttcggacatgaggggttgggacttctgctcgacgaattggagaaactgctggacaagaagcagcaggagaacatcgacaagaagaatcagtacaagctgattcagtgtctcaaggcgtttatgaataacaaattcggcttgcagcggatactgggagacgaacgcagcctgctcctgcttgcccgcgccattgaccctaagcagccgaatatgatgaccgaaatagtgaagattctatccgcgatctgcatcgtcggtgaggaaaatattctcgacaagctcctaggagctattactactgcagccgagcgtaataacagggaacgattttcaccaattgtcgaaggtctagagaatcaggaagcccttcagctgcaggttgcgtgtatgcagtttattaacgctctggtaacatcgccttatgaattagacttccggatccacctgcgaaatgagttcctgagatccggcctcaagaccatgttgccagatctgaaagagaaggagaacgatgaactagacatacagctcaaggtcttcgacgaaaataaggaggacgatctgacagaactttcccacagactaaacgacattagggcagagatggatgacatgaacgaggtctaccacctattatataacatgctgaaggatacggccgccgagaactactttctgagtatcctgcagcatttcctgctcatcaggaatgactactacatacgtccacagtactacaaaattattgaggagtgcgtgagtcaaatcgtgctgcattgcagtggaatggatccggattttaagtatagacaacggctcgacatcgatctcactcacttaattgattcttgcgtcaacaaggcaaaggtggaagaatccgagcagaaagccgcggagttcagtaagaaatttgatgaggaatttaccgctcgccaggaggctcaggctgagctgcaaaagcgggatgagaaaatcaaggaactcgaagccgagatacagcagttacgtactcaagcccaagtcctttcttcgagctcaggcatccccggtccccctgcagcgcctccgctacctggagtgggcccacctcctcctccgcccgctccgcccctgcccggtggagctcctctccccccaccacccccgcccctgcctggaatgatgggtatcccccccccccctccaccaccccttctcttcggcggcccccctcctccccccccactaggcggcgtcccccccccacctgggatatcgctgaacctgccctatggtatgaagcagaagaaaatgtataaacccgaagtctcgatgaaaaggatcaattggtcgaagattgaacctacagaactgagtgaaaactgcttttggcttagagtgaaagaagacaaattcgaaaatcccgacttattcgccaagttggctttaaatttcgccacacagattaaggttcagaaaaatgccgaggccctcgaagagaagaaaaccggccctacaaaaaagaaagtgaaggaacttcgaattctggacccaaaaaccgcccaaaatctgagtatctttcttggcagttataggatgccttacgaagatattaggaacgtgatactggaggtgaatgaggacatgctgtctgaggcgctgattcagaacttagtaaaacacctgcctgagcaaaagatcctcaacgagctcgcagaactgaagaacgagtatgacgatctgtgtgagcccgaacagtttggagtagttatgagcagtgtcaagatgttgcagccccgcctaagttctatcctctttaagctcacatttgaggaacatattaataacattaaaccatctatcatcgcagtgactctggcatgcgaagagctcaaaaaatctgagtcattcaatagactcttagagttggtcctgttggtgggcaactacatgaatagcggctctaggaacgcacagtcgctgggattcaaaatcaactttctttgtaagatcagggacaccaaaagcgcggatcagaagacgacacttctgcacttcattgctgacatttgtgaggagaaatacagggacatcttgaagtttccagaggaactcgaacacgttgaaagcgcatctaaggtttctgctcagattctgaaatcaaatttggcatcgatggaacagcagattgtacatctcgagagagacatcaaaaaatttcctcaagccgagaatcagcatgataaatttgtggagaaaatgaccatctttaccaagacggctcgcgaacagtatgaaaaactgtccactatgcataacaatatgatgaaactgtatgagaacctcggcgagtatttcatattcgattccaagacagtgagtatcgaggaatttttcggggatcttaataattttagaaccctgttcctggaggccgtgcgggaaaacaacaaacgacgcgagatggaagaaaagacccggcgggctaaactcgcgaaggagaaagcggaacaggaaaagttggaaaggcagaagaagaagaaacagctgattgatatcaacaaagaaggcgatgagaccggcgtaatggacaacctattagaagctctgcagtccggagccgcattcagagatagacgcaagcgcattccgcggaatcccgataaccggcgcgtgcctctggaaaggtcgagatctcgtcacaacggagctatctcctcaaagtag

SEQ ID NO: 114527 - DNA, 3312 bp, synthetic construct
  misc_feature 1..3312: note = Description of Artificial Sequence: Synthetic coding sequence
  source 1..3312: mol_type = other DNA
atggagcaacctggagccgccgcttccggcgctggcggcggcagcgaggagcccggaggaggccgatccaataaacggtcagctggaaatagggctgccaatgaagaagaaactaaaaacaaaccgaagcttaatattcagatcaagaccctggccgacgacgtgcgcgatagaattacttccttccggaagagtaccgtgaagaaagaaaaacccctgattcagcaccccatagactcccaagtggccatgtccgaattcccagctgcccagcctctgtatgacgaacgatcactcaatttgagtgaaaaggaagtccttgacctgttcgagaagatgatggaagatatgaacctgaatgaagagaaaaaagcacccctgcggaataaggactttaccactaaaagagagatggtggtgcagtatatcagcgctaccgccaaatccatcgtgggcagtaaggtcacaggcgggctgaaaaactctaagcatgaatgcaccctgtcaagtcaagagtacgtgcacgagttgagatctgggattagcgacgaaaaactattaaactgcctggagagtctccgggtctctctgacgagcaatcccgtgtcatgggtcaacaacttcgggcatgagggtctaggcttgctgcttgatgagctagaaaagctgctcgacaagaagcagcaggaaaatatcgataaaaagaatcagtataagctcattcagtgtctcaaggcctttatgaacaacaagtttggtctccaacgcattctgggtgacgaacgtagcctgctgctgttagccagagcaatcgaccccaagcagcctaatatgatgactgagatcgtgaaaatactgagcgccatctgcatcgtaggcgaggagaacatacttgataagttgctcggcgctattaccacagccgctgagcgaaacaatcgtgaacggttctcaccgatcgttgaaggtctcgagaatcaggaggcacttcagttgcaagtggcctgcatgcaattcatcaacgccttggttacaagcccatacgagttggattttcggatccatttgcggaacgagtttctcagaagcggtttgaagacgatgcttccagacctgaaggaaaaggagaatgatgaactcgatatccaactgaaggtattcgatgagaataaagaggatgacctgaccgagctttcccacagactcaatgatatccgagcggagatggacgacatgaatgaggtctaccacctgttgtataatatgctgaaagatactgcggctgagaattatttcctcagcatactgcagcactttctgctgattcgaaatgattactatatcagacctcagtattacaaaataattgaggagtgcgtgtctcagatcgtcttgcattgtagcggtatggacccagattttaaatatcgacagcggctggatatcgatctgactcatctcatcgactcctgtgtaaacaaggcgaaggtggaagaatccgagcagaaagctgccgaatttagcaagaagttcgatgaggaattcaccgcccgacaggaggcccaggccgaattacaaaagcgtgatgagaagattaaagaactcgaagccgagatccagcagctgcgtacccaggcccaagtcctgtccagtagttccgggatccccggacctcctgcagcacctcccctgcctggggttggtccaccaccacctccacctgccccacccctgcctggcggggccccactgcctccgcctccccccccactaccaggaatgatgggcattccaccacctcctcccccccctttgctgtttggtggtcctcctccaccccctccgctcggaggagtcccccccccacccggcatatcactgaacctcccatacggtatgaaacagaaaaagatgtacaaacccgaggtgagcatgaagaggatcaactggtctaagattgaaccaaccgaactgtcagagaactgcttttggctgcgcgtgaaagaagacaagttcgagaaccccgaccttttcgccaagcttgctcttaattttgctactcagataaaggtccagaagaatgctgaagcactagaggagaagaagaccgggccaacgaagaagaaggttaaagaactacgaatcttagaccctaagacagcacagaatttgtctatctttctggggagctataggatgccctacgaggatattaggaatgtgatcttggaggtgaacgaggacatgctgagtgaagctctgatccagaatctcgtgaaacaccttccagaacagaagatcctgaatgaattagccgagctgaagaacgaatatgacgatctttgtgagccagagcagtttggagttgtcatgtcctccgtcaaaatgctgcagccccgcctgtcatcgatactgttcaaactcacgtttgaagaacacattaacaacattaaaccttcgataatcgctgtaactcttgcctgtgaagaactgaagaaatccgaaagcttcaatagattgctggaactggtgctgctggtagggaattacatgaactctgggagccgcaacgctcagagtctggggttcaaaatcaatttcctgtgtaaaattagggacaccaagtcagccgaccagaagacaacactgctccatttcattgccgatatttgcgaagagaagtatcgcgacatactaaaatttcctgaagaactggaacatgtggagagtgcatccaaggttagcgcccagatattgaaatcaaacttggctagcatggagcagcagattgtgcacttagagagggatattaagaaattccctcaggccgagaatcaacacgataaattcgtggaaaagatgacaatcttcactaagacagcccgagaacaatatgaaaagctgtctacgatgcacaataacatgatgaaactatacgaaaatctgggggaatatttcatattcgactccaagacagtgagcatcgaggaattttttggtgacctcaacaactttcggaccctcttccttgaggccgtgcgtgaaaataacaaacgacgcgagatggaagagaaaactcgaagagcaaaactggctaaagagaaggccgaacaagagaaactggagcgccagaagaagaaaaagcagctgattgacattaacaaggaaggggacgaaaccggagtcatggacaaccttctggaagctctacagtctggagcagccttccgggaccgccgaaaaaggatcccacggaaccctgtcgtcaatcacccgtgtgcaacccgcgccaacccaaggagcgccacctag

SEQ ID NO: 114528 - DNA, 735 bp, synthetic construct
  misc_feature 1..735: note = Description of Artificial Sequence: Synthetic coding sequence
  source 1..735: mol_type = other DNA
atggagcttttcctcgctggacgccgcgttctcgtgactggcgccgggaaagggatcggcagaggcacagttcaggcattgcacgccaccggggctagagtggtggccgtttcccgtacacaggctgacctggattctcttgtccgcgaatgccctgggatcgagcctgtatgtgttgatctgggagactgggaggctacggagagggcacttggctccgtggggccagttgacctactggttaacaatgccgcagtggcgttgctgcagccattcttggaggttaccaaggaagccttcgacaggtcgtttgaggtcaatttgagagcagtgatccaggtctcacagatcgtcgccaggggtctgattgcacgaggtgtgccgggcgcaatcgttaatgtatcttcccaatgctcccagagagcagtgaccaaccactcagtctattgcagtaccaaaggagccctggatatgctgactaaagtgatggcgttggagctgggcccacacaaaattagagtcaatgccgtgaacccaactgtcgtgatgacttccatgggccaggccacatggagcgacccccacaaggccaaaacaatgctgaaccgcattccccttggcaagttcgcagaggtggagcacgtcgtaaacgctattctttttctgctctctgaccgcagtggcatgacaaccggaagtaccctgccagtcgagggcgggttctgggcctgctag

SEQ ID NO: 114529 - DNA, 5769 bp, synthetic construct
  misc_feature 1..5769: note = Description of Artificial Sequence: Synthetic coding sequence
  source 1..5769: mol_type = other DNA
atgaagtctcccgcgctgcaacccttgtccatggcgggactccagctgatgacgccagcttctagccccatggggcccttcttcgggctcccttggcagcaggaggcaatccatgacaacatctatactccacgaaagtaccaggtagagttattagaagcagctctggatcacaacactatagtttgtctgaacactggttctggcaagacatttatcgccgtacttctcacaaaagaattgagctaccaaattaggggcgattttagtcggaacgggaaacggaccgtgttcctggtcaactctgccaaccaggtagcccagcaggtgagtgctgtgaggacccattctgacctaaaagtgggggagtatagcaatcttgaagtaaacgcttcctggactaaagagcggtggaatcaagagttcactaagcatcaagtgctgattatgacatgttatgtggccctaaacgtcttaaaaaacgggtacctcagcctatccgatatcaacctgcttgtgttcgatgagtgccacctggccatcctggatcatccttatcgggagataatgaagttgtgcgagaactgtccgtcctgcccccgtattttgggactgaccgccagcatcctcaacggaaagtgtgatcccgaggagttggaggagaagattcagaagcttgagaagatcctgaagagcaatgctgaaaccgccaccgatctcgtggtcctggaccgatacacatcacaaccgtgcgagattgtggtagactgcggcccattcaccgatcgctccgggctctatgaaaggctcctgatggaactcgaggaggccctcaattttatcaatgactgtaacatcagcgtacactcaaaggaacgtgatagtaccctcatttccaaacagatcctgtcggactgccgagcggttctcgtggtcttggggccctggtgtgccgacaaggtggctgggatgatggtgagggaactgcaaaagtacatcaaacacgagcaggaggagcttcatcgtaaattcctgctattcacagacaccttcctgagaaaaatacatgctctctgtgaggaacatttttcccctgcatcgctggatcttaagtttgtgaccccaaaagtgataaagctgctcgagatcttgcggaagtacaaaccctacgaaaggcaacagttcgagtccgtggagtggtataacaacagaaaccaggataattacgtgtcatggagtgactccgaagacgatgatgaagatgaggaaatagaggaaaaggagaaacccgagacaaatttcccatcacccttcactaacatcctctgcgggataatctttgtggaacggaggtacactgccgtggtgttgaaccgccttatcaaggaagccggcaagcaggatccagaacttgcctacataagtagcaactttatcacagggcacggaattggcaagaatcagccccggaataaacagatggaggccgaatttagaaaacaggaagaggtgcttcgaaaattccgcgctcacgagacaaacctgctgatcgccacatctattgtggaggagggcgtcgatatccctaaatgcaacctcgtggtacgattcgaccttcctacagagtacagatcttacgtgcagtcaaagggacgtgcacgagcacccatcagtaattacatcatgttggcagacacagataagattaaaagtttcgaggaggacctgaagacatataaggcaatcgagaaaattctgagaaataaatgttcaaaaagcgttgacactggagaaaccgacatcgatcccgtcatggacgatgatgatgttttccccccctacgtgttaaggccagatgacggcgggcctcgggtaaccattaacaccgctatcggtcatatcaacagatattgcgctaggttgccctctgatccatttacacatttggccccaaagtgtagaactcgagaacttcctgacggaaccttttactcgacattgtaccttcctatcaatagcccactcagagcctccatcgtcggccccccgatgagttgcgtgagactggcagagagagtagttgctttgatatgctgcgagaaattgcacaagattggtgagctcgacgatcacctgatgccggtggggaaggagactgtaaaatatgaagaggagcttgatctgcatgatgaagaggaaacctccgtgcccgggcggcctgggtccacaaagcggagacagtgttaccccaaggctattcccgaatgcttacgcgacagttatccacgtcccgatcagccttgctatttgtacgtcattggtatggtgctgaccaccccattaccagatgaactgaattttcgaagacgcaaactgtacccacctgaggatacaacacgctgtttcggaattttgacagcgaaacccattcctcaaattcctcacttccctgtatacactaggagcggtgaggttacaatttccattgaactgaagaaatctgggtttatgctgagcctgcagatgcttgagctaattacgagactccatcagtacatcttttcccatatcctcagattggaaaagcccgcgctggaatttaagcccaccgacgcggatagcgcctattgtgttttgccgctgaatgtagtgaatgattcgtctaccttagacatcgattttaagtttatggaagatatcgagaaaagtgaggctcggattggcattccctcaactaagtataccaaggaaacaccattcgtgtttaagctcgaagattatcaggacgcagttattattcctaggtataggaatttcgatcagccacaccggttctacgtggctgatgtatatacagatctcacccccttgtccaaattcccttctcctgagtatgagacctttgccgaatattacaaaactaagtataatctagacctgacaaatcttaaccaacccctactggacgtggatcatacttcatctcggctcaacctacttactcctcgtcacctgaaccagaaaggcaaggccctgcctctgagtagcgcggaaaagcggaaggccaaatgggaatccctgcaaaacaagcagattttagttcccgagctctgcgccattcatcctatccccgcgtctttatggcgtaaagcagtctgcctcccgtccattctctatcggctccattgcctgctgaccgcagaagagctgcgcgcccagacggcctcggatgccggcgtgggcgtccgtagcttgccggctgactttcggtaccccaatttggatttcggttggaaaaagtccatcgattctaaaagctttatcagcattagtaattcctccagcgccgaaaacgacaactactgcaagcatagcacgatcgttcccgaaaatgcagcccatcagggagccaaccggacttccagcttggagaaccatgaccaaatgtcggtgaactgccggaccttgttaagtgagagcccagggaagctgcacgtggaggtcagtgccgatttgacagctatcaacggcctgagttacaatcagaacctggctaacgggagttacgatctagctaatagagacttctgtcagggaaaccaactgaactactacaagcaggaaatacccgtccaacccacgacgagctactcaattcaaaatttatacagttacgagaatcagccacagccatctgatgagtgtacactgctatcgaataagtacctggacgggaacgccaacaagtcgacaagtgacggttcgcctgtgatggcggtgatgccagggactaccgatactatacaagtcttgaaagggcgcatggacagtgagcaatccccaagcattgggtacagttccagaactctgggcccaaaccccggattgatcctgcaggctctgactctgtctaacgcctccgacgggtttaatctggagaggttagagatgctcggtgattccttcctcaagcacgctattacaacctatttattctgcacctatcccgacgctcacgagggaagactgagctacatgaggtcgaagaaagtgtctaactgcaacctgtaccgtctggggaagaaaaagggactgccatctaggatggtggtgagtatcttcgatccacccgtgaactggcttccacccggctatgtggtcaaccaggacaagtccaacactgacaagtgggagaaagacgagatgactaaagattgtatgctagcaaacgggaaattagatgaggattatgaggaagaagatgaagaggaggaatccctcatgtggagagcaccaaaggaagaggctgattatgaagacgattttctggagtatgaccaggaacatatcagattcatcgataacatgctcatgggttcaggtgcctttgtgaaaaaaataagcctctctcctttctctactactgactctgcctatgagtggaagatgcccaagaaaagtagtctgggaagcatgccattctctagcgattttgaggactttgactactcttcctgggatgcgatgtgttacctggacccctctaaggctgtggaggaggacgatttcgttgttggcttctggaatcccagtgaggaaaattgtggggttgatactgggaagcagtccattagttacgatctacatacagagcagtgtatcgcagacaaaagtatagccgattgcgtggaagctctgcttgggtgctacctcactagttgcggggagagggctgctcagctgttcctatgctccctgggtctgaaagttttgccagtcatcaagcgcaccgatcgagagaaagctctttgcccaacacgagagaacttcaattcccagcagaagaacctctcggtctcatgcgccgccgcctcagtggcgagtagccggagctcagttctgaaagacagcgagtacggttgtctcaagattcccccacgctgtatgttcgaccaccccgatgccgacaaaaccctgaatcacttgatatcaggcttcgagaactttgaaaagaagattaactaccgcttcaaaaacaaggcatatctgctgcaggcctttacccacgcaagctaccactataacactattacggactgctaccagagactagagttcctcggcgatgccatccttgactatctgattaccaagcacctttacgaggacccgcgtcagcattccccaggggtcctcacggatctacggtctgcgctggtgaataacactatctttgcttcgctggcagtgaagtatgactaccataagtacttcaaggcagtctccccagagctctttcacgtcattgacgattttgtgcagtttcagcttgagaaaaatgagatgcagggcatggattctgagttgcgacggagtgaagaagacgaggaaaaggaagaagatatcgaagtgccgaaagccatgggcgacatcttcgaatctctcgccggagctatttacatggattctggcatgagcctggaaactgtgtggcaggtttactaccccatgatgagacctctaatcgagaagttttctgctaatgtcccccggtctcccgtgagggaactcttagaaatggaacccgagactgccaagttctctcccgcggaacggacttacgacgggaaggtgagggtgacagtagaagtggttggcaagggcaaattcaagggcgttggaagatcataccggattgcaaaatccgctgccgcaagacgcgccctccggagcctaaaagctaatcagccccaggtcccaaattcttag

SEQ ID NO: 114530 - DNA, 5769 bp, synthetic construct
  misc_feature 1..5769: note = Description of Artificial Sequence: Synthetic coding sequence
  source 1..5769: mol_type = other DNA
atgaagagtccggcccttcagccgctgagtatggcggggctgcagttgatgaccccagccagtagtcccatgggacctttctttggccttccctggcagcaggaggctatccatgataatatctacactccacggaaataccaggtagagctcctcgaggccgccctagaccataatactattgtctgcctcaataccgggtccggaaaaacatttattgccgttctcctcactaaggaactgagctatcagattcgtggggatttttctcgtaacggtaaaaggaccgttttcctggtaaatagcgctaaccaggtggctcaacaggtttccgccgtgcgcacacacagcgacctcaaggttggagagtatagcaatttggaagtcaacgcatcttggaccaaagagcgatggaatcaagagtttaccaaacaccaggtcttaatcatgacgtgctacgtggctcttaacgtcctaaaaaacggataccttagcttgtccgatataaacctgctcgtgtttgatgagtgccatttggcaatcttggaccatccctacagagagatcatgaagctgtgtgaaaattgcccatcctgtccacggatcctgggattgacagcgtccattctcaacgggaagtgtgatccggaagagcttgaggaaaagattcagaaattagaaaagatcctcaagtccaatgcagaaaccgcaactgacctggttgttctcgatcggtataccagtcaaccttgtgaaattgtggtggactgcggccccttcactgatcgctccggcttgtacgagcgactgctgatggaactcgaagaagccctgaatttcatcaacgactgtaacatcagcgtacacagtaaagagagggatagcactttgattagcaaacagatactaagcgattgcagggcagttcttgtcgttttaggtccctggtgcgccgacaaggtggctgggatgatggtgcgggagctgcagaaatatatcaaacatgagcaagaggaactgcacagaaagttccttctgttcacagacacctttctgcgaaagattcacgcattatgcgaggaacacttcagcccagccagcctcgacctgaaattcgtcacacccaaagtgataaaactgcttgaaatactgagaaagtataaaccctatgaaaggcagcagtttgagagtgtggaatggtacaacaatcgtaaccaagacaactatgtcagttggagcgactctgaagacgacgacgaagacgaggagatcgaggagaaggagaaacccgaaacgaacttcccaagtccttttacaaacattctatgcggcatcatatttgtggaaagacggtacactgctgtggtacttaacagactaatcaaggaggccggaaagcaagacccagagctggcctacataagtagcaatttcatcactggtcatgggatcggaaaaaaccagccaaggaacaaacaaatggaggctgaattcaggaaacaggaggaggtgctcaggaagttcagagctcacgagacgaacctgctgatagccaccagcatagtggaggaaggagtcgacatccctaaatgcaatctagttgttagatttgacctaccgaccgagtaccgaagttacgtgcagtctaaggggagagcccgggctcccatttctaactacatcatgttagctgacacggataagatcaaatcatttgaagaggatctcaagacttacaaggcaattgagaagatcctgagaaacaagtgctcaaaatccgtggacactggcgagactgatattgaccctgtcatggatgacgatgacgtgttcccaccatacgtgctccgaccggatgacggcggacccagagtgacaatcaacaccgcaatcggacatattaatagatactgcgcccggctcccctccgacccctttacgcacctggcacctaaatgccgtactagggaattgccagacggcactttctattcaaccctatatctgcctattaattctccactgcgggcatcaatagtgggtcctccgatgtcctgcgtgagattggctgaacgtgtggtggcactgatctgctgtgaaaagctccacaagatcggtgaactggacgatcacctcatgcccgtaggaaaggagaccgttaaatacgaagaggagcttgatctccacgacgaggaagagaccagtgtccctggcagaccagggtcgacaaagagacgacaatgctaccccaaagctatcccagagtgcctgcgtgattcttacccaaggccggaccaaccctgttatctgtacgtgataggtatggttttgacaactccactccccgatgagctcaacttccgtagacgcaagctctatcctcctgaggatacgacccgctgctttggcatcctcacggcaaagcccattccccagatccctcactttcctgtctacactaggagcggagaagtaaccatctcaatcgagctgaagaaaagcggtttcatgctgtcactacagatgcttgaactcatcacaagactgcaccagtacatcttctcccatatactacgtcttgaaaagccagcactggagttcaaacctaccgacgcagactccgcatactgcgtgttgcccctgaatgtcgtgaatgactcaagcactcttgacattgacttcaagttcatggaagatatagaaaaatcggaagccaggattggcattccgagcacaaaatatacaaaagaaacaccctttgtctttaagttggaagactaccaggacgccgtgatcattcccagataccgcaactttgaccagccccatcggttttacgtcgctgacgtgtatacggatttaacacctctaagtaaattcccatcccctgagtatgagacgttcgcagaatactataagaccaagtacaatctggatctcactaatttgaatcagcctctgctcgacgtggatcatacttcgtcaagactcaacctgctcacacccaggcacctcaaccagaagggcaaagcattgccactgtccagtgctgaaaagagaaaggccaaatgggagtcactgcaaaacaaacaaatcctagtgcccgagctttgtgctatccaccctattccagcctctctgtggagaaaggcagtatgcctgccatcaatcttgtatcgattgcattgcttgctcacagcagaggagctgcgagcccaaaccgcatctgacgctggcgtgggcgtacggtccctgcctgccgactttagataccccaacctggatttcggttggaagaaatccatagactctaagtcctttatctctatctcgaattcctcctctgctgaaaacgacaattactgcaaacactccacgattgttcctgagaatgcagctcatcagggagctaatcgaacttcatccctggagaaccacgatcagatgagtgttaactgtagaacacttctctcggagtctcctggcaaacttcatgtggaagtgtcagcggatctgactgctattaacggcctctcatataaccagaatctagcgaacgggagctatgatctcgcgaatagagacttctgccagggtaatcaactgaattactacaaacaagaaatccccgttcagccaaccacatcctactctatccagaacctttattcctacgagaatcaaccacagccttcagatgagtgcacactcctatctaacaaatatctcgacggaaacgcaaataagagcacctccgatggctctccagtcatggcagtgatgcccggtaccaccgacaccattcaggtgcttaaaggaaggatggattccgagcagagccctagtataggatattctagccgcacccttggccccaacccggggttaattttgcaggcactcactctttccaatgccagcgacggattcaacctcgagcgactggagatgctgggcgattcgttcttaaaacacgctatcacgacgtacctattttgtacttacccagatgctcatgaaggccggctgagctatatgagaagcaagaaagttagcaactgcaacctgtaccgactgggaaagaagaagggcttaccgtcccgaatggttgtgtctatctttgatccacctgtaaattggttgccacctggatacgtcgtcaaccaggataaatccaatacggataagtgggagaaggacgaaatgactaaggactgcatgctcgctaacgggaaattggacgaggactatgaagaagaggatgaggaagaggaatctctgatgtggagggcccccaaagaagaagccgactacgaagatgatttcctggagtacgatcaggaacacattcgtttcatcgacaatatgctgatgggctccggagcattcgtcaagaagatcagtttgtcacccttcagtactacagattccgcatacgagtggaagatgcctaagaaatcttccctcggtagtatgccattctctagtgatttcgaagacttcgattacagcagttgggatgctatgtgttacttggaccccagcaaagccgtggaagaggatgattttgtcgtaggattctggaatccttccgaagagaactgcggcgtggacaccggaaagcagtccatcagctatgacctgcacactgaacagtgcattgctgataagtctatagcggactgcgtggaggctctgctgggctgttacctcacatcttgtggcgagcgggctgctcagttgtttctctgttcactgggacttaaagtgcttcctgttatcaaacgcacggacagggagaaggccttgtgccctacgcgcgagaactttaattcacaacagaagaatctgtctgttagttgtgccgcagcatcagtggcgagtagccgtagctctgtgctgaaggattccgagtacgggtgtctcaagataccaccacgctgtatgttcgatcatcccgatgctgacaagacactcaaccacctgataagcggcttcgaaaatttcgagaagaagattaattatagattcaagaataaggcttatctgctgcaggcttttactcacgctagctaccactacaatactatcaccgactgttatcagagactggaattcctgggcgatgcaatcctggactatctgatcacaaaacacctgtatgaggatcccagacagcacagccccggtgtgcttaccgatctgagaagtgcactcgttaacaacactatcttcgccagcctggcagtaaaatacgactatcataagtatttcaaagccgtgtcaccagagctgttccatgttatcgacgacttcgtgcagtttcagctggagaagaacgaaatgcaaggaatggattccgagttacggcggagtgaggaagatgaggaaaaggaagaagacatagaggtccccaaggcgatgggggacatctttgagtcattggccggagccatatacatggattcgggcatgagccttgagaccgtttggcaagtctactacccgatgatgcggccgctgatagaaaagttttccgcaaatgtgccgcggagtcccgtccgtgaattgctggagatggaacccgagaccgccaagttcagtccagccgagaggacctacgacggcaaggtccgggtgacggtcgaggttgttggaaagggaaaattcaagggcgtcggccggagctataggattgccaagtcggcggcagcgcggagggccctccgaagtctgaaagccaatcagccacaggtgcccaattcttag

SEQ ID NO: 114531 - DNA, 5769 bp, synthetic construct
  misc_feature 1..5769: note = Description of Artificial Sequence: Synthetic coding sequence
  source 1..5769: mol_type = other DNA
atgaagtctcctgccttgcagcctctgtccatggccggtttacagctaatgactcccgccagttcgccaatgggaccttttttcggcctaccatggcagcaagaggctatacacgacaacatctacacccctcggaaataccaggtcgaactgttggaggctgccctcgaccataacaccattgtgtgtttgaatacaggctccggaaagacattcatagctgtgctgctcaccaaggagctgagttatcagataagaggagacttctccaggaacgggaagaggaccgtgtttctggtgaactccgcaaatcaggttgcccagcaagtaagcgccgtacgaacgcacagcgacctgaaggtgggcgagtattcgaacctagaagtgaacgcctcctggacgaaagaacggtggaatcaggaatttaccaaacatcaagtcctgatcatgacatgctacgtggctctgaatgtactcaagaatgggtacctgtctttatccgacatcaaccttctggtcttcgatgagtgtcacttagcaatcttggaccatccttaccgcgagatcatgaaattgtgtgagaattgcccttcctgccccaggatcctgggcctcaccgcgtctattctgaatggcaagtgcgaccctgaagagctcgaagagaagatccagaagcttgagaagatcctcaaatccaatgctgagactgccactgacttggtggtactggataggtacacctcccagccctgtgagatcgtcgtcgactgcggcccattcactgaccgcagcggcctgtatgagagactgcttatggagcttgaggaggcactgaattttatcaacgattgtaacatttcagtgcacagcaaggaaagggactctaccctgattagtaaacagatcctcagtgactgcagagccgtcttggtggtcctaggaccctggtgcgccgacaaagtggccgggatgatggtgcgtgagctgcaaaagtatattaagcatgagcaggaagaactccaccggaagttcctgctgttcaccgacacatttctgagaaagattcacgccctgtgtgaagagcacttctcacctgcctcacttgacctcaagtttgtgacacctaaggtaattaaactcttggaaatattgagaaaatacaagccctacgaacggcagcagtttgaaagcgtggaatggtacaataaccgcaatcaagataactatgtctcttggtccgacagcgaagacgatgacgaggacgaggagattgaggaaaaagagaaaccagagactaattttccaagcccattcactaatatcctgtgcggcataattttcgtggagaggcgatataccgcagtggtcttgaaccgacttatcaaagaagctggcaaacaagaccctgagctggcatacatttcatcaaattttattactggccatgggatcggaaagaaccagccaagaaataagcagatggaagcagaatttagaaagcaggaagaggtattgagaaaattccgggcacacgaaaccaacttactgattgcaacaagcatagtcgaagaaggagtggatatccctaaatgcaaccttgtggttcggtttgatctgcccacagaatacaggtcctatgtgcaaagcaaaggccgtgctcgtgctcccatctctaactacattatgctagccgacaccgacaaaataaagtcttttgaagaagatttgaaaacttataaggccatcgagaagattcttcggaacaaatgctctaagtctgtggacacaggagagacggatatagacccagttatggatgacgatgacgtctttcccccttacgttctcaggccagatgacgggggcccacgcgtaaccattaacaccgcaataggccacatcaatcgatactgcgctaggttacccagtgacccatttacgcacttagccccaaagtgccgtacccgtgaactgcctgacggtacattctacagtactctgtacctgcctataaacagtccactccgtgcaagtatcgttggcccccctatgagctgcgtccggcttgccgaacgcgttgtggccctcatttgctgtgagaaacttcacaaaatcggagagttggatgatcacttgatgcccgttggcaaggaaacagttaagtacgaagaggagttagatctccacgatgaagaagagactagcgtaccgggacggcctggttccacaaaaaggcggcaatgctaccctaaggcaatccccgagtgtctgagggactcctacccacgacctgatcagccctgctacctctacgtcattggtatggttttaacaaccccgttgcccgacgagctcaattttagaaggcggaagctatatcccccagaagatacaacgaggtgctttgggatcctgaccgccaaaccaatccctcaaatcccacacttccccgtgtatactcggtccggagaagtgacaattagcatcgagctcaagaagagtgggtttatgctgtccttgcagatgttggagctcatcacgaggctgcaccagtacatcttttctcatatacttcgcctcgagaagccggcactggagtttaagcctactgacgccgactctgcgtactgcgtgctcccactgaacgttgtcaacgattccagcaccctagacattgacttcaagttcatggaggatattgagaagagcgaagcgcgcatagggataccttccactaagtatacaaaggagactcctttcgtattcaagctggaggattatcaggatgctgtgattatcccccggtaccggaacttcgatcagcctcaccgcttttacgttgcggatgtctatacagatttaacaccactttccaaattcccatcgccggaatatgagaccttcgcggaatattacaagaccaaatacaatctcgatcttaccaatttaaaccaacccctcctggacgtggatcacactagttcaaggctgaacttattgaccccaagacatctcaaccagaaggggaaagcacttcctctaagttccgccgaaaagagaaaagcaaaatgggagtcactacaaaacaagcagatcctagtgccagaattgtgcgcgatccaccctattccagccagcttatggagaaaggccgtctgcttaccttcaatcctgtaccggctccattgcttattgacggccgaggagctcagagcccagacggctagcgatgcgggagtgggggtgagaagccttcccgcagattttagataccccaatctagactttgggtggaaaaaaagcattgattccaagagcttcatcagcatctccaatagcagctctgccgaaaatgacaactactgcaaacactcaacaattgtgcctgagaacgcagcccaccagggcgctaaccgcacatcatccttggagaatcacgatcagatgtctgtaaattgcaggactcttctgagcgagtctccaggcaagttgcacgtggaggtctccgctgatctgaccgcaattaatggactatcatataatcagaatcttgcaaatggcagctacgaccttgccaatcgcgacttctgccaagggaaccaactcaactactacaaacaggaaatcccggtgcagccgaccaccagttactcgattcaaaatctttactcttacgagaaccaacctcaacccagcgacgagtgtaccctgctctccaataagtacctggatgggaacgcgaacaagagcacttcagacggtagcccagtgatggctgtgatgcctggtaccacagacacaattcaggtgctaaaaggccggatggattctgagcagagtccttccataggttatagtagcagaactctgggcccgaatcccggcctgattcttcaggcactgacgctgtccaacgcctccgacggatttaatcttgagcgtctggaaatgctgggagatagcttcctgaagcatgcaatcaccacatacctcttctgtacataccccgacgcccatgaggggcggctgtcatacatgaggagcaaaaaggtctctaattgcaatctgtatagactagggaagaagaaggggttgcccagccgaatggtggtctcaatcttcgaccctccagtgaattggctgccccctggctacgtcgtgaaccaggacaaatccaacaccgataaatgggagaaggacgagatgaccaaggattgcatgctggccaatggcaagcttgacgaggactatgaagaggaagacgaagaagaagaatcattgatgtggcgcgcaccaaaagaggaagcagattacgaggatgatttcttggagtatgaccaggagcacattcgctttattgataatatgctgatgggctctggcgcattcgtgaagaaaatctctttgagcccgttttcgaccacagactcggcctacgaatggaaaatgcctaagaagtcaagtctggggagtatgccattttcctcagattttgaagatttcgattactctagttgggatgctatgtgttatctggatcccagtaaagcagtagaagaggatgactttgtggtgggcttctggaatccaagcgaagagaactgcggagtcgacactggcaagcaatcaatttcctacgatctgcacaccgaacagtgtatcgcggataagagcattgcggattgcgtcgaggccctcctgggatgctatctgactagttgcggggaacgggcggcccagctgtttctatgcagcttaggtttaaaagtgcttcccgttatcaagcggactgacagggaaaaagctctgtgccctacccgagaaaattttaacagccaacaaaagaacctctccgtaagttgtgccgcggcaagcgttgcaagttcgcggtccagcgttctgaaggacagtgagtacggttgcctgaagatcccaccacgatgtatgttcgatcatccggatgctgataaaacacttaatcacctcattagcggtttcgaaaatttcgaaaagaagatcaactatcgcttcaagaataaggcttacctgctgcaggcattcactcacgcatcttatcattataacaccattactgattgttaccaacgcctggaatttctgggtgacgccatactggattacctgattacaaaacacctgtacgaggatccccgtcagcacagccctggggtgctcaccgatttgagatctgcacttgttaacaacacaatcttcgctagcctggcagtcaagtatgactatcacaaatactttaaagccgtttccccggaactattccatgtcattgacgatttcgtgcaattccagctcgaaaaaaacgagatgcaggggatggacagcgaactcaggaggtcagaagaagatgaagagaaggaagaggacatcgaagtgcctaaggcgatgggggacatcttcgagtccctagccggcgctatttacatggattctggaatgtctttggagacagtgtggcaggtctattatccaatgatgagaccactgatcgaaaaattcagtgccaacgttccccgcagtcctgtcagagagcttcttgaaatggagcccgagactgccaagttttcccctgctgagcgcacatacgatgggaaggtcagggtgactgtggaagtggtgggaaaagggaagtttaagggtgtcggtcgctcctaccggatcgctaaatctgccgcggcacgaagagcactgcggagcctgaaggccaaccaaccacaggtgccaaattcctag

SEQ ID NO: 114532 - DNA, 5769 bp, synthetic construct
  misc_feature 1..5769: note = Description of Artificial Sequence: Synthetic coding sequence
  source 1..5769: mol_type = other DNA
atgaagtctcccgctctgcagcctctttccatggccgggctacagctcatgactcccgccagtagcccaatgggccctttctttggcctgccatggcaacaggaagctatacatgataacatatacacgccccgtaaataccaagtcgagttactggaagccgctctcgaccataacactatcgtgtgtctaaatactggaagcggaaagacattcatagccgtgctgttaactaaggagctgtcctaccagatccgaggggacttttcccgaaacggcaagaggactgtgtttctggtgaacagtgctaaccaagttgctcagcaagtgtccgcagtccggacgcattctgatttgaaggtgggagagtacagcaatctcgaagttaatgccagctggaccaaagagcggtggaaccaggaattcacgaagcaccaagttctaattatgacctgctacgtcgccctcaatgtgctcaagaacggatatctgtccttgtcagacatcaacctgcttgtattcgacgagtgccacttggcaattctcgaccacccgtatagggagatcatgaaactctgcgagaattgtccgagctgccctcgtattctgggactcacagccagtattctcaacgggaagtgtgatccggaggagctcgaagaaaaaatccagaagttggaaaaaatcctcaaaagtaatgctgagacggccactgacttggtggtgctggacaggtacacctctcagccttgtgaaatcgtcgttgattgtgggccatttactgatcgctccggcttgtacgagaggctcttgatggagttagaagaagcacttaatttcattaacgactgtaacattagcgtgcacagcaaagaaagggattctaccctgatttctaagcaaatactatccgattgccgggcagtgctggtagtcctgggcccatggtgcgccgataaggtggccggtatgatggtccgcgagttgcagaaatatatcaaacatgaacaggaggaacttcatagaaaattccttctgtttaccgacacatttttgaggaagatccacgccctgtgtgaagaacacttctcccctgcatctcttgatttgaagtttgttacccctaaagtgattaagttactggagatcctcagaaagtataagccttacgaaaggcaacaattcgagagcgttgagtggtacaataatcggaaccaagacaactacgtgtcatggagcgattctgaggatgatgatgaggacgaagagattgaggagaaagaaaaacctgagaccaatttcccctctccattcacaaacatcttgtgcggcatcattttcgtggaacggcgatataccgcagtggttcttaatcggctgatcaaggaggcggggaagcaggaccccgagttagcctacattagcagtaatttcattaccggacatggcattggcaaaaaccaacctcgcaataagcagatggaggccgagttcagaaagcaagaggaggtgctgaggaaattcagagcgcacgaaacaaacctgttaatcgccacatcaattgtggaagaaggggttgatataccgaagtgcaatctggtagtccgcttcgatctacccacagagtatcggtcatatgtccaatctaagggccgggctcgggcacctatctctaactatatcatgctagccgatacagataagatcaagtcctttgaagaggacctgaaaacatataaggccatcgaaaagattctgagaaacaaatgcagcaagtctgtagacaccggtgaaactgacattgacccagttatggatgacgacgatgtttttcctccatacgtcctcaggccagatgacggaggccctcgggtcaccatcaacactgccattggccacataaaccggtactgcgcccgcttgccttccgatccctttacacatctggccccgaagtgtcggactcgggagttgccagacgggaccttttatagcactttgtacctcccaatcaattccccactgagggcctccattgttggccctcctatgtcttgcgttcgattggccgaacgggttgtggcactgatttgctgcgaaaagctccacaaaattggagagcttgacgatcatctgatgcctgtcggcaaagagactgtaaagtatgaggaagagctcgacctacacgatgaggaagaaactagcgtgcccggtaggccaggatctacaaagcggaggcagtgctaccccaaagctatccccgaatgtctgcgagattcctacccgcgacctgaccaaccttgctatctttatgttataggcatggtgctgacaacccctctgccagacgaactcaacttcagaagacgtaagctgtaccccccagaagacacaaccagatgtttcgggattttgacggctaagcccatcccacagattccgcacttcccagtttacacgcggagcggagaggtgacaatctccatagaactaaaaaagagcggctttatgctatctctacagatgctggagctgatcactcgcttacaccaatacattttttcccatattctccgcctagaaaaacccgccctggagtttaagccaacggacgccgactccgcatattgtgtgctcccgttaaacgttgtgaatgatagcagcacactcgatatcgactttaaattcatggaggatattgaaaaaagcgaagctagaattgggatccccagcaccaagtatacaaaagagacacccttcgtatttaagctggaagattatcaggatgccgtgatcatcccccgttatcgaaactttgatcagccacaccggttctacgttgccgatgtttacactgatcttacgcctctgtcgaaatttccgagtcccgaatatgaaaccttcgccgaatactacaagaccaaatacaatttggatctgaccaaccttaaccagcccctgctcgatgtcgatcacacctcttcccggctcaatctcctgactcccagacatctgaaccagaagggcaaggcactccctctgagctccgcagaaaagcgtaaggccaaatgggagtctctgcagaacaagcaaattttagtaccagagctgtgtgcaattcaccccattcctgcatcactctggagaaaagctgtctgtctgccatctatcctctacaggttacattgtctgttgactgccgaggagctgagagcacagactgcttctgatgccggcgtgggtgtccggtctctacccgccgacttcaggtatcccaacctagatttcggctggaagaaatccattgatagcaaaagtttcataagcataagcaacagttcgtccgcagaaaacgataactattgtaaacacagtaccatcgtccccgagaatgctgcacaccagggggccaatcgcacatcttcacttgaaaaccacgaccagatgagtgttaattgccgcactctgctatccgaaagccccgggaaacttcacgttgaagtatccgctgatttgaccgccattaatggcctgtcttacaaccagaacctggccaatggcagctacgatctagccaaccgcgatttttgccaggggaaccagttaaattattacaaacaagaaatccccgttcagccgactacttcctattctatccagaacctgtactcctacgagaatcagccccagccctccgacgagtgtaccctgcttagtaacaagtacctcgacggtaacgccaataagtcaacatccgacggctcacctgtgatggccgtgatgccagggacaactgatacaatccaggtcttaaagggaagaatggactccgaacagagtccaagcataggctatagctcacggacgctgggaccgaatccaggactgattctccaggccctgacactgtcaaatgcatccgacggcttcaacctcgagcggctggagatgcttggggactccttccttaaacacgccatcaccacttatctcttttgtacctaccctgatgcacacgagggccggttaagctatatgcgttcgaagaaggttagcaactgcaacctttatagattgggaaagaaaaaaggactcccatcacggatggtcgtcagcatttttgaccctcctgtgaattggctgcctcccggctacgttgtgaatcaggataagtccaacactgacaagtgggaaaaagatgagatgacgaaggactgcatgctcgccaatgggaagctcgatgaagactacgaagaagaggatgaggaggaggaaagtttaatgtggcgagcgcctaaggaggaggctgattatgaggacgacttccttgagtacgaccaggaacatatccgattcattgataacatgcttatgggatctggggcttttgtgaagaagatctcactcagcccattctcaactaccgactccgcctacgagtggaaaatgcccaaaaagtcatctctggggtctatgccctttagttccgacttcgaggacttcgattatagcagctgggatgccatgtgctaccttgacccatcgaaggcagtggaggaagacgatttcgtggtcgggttttggaatccgagtgaggagaactgtggggtggatacagggaaacagtcgatcagctacgaccttcacactgaacagtgcatcgctgataaatctattgctgattgcgtcgaagcacttctaggctgttacctcacttcctgcggagagcgtgctgcgcaactgttcctgtgttccttaggattgaaggtcctgcctgtgattaaacgcaccgaccgggaaaaggcattatgccctacgcgtgagaattttaattcacagcagaaaaatctgagcgtctcttgtgccgcagcaagcgtcgcatcgtcccgtagtagcgtgttaaaagactcagaatatggatgcctcaagatcccccctcggtgtatgtttgatcatccagacgcagacaagactctgaatcacctcatatcggggttcgagaacttcgaaaagaagataaactacagatttaagaacaaggcgtacctgctacaggccttcacccatgcgtcctatcattataacaccattacagattgttaccagcggctggagttcttaggagacgctatcctggattatttgataacgaagcatctctatgaagatccgcggcaacatagccctggtgtgctgacggatttacgatccgctctggttaataacacaatattcgctagccttgcggtcaagtacgactaccacaaatatttcaaagctgtgtcccccgaattgtttcatgtcatagacgacttcgttcagtttcagcttgagaaaaatgagatgcagggcatggacagcgagctaaggcgatccgaagaagacgaagaaaaagaagaggatatagaagtcccaaaagccatgggcgatattttcgaatctctggccggggctatctacatggacagtggtatgagcctagaaaccgtatggcaagtctattaccccatgatgagacccctaatcgagaagttctctgctaatgtgcctaggagtcccgtcagagaactgctggagatggagccagagacggccaaattttctcccgcagaaagaacttacgacggaaaggtacgcgtcacggttgaggtggtcggcaaagggaagttcaagggtgtgggaagatcttaccgcattgctaaatctgcagctgcacggcgggcactgcggtcactgaaggccaatcagcctcaggttcccaactcctag

SEQ ID NO: 114533 - DNA, 213 bp, synthetic construct
  misc_feature 1..213: note = Description of Artificial Sequence: Synthetic coding sequence
  source 1..213: mol_type = other DNA
atgaaatcaccagcactgcaaccgctttcaatggctggtctgcagctcatgacacccgcaagtagtccaatgggtccgttcttcggactcccttggcagcaagaagccatccatgataacatctacacccctagaaaataccaagtcgaactgctcgaagcggcactcgaccacaatacaatagtttgtctgaacaccggcagcggaaagtag

SEQ ID NO: 114534 - DNA, 213 bp, synthetic construct
  misc_feature 1..213: note = Description of Artificial Sequence: Synthetic coding sequence
  source 1..213: mol_type = other DNA
atgaaaagccctgcattgcagccattatccatggctggactgcagttaatgacgcccgcgagctctcctatgggtccattcttcggactgccttggcagcaggaggccatacacgataacatatatactccacgaaaatatcaggtggaactcttagaagctgctctggaccataacactatcgtgtgcctcaacactggctctggtaagtag

SEQ ID NO: 114535 - DNA, 5490 bp, synthetic construct
  misc_feature 1..5490: note = Description of Artificial Sequence: Synthetic coding sequence
  source 1..5490: mol_type = other DNA
atgaaaagccctgctctccagcccctttccatggctggactccagctcatgaccccggcctcttcacccatgggaccttttttcggtcttccctggcagcaggaagccatccacgataatatctacacccctaggaagtaccaggttgagctgcttgaggcggctctcgatcataataccatcgtctgcttgaacaccggctctggtaagacattcatcgccgtgcttctgactaaagagcttagttatcagattagaggagatttctcgcggaatgggaaaaggactgtgttcctcgtgaatagcgctaaccaggtggcccagcaggtcagtgctgtgagaacacactccgaccttaaagtgggagagtatagcaatcttgaagtcaatgcatcatggaccaaagaacgttggaatcaagaattcacaaaacaccaggtgttaatcatgacctgctacgtagcactgaacgtgctcaaaaatggctacctttctcttagtgatatcaatctcttagtgtttgacgagtgccatctggctatactggaccacccttatcgtgaaataatgaagctgtgcgagaattgcccttcctgccctcgcatcttaggtctgaccgcttccattctcaacgggaagtgcgatcctgaagagctcgaggagaagatccagaagttagagaaaatacttaagtctaacgccgagactgcaacggacctggtggtcctggacagatatacaagccagccatgcgagatagtggtggattgtggacccttcactgacaggtccggcctgtatgagagactactcatggagctggaggaagctttgaattttatcaatgattgcaacatctctgtgcattccaaagaaagggattctacactcatttcgaagcagatcctcagtgactgtagagctgtgctggtagtgctcggcccatggtgtgccgacaaggtcgctggcatgatggtgagagaactgcaaaagtacattaaacacgagcaggaggagctacaccggaagttcttgctcttcactgatacattcttacgcaagattcacgccctgtgcgaagaacacttcagccccgccagcctcgacttgaagttcgtgacccccaaggtgatcaaactgcttgagattctgcgcaaatacaagccttatgagaggcaacagtttgagagcgtggagtggtataacaatagaaatcaagataactacgtctcctggtctgacagtgaggacgatgacgaagatgaggagattgaggagaaggaaaagcccgagaccaactttccctccccatttactaacatcctgtgtggcattatcttcgttgagcgccggtacacagccgtggtgctcaatcggctgattaaggaggctggaaagcaggaccccgagcttgcttatatcagctctaatttcatcacaggacatggtatcggcaaaaaccagcctcgaaacaaacaaatggaggccgaatttcggaaacaggaagaagttctaagaaagttccgcgctcacgagacgaatctgttaatagcgacctcaattgttgaggagggcgttgatattcctaagtgtaaccttgtagtgagatttgatttgcccacagagtaccggtcatatgtgcagtcaaagggaagagctagagctcctatctcaaactacataatgctagctgatacagataaaatcaagtccttcgaagaggatctgaagacctataaggctatcgaaaagatcttgcgcaataagtgcagcaagtccgtggatactggggagaccgatattgatcctgttatggatgacgatgatgtatttcctccctatgtcttgcgcccagatgatggcgggccgagagtcaccatcaacaccgctattggtcacattaatcgatactgtgctaggctgcctagcgatccctttacacatctcgccccaaagtgtcgtacgcgtgagctccctgatggaactttttatagtaccctttatctgccaatcaattctcccctacgcgcttcaattgtggggcctcccatgagctgcgtcagattagctgagcgggtagtagctttaatctgttgcgaaaagctacacaagatcggcgagttagacgaccatctgatgccagtaggaaaggagactgttaagtatgaggaggagctcgacctccatgacgaggaggagacgagcgtccctggccgacccgggagtaccaagcgacgccagtgctatcctaaggcaatcccggagtgcctgcgagactcatatcctcgcccggaccaaccgtgctacctctacgttatcggaatggtactcactacccccctcccagatgaattgaattttcggcgaagaaaactttacccgcctgaggataccacacgctgtttcggaatccttaccgccaagccaattcctcagatcccacacttccctgtttatactagatcaggggaggtgacgatatctattgagctcaaaaaaagcggatttatgctgtctcttcaaatgctagagctgattactcgactgcatcagtacattttctcccatattctgaggcttgaaaagccagcgctggagttcaagcctaccgatgcagattccgcgtactgtgtgttgcccctcaacgtggtgaacgacagtagcacactggatatagacttcaaattcatggaggacatcgagaagagcgaggcccgtataggcatcccttccacaaaatacaccaaagagactccatttgttttcaaacttgaggactatcaggacgccgttataattccaagataccgcaactttgaccagcctcacagattttatgtagccgacgtctacaccgatctgacacctttgtctaagtttccatcccctgaatacgaaactttcgcggagtattataaaactaaatataacctcgatctgacgaaccttaatcagcctctgctggacgtggaccacacatccagccgcttgaacctcttgacaccccgtcacctgaatcagaaaggaaaggcactgcccttatcgagcgcagaaaagagaaaggcgaaatgggaatcactccagaacaagcagattttagtccccgagctctgtgcgatacaccctatcccagcatcactgtggagaaaggccgtgtgtttgccatcaattctctatcggctccactgtttgctgactgccgaagagctccgggcccagactgcctctgatgccggagtcggcgtgcgcagccttcctgcagattttagatacccgaatctagacttcgggtggaaaaaaagcatcgatagcaaatcctttatttctatttctaactcgagttcagcagaaaacgacaactactgtaaacacagtactatcgtgcctgagaacgcagcacatcagggggcaaacagaacatccagcctagagaaccatgatcagatgagcgtaaactgccgtactctgttaagtgaaagcccgggcaagctacacgtggaagtgagcgcagatcttaccgccattaatggtctgtcctacaaccaaaatctggccaacggctcatacgatttggctaacagggatttctgtcaaggtaatcagctcaattactacaaacaggagatccctgttcaaccaaccaccagttattccattcaaaacctgtacagctatgaaaaccagcctcaaccaagcgacgaatgcaccctactgtccaacaagtatctcgatgggaacgcgaataagagcacctctgacggatctcccgtgatggctgtgatgcccgggacaactgatactatccaggttctgaagggtaggatggacagtgagcagagcccaagtatcggatattcttctaggactctgggccctaacccagggctaatcttgcaagctctgacactgagtaacgcctcggacggatttaatctcgagagactagagatgcttggggatagtttcctgaagcacgcaatcactacctatctgttctgcacgtatcctgatgcccatgagggacgcttgtcttacatgcgcagtaaaaaagtgagtaattgcaacttgtacagactggggaagaaaaaaggccttccctcaaggatggtggtgagcatttttgacccgccagtaaattggcttcccccgggctacgtggtgaatcaggacaagtcgaacactgataagtgggagaaggacgagatgaccaaagactgcatgcttgccaacggcaagttggatgaggactacgaagaagaggatgaggaggaggaaagtctcatgtggcgagcccctaaagaagaagctgactacgaggatgatttccttgaatatgatcaggaacatatcagattcatagataatatgctgatgggtagcggtgctttcgtcaaaaaaatttcgctgagcccgtttagcactacagacagcgcttacgagtggaagatgcccaaaaaaagttccttgggatctatgcctttttcctcggactttgaagattttgactactcttcttgggatgcaatgtgttacctggacccttcaaaggccgtggaagaagatgacttcgtggtgggattttggaatccatccgaggaaaactgcggggtggacaccggcaaacagtccataagttatgacttgcataccgaacaatgcattgccgataagagcattgccgactgcgtggaagcactgctaggatgttaccttacatcttgcggcgagcgggccgcacagctgttcttgtgttcgctgggacttaaagttctgcctgttatcaagcgcaccgatagagagaaggccctgtgtcccacccgtgagaattttaacagtcagcagaaaaatctatccgttagctgtgctgcggcatccgtcgcctcctcacgaagttcagtgttgaaagactcagagtacggatgcctgaagatccccccgaggtgtatgtttgatcatcccgacgcagataagacgctcaaccatcttatctccggctttgaaaactttgagaaaaaaatcaattatcgctttaagaataaagcgtatctgcttcaggcgtttacccacgcttcatatcactataatacaattacagactgctatcagcgcctggagttcctcggtgatgcaattctcgactacctaatcacaaaacacttgtatgaagaccctagacaacacagccccggggtgttaaccgatctccgtagcgccctggtcaacaacacaattttcgcctcactggctgttaagtacgactaccataagtactttaaggctgtgagccccgagctcttccatgtgattgacgactttgtgcagttccaactggaaaaaaatgagatgcaaggaatggacagtgagaagtcattcctgcaaatgtaccccgtgccattgtgtgagaattgccttaaatggaatcagaagctcccgaacctcgcgcggctgcgcgagctcacaacagggaggagcgaaagtctctggaaatag

SEQ ID NO: 114536 - DNA, 2463 bp, synthetic construct
  misc_feature 1..2463: note = Description of Artificial Sequence: Synthetic coding sequence
  source 1..2463: mol_type = other DNA
atgctcgcttgggaatctgatcacttcctgcggatcctagctgagaacgataactattgtaaacattccaccatagtccccgaaaacgccgcgcatcagggggcgaatcgtacaagcagtctggaaaatcacgatcaaatgtccgtgaactgccggaccctactctcagagtccccaggcaagctgcatgtcgaagttagtgcagacttgactgcgattaacgggctgagctataatcagaacctggccaacgggagttatgatcttgccaatcgtgacttctgtcaaggaaatcagcttaattactacaaacaggaaatcccagttcagcctacaacgtcctattcaatccagaatctgtacagctatgagaaccagccccagccttccgatgagtgtaccttgctgtctaataagtatctggacggtaacgccaataaatctacaagcgacgggtctcccgtgatggccgtcatgcctgggaccacggacaccatccaggtgctgaaagggagaatggattctgaacagagtccatctattggatactcctcacggaccctggggcccaaccccggcctgatactgcaagccctcaccctctccaatgcctcggacggcttcaatttggaaagactcgaaatgcttggcgattccttcctcaagcatgcaatcacgacatacctgttctgtacctacccggacgcccacgaagggcggctgagttatatgcgctctaaaaaggtaagtaactgtaacttatatcgcttgggaaagaagaaaggacttccttctagaatggtagtctccatttttgatcctcccgtgaactggctgcccccgggatacgttgtgaatcaagacaaatctaacacggacaaatgggagaaagatgagatgaccaaagactgtatgctcgccaacggcaagctggacgaggactatgaggaagaagatgaggaagaggagagtctgatgtggcgggcccccaaagaggaagcagattacgaagacgacttcctggagtatgatcaagagcatatcaggtttattgataatatgcttatgggatctggcgcctttgtaaagaagatatccctgtcacctttctcaaccaccgacagtgcatatgagtggaagatgcccaagaagagttcattggggtccatgcccttttctagcgatttcgaagacttcgactattcctcgtgggacgccatgtgctacctggaccccagcaaagctgtcgaagaggacgacttcgtagtaggcttttggaatcccagtgaagaaaactgtggggtggataccggcaaacagagcatcagctatgatctacataccgagcaatgcatagccgataagagcattgcagattgtgtggaggccctcctgggatgttatctgacaagttgcggtgagagggcagcacagctgttcctgtgcagcctggggctcaaagtgcttccagtcatcaaaaggactgacagggagaaggctctgtgccccaccagggagaatttcaattcgcagcaaaaaaacctatcggttagctgtgctgccgcaagtgtggcttcaagcagaagctctgtgctgaaagattccgaatatggttgtctgaagattccccctcgctgcatgtttgatcacccagatgccgataaaaccctgaatcatctgatttctggcttcgaaaatttcgagaagaaaatcaattacaggtttaagaataaggcgtatctgctccaggctttcacccacgcctcttaccattacaacacaatcacagattgctatcagaggcttgaatttctgggagatgcgatattagactacttgataactaaacatttatacgaagaccctcggcaacactccccaggcgtgttgaccgacctgagatctgccctggtcaacaatacaatcttcgcctcccttgcagttaaatatgattatcacaagtatttcaaggccgtgagtccagagctattccacgtcatagatgactttgtgcagttccaattagagaagaacgaaatgcaggggatggactcggagctacggaggagcgaggaggatgaggagaaggaagaggacattgaggtccctaaagccatgggtgatattttcgaatcactggccggagccatttacatggacagcggcatgtccctggaaacagtttggcaggtttactaccctatgatgcgcccactaatcgagaagttctctgccaatgtgcccagatccccggtacgagagctcctcgaaatggagcccgagaccgctaagttctcccctgccgaaaggacttacgatggcaaagttcgcgtgactgtggaagttgtgggcaaagggaagttcaaaggcgtaggacgctcgtatcggatagccaaatctgctgcagctaggcgtgccctgcgctctcttaaggccaatcaaccacaagtgcccaattcgtag

SEQ ID NO: 114537 - DNA, 801 bp, synthetic construct
  misc_feature 1..801: note = Description of Artificial Sequence: Synthetic coding sequence
  source 1..801: mol_type = other DNA
atgatggccttgggggctgcgggggcaacaagggttttcgtggctatggtggcagccgctctgggaggtcaccccttgctgggggtttctgccaccctgaatagtgtgcttaacagcaacgctatcaagaatttacctccccccctgggaggcgctgccgggcaccccggttctgcagtctccgctgcaccagggatactttaccctggtggaaataagtaccaaacaattgataattatcagccatatccatgtgccgaggacgaggagtgcggcacagacgagtactgcgcaagcccaacacggggcggtgatgcaggcgtgcagatttgcctcgcctgtaggaaaaggcggaaaagatgtatgcgtcacgccatgtgttgcccgggtaactactgcaagaatggaatttgcgtcagctcggaccagaaccactttagaggcgaaattgaggaaacaataactgaatcatttggaaacgatcactctacacttgacggttacagtagaagaacgaccctgagctcaaagatgtatcacaccaaaggacaggagggctccgtctgcctcaggtctagtgattgcgctagcggcctctgttgtgctagacatttctggtccaagatttgtaaacccgtactgaaggagggccaggtgtgtactaaacatcggaggaaaggctcacatggattagagattttccagaggtgctactgtggcgagggtctgtcctgccgaatccaaaaagatcaccatcaggcatccaactcttcccgactgcatacatgccagcggcactag

SEQ ID NO: 114538 - DNA, 1689 bp, synthetic construct
  misc_feature 1..1689: note = Description of Artificial Sequence: Synthetic coding sequence
  source 1..1689: mol_type = other DNA
atggatgctatgaagcggggcctgtgttgcgtgctgctgttatgtggtgccgtgttcgttagtccctcgcaggagattcacgccaggttccggagaggggccagaagctaccaggtgatttgccgcgatgagaagactcagatgatctaccagcaacatcaaagctggctccgaccagtcttgcgttctaaccgcgtcgaatattgttggtgcaattcaggaagagcacagtgtcatagtgtccccgtaaagagttgtagcgagcctcggtgtttcaacgggggcacttgccagcaggctttgtatttctctgattttgtgtgccagtgcccggaaggattcgcagggaaatgctgtgagatagacaccagagcgacgtgctatgaagatcagggcatctcatatcgcggcacttggtctactgccgagtccggggccgagtgcacaaactggaacagctccgctctggcccaaaagccttatagtggacggaggccagacgcaatccgactgggcctggggaaccacaactattgtcgaaaccccgatagagattctaaaccctggtgctacgtttttaaggccggtaagtattccagcgaattctgcagcacccccgcctgtagtgagggcaactctgactgctatttcgggaatggctctgcctaccgcggcactcattctttgacagagagcggagcttcatgtttgccctggaattctatgattctcattggcaaggtgtacacagctcaaaatccttccgcccaggccctaggtctgggcaagcataactactgccgcaacccagatggagacgcaaagccttggtgccatgtgctgaagaatcgacgactcacctgggaatactgtgatgtgcccagttgctcaacctgcggcttgaggcaatactcacagccccagtttcgaataaaaggcggactgtttgccgatatagccagtcatccatggcaggcggccatcttcgctaagcaccggcgctctcctggggagaggtttctgtgtggcgggatccttataagcagctgttggatactcagcgctgcccactgtttccaggagagatttcccccacaccatctgaccgtaattctggggcgtacctatcgggtggtccctggggaggaggagcagaaatttgaagtagagaaatacatagttcacaaagagtttgatgatgatacttacgacaatgacatcgcactcctccagttgaaaagcgactcgtcccggtgcgcccaggaatcgagcgtggtgagaacggtatgtttacctcccgccgacttacagctgccagattggaccgagtgcgagctatctggctacggcaagcacgaagctttgtccccattttattccgagcgcctgaaggaggcccacgtaagactgtacccttcatcccgctgcacatcacagcacctgctaaatcgcaccgtaacagacaatatgctgtgcgcaggcgatacccgctctggcggcccacaggcaaacctccacgacgcctgtcagggtgattccggcggtccgctcgtttgcttaaacgacggacgcatgacattggttgggatcatttcttggggcctaggctgcggccaaaaagacgtgccaggtgtgtatactaaagtgacgaattacctcgattggattcgggataatatgcgcccatag

SEQ ID NO: 114539 - DNA, 420 bp, synthetic construct
  misc_feature 1..420: note = Description of Artificial Sequence: Synthetic coding sequence
  source 1..420: mol_type = other DNA
atggtggcagcggtgctcctggggctgagctggctctgttcaccactcggagccctcgttttggatttcaacaatattagaagctctgcggatctccatggcgctagaaaaggtagtcagtgcctgagcgatacagactgcaatacgcgtaaattctgcctccagcccagggatgagaagcccttttgtgccacatgccgcgggctgcggagaagatgtcagcgggacgcaatgtgctgccctgggactctttgcgtgaacgatgtctgcacaactatggaagatgctacgcccatcctggagagacagctcgatgagcaggatggcacccatgccgaggggaccaccggccatcccgtgcaggagaaccagcctaagaggaagccctccattaagaagtccagcagtatgttggactag

SEQ ID NO: 114540 - DNA, 1683 bp, synthetic construct
  misc_feature 1..1683: note = Description of Artificial Sequence: Synthetic coding sequence
  source 1..1683: mol_type = other DNA
atgcgcgacctgcccttaacctctcttgctcttgtgctgtcagccctcggggccttactgggtaccgaagccctcagagcggaggagcctgcagtgggaacctctgggctgatcttccgggaagacctcgactggccacctgggtctcctcaggagcccctgtgccttgtggctctgggtggggattctaacggtagctcatctcccctgagggtggtgggggcccttagcgcttatgagcaagcttttcttggcgcagtacagagagcccggtggggacctcgcgacttagctacatttggagtctgcaacactggggatagacaggcagcactgccgtctctgagacgcttgggagcttggctcagagacccaggcggacagcgactcgtggtcttgcatctggaagaggtgacctgggagcccacaccatctctgcgatttcaggagccacccccaggcggcgccggccctccggaactcgccctactagtgctctatccaggcccaggccccgaggtgacagtgacgagggcaggcctccccggggcccagtccctgtgcccatctagggacacacggtacctcgtcctagcggtggatcgtccagccggagcctggcgcggttctggcctggccctgaccctgcaaccacgtggggaagattccagactatcaacagccagattgcaggcgttgttgttcggtgatgaccacaggtgttttacccggatgacacccgctttgctgctgctgccccgctccgagcccgcaccgctgccagcccacggccagctggacaccgttccattcccaccacctagaccgagcgcagaactcgaagaaagccccccatccgcggatccctttttggaaacccttacaagattagtgagagcacttcgagtgccacccgcaagagcaagtgctccccgactggccctcgatcccgatgccctcgctggtttcccccaggggctggtgaacctaagtgatcctgctgcattagaaaggcttcttgatggcgaggaacctcttctcctcctgcttcggccaactgccgctaccacgggtgatccagctccactgcatgaccccacttccgctccatgggcgacggcactggccagacgagtggccgccgagcttcaggctgcagcggcagagttaaggtcacttccgggtctgccacccgcaaccgccccactcctggccaggctgttagccctgtgtccgggcggccccggggggctcggcgacccactgagagcactactgctgttaaaggccttacagggtctgagggttgagtggagaggaagagatccccggggtcccggccgggcacaaaggtcggctggagcgacggcagcagacggtccttgcgccctgagggagctgtccgtggatcttagagctgagagaagcgtccttatccccgagacatatcaagcaaacaactgtcagggggtttgtggctggccccaatccgatcgcaatcctaggtatggcaaccacgtggttcttctgctgaagatgcaggtccgaggcgcagccctcgcccggccgccttgctgtgtccccaccgcttacgctggtaagcttctgatcagcctgtcggaagaacgaatatctgcccatcatgtgcctaacatggtggcgacagagtgtggttgtagatag

SEQ ID NO: 114541 - DNA, 600 bp, synthetic construct
  misc_feature 1..600: note = Description of Artificial Sequence: Synthetic coding sequence
  source 1..600: mol_type = other DNA
atgggtgaagcttccccccccgcacctgcccggcgccatctattagtcctcctgcttctgctctcaactctggtcatccccagcgcagctgcaccaatacacgacgccgatgcccaggagtccagtctgggtctgacaggcctgcagagccttcttcagggatttagtaggcttttcctcaaaggaaacttactgagaggcatcgacagtctctttagtgctcccatggatttccgagggcttcccgggaattaccacaaagaagagaaccaggaacatcagctgggcaacaacaccttgtcctcacatcttcagattgacaaggtgccacggatggaagagaaagaggctctggtaccaatacagaaagcaactgactctttccacacagaactacaccctcgagttgccttctggattatcaagctgccacggcggcgttcacaccaggatgctcttgaagggggccactggctatcagaaaaacgccataggctgcaagctataagggatggattgcggaaagggacacacaaagacgttttagaggaagggaccgagagttcctcacattccagactgagtcctcgcaaaacctag

SEQ ID NO: 114542 - DNA, 1896 bp, synthetic construct
  misc_feature 1..1896: note = Description of Artificial Sequence: Synthetic coding sequence
  source 1..1896: mol_type = other DNA
atggcccttaggaaagagttgctcaaaagtatatggtatgcatttaccgcgctggacgtggagaagtcagggaaagtgagcaaatcccaattaaaggtgttaagtcacaatctgtataccgttttacacatcccacacgaccccgttgcactcgaagaacattttcgagacgatgacgacggcccggtctctagccagggatatatgccctatctgaacaagtacattctggataaggtggaagagggtgcatttgtcaaggagcattttgacgagttgtgctggaccctcacagccaaaaagaactatcgggcggattctaatgggaacagtatgttaagcaaccaagacgcatttcgactgtggtgcttgtttaatttcttatccgaggataaatacccacttatcatggtgcctgatgaagtagagtacctcttgaagaaagtcctgtcatcgatgtcattagaggtgtcactgggcgaacttgaagaactgctggcccaggaagcccaggtcgcccagacaacaggcgggctctccgtgtggcagttcctggagctgttcaattccggaagatgcctgcgcggggttggcagggatacacttagcatggccattcacgaagtgtaccaagagctgatccaagatgtgctgaagcagggctacctgtggaaacgtggtcacctgcgacggaactgggcagaacgctggttccaattgcagccctcctgcctgtgctattttggaagcgaagagtgcaaggaaaagagaggaatcatcccgttggacgcgcactgctgtgtggaggtcctgcctgatagagacggtaaaaggtgtatgttctgcgtgaaaacagcaaatcgcacctacgagatgtccgcttctgacacacgacagcggcaagagtggactgcggccatccagatggctatacggctacaggccgagggaaagacaagcctccacaaagacctcaagcagaagcgcagggagcagcgagaacagcgcgaaaggcgacgcgccgcaaaagaggaagagctgttacgcttgcaacagctgcaggaagagaaagaaaggaaacttcaggagctcgagcttctgcaagaagcccagaggcaggctgagcgcctgctgcaggaagaagaggagagacggagaagccagcacagggagctgcagcaggcactggagggtcagctgcgagaggccgaacaggcccgcgcttcgatgcaggctgagatggaacttaaggaggaagaagctgcacgacagaggcagcgaataaaagaactggaggagatgcagcagaggctgcaggaggctttgcaactagaagtgaaggccaggcgagacgaggaatctgtgcgcatcgcccagacccgcctgttagaggaagaggaggagaagctgaagcagctgatgcagctgaaagaagaacaggaacgctatattgagagagcacagcaggagaaagaagaacttcaacaggaaatggctcagcaatctcgatcactgcagcaggcgcaacagcagcttgaggaggttcgccagaacagacagagagccgacgaggatgtggaggcggctcagcgcaaactccgccaggcatccacaaacgttaaacattggaacgtgcagatgaatcggctgatgcaccccatcgaaccgggcgacaaacgaccagtgacttctagcagtttctcaggtttccaacctcctctcttggctcatcgagactcttcactcaagcgtcttacaaggtgggggtctcagggtaacagaacgccaagtcccaattctaatgaacagcagaagagcttaaacggaggggacgaagcacccgcaccagcgtccacaccccaggaagataaactggacccagcgccagaaaattag

SEQ ID NO: 114543 - DNA, 555 bp, synthetic construct
  misc_feature 1..555: note = Description of Artificial Sequence: Synthetic coding sequence
  source 1..555: mol_type = other DNA
atggccctccgcaaggagttgctcaagtcgatctggtatgcatttactgctctggatgtcgaaaaatctgggaaagtctcaaagtcccagcttaaagtgctctcacacaatctctatactgtcctgcacattccccatgaccccgtggccctggaggagcactttcgtgacgatgatgatggacccgttagctctcaagggtatatgccctacctgaacaagtatattcttgacaaagatgcctttcggctgtggtgtttgttcaatttcctgagcgaggataaataccccttgattatggtccctgatgaagtcgaatatctgctcaaaaaggttttgtcttccatgtctctcgaggtgtccctgggcgaattagaggaacttctggcacaagaggctcaagtagcccaaacgactggtggcctaagcgtgtggcagttccttgagctgttcaattccggccgctgtctacgaggcgtgggccgtgataccctctcaatggccatccacgaagtgtaccaggagctaattcaagacgtgctcaaacagggctag

SEQ ID NO: 114544 - DNA, 393 bp, synthetic construct
  misc_feature 1..393: note = Description of Artificial Sequence: Synthetic coding sequence
  source 1..393: mol_type = other DNA
taacgggacgacgatgacggacctgtctcctcacagggttacatgccttacctgaacaagtacattcttgacaaagacgcctttcgtctatggtgtttattcaactttttgtctgaagacaaatatccattgatcatggtgcctgatgaggtggagtacctgctgaagaaggtcctgagcagcatgtctcttgaggtcagtctgggggagttggaggaactgctcgcacaggaagctcaagtggcccaaactacggggggcctctccgtgtggcaatttcttgaactttttaacagcgggagatgtctcagaggcgtgggcagagatacactgtccatggccatacacgaagtgtaccaggagttgattcaagacgttctcaaacagggatag

SEQ ID NO: 114545 - DNA, 1131 bp, synthetic construct
  misc_feature 1..1131: note = Description of Artificial Sequence: Synthetic coding sequence
  source 1..1131: mol_type = other DNA
atgatctgcccgccacggccacctaaagtgctgggactccaggtacttcccgatagagacgggaaacgttgtatgttttgtgtcaaaactgcaaatcgcacatacgagatgagcgcttctgacacacgccagagacaggagtggactgcggcaattcagatggccattaggttgcaagccgaggggaaaactagcctgcacaaggatctcaaacagaagcgccgcgagcagcgggaacagcgggagaggcgtcgagctgcaaaggaggaagagcttcttcgtctccagcagcttcaagaggagaaagaaaggaaactgcaggagttagagcttttgcaggaagcccagcgtcaggctgaaaggttgctgcaagaggaggaagaaagacgccgatcccaacaccgcgagctgcaacaagctttggagggccagctgagagaagccgagcaggctcgagcgagtatgcaggctgagatggaactcaaggaggaggaagctgcgcgacaacgccaaagaattaaggaactggaagagatgcagcagaggctgcaggaggctttgcagttagaggtcaaggctcggcgggatgaggagagtgtgaggattgcccaaactcgcctgttagaagaggaagaggagaaactgaaacaactgatgcaactgaaggaggagcaggaacgttatatcgaaagggcccagcaggaaaaggaagagctgcagcaggaaatggcccagcaaagtcggtcgttgcagcaggcccagcagcagttggaggaggtgcggcagaatcgccagcgagccgacgaagacgtggaagctgcgcagagaaaactccggcaggcctcgacaaacgtcaagcattggaatgtgcaaatgaatcggctgatgcaccccattgagccaggggacaaacggcctgtgacctcaagcagctttagcgggttccaaccaccacttttggcccatcgcgattcgtcactgaagcgtcttactaggtggggctcccaaggcaaccggactccctcccccaactccaacgaacagcaaaagtccctaaacggcggcgacgaagcacctgctccggccagcacaccacaggaggacaaattggaccccgcccccgagaattag

SEQ ID NO: 114546 - DNA, 708 bp, synthetic construct
  misc_feature 1..708: note = Description of Artificial Sequence: Synthetic coding sequence
  source 1..708: mol_type = other DNA
atgactcaggtgaccgaaaaaagtaccgaacacccagagaaaacgacgagtaccaccgagaaaaccactcgaacccctgaaaagcccaccctctactccgagaaaacaatctgcactaaaggcaagaatacacccgtgcccgaaaagccaaccgagaacttagggaacaccaccctaactaccgaaactattaaagccccagtcaaatccacggaaaatccggagaaaactgccgctgttaccaaaaccatcaagccatcagtgaaggtaacaggtgataaaagtctcactacgacttcgagtcacctgaacaaaacagaggtaacacaccaggtccccacaggctcatttacactcatcaccagtaggacaaagctgtcctccataacctccgaggcgactgggaacgaatcccatccatacctaaacaaagacggaagccaaaagggcatccacgccggtcagatgggggaaaacgattcattccccgcatgggctattgtgattgtagtgctggtcgccgtgatcctgttactagtcttccttggattgatatttctcgtgagctacatgatgagaacccgccgaaccttgacgcagaacacgcagtacaacgatgccgaggatgaaggaggccccaacagctaccccgtctacctcatggagcaacagaaccttgggatggggcagattccatccccgcgttag

SEQ ID NO: 114547 - DNA, 1524 bp, synthetic construct
  misc_feature 1..1524: note = Description of Artificial Sequence: Synthetic coding sequence
  source 1..1524: mol_type = other DNA
cccctggccaacgagaagacaacccttagcccggccgagccgactgaaaacggtgagaggacaccctttacaaacgagaagacaaccccaagcagtgctgagccgactgagcacggagagcggacccccctggctaatgagattacaaccccgagtcgcgcagaaccgactgagcatggggaacggatagccaacgaaaaagctaccccttctcccgccaaacctactgaacacggagaaacaacagtgaatgaagatactacaccttcttccgccgaaccaactgagaacggagagaggacacctctagcgaatgagaataccacaacctctcccaccgaaagcactgaacacggagagcgaacggccaatgagaagactacaccatcacctgcggagcccacagaacacggagagcggaccccttctgcgaacgaaaaaaccatcccctcccccgccaaaccaaccgaacacgaagaaatgaccccctccgcgaatgagaatactactccatctccggtgaagccaacggagcatggcgagaagacgacgctggccaacgagaaaataactctgagtcctgaaggcccaaccgagcatggagccaagaccaccagcgccaacgaaaaaatcactccttcacttgccaaaccaaccgagcacggagaaaggactacatcgcccaacgacaaaatcacctcttccgccgcagaaagcacagagcaccgggaccgcgccacctcagccaacgtgatcacaccagcccctgcagagcccatcaagcacgccaagcgaacgacacttgctcatgagaagatgacccaagtcaccgagaaaagtactgagcatcctgagaaaactacttccaccaccgagaagacgacccgtactccggagaaacccaccctgtactcagaaaagaccatctgcacaaaaggcaagaatacaccagtccctgagaagccaacagagaatctcggtaataccactctgacgaccgaaactatcaaagcacctgtgaaatccacagagaatcctgaaaagaccgctgcggtgacgaaaaccattaagccatctgtcaaagtgaccggggataagagcctgacgacaacatcttcccatctgaataaaaccgaagtgacccatcaggtacccactggatcctttacgttgattaccagtcggacaaagctgagcagcatcacctccgaagccaccggcaatgaatcccacccatatttaaataaggacgggagtcaaaagggaattcatgccggccagatgggcgagaacgattcttttccagcttgggctatcgttatcgtggtgctggtggctgtcatcctactgctcgtcttcttaggactcattttcctggtgagctatatgatgcggacacggcgaactctgacccagaatactcagtataatgacgcagaagacgagggcggcccgaatagctaccccgtctacttgatggaacagcaaaatctgggcatggggcagatccccagtccaagatag

SEQ ID NO: 114548 - DNA, 1524 bp, synthetic construct
  misc_feature 1..1524: note = Description of Artificial Sequence: Synthetic coding sequence
  source 1..1524: mol_type = other DNA
ccgttggcgaatgagaagacgacccttagtcctgccgaacccactgaaaacggggaacggaccccattcaccaacgagaagaccacacctagctctgccgagcctaccgaacatggtgagcgtactcccttagccaacgaaattaccaccccgagccgcgccgagcctaccgagcatggcgagcggattgccaatgagaaggctacaccttcacctgccaaaccgaccgaacatggggaaacaaccgtgaatgaagatactaccccttctagcgctgagccaaccgagaacggagaacgcactcctcttgccaatgagaatacaactacctcaccaactgaatcaaccgagcatggtgagaggaccgccaatgaaaaaaccacaccctctcccgctgagcctacggaacacggcgagaggacaccttctgcgaacgaaaaaaccatacccagccccgctaaaccgaccgagcatgaggagatgactccgtccgctaacgaaaatacgacacccagtcctgtcaagcctacagagcatggcgaaaaaaccactctcgcaaacgagaagataacactatccccagaaggccctaccgaacatggtgccaaaaccactagtgctaacgaaaaaatcactccttccctggccaagcctacggagcacggcgagaggacaaccagcccgaacgataagatcacgagtagcgctgctgagtctaccgaacatcgcgaccgcgctacatctgccaatgtcattacgccagctcctgccgagcctatcaagcacgccaagaggaccaccttggcacacgaaaaaatgacccaggtgacggagaagagcaccgagcacccagaaaagacaacatctactaccgaaaagacgactcggactcccgaaaaaccgacactgtattcagaaaaaactatctgtaccaaaggcaagaataccccagtgccagaaaaaccaaccgaaaatttaggaaacacaactctcacgactgaaaccatcaaggcccccgtaaaatctactgagaatcccgagaagacagccgcagtgaccaaaactataaagccatctgtgaaggtgacaggagataaaagcctgacaactacatcatcacacttgaacaaaacagaggtgacccaccaggttcccactggtagttttactctgattacaagtagaacgaagctgagctctattacaagtgaggccaccggcaacaagagccacccttacctgaacaaagacggatcccagaagggaattcatgctggtcagatgggggagaacgactcgttcccagcctgggcaatcgtcattgtggttctagtggcagtgattctgcttctggtgttcctgggcctgatctttctggtctcctatatgatgaggacccgtcggacactgactcagaatacccagtacaacgatgctgaagacgagggaggaccgaactcctaccctgtgtaccttatggaacagcagaatttggggatgggacagatcccaagtccaagatag

SEQ ID NO: 114549 - DNA, 1524 bp, synthetic construct
  misc_feature 1..1524: note = Description of Artificial Sequence: Synthetic coding sequence
  source 1..1524: mol_type = other DNA
cctctggcaaacgaaaagaccactctgtctcctgccgagccaactgaaaatggcgagaggacaccttttacaaacgaaaagacaacaccatcttcagcggagccaaccgagcacggggagaggacacccttggccaacgagatcaccacaccttctcgtgctgagcctactgagcacggggagagaatcgctaacgaaaaggcaacccctagtcccgccaaacccaccgaacacggtgagactactgtcaatgaagataccacgcccagctcagcagaacccactgaaaatggcgagagaacgccgctggcaaacgaaaataccaccaccagcccgacagaatcaacagaacacggtgaaagaactgctaacgagaaaaccactccctctccagcggaacccaccgaacacggtgagcggactccgagtgcgaacgagaagacaatcccctctccagccaagcctacagagcacgaggaaatgacgccctctgccaacgaaaatacaacaccctcaccagttaagcccaccgagcacggcgaaaagaccacactcgccaatgagaaaattaccttgagtccggagggaccaacagagcatggcgccaagacaactagcgcgaacgaaaaaataacccccagcctggcgaagcctacagaacacggagagaggaccacctctccaaacgacaaaattacgtcctccgctgccgagagcacagagcaccgagacagagcaacaagcgccaatgtcattactcccgcaccggccgagcccataaagcacgcaaagagaacgacccttgcgcatgaaaagatgacacaagtgaccgaaaagtctacagagcaccccgaaaaaacaacctctacaacggagaaaaccacaaggactccagaaaaacctactctgtacagtgaaaagactatttgcaccaagggcaagaacacccccgtgccagagaagcccactgaaaatctgggcaacactacgctgactactgaaacaatcaaagccccagttaaaagtactgagaacccagagaaaaccgctgccgtcacaaaaactattaaaccaagcgttaaagtgactggagacaagagtttgacaacaacgagctcccacctaaataaaaccgaagtgacgcaccaggtgccaacaggtagttttacactgatcacatcccggacaaaactttcttctataacatccgaagctacgggcaacgagagccatccctaccttaataaggatgggtctcagaaaggaatccacgccggccaaatgggggaaaacgattcgtttccagcttgggcaatcgtaattgtggttttggtggcggtaattctgctactggtgttcctaggcctgatcttcttggtgtcatatatgatgcggacccgtagaacgcttacccagaacacccagtacaacgacgcagaggacgagggcggccccaactcataccccgtatatttgatggagcagcagaacctaggcatggggcagatcccctcccctcggtag

SEQ ID NO: 114550 - DNA, 1554 bp, synthetic construct
  misc_feature 1..1554: note = Description of Artificial Sequence: Synthetic coding sequence
  source 1..1554: mol_type = other DNA
atggcacagccagtccactccctgtgctccgccttcggcctccagtgctgcttgctctttctgctggcctcttggggggctggtgcgacaacattccaggaatatcagaaaaccggcgagctgtctacaagcgaccatatttttccactgacccccggcctggtttacagcattcctttcgatcatatcgtcctgcactcgggccaacggccaccagaattgccgaagagcactgagattcatgagcaaaaaaggcactgcaacaccactcggcactctaaacctaccgataagccgacagggaactcgaaaacgattgaccataaaagctctactgataaccacgaagccccacctaccagtgaggagaattcctctaaccaaggtaaggatcctatgattagaaaccaacgctctgttgatcccgctgacagtaccaccacccacaaagagtctgcaggcaaaaagcacattacacccgcccctaagtccaagattaactgtaggaagagcacgaccggcaagagcacggtcacaagaaagtccgacaagaccggtcgtcccctggaaaaatcaatgtctacactagataagaccagcacctctagccacaaaaccactaccagtttccataacagtgggaactcccagacaaaacagaagtcaaccagttttccagagaaaattacagcggctagcaaaacaacatataagacaacaggcacccccgaggaatcagagaaaaccgaggattcacgaaccacagtggcctccgacaaattgctgacgaaaacaacaaagaacattcaggaaactatcagcgccaatgaacttactcaatccctggctgagcccaccgaacatggtggccgaacagcaaacgaaaataacactccatcgccagctgaacctaccgaaaatcgcgaacggactgccaatgagaacaagaagaccatttgcacaaaggggaaaaacactccagtcccggagaagccaacggagaatctgggaaatactacactcaccacagaaaccatcaaagctccagtcaagtcaaccgaaaatcccgagaagaccgcagctgtcacaaagacaattaagccatccgtgaaagttaccggtgataagagtctgacaaccacgtcctcccacctaaacaagaccgaagtcacccatcaagtgccaactggcagctttactctgattaccagtcgtacaaaactgagcagtattacatccgaggcaaccggcaatgaatctcacccttaccttaacaaggacgggagtcagaaaggcattcacgctgggcagatgggcgagaacgactcattccccgcctgggctattgttattgttgtgctggtagccgtgatcctccttctggtgttcctggggctgatattcctcgtctcctacatgatgcgcaccagaagaaccttgacccagaatacccagtacaacgatgctgaagacgagggcggccccaattcttatcctgtgtatcttatggagcagcagaacctaggcatgggacagatcccatcccccagatag

SEQ ID NO: 114551 - DNA, 1554 bp, synthetic construct
  misc_feature 1..1554: note = Description of Artificial Sequence: Synthetic coding sequence
  source 1..1554: mol_type = other DNA
atggcccagcctgtgcactccctatgcagcgccttcgggctgcaatgctgtctcctttttctgttggccagctggggggctggtgcgacgacatttcaagagtatcagaagaccggggaactatctacaagcgatcatatcttccccctgactccagggctggtgtattccattccgttcgaccatatcgtcctgcacagtggccaaaggccacccgaattgccaaaaagtactgaaatacatgaacaaaaacgtcactgtaatacaacccggcacagcaaacccaccgataagcccacagggaacagtaagacaattgatcataaatcttctaccgacaaccacgaggcccctcccaccagtgaagagaacagctccaatcagggcaaagacccaatgatccgcaaccagcgcagcgtggaccccgcggacagtactacgacacacaaagagtcagctggcaaaaaacatatcaccccagcccctaaatccaagatcaactgtcggaagagtactacaggcaagtctacagttaccaggaaatccgacaagactggccgcccattagagaaaagcatgagtacgctggataagacttctacaagctctcacaaaacaacaaccagcttccacaactcagggaatagtcagacaaagcaaaaaagtacatcttttccagaaaaaattactgcggctagcaagactacttacaagactacaggcacccccgaggagtcagagaagacagaggatagccgaactaccgttgctagtgacaagctacttacgaagacaacaaaaaatatacaggagactatcagtgctaatgaacttactcagtcgttggcagaacccaccgagcacggtgggcgcacagctaacgaaaacaataccccctcacctgcagagcctactgagaaccgcgagcgcactgctaacgaaaacaaaaagacaatctgcacaaaaggcaagaacacccctgttcccgagaagccaaccgaaaatctgggcaacacaaccctgaccacagagaccattaaggcacctgttaagtccacagaaaatcctgagaagactgccgctgttaccaagacgatcaaaccatctgttaaagtgaccggcgataagtcactgacaaccacttctagtcacttgaacaagaccgaggtgacccaccaagtccccacaggctcctttaccctgattacttcgcggacaaaactaagctcgattacgagtgaagccactggtaatgagtcccacccttacctcaacaaagatggatctcagaaaggcattcacgccggccagatgggcgaaaacgactcctttcccgcttgggcaatcgttatagttgtgctggtcgccgtgattctgcttctagtgtttctgggcttgatatttctcgtgagttacatgatgcggacaagacggacgctgacacagaatacacagtacaacgacgcggaagacgaaggcggtcccaactcatatccagtctatctgatggaacagcagaatctgggtatgggccagatcccatctccccgttag

SEQ ID NO: 114552 - DNA, 1554 bp, synthetic construct
  misc_feature 1..1554: note = Description of Artificial Sequence: Synthetic coding sequence
  source 1..1554: mol_type = other DNA
atggcccagccggtgcatagcctgtgcagcgctttcgggctgcagtgctgcctgctgtttctgctggccagttggggcgccggagcaaccactttccaggagtaccaaaaaaccggggaactgagcacgtctgatcatatctttccgctgactcccggtctggtgtattcaatcccatttgatcacatcgtgctgcattctggccaacgtcccccagaactgcctaagagcactgaaatccacgagcagaaacggcactgtaacacaacacggcacagcaagccaaccgacaagccaactggaaattccaagaccatcgatcacaaaagtagtactgacaatcacgaggcccctccgaccagcgaggaaaactcctctaaccaaggaaaagatccaatgatcagaaatcagagaagcgtggaccccgcggattccactactacacacaaggagtctgccggcaaaaaacatataactccagcccctaagtcaaagatcaattgtaggaagtctaccaccgggaagagcacagtgacacgtaagtctgataaaaccgggaggcctcttgagaagagcatgtcgacactggataaaacgagtacaagctcccacaagacaactacaagttttcacaactccggaaactcccagaccaaacagaagtcaactagttttccggaaaaaataacggctgcctccaaaactacctataaaactactggtacccctgaggagagcgagaaaactgaagattctcggactacggtggcctccgacaagttactaactaaaactacaaagaatatccaggagactatttccgcgaacgaactgacccagtctttggccgagccgactgagcatggaggtcgcacagctaacgaaaacaacactccctcccctgccgagcctactgaaaaccgcgaacgaaccgcgaatgagaataagaaaacaatatgtacaaagggcaagaatactcccgtgccagaaaaacccactgagaaccttggtaatacaaccttaaccacggaaacaatcaaagcaccagtgaagagcactgaaaatcccgaaaaaaccgcagcggtgaccaaaactattaagcctagcgtaaaagtgactggcgataagtcccttacaacaacaagttctcatctaaataaaactgaagtgacccaccaagttcccacgggtagcttcacactcatcaccagtaggactaagctgtcctcaattacttctgaagctaccggcaatgagagccacccatacctgaacaaggacggaagtcagaagggaatccacgccggtcaaatgggggaaaatgacagtttcccagcttgggccatagtgattgttgtgctggtggcagtgatcctcctcctggttttcctggggcttattttcctggtatcatatatgatgcggacccgtcggaccctgactcagaatactcagtacaatgatgctgaagatgaggggggtccaaatagttatcccgtttacctgatggagcagcagaatctggggatgggtcagattccaagcccccgctag

SEQ ID NO: 114553 - DNA, 4182 bp, synthetic construct
  misc_feature 1..4182: note = Description of Artificial Sequence: Synthetic coding sequence
  source 1..4182: mol_type = other DNA
atggcacagcctgtgcactcactatgctccgcctttgggctgcagtgctgccttctgttcctcttggcttcatggggtgcaggcgctacaactttccaagagtatcagaaaactggtgagctaagcactagcgatcacatttttccccttacccctgggttggtctacagtatacctttcgatcacattgttctgcactctggccagagaccacctgaattacctaaaagtacagaaattcacgagcagaagaggcattgtaacacaacccgccactccaagccaacagataaaccgaccggaaattcaaaaaccatcgatcacaaaagctcgaccgacaatcatgaagctcctccaacctcagaggagaactctagcaaccaagggaaggaccccatgatccgaaatcagcggagcgtcgaccccgccgattccacaaccactcataaagagtctgctggaaaaaaacatatcaccccagcgcccaaaagcaagatcaattgtaggaaaagcacaacgggtaagtccacggtgacacgcaagagtgataagactggacgaccactggaaaaatccatgagtactctcgataaaacctccactagctctcacaaaaccactactagcttccacaactcggggaacagccagacaaaacaaaagtccacaagctttcccgagaagatcacagctgcatctaagaccacatataagacaactggaacacccgaagaatctgagaagactgaggattctcgcacaacggtcgcctccgacaagctcctcacaaagactactaagaatattcaggagactatctctgcaaacgaactaacccagagcctcgctgagccgaccgagcatgggggccgcaccgcaaacgagaacaacaccccttcaccagctgagcctactgaaaacagggaacgcaccgccaatgaaaacacaacactgtcacccgcggagcccactgagaacagagaaaggactgcaaacgagaacaccgctcccttccctgctggcccgaccgagaacagagaaatgacggcaaacgagaacacaacactgttccccgcagagcccacagagcacggcgaacggaccgccaacgaaaataccaccccctcgccagccgaaccgacagagcacggagagcgcaccgccaatgaaaacacgaccccctctcccgccgaacccaccgaacacggtgaaaggacaccgttcgctaatgacaagacaacgtcctcatcagctgaatccactgagcatggagagagaacgcctctagccaatgagaatactacgcccagtccagccgagccaacagaaaatcgggagaggactgccaacgagaatactaccccgagtccagccggccccacagaaaatagggagaccacagccaacgaaaaaacgactttatcaccagtggaacctaccgaaaaccgcgagacaacagcaaatgaaaaaacaacacccagccccgctgaacccactgagaatggacaaaggactccatttgccaacgaaaagactacgagctcgtctgccgagccaaccgaacatggtgagcgcacaccgttggccaatgagaacaccacaccctcccccgctgaacctacggagaaccgagaaaggactgctaacgaaaagactacaccttctcctgcggagcctactgaaaatggggataggactccgcttgccaacgaaaagaccacaccctctttagcagaaccaaccgagaatggacagagaactccgtttgcaaatgaaaagaccacttcatcttcagcagagcctaccgaacatgaagagcgcacgccgcttgccaacgagaacaccactcctagcccggcagagcccactgaaaacagagaaaggaccgctaatgaaaataccacccctagcccagccgggccaacagagaatagagagatgaccgctaacgagaaaaccacactctttcctgccgagccaaccgaaaaccgggaacgaacggctaatgagaaaactacgtccagtcccgcagagccgaccgagaacggccagaggacaccattcgctaacgagaagacgacgagctccagtgccgagcccacggagcatggcgaaagaaccccactagcaaatgaaaatacaacattgagccccgccgagccgacggagaatcgtgagagaacggcaaacgagaagaccaccccatttccagcagaacccactgagaaccgggagcggacagctaacgaaaacactacaccgagccctgctcagcccacagaaaatggcgatagaactccacttgccaatgaaaaaaccacaccttctctcgccgaacctaccgagaatggcaaacgcaccccttttgctaacgaaaaaaccacctcttcctcagccgagcccacggagcatgctgagcgcacacctctggctaacgagaataccacgagtagcccagccgagccaaccgagaaccgcgagcgtacagcaaacgagaagactacgcaattcccggcggagcctactgaaaaccgggaatctaccgcaaacgagaagaccactcctttccccgcagagcccacggaaaaccgcgagtggacagccaacgagaacacaacattatctcccgctgaaccgacagagcatgaagagatgacgccgctggccaatgagaagaccaccttgtcgccagctgaaccgactgagaatggtgagcgcaccccattcaccaacgaaaaaactaccccttctagtgccgagcccactgaacatggtgagcggacccctctggccaacgaaatcactaccccgtcaagggccgagcccaccgagcatggcgagagaatcgccaacgagaaagccaccccctctccagctaagcctactgaacatggtgaaaccactgtaaacgaagatacaacgccttcttccgccgaaccgacagagaacggtgaaaggacgcctctagcgaatgaaaacaccactaccagtccgaccgagtccacggaacacggagaacgcacggcaaatgagaagaccacgcctagccctgctgagcccaccgagcatggagagcggaccccaagtgccaatgaaaagactattccgtcccctgccaaacctacggaacatgaagaaatgaccccctctgccaatgaaaacaccaccccttccccggtcaagcctactgagcacggggaaaaaacaacacttgcaaacgagaagatcaccctcagccccgagggtccaaccgagcacggggccaagaccactagcgctaacgagaagatcaccccctccttagcaaaacctaccgaacacggagagcgcacaacaagcccgaatgacaagattacatcaagcgctgccgagtcaacagaacatagggaccgtgccaccagcgccaacgtaattactccagcaccagcggagcctatcaagcatgccaaaaggaccaccctagctcacgagaaaatgactcaagtgacagaaaaaagcacagagcaccccgaaaagaccacgtccaccaccgagaagactacacgaacccctgaaaagccaacgctttattcagagaagacaatctgcacaaaaggcaaaaatacacctgtgccagaaaaaccgaccgaaaacttgggcaatacaacgttgactactgagacgataaaagcccctgtgaaaagcacagagaacccggaaaaaacagctgccgtgaccaaaaccattaagcccagtgtgaaggtcacgggcgataagtctctgacaaccacatctagccatctgaacaagacggaggtcacccatcaagttcccaccggaagtttcaccctgataacatcccgaaccaagctttcatctatcactagtgaagcaaccggtaatgaatcccatccctaccttaacaaggacggcagtcagaaaggcatccacgctgggcagatgggtgaaaatgactctttcccagcatgggcgatcgtaatcgtagtgctggtggccgtgatcctacttcttgtctttctggggttaatctttctggttagctacatgatgagaactaggcgtacattaacacagaacacgcaatacaatgatgccgaggatgaagggggtcccaatagctatcccgtgtacctgatggagcagcagaatctggggatgggtcagatcccctcaccaagatag

SEQ ID NO: 114554 - DNA, 2670 bp, synthetic construct
  misc_feature 1..2670: note = Description of Artificial Sequence: Synthetic coding sequence
  source 1..2670: mol_type = other DNA
atggcgcagcccgtgcacagtctttgctcggcctttgggctccagtgttgcttgttattcctccttgcttcatggggagcgggggctactacgttccaggagtatcagaagaccggggagctctccacaagtgaccacattttccccctgactccaggtctcgtctatagcatcccttttgaccacatagtgctgcactccgggcagaggccacctgaactcccaaagtctacagagatccacgagcagaagcgtcattgcaacactacccggcatagcaagcctactgataagcctaccggcaactcaaagactatcgaccataagagcagtactgacaaccatgaggctccccctacttcagaagagaactcatcaaatcaggggaaagacccaatgatccgcaaccagagaagcgttgatcctgctgactcaaccactacccacaaggaatccgccggcaagaagcacattacgcctgctccaaagagtaaaatcaattgccgaaaatcgacaaccggaaagagcaccgttaccaggaaaagcgacaagactggccgacccctggagaagtcaatgagtaccctagataagacctccaccagctcccacaaaacaaccacctccttccataattctgggaatagtcagactaaacaaaagtccacatctttcccagagaaaatcaccgccgcttccaaaaccacttacaaaactacaggcacccccgaggaatcggaaaagactgaagacagcagaaccactgtggcttccgataaactgctgaccaaaacaaccaagaacatacaggaaaccataagtgccaacgaattgactcaatctcttgccgaacccaccgagcacggaggccgaaccgccaatgaaaacaatactccgtcccccgctgaaccaaccgaaaatagggagcgaaccgcaaacgagaacacaaccctcagccccgccgagcctaccgaaaaccgggagcggactgctaatgagaataccgctcccttccccgctggcccaactgagaacagagaaatgaccgctaatgaaaacactaccctgttcccagccgaaccgactgagcacggggaaaggaccgctaatgagaacactaccccctccccagccgaaccaaccgagcatggggagcgcacagcaaatgagaacacgacaccttccccggccgagcccaccgagcacggggaaaggacaccttttgccaatgacaagacaacaagtagctcagcagaaagcaccgaacacggtgaaagaactccattagccaacgaaaataccaccccgtctcccgccgaacccacagagaaccgtgagcgaacagcaaatgaaaacactacacccagcccagctgggcctactgagaatcgggagacgaccgccaatgagaagactacactaagtcctgtggagccgaccgagaatcgcgaaacaaccgcaaatgaaaaaaccactccctctccagccgaacctacggagaatgggcagcgcacccctttcgccaatgagaagacgacaagcagtagcgctgaacccacagaacacggagaacgcactcccttagcgaatgagaacacgacccctagccctgctgaaccaactgaaaatcgcgaacgcactgcaaatgaaaagacaacccctagccccgccgagcccacagaaaatggagacaggaccccattggccaacgagaaaacaactccatcactcgctgaaccaaccgagaacgggcaacgtacccctttcgctaatgagaagacaacctcttccagtgcagagcccaccgaacacgaggaacgcaccccattagctaatgaaaatactacgccgagtccagctgagcccaccgagaaccgtgaaaggaccgcaaacgaaaatacgaccccaagtcccgcaggccccaccgagaatagggagatgacggcgaacgagaaaaccacactgttcccagccgaaccaaccgagaaccgcgaaaggaccgctaacgagaagacaaccagcagtcccgccgagcccaccgaaaatggacagagaaccccgtttgctaatgagaagacaacatcctcttctgcagagccgaccgagcacggggagaggacgccgctggctaacgagaataccaccctgtctccggcagggccgacagagaacagggagcgtaccgccaacgagaagacaactccttttccagctgaacctactgagaatagagagagaactgcaaatgagaacacaactccttccccagctcagcccactgagaatggagaccgaacccccctggccaacgagaaaacaactcccagcctggccgagcccaccgaaaatggcaagaggaccccctttgctaatgaaaagacgacctcttcgagcgcagagcctactgaacatgccgagcggacgcccctcgctaacgagaatactacaagttctcctgctgagcctaccgagaaccgagaacggactgctaacgaaaaaacaactcagtttccagctgagcccacggagaacagagagtctaccgcgaacgaaaagacaaccccatttcctgccgaaccgactgaaaatcgggaatggacggccaatgagaacacgacgctgtctcccgctgaaccaactgagcacgaagaaatgactccattggcctag

SEQ ID NO: 114555 - DNA, 1653 bp, synthetic construct
  misc_feature 1..1653: note = Description of Artificial Sequence: Synthetic coding sequence
  source 1..1653: mol_type = other DNA
atggtgcctaaagccgactccggagcattcctgctgttattcctcttagttctaaccgttaccgaaccgttacggcctgaactgaggtgtaatcccgggcaatttgcctgcaggagcggtacaatccagtgtattccgctcccttggcagtgcgacgggtgggccacctgcgaggacgaatccgatgaagctaattgccctgaagtcacaggcgaggtcaggcctcaccacgggaaggaggctgtagatcccagacagggccgagctcgtggaggggatccgtcccacttccatgccgttaatgtagctcagcctgtcaggttttcttccttcctgggtaagtgtcccacggggtggcaccactatgaagggaccgccagttgctatagagtgtacttaagcggggagaattactgggatgctgcccagacctgccagcgcctgaatgggtccctggcaacatttagcacggaccaagaattgcgtttcgtcttggcacaagagtgggaccagcctgaacgatctttcggttggaaagaccagcggaagctctgggtgggctaccagtacgtgataactggacggaataggagcctggaggggagatgggaggtcgcttttaaaggatccagcgaagtgttcctgccccctgatcctatttttgcctccgctatgtcggaaaatgataatgttttttgcgcccagctccagtgcttccattttcctactcttcgacatcacgaccttcactcttggcatgcagagtcctgttacgaaaagtcttctttcctttgcaagcggtcgcagacctgcgtcgacattaaggataatgtcgttgacgagggtttttatttcacacccaaaggcgacgacccttgcctgagctgtacctgccacggcggcgaacccgagatgtgtgtagccgctctgtgcgaacggccccaagggtgccagcaatatcggaaggacccaaaggaatgttgcaagtttatgtgccttgaccccgatggcaactcactcttcgacagtatggcgtcaggaatgcgtctcgttgtgtcctgtatcagtagtttcctgatcctgtccctgcttttgttcatggttcacaggcttaggcaaaggcgccgcgagaggattgagagtcttattggtgccaacctgcatcatttcaacctggggagacgaatcccaggtttcgattacggtccagatggctttggcaccggactgacacctctgcatctgagtgatgacggagaaggggggactttccatttccatgatcccccacctccctatactgcatataagtatcctgacataggacagccggatgatccaccccctccctatgaagcttccatccatcctgattctgtgttctatgatcccgcggacgacgacgcatttgagccggtcgaagtgagcttgccagcccccggcgacggcggctccgaaggcgcactgttgcgccgactggagcagccactgccaacagctggcgcctcactcgctgacctagaggactcggcagactcttcctccgcgctgctggtccccccggaccccgctcagtccggtagcacccctgcagctgaggccctgcctggaggtgggcgccacagtcgatccagtctcaatacggtcgtttag

SEQ ID NO: 114556 - DNA, 984 bp, synthetic construct
  misc_feature 1..984: note = Description of Artificial Sequence: Synthetic coding sequence
  source 1..984: mol_type = other DNA
atggtgcctaaagccgatagtggggcctttctgctcctttttctcctggttctcacagtgacagagcccctgcgccctgaactgcgatgcaatcctggccaatttgcttgtaggagtggcaccatccagtgcattccgctcccctggcagtgcgacggttgggctacctgtgaggacgagtctgacgaggcgaattgccctgaagtgactggcgaggtgcgaccacaccacgggaaggaggccgtcgatccacggcaaggacgcgctagggggggggatccttctcatttccatgctgtgaacgtcgctcagcctgtacgattttcttctttcctggggaagtgccccacaggttggcatcactatgaggggaccgcaagctgctacagagtatacctctcaggagaaaactactgggatgccgctcagacctgtcagagactgaatggttctctggcaacgttttcaactgatcaggagctccgttttgtactggcccaagagtgggaccagcccgagcggtccttcggctggaaagatcagaggaaactctgggtgggctaccagtatgtgataactgggagaaaccgcagcctggaaggtagatgggaggttgcttttaaggggtcctccgaagtatttcttcctcccgaccctatcttcgccagtgcaatgtccgaaaatgacaacgtgttttgcgcccaactccagtgctttcatttccccacacttcgacatcatgatctgcacagctggcacgccgaaagttgctacgaaaaaagctcatttctatgtaagcggtcccagacctgtgtggatattaaggacaacgtggtcgatgagggcttttacttcactcctaagggtgatgacccctgcctgtcctgtacctgccatgggggggaacccgaaatgtgcgtggccgcactgtgcgagcgcccccagggctgcagcccgctcagttgtacagcaagagccacctag

SEQ ID NO: 114557 - DNA, 1530 bp, synthetic construct
  misc_feature 1..1530: note = Description of Artificial Sequence: Synthetic coding sequence
  source 1..1530: mol_type = other DNA
atggtccccaaagcagacagcggcgctttcctgcttcttttcctgttagtgcttactgttaccgagccacttaggcccgaggtaaccggggaggtgcggccccaccatggcaaagaggccgtggatccacggcaaggtcgagctcgagggggagaccctagtcacttccatgcggtcaacgtggcccagcccgtgaggttctcaagtttcttgggcaagtgccccacgggatggcaccattatgagggtactgcaagctgctaccgggtgtatctgtccggggagaactactgggacgctgcacagacgtgccaaaggttaaacggctcacttgctacctttagtaccgaccaggaactgcgattcgtgctggcccaggaatgggatcagcctgaacgtagtttcgggtggaaagatcagcgcaaattgtgggtagggtaccagtacgtgatcactggcaggaacaggagcctggaggggcgctgggaagtggcattcaaagggtctagtgaagtattcctacctccggatccaatcttcgcaagcgcaatgtccgagaatgataacgtgttttgtgcccagttacaatgtttccactttccaacactgcgtcaccatgatctgcactcttggcatgccgaatcttgctacgaaaaatcttcattcctgtgcaaaaggagccagacttgtgttgacatcaaagataacgtagtggatgaaggcttctacttcacaccaaagggcgatgacccctgccttagttgtacttgccacggcggagagcccgaaatgtgcgtcgctgccttgtgcgagaggcctcaggggtgccagcagtacaggaaggatcccaaggaatgttgtaaatttatgtgcctggaccctgatggaaattcattgtttgattccatggctagtggaatgaggctggttgtgtcctgcattagttctttcctgatattatctcttcttctgtttatggtccatcgcctccgccagcgccgacgagaacgtatagagtccctcattggtgcaaatctccaccacttcaatctggggaggcgaattcctgggtttgattatggcccggatgggtttggtaccgggttgacaccactgcacctgagcgatgacggggaagggggtacatttcactttcacgatccaccccccccctacacagcttataagtatcccgacataggccagccagatgatcctccccccccgtacgaggcttccatccatcccgactcagtcttttatgacccagcagacgacgatgccttcgagcccgttgaagttagcctacctgcccccggagacggagggtctgaaggagcattactgcgcagacttgagcaacccctcccgacagcgggcgcttctttagctgatttagaggattctgcggacagctcaagcgccctgctggtacccccagaccctgcccaaagcgggtcgacccccgccgcagaggcgctgcctggaggcggtcgccactcaaggagtagcctcaacacggtggtctag

SEQ ID NO: 114558 - DNA, 810 bp, synthetic construct
  misc_feature 1..810: note = Description of Artificial Sequence: Synthetic coding sequence
  source 1..810: mol_type = other DNA
atggtgcctaaagcagactctggcgcctttcttctgttgttcctccttgtgttgaccgtgactgaaccactgaggcccgagctgcggtgtaacccgggacaatttgcttgcaggtctggaacaattcaatgcataccgctaccttggcaatgcgacggttgggccacgtgtgaggacgaatccgacgaggcaaactgccccgaggttaccggcgaagtaaggcctcaccacggaaaggaagctgtggatccacgacaggggcgggctcgtggcggcgacccgagccactttcacgctgtgaatgtagcacagcctgtgagattttcccggaaatgcccaacagggtggcaccactatgaaggaacagcatcctgttacagagtgtatctctctggagaaaactactgggacgctgctcagacctgtcagaggctgaacgggtccctcgccaccttctctaccgaccaagaacttagatttgtgctggcgcaggagtgggaccagcccgagcggtcgtttgggtggaaagatcagcgaaaattgtgggtgggctaccagtacgttattacgggccgcaatcgctccttggagggccgttgggaagtggcctttaaggactggggcgtttcagatacaatggtacaccgaagattgctctgcccttgcgttggcaccctccatacccaccttaagctgggagccaggttccgcagggtgcctgtgagactgggaggagctctttctaggcggtcaccacgcccaacacctgcttgcgagcccagattgggagcaaagactctgcaggtgtag

SEQ ID NO: 114559 - DNA, 663 bp, synthetic construct
  misc_feature 1..663: note = Description of Artificial Sequence: Synthetic coding sequence
  source 1..663: mol_type = other DNA
atggagaggtatgccggggcactggaggaagtggctgatggcgcacgccagcaggaaagacactatcaactccttagcgccttgcagtcgctggtaaaggagctgccaagctccttccagcagcggctgagctatacaactctatctgacttggcattagccttgctggatgggactgtgttcgaaatcgtgcagggcctcctcgagatccagcatttgactgaaaaaagcttatataaccaacggctgcgccttcagaacgagcatagagtcctccggcaagccctgcggcagaagcatcaggaagcacaacaggcctgcagacctcataacttaccggtactgcaggcagcccagcaacgggagctggaggctgtggagcatagaatccgagaagaacagagagccatggatcagaagatcgtgcttgagctggacagaaaagtggcggatcagcaatccaccctggagaaggccggagttgcgggcttttacgtcactacaaacccacaggaattgatgttgcaaatgaacctgctcgagttaattagaaaactgcaacagaggggttgctgggccggtaaagccgctctggggctcggcggtccgtggcagttgccagccgcccagtgcgatcagaaggggtcacctgtgccgccctag

SEQ ID NO: 114560 - DNA, 663 bp, synthetic construct
  misc_feature 1..663: note = Description of Artificial Sequence: Synthetic coding sequence
  source 1..663: mol_type = other DNA
atggagcgctatgcggccgccttggaagaagtggccgatggcgccagacagcaagagaggcactaccagttactaagtgcactgcagtccttggtgaaagaactgccttcttcctttcagcaacggctatcttataccacgttgagcgaccttgcccttgcattattggacggtaccgtgttcgaaattgttcaaggactcctggagattcagcaccttacagaaaaatccctgtacaatcagcggcttcgcttacagaacgagcacagggtgctaaggcaggcgctacgacaaaaacatcaagaggctcagcaggcctgccggccacataatctgcccgttgtccaggccgctcagcagcgggagctggaagctgtggagcataggattagagaggaacagagggctatggaccagaaaatcatcctggagttagatcgcaaggtggcagaccagcagtcgactctcgagaaggcaggagtggccggtttctatgtcacaaccaatcctcaagaattgatgctgcaaatgaatttgctggaactcatcaggaagcttcagcagcgagggtgcagagctggaaacgccgccctaggcttgggtggaccctggcagagccctgcagcccaatgtgatcagaagggatcccccgtaccgccatag

SEQ ID NO: 114561 - DNA, 2322 bp, synthetic construct
  misc_feature 1..2322: note = Description of Artificial Sequence: Synthetic coding sequence
  source 1..2322: mol_type = other DNA
atggagaccgacgagagtccgtcccctcttccttgcgggcctgctggagaagccgtcatggaatctcgagcaaggccttttcaggcactgccgcgggagcagtcgccacctcctcctctgcagacttcatccggcgccgaggtcatggacgtgggatcaggcggagatggacagtccgaattacctgccgaggaccccttcaacttttatggcgcctccctgctatccaaaggttccttctcaaaagggcgcctgttgattgacccgaattgttccggccattcaccaaggaccgcgagacacgcgccggccgtccgcaagttcagcccggatttgaagcttttgaaagatgtgaaaatttcagtgagcttcacggaatcatgccggagtaaagataggaaagtgctatataccggggccgagagggatgtgcgagccgagtgcggcctgctactgtctcctgtttccggcgatgtgcacgcttgtcctttcggagggagcgtcggcgacggtgttggtatcgggggtgaaagtgccgataagaaggacgaagagaatgaactcgaccaagagaagcgtgtggagtacgccgtccttgatgagctcgaggactttacggacaatttagaactggatgaagagggagccggcggatttactgccaaggcgatagtccagcgcgaccgtgtggacgaggaggctctaaatttcccctatgaagatgatttcgacaacgatgtcgacgcactgctggaggagggcctgtgtgcaccaaagaaaagacggaccgaagaaaaatacggtggcgactcagaccatccctccgatggcgagaccagtgtgcagcctatgatgaccaagatcaaaactgtcctaaagtcgcggggcaggccacctacagagcccctgccagacggctggatcatgacctttcacaattccggagtccccgtgtacctccatagggaaagtagggtggtgacatggagcaggccttactttctcggcacgggatccattcgaaaacacgaccctccattatccagcatcccatgcctccattacaaaaagatgaaggataatgaggagagggagcagtcgagcgatctcacaccaagtggcgacgtatctcctgtgaagcctctgtcccggtctgctgagctagagtttccactggatgaacccgatagcatgggcgccgaccctggcccccccgacgaaaaggatccactcggagcagaagccgcgcctggcgcactagggcaggtaaaagccaaggtggaagtgtgtaaggatgaaagcgtggacctggaggagttcagatcctatctggaaaaaagattcgatttcgagcaggttacagttaaaaagttccgcacttgggcagagcggaggcagtttaacagagaaatgaaacgcaagcaggctgaaagcgagagaccaatcctgcccgctaatcaaaagctcattaccctctctgtccaagatgctccaaccaagaaggagtttgtgatcaatcctaatgggaaatcagaagtctgtattctgcacgagtatatgcaaagggtgctgaaagtccggccggtgtacaacttcttcgagtgtgagaacccctcggaacctttcggggcatcagtcaccattgatggggtgacgtacgggtctggtaccgcgagttcaaagaagctggccaaaaataaggcagcgcgggctactctggagattctcatcccagattttgtaaagcagactagtgaagagaaacccaaggatagtgaggagctggagtacttcaatcacatcagtattgaagatagtagggtatacgagctcacatctaaagctggcctgctgagtccctatcagatcttacatgaatgcctgaaaaggaaccacggaatgggggatacaagcatcaaattcgaagtggtgccaggcaagaaccagaaaagtgaatacgttatggcctgcggcaagcacaccgtgaggggttggtgtaagaacaaacgggtgggcaagcagttggcttcccaaaaaattctgcagctcctgcaccctcatgtgaagaactggggatctctgttaaggatgtatggtagggagagctcgaagatggtgaagcaggaaacctccgataaaagcgtaatcgaactgcagcagtatgctaaaaagaataaacctaatctgcatatcctcagtaaattgcaagaggagatgaaacgtttggctgaggaacgtgaggagacccgcaaaaaaccgaagatgagcatcgtggccagtgcccagcccggcggcgagcctctatgcaccgtcgacgtgtag

SEQ ID NO: 114562 - DNA, 2223 bp, synthetic construct
  misc_feature 1..2223: note = Description of Artificial Sequence: Synthetic coding sequence
  source 1..2223: mol_type = other DNA
atggaaaccgacgagagtccgtcaccattaccatgcggaccagccggagaagccgtgatggagagcagagcacgaccctttcaggccttaccacgtgagcagagtcctcccccaccccttcagacaagttccggggcggaggtgatggatgtcggaagtgggggggatggccagtccgaactgcctgccgaggatccctttaatttttacggagcctctctcctctccaagggctccttcagcaaagggaggctgctgattgacccgaactgtagcggccactcaccccggactgccaggcacgcacctgccgtcaggaaattcagtcccgatctcaagctgctcaaggatgtaaagatcagcgtatccttcacagaaagttgtcgctccaaagatcgcaaggtactgtatacaggagctgaaagagacgtgagagccgagtgtggactgttgttgagtcccgtgagtggagatgtgcatgcatgtcctttcggcggctccgttggggacggtgtgggaattggaggcgaatccgccgataagaaggatgaggaaaatgagcttgatcaggaaaaacgggtagagtacgccgtcctcgatgagcttgaggattttacggacaacctggaactcgatgaagagggagccggagggtttactgccaaggccattgtgcagcgggaccgtgtggatgaagaggctctgaacttcccctacgaagatgacttcgacaacgatgtggacgcactcctggaggaaggtttatgtgcccctaagaagaggaggacagaggaaaaatacggcggcgattccgatcacccatctgatggcgagacaagcgtccagccaatgatgaccaaaatcaagaccgttcttaagtctaggggccgtcccccaacagaacccttgccagatgggtggatcatgacattccacaattctggtgtcccagtgtatttacaccgggaatctcgcgtggttacctggagtaggccgtacttcctgggtactggctctattcggaagcacgatcctcctctctcctccataccatgtcttcactacaaaaaaatgaaggataacgaggagcgggagcaaagttctgatcttactccaagtggcgacgtgtcgcccgtgaagcctctctctcgaagtgccgagctggaatttcccctcgatgagcctgacagcatgggcgcagatccaggcccccccgacgaaaaggacccactgggggcagaagccgcaccaggagcccttggccaggttaaggccaaagtggaggtgtgtaaagacgagagtgtggacctggaagaattcaggtcctaccttgaaaaacgctttgactttgaacaggtcactgtaaaaaagtttagaacttgggccgagagaaggcagtttaatagagaaatgaaacgaaagcaggcagaaagcgagaggccaatcctccccgcaaatcagaagctgattacgctgtctgtccaggacgcacccactaaaaaagagttcgtcattaacccaaacggaaaatccgaagtctgcatccttcacgagtacatgcagcgcgtactgaaagtcagacccgtgtataattttttcgagtgtgccagagcgaccctggaaatcctgattcctgatttcgttaaacaaacctcagaagagaagcccaaggattctgaagaactagagtacttcaaccatatttctatcgaggactctagagtatatgagctgaccagcaaggctgggctcttgtcaccataccagattctgcacgagtgcctgaagcgcaaccacggcatgggggacacttctattaaatttgaagttgtgccaggaaaaaaccaaaagagcgagtacgtcatggcctgcggtaagcacacagtccgaggatggtgtaaaaataagagagttggcaagcagctcgctagccaaaagattttacaactattacatccccacgtgaagaattggggctctctgctgcgcatgtacggcagggagtcatcaaagatggtcaagcaggagacgagcgacaaatctgttatcgaactgcagcagtatgctaagaagaacaagcctaacctgcatatcctcagtaaactgcaggaggaaatgaagcggctggctgaagaacgagaggagacccggaagaagcccaaaatgagtattgttgccagtgcccagccagggggagagccattatgcaccgtggatgtgtag

SEQ ID NO: 114563 - DNA, 2223 bp, synthetic construct
  misc_feature 1..2223: note = Description of Artificial Sequence: Synthetic coding sequence
  source 1..2223: mol_type = other DNA
atggagaccgatgagtcaccaagtccccttccttgtggccctgcaggcgaagccgtgatggagtctagggcgcgcccattccaggcactgcccagagaacagtcaccaccgccccctctccagacatcctcaggggcagaggtcatggatgtggggtcgggcggcgacggccaatccgaacttcccgctgaggatcctttcaatttctacggtgctagtctactatcgaagggaagcttttcgaaggggcggctgctcattgatcctaattgcagcggccattcacccagaaccgcccggcatgccccggccgttcggaagtttagccctgacctaaaactgctgaaggacgtgaagatctccgtcagtttcactgagagttgtcgatctaaggatcgaaaggtgttatatactggcgcggaaagagatgtaagggccgagtgcgggctcctcctatcaccggtgtcgggggatgtacacgcttgtcctttcggaggctccgttggagatggtgtgggaatcggcggcgagagtgccgataaaaaagacgaggagaacgagcttgaccaggaaaaaagagtggagtacgcagtgctcgacgaattggaggacttcactgacaatctcgagttggacgaagagggtgctggaggctttaccgcaaaggccattgttcaaagagaccgtgtggacgaagaagctctcaattttccttatgaggacgacttcgacaacgacgttgacgctctccttgaggaggggctttgcgctcccaaaaaacggaggactgaggagaaatacgggggggattcagatcacccttctgatggcgaaacctccgtccaaccaatgatgacaaaaattaagaccgtgctcaaaagtaggggtaggcccccaacggagcccttgcccgatggatggattatgacctttcacaattctggcgtgcccgtgtacctgcaccgcgaaagccgcgtcgttacatggtcccggccttattttttgggcaccggaagcatcaggaaacacgacccaccactttctagcattccatgccttcactataaaaaaatgaaagataatgaagaaagggaacagtctagcgatctcacaccttctggggatgtcagccctgtgaaacccttaagcaggtccgccgagttagagtttccattggacgagcctgattccatgggagcggaccccggtcctccggacgagaaagaccctctcggtgcagaggcggctcccggggccctcgggcaggtgaaagcaaaggtcgaagtttgtaaggacgaatccgtagatctggaagagtttaggtcttacctggagaagaggtttgacttcgaacaagtaacggttaagaaatttcgcacctgggctgagcgaaggcagttcaatcgagagatgaagagaaagcaagccgagtctgaacgtcctattctgccagcaaatcaaaagctcataaccctgtctgtgcaagacgctccaaccaagaaggagttcgtcatcaaccctaacggcaaatccgaggtctgcattctgcacgagtatatgcagagagtcctcaaggttcggcccgtgtacaacttcttcgagtgtgctcgcgcaacgctggagatactgataccagatttcgtcaagcagacctccgaggaaaaacccaaggattccgaagagctcgaatactttaaccacatttcaatcgaggacagcagggtttatgaactaacgtccaaggctggccttctgagtccctatcagatccttcatgagtgcttgaagcgtaaccacggtatgggcgatacatcaatcaaattcgaagttgtgcccggtaagaaccagaaaagtgaatatgtgatggcctgtggaaaacacacagtgcgaggatggtgcaagaacaagcgagtgggaaagcagctggccagccaaaaaatattgcagctgctccaccctcatgtgaaaaattggggctcacttttgcgtatgtacgggcgagagtcttcaaagatggttaaacaggaaaccagcgataagagcgtgattgaattacagcagtatgccaagaaaaataaaccaaacctgcatattctctccaaactacaagaggaaatgaaaagacttgccgaggagcgagaggagacgagaaagaagccgaaaatgtccatcgttgcctcggcacagccaggaggggagccgctctgcacagtggatgtgtag

SEQ ID NO: 114564 - DNA, 378 bp, synthetic construct
  misc_feature 1..378: note = Description of Artificial Sequence: Synthetic coding sequence
  source 1..378: mol_type = other DNA
atggaaacagacgagtctcctagtcccctgccatgcggtcctgctggcgaagccgtaatggagagccgcgcacgcccttttcaggcactccccagagagcagtctcccccccctcccctgcagactagctccggtgctgaagtaatggatgtggggtcagggggcgacggacagtctgaactgcctgctgaggatccctttaacttctatggcgcctcattgctgtctaaaggctctttctcgaaaggacggttacttattgaccctaactgtagtggccatagtccccggactgcccgccacgctcccgccgtcagaaagtttagccctgatctgaagctgctgaaagacgtaaagatttctgtgtccttcacctag

SEQ ID NO: 114565 - DNA, 564 bp, synthetic construct
  misc_feature 1..564: note = Description of Artificial Sequence: Synthetic coding sequence
  source 1..564: mol_type = other DNA
atggtggggtctctgaattgtatcgttgccgtgagtcagaacatgggtatcggaaagaatggcgacctgccctggcccccactgagaaacgaatttcgctattttcagcgaatgaccaccacatcttcagtggaaggtaagcaaaatttagtaataatgggaaaaaagacatggttctcaataccagagaagaatcggcctttaaaggggaggatcaatctggtcttgtcacgtgagctaaaagaaccaccccagggtgcccattttctgagccgttcgctcgatgatgcacttaagcttaccgagcaacccgaactggctaacaaggtggacatggtctggatcgttggaggcagtagtgtgtacaaggaggccatgaaccatccaggccaccttaaactcttcgtgacccggattatgcaggacttcgagtccgacacttttttcccggaaattgatttggagaaatacaaactgttgcctgagtaccccggagtattgtctgatgtgcaggaagaaaagggtataaagtataaattcgaggtttacgagaagaacgattag

SEQ ID NO: 114566 - DNA, 564 bp, synthetic construct
  misc_feature 1..564: note = Description of Artificial Sequence: Synthetic coding sequence
  source 1..564: mol_type = other DNA
atggttggctccctgaactgcatagttgccgtctcccagaacatgggaattgggaagaatggcgatctgccatggccccccttgcgcaacgagtttagatacttccagcggatgaccactaccagcagcgtcgaggggaaacagaatctggtaatcatgggaaaaaaaacttggttcagtattccagagaaaaaccggcctctcaagggtcgcatcaatctggtcctgtcgcgggaacttaaggagccaccacagggcgcccattttctttcccgaagcttagatgacgctctaaagttgacagaacagccagagctcgctaataaggtcgatatggtctggatcgtgggggggtcctctgtatacaaggaggcgatgaaccacccaggacacctgaaactatttgtgacacggataatgcaggacttcgagtcagatactttcttccccgaaattgacctcgagaagtataagcttttgccagaataccccggagttttaagcgacgtgcaagaagagaagggtattaaatacaagtttgaagtgtatgagaagaacgattag

SEQ ID NO: 114567 - DNA, 963 bp, synthetic construct
  misc_feature 1..963: note = Description of Artificial Sequence: Synthetic coding sequence
  source 1..963: mol_type = other DNA
atggccgccgtccgtatgctccgcacctggagccgcaacgccgggaagcttatttgtgtacgttacttccagacctgtggcaacgttcacgttctgaagcccaactacgtctgctttttcggatatccctcatttaaatactctcatccacaccatttccttaaaacaactgccgcccttagggggcaggtggtccaattcaagctgtctgatatcggtgagggtatcagagaagtcacagtgaaggaatggtacgtaaaggagggtgacactgtgtcccagtttgactccatctgtgaagtccaaagtgataaggcatcagtgactattacctcacgctacgatggtgtcatcaagaagctgtactacaacctggatgatatcgcctacgtgggcaaacctctggtggatatcgaaactgaagccctgaaagatagtgaggaagatgtcgtggaaactcccgccgtgagccatgatgagcacacacaccaggaaattaaaggccggaagacactggcaacacccgccgtccggcgcctggcaatggaaaacaacatcaaactatcagaagtagtcggcagcgggaaggacggacggatcttgaaagaagatattttgaactatctcgagaaacaaaccggtgccatcctgccaccttctccgaaggtggagatcatgcctccgcccccaaagccaaaagatatgaccgttcctattctggtaagcaagccccctgtattcactggtaaagacaaaaccgaaccaatcaagggattccagaaggctatggtcaaaacaatgagcgccgccctgaagattccacattttggatactgcgacgaaatagacttgaccgaactggtcaaactgagggaggaattgaaacccattgcttttgctcggggcatcaagctgagttttatgcctttcttcttgaaatattatttcagttggaagtcttag

SEQ ID NO: 114568 - DNA, 1449 bp, synthetic construct
  misc_feature 1..1449: note = Description of Artificial Sequence: Synthetic coding sequence
  source 1..1449: mol_type = other DNA
atggcggctgtgcgaatgctgcggacttggagtcgcaacgcagggaaactgatttgtgtgcggtactttcagacatgcggcaatgtacatgtgttaaagccgaactatgtttgctttttcggctatccctcttttaagtacagtcacccacatcacttcctgaagaccacggccgccttacggggtcaggtagtgcaatttaaactctccgatataggggagggtatcagggaggttacagtgaaggaatggtacgtgaaagagggcgacacggtgtctcaatttgactcaatttgtgaggtgcaaagtgataaggccagcgtcacaattacaagtaggtacgacggggtcataaagaagctctattataacctggatgatattgcatacgtaggcaagccactggtggatattgaaacggaagctctcaaggactccgaagaggatgtagtcgagacacctgcagtgtcacatgatgagcatactcaccaggaaatcaaggggcgcaaaacgctagctacaccggctgttcgtcggctcgccatggaaaataatataaagctgtcagaagtggtcggatctgggaaggatgggcggatcttaaaagaggacatcctcaattacctcgagaaacagaccggcgctattctccctcccagtcctaaggtcgagatcatgccccctccacccaagcccaaggatatgactgtgcctatactcgtgtcaaagcccccagtgtttactggaaaggacaagacggagccaattaagggattccagaaggcaatggtgaaaaccatgtctgcagccctgaagattcctcatttcggctattgcgatgagatagatttgacagaactcgtgaaattgagggaagaacttaagcctatagctttcgcaagaggaatcaaactctcatttatgccatttttcctgaaggctgcttcattggggctgctgcagtttccaattctgaatgcctctgtggacgaaaattgtcagaatataacgtataaggcctcacacaatattggcatcgctatggacaccgagcaggggttaattgtccccaacgtaaagaacgttcagatttgctctattttcgacattgccacagaactcaatcggctgcagaagctggggagcgtcagtcaactgtccaccaccgacctaactgggggcacctttaccttgtccaacatcggcagcattggcggtacattcgcaaaaccggtgattatgccaccagaggtcgcaattggggcacttggaagcatcaaggcaattcccaggttcaaccagaagggtgaggtgtacaaggctcaaatcatgaatgtatcctggagcgccgaccacagagtgatcgacggagccacgatgagccgcttcagcaacttgtggaaaagttacctcgaaaatcccgcctttatgctgctggatctcaagtag

SEQ ID NO: 114569 - DNA, 906 bp, synthetic construct
  misc_feature 1..906: note = Description of Artificial Sequence: Synthetic coding sequence
  source 1..906: mol_type = other DNA
atggaaaacaacattaaactgtccgaggtggtcggatctggtaaggacggcaggatcctgaaggaagacatcctgaactatctagagaaacagaccggcgccatactacctccttctcccaaggttgagatcatgccacccccacccaagcccaaggatatgacagttcctatcctggtctcaaaacctcccgtttttaccggaaaagataagactgaaccgatcaagggatttcagaaggccatggttaaaacgatgtctgcagctctgaaaatccctcatttcggctactgcgatgaaatagatctgaccgaattggttaaactcagagaagagctgaagcccatcgcctttgctcgagggatcaagttgtcattcatgccattttttctgaaggcggcaagtttgggtttgcttcagttccccattctcaacgcaagtgtcgacgagaattgccagaacatcacctacaaggcaagccacaatataggtatagctatggacaccgagcagggactgattgtacctaatgtcaaaaacgttcagatttgctccatctttgacatcgctaccgagcttaatagactgcagaaactcggatcagtgtctcagctgagcacaaccgaccttaccggaggaactttcacgctgtcaaacattggttctatcggtggaaccttcgctaagccagtcataatgcctcctgaggttgccataggcgccttaggctctattaaggctatcccaagatttaaccagaaaggcgaggtgtataaagcacagattatgaacgtctcatggtccgccgatcacagggtgattgacggtgccaccatgagccgattttcaaacctttggaaaagctacctcgaaaaccccgcgttcatgttactggatttaaagtag

SEQ ID NO: 114570 - DNA, 5286 bp, synthetic construct
  misc_feature 1..5286: note = Description of Artificial Sequence: Synthetic coding sequence
  source 1..5286: mol_type = other DNA
atgcagtttcagctaaccctgttcctccacctaggctggctatcttattcgaaggcccaggacgattgtaatcgcggggcttgtcacccaaccacaggcgacctgctagtcggacgcaacacgcagttgatggccagcagcacatgtggactctcccgggcccagaagtactgtatactcagctacctcgagggagagcagaagtgctttatctgtgactcacgctttccttacgacccatacgatcagcctaactcccacaccattgagaacgtcatcgtgagctttgagcctgacagggaaaagaagtggtggcaatccgaaaacgggctcgatcacgtgtcaatccggctcgacttagaagctctctttcgatttagccacctgatcctgacatttaaaaccttcaggccggctgcaatgctggtggagagatccaccgattacggccacaattggaaggtgtttaaatacttcgcaaaggactgtgctaccagcttcccgaatatcacctcaggccaggcccagggcgtcggtgacattgtgtgtgactcgaaatacagcgacattgaaccttctaccggcggagaagtggtcctcaaagtgctcgacccctcattcgagatagaaaatccatacagcccatatatccaggacttggtcaccctcactaatctgaggataaactttactaaactgcataccctcggcgatgctctacttggacggcgtcagaacgatagtctcgataaatattactatgccctatatgaaatgatcgtccgcggtagctgcttttgtaacggccacgcctcagagtgccggccaatgcagaaaatgaggggcgacgtcttttcccctcctggcatggttcatggacagtgcgtatgccagcataacaccgacggacccaattgcgagcgctgtaaagatttttttcaggatgcaccttggcgcccagctgccgatcttcaagacaatgcttgccgatcttgttcttgtaatagtcattccagcaggtgccacttcgacatgacaacgtaccttgcatccggcggcctcagcggaggcgtgtgcgaggattgccagcataacacagaggggcagcattgcgacagatgtcgcccgctgttctacagagatccgctgaagacgatctctgatccgtatgcctgcataccctgtgagtgtgatcctgacggaactatttccggcggcatttgtgtatcgcacagcgacccagccctcggcagcgttgcaggccagtgcctgtgcaaagagaacgtggagggcgccaagtgtgaccagtgtaaacctaatcattacggactctccgccacagatccactgggttgccagccatgtgactgcaaccctcttggttcattgcccttcttgacttgtgatgtcgacacaggacaatgtttgtgtctgtcctacgtcacaggagcccattgtgaggagtgcactgtggggtattggggcctgggcaaccatctccacggatgctcaccctgcgactgtgatattggtggcgcatactctaatgtgtgctcccccaaaaacggtcagtgcgaatgcagacctcatgtgactggccgctcgtgttctgaacccgcaccgggatacttctttgcacctctgaacttctacctctatgaagctgaagaggccaccaccctgcagggactggcgccactgggcagcgaaactttcggacagtccccagcagttcatgtcgtcttgggggagcctgtccctggaaatccagtaacgtggacaggtcccggctttgctagagtgctcccaggtgccggtctgcgattcgccgtcaacaacatcccttttccagtggattttaccattgccattcattatgaaacccagagtgccgctgattggactgtacagattgtagtgaaccctcctggtgggtcggagcattgtattccaaaaacactgcagtccaagccccaatcattcgctcttcctgcagcaaccagaataatgcttctacctacccctatctgcctagagcccgacgtccaatattcaattgacgtgtacttctctcagccactccagggtgagagccacgcccactcacatgtgctcgtggactctctcggcctgattccccagatcaattctctcgaaaacttctgtagcaagcaggacttagacgagtatcaacttcacaattgcgttgaaatcgcttctgcgatgggaccgcaggtgctcccaggagcctgcgagcgcctcatcatatccatgagtgccaagctgcatgacggcgccgtggcgtgtaagtgccacccccaggggagtgtcggctcaagttgctctaggcttgggggtcagtgtcaatgcaagcctttggtcgtgggaaggtgctgtgatcgttgcagcacaggcagctatgacctgggccatcatggatgtcacccctgtcactgtcacccgcagggatcaaaggatactgtgtgcgatcaggtcactggccaatgcccctgtcatggagaagtatctggaagacggtgcgatagatgcctggctggatatttcgggttccccagctgccatccttgcccttgtaatcgtttcgccgagctttgtgatcctgagactggctcgtgctttaattgcggcggcttcacgactggcagaaactgcgagagatgtatcgacggctattacggtaatccatcgagtgggcagccttgtagaccttgcttatgtcctgacgatcccagttccaaccaatacttcgcccacagctgttatcagaatctttggtctagtgacgtgatctgcaactgtctccagggctacacaggcactcagtgtggcgagtgttctactgggttttatggcaatccccggattagcggagccccctgccaaccatgtgcctgcaataataacatcgacgtgacagacccagagtcttgttcccgtgtcaccggagaatgcctgagatgtcttcacaatacacagggggcaaactgtcagctgtgtaaacccggacattacggttctgccctcaaccaaacctgcaggcggtgttcctgtcacgcatccggggtgtccccaatggaatgcccacccggagggggagcatgtctttgcgaccctgtaaccggcgcgtgtccgtgcctgcccaatgtcaccggcctggcctgcgaccgctgcgctgatggctattggaatttagttcctggtcgtgggtgtcaatcttgcgactgtgaccccaggacgagtcagtcgtcacactgcgatcagctgactggccaatgcccctgcaagttggggtacggggggaagaggtgtagtgaatgtcaagaaaattattacggcgacccccctggaagatgcattccatgcgactgcaaccgcgctggtactcagaagccaatctgtgaccctgacacaggcatgtgccgctgtagggagggcgttagtggccagcgctgcgatagatgtgcacggggccatagccaagaatttccaacatgcctgcagtgccatctgtgctttgatcagtgggaccacactatttcctcactctcaaaggctgtgcagggccttatgaggttggcagctaatatggaggacaaacgcgagactttacccgtgtgcgaagccgactttaaggacctgaggggaaacgtttccgagattgagcgcattctgaaacaccccgtgtttccttctggcaaattcctgaaggtgaaagactaccatgactcagtccgccgccagattatgcaactcaacgagcagcttaaggcagtgtatgagttccaagatctcaaagacaccatcgagcgcgccaaaaatgaggcagacctgctgctcgaggacctgcaggaagagatcgacctgcagtcttccgtactgaatgcttcgatcgcagattcttctgagaatataaagaagtattatcatatctcttcttctgctgaaaagaaaatcaatgagaccagctccaccataaatactagtgccaatacacgtaatgacctgctaaccatactggacactctgacctccaaaggcaatctcagcctggaacgcctgaagcagatcaagattccagacatacagatcctgaatgaaaaggtatgtggcgacccggggaacgtgccgtgcgtgccgttgccatgcggaggtgcactctgcacaggaaggaagggccacagaaagtgcaggggaccaggttgccatgggagtctcaccctgtctacaaacgctttgcagaaagctcaggaggccaagtctataatccgtaatttagataagcaggtaagaggcttaaagaaccagatcgagtcaataagcgagcaagcggaggtttcaaagaacaacgcccttcagctgagagaaaaattaggcaatattcgcaatcagtctgactctgaggaggagaatattaatttgttcatcaagaaagtgaagaattttctgttggaggagaacgtgcctcctgaggacatcgagaaagttgccaacggggtgctcgacatccacctgcctattccttctcagaacctgaccgacgagctggtgaaaatacagaaacacatgcaactatgtgaagattacagaaccgacgagaacaggctgaacgaggaggccgacggagcacagaaactcctggtgaaggctaaggccgccgagaaagccgcgaatatcttactcaacctcgataagacacttaaccagctccaacaggcccaaataacacagggaagagcaaattctaccattacccagctcaccgccaatataaccaagattaagaaaaacgtcttgcaggcagaaaaccagacaagggagatgaaatccgaactcgagctcgctaaacagagatctggcctagaggacggcctttcactcttgcaaacgaaacttcagcgacaccaggaccatgcagtgaatgccaaagtccaggccgaatccgcccagcaccaggcgggctccctggaaaaggaatttgtagagttaaaaaaacaatatgcaatcctgcagcgaaaaacgtctaccaccggactgaccaaagaaacacttggcaaggtcaaacagctgaaggacgcagccgaaaaactggctggagatactgaggcaaaaatcaggcggatcactgatctggagaggaagatccaggatttgaacttaagccggcaagccaaggccgatcagctgaggatcctggaagaccaggtggtcgctatcaagaacgagatagtggagcaggaaaagaaatacgcacgttgctatagttag

SEQ ID NO: 114571 - DNA, 1530 bp, synthetic construct
  misc_feature 1..1530: note = Description of Artificial Sequence: Synthetic coding sequence
  source 1..1530: mol_type = other DNA
atgcagtcctggtctcgcgtgtattgttcgctagcaaagaggggccactttaaccgcatctcgcacggcctccagggcctttctgccgtgccactgcggacctatgccgatcagccaatcgacgctgacgtgaccgtgatcgggtctgggccaggggggtacgttgccgccatcaaagccgctcagctgggcttcaaaactgtatgtatcgagaaaaacgagacccttgggggtacatgtctgaatgtgggatgcattcccagcaaggctcttctcaacaactcacattactaccacatggcccacggaaaggacttcgcttcaagagggatcgagatgagtgaggtcagactcaacctggacaagatgatggagcagaagagcacggctgtgaaagctctgactggcgggatcgcccacctctttaagcagaataaagtcgtgcacgtgaacggctatggcaagattacaggcaagaatcaggtgacagccactaaagccgacgggggtacccaggtgattgatacgaagaatattctgattgcgacaggttctgaagtcactccgttcccaggcattaccattgacgaggacacaatagtgtccagtactggggcacttagtcttaaaaaggttcccgaaaagatggtggtgatcggggcaggcgtcattggtgttgaactgggatccgtgtggcagagactgggggccgatgtcacagctgtggaattcctggggcacgttggaggggtaggcattgacatggagatttcaaaaaattttcagagaattctgcagaaacaagggttcaaattcaaactcaatacaaaggtgaccggcgcgaccaaaaaatcagatgggaagatcgacgtcagcatcgaggccgcctctggagggaaagccgaagtgataacttgcgatgtgctgctggtctgcatcggaaggcgtccttttacaaagaatctgggtctcgaggagctcggcattgaattagacccacgaggtaggattccagttaatactcgctttcagaccaagatacccaatatctacgccattggtgatgtggtagccggtccaatgcttgctcataaagcggaagacgagggaatcatatgcgtcgagggcatggctgggggagccgttcatatagattacaactgtgtgccctccgttatttatacacacccggaggttgcctgggtcggaaaatcagaggaacaactaaaggaggaaggaattgagtacaaagtgggcaaattcccctttgccgctaatagccgcgctaagactaatgccgacacagatgggatggttaagatactcggtcagaagtccacagacagggtgttaggcgcccatatcttggggcccggcgcaggtgaaatggtgaacgaggctgcattggcattggagtatggggcaagctgtgaggacatcgcaagagtgtgtcatgcccacccaacactgtcagaagcattccgtgaagccaatctggccgcctccttcgggaaaagtattaacttctag

SEQ ID NO: 114572 - DNA, 1386 bp, synthetic construct
  misc_feature 1..1386: note = Description of Artificial Sequence: Synthetic coding sequence
  source 1..1386: mol_type = other DNA
atgcagagctggagtcgcgtgtattgttcactcgccaaacgcgggcattttaatcgaatttcacacgggttgcagggtctgagcgccgttccccttagaacctatgcagaccagccaatagatgctgacgtcacagtgatcggttcaggccccggtggatatgtcgctgccattaaggccgctcaacttggcttcaaaaccgtttgtatcgaaaagaatgagactttggggggtacttgtcttaatgtgggatgcatcccctctaaggccttactcaacaacagtcactattatcatatggctcatggcaaagattttgcctctagggggattgagatgagcgaagtaagactcaaccttgacaaaatgatggaacagaagtccactgccgtcaaagctttgactggcggcattgcacacctgtttaaacagaataagatcgatgaggatactatagtgagttcgacgggagccctctcactgaagaaggtgccagaaaagatggtagtaatcggcgctggtgtaattggagtggaattaggctctgtgtggcaacggctcggcgctgacgtcaccgctgtagaattcctcggacatgttggaggcgttgggatcgacatggagataagtaaaaatttccagcggatattgcaaaaacaggggttcaagtttaagttgaacacaaaggtgaccggagcaaccaagaagagcgacgggaagattgatgttagcattgaggctgccagcggcggcaaggcggaggtgataacctgtgacgttctgttagtctgcatcgggcgtcggccttttacaaaaaacctggggctggaagaactggggattgagctggaccctcgcggccgcatacctgtgaacactaggtttcagacaaaaattcccaacatatacgcgatcggcgacgtcgttgctggaccaatgcttgcccacaaggccgaagacgaggggatcatctgcgtggagggcatggcgggcggcgccgtacatatcgactacaactgcgtaccatcggttatctacacacatcctgaagtcgcttgggtgggcaagtcagaggagcagctcaaagaagaagggattgagtataaggttgggaagttcccatttgcagctaatagtcgggcaaagacaaacgccgacacagatggcatggtgaagatacttgggcagaagagtaccgacagggtcctcggagcacacatcttgggaccaggcgccggggaaatggtgaatgaggcagctctggcactcgagtacggcgcaagttgtgaagacatcgccagggtctgccacgcacacccgactctgtccgaagcatttcgagaggctaatctagccgcctcattcggcaaatcaattaacttttag

SEQ ID NO: 114573 - DNA, 1461 bp, synthetic construct
  misc_feature 1..1461: note = Description of Artificial Sequence: Synthetic coding sequence
  source 1..1461: mol_type = other DNA
atgcagtcgtggtcgagggtgtattgtagtcttgcaaagagaggtcactttaacaggattagccacggtctacaggggctcagtgccgtccccctgcgaacgtatgccgatcagcctattgacgctgacgtcactgtgatcggcagcgggcccggcggctacgtcgctgcaatcaaggcagcccagctggggttcaaagccctgctgaacaattcccactattaccacatggcccacggtaaggatttcgcctcccggggtattgagatgagcgaagtgagactgaacctggataagatgatggagcagaagtccaccgctgtgaaggctctgacggggggcatcgcccacttgttcaagcagaacaaggtggtccacgtgaacgggtatggcaagatcaccggcaaaaatcaggttactgctaccaaagcggacggcggaactcaggttatagacacaaaaaacatcctcatagccaccggttcagaagttacccccttccctggtatcacgatagatgaggataccattgtgagcagcaccggagccctgtcattgaagaaggtccctgagaaaatggtggtgattggagccggagtgatcggagtcgagctgggaagcgtgtggcagcgccttggcgctgacgtcaccgctgtcgagtttttaggacacgtcgggggcgttggcatagacatggagatcagcaaaaactttcagaggatactgcagaagcaggggtttaagttcaaacttaacacaaaggtcacaggtgcaacaaagaaatcggatgggaaaatcgatgtctccatagaggccgccagcggagggaaagctgaagtgattacttgcgatgtattgttagtgtgtattggcagacgaccattcacaaaaaacctggggctggaagagctcggaatcgagttagacccacggggccgaatcccagttaacactaggtttcagaccaagattcctaatatttacgccataggcgatgtagtcgcagggccaatgctggcccataaagccgaggatgaagggatcatttgtgtggaaggaatggctgggggggcagtgcatattgattacaactgcgtaccttccgtcatatatacccaccccgaggtggcatgggtggggaagtcagaggaacagctgaaagaggagggaattgaatataaggtcggtaaatttccgttcgcagcaaatagtcgcgccaaaaccaacgccgacacagacggtatggtgaagattttgggacagaagagtactgacagggttctcggagcacatattctgggcccaggcgccggcgaaatggtcaatgaggcggctctggccctggagtatggtgcctcgtgcgaagacatagcccgggtatgtcatgcccaccctacactttccgaggcttttagggaagctaacttggcggctagttttggaaaatccattaacttctag

SEQ ID NO: 114574 - DNA, 1233 bp, synthetic construct
  misc_feature 1..1233: note = Description of Artificial Sequence: Synthetic coding sequence
  source 1..1233: mol_type = other DNA
atggcccacgggaaagattttgccagcagaggaattgaaatgtctgaggtgcgcctgaatctggacaaaatgatggaacagaaatccacagccgtgaaagcgctgaccggtgggatcgctcacctgttcaaacagaacaaggtcgtccatgtgaacggttacggcaaaattacagggaaaaaccaagtgacagccaccaaagcagacggcgggactcaggttatcgatactaagaacatcctgatcgccaccggaagtgaggttaccccttttccagggattacaattgatgaagataccattgtgagctccacaggcgcactgtcccttaaaaaggtgccagagaaaatggttgtgattggcgccggtgttatcggcgtcgagctgggttcggtgtggcaaagactgggcgctgatgtcactgcggttgagtttctgggccacgtaggcggagtgggaatcgatatggagatctctaaaaatttccaaagaattctgcagaagcagggattcaaatttaaactcaacaccaaagttaccggggcgactaagaagagcgatggtaaaatcgatgtctccatcgaggcggcttccggcggaaaggccgaggtgataacatgtgatgtgctgctcgtctgcattggtcggcgcccctttactaagaatctcgggctagaggaactgggaatagagctggacccccgggggaggattccggtgaacacacggtttcagacaaaaatccctaatatctatgctataggggacgtggtcgccggacccatgctcgcccacaaggctgaagatgagggcataatctgcgtcgaggggatggccgggggggcagtgcatatcgattacaactgcgtcccctcggtgatatacactcaccccgaggtggcatgggtcggaaagagcgaggaacagcttaaggaggaggggatcgagtataaggtagggaagtttcctttcgctgcgaattcaagggcaaaaactaacgccgacactgacggcatggtgaaaatcttggggcagaaaagtacagaccgcgttcttggggctcacatcctaggaccaggggctggcgaaatggtgaatgaagccgctttagctctcgaatacggcgctagctgtgaggacatcgctcgcgtgtgccatgcgcatccaactctatcagaagccttccgggaggccaatctggcggccagttttggaaaaagcattaacttttag

SEQ ID NO: 114575 - DNA, 1380 bp, synthetic construct
  misc_feature 1..1380: note = Description of Artificial Sequence: Synthetic coding sequence
  source 1..1380: mol_type = other DNA
atgttgatttacgttgccgccattaaagctgctcagttggggtttaagacggtgtgtatcgagaagaatgagactctgggcggcacctgcctaaacgtgggatgtattccgagcaaggcgctgctcaacaattctcattattatcacatggcccacgggaaggacttcgcaagccggggtattgaaatgtctgaggtcaggctcaacctcgacaagatgatggaacagaaaagcaccgcagtaaaggccctgacgggaggcatcgctcatctattcaagcagaataaagtggtgcatgtcaacgggtacggtaagataaccggcaagaaccaggttacagccacgaaagccgacggcggtactcaggtaatcgacactaaaaacattctgatcgccaccggttccgaagtcactcccttccctgggataacaatcgacgaggacactatcgtctcttctacgggagcactatcacttaagaaggtcccagaaaagatggtggttatcggggctggagtgattggcgtggaactcggatcagtgtggcaacgactaggcgctgacgtgaccgctgtcgagtttctcggacacgtgggaggcgtcggtatcgatatggaaataagcaagaattttcagcgtatcctgcagaaacagggcttcaagttcaagctgaatacgaaggttactggcgccacaaagaaaagtgatgggaaaattgatgtttctatcgaggccgctagcggtggaaaagccgaggtgatcacttgtgacgtgttattagtgtgcattggtcgaagacccttcaccaaaaatctcggtttggaggagttaggcatcgaacttgacccccggggacggattccagtgaataccagattccagaccaagattcccaacatttatgcaattggagacgtcgtggccggcccaatgcttgcccataaggctgaggacgagggcataatctgcgttgagggaatggctgggggggcagttcacattgactacaactgtgtgccatcagtgatctacacacatcctgaagtggcatgggtggggaaatccgaggagcaactgaaagaggaaggaatcgaatacaaggttgggaaatttccgtttgcagccaattcccgggccaaaaccaacgcagataccgacgggatggtcaagatcctcggacagaaatctactgacagagtgctaggggcccatatcttagggccaggagccggagaaatggttaatgaagcagccctggccctagagtatggcgccagttgcgaagacattgcacgggtctgccacgctcaccccaccctgtccgaagctttccgcgaggcaaatcttgccgcatctttcggcaagtccatcaacttttag

SEQ ID NO: 114576 - DNA, 1944 bp, synthetic construct
  misc_feature 1..1944: note = Description of Artificial Sequence: Synthetic coding sequence
  source 1..1944: mol_type = other DNA
atgtggagagtctgcgctcgccgggcacagaatgtcgctccctgggccggtctagaggcacggtggacagcgctgcaggaagtacctgggacaccgcgggtgaccagcagatccggaccggcgccggcgcgcaggaattcggtgactacaggctacggcggcgttcgcgctctttgtggttggacccccagctccggcgccaccccacgtaacaggttgttactccaactgctgggatcaccaggccggagatactactctctaccgccacaccagaaggtccccctgccatctctctctcccactatgcaggccggtacaatcgccagatgggagaaaaaggaaggtgataagattaacgagggcgatctgatcgcagaagttgaaacagacaaggctacagtaggcttcgagtccctggaagaatgctatatggctaaaatcctagtggcagagggtacaagggacgtacctataggagctatcatctgcatcacggtcggcaaacctgaggacatcgaagcctttaaaaactacactcttgactcttctgcggccccaacaccacaggcagcacccgctccaaccccagccgctaccgcaagtccacccactcctagcgctcaagcccctggatcatcctatccgccccatatgcaagtcttgttgcccgccttatctcccaccatgaccatgggcactgtgcaaaggtgggaaaagaaagtgggcgagaaactgagtgagggagatttgctggccgagatagaaactgacaaggcaacaataggcttcgaagtgcaggaagaaggctaccttgctaagatattggtaccggagggtactagggatgtccctttgggcacacccttgtgtatcatcgttgagaaggaagccgatatctcagcatttgctgactaccggcccactgaggtgaccgacttgaagccccaggtaccaccccctacccctcctcccgtggcagctgtccctcccacaccgcagcctctcgccccaaccccgagcgctccatgcccggcgaccccggcaggacccaagggtagagtgtttgtgtctcccctggccaagaaactggccgtcgaaaagggaatcgatctgacccaggttaagggtacgggccctgacggccggatcacaaagaaagacattgactcctttgtgcctagcaaagttgctccagctccagctgctgtcgtgcccccgacaggccccggcatggctccggtgcccaccggggttttcactgatatccctatctccaatattagacgtgtcatcgctcagcgtctgatgcaatcaaaacagacgataccccactattacctgtctatcgatgttaatatgggcgaagtgctgctcgtccgaaaagagttaaataagatccttgagggaaggtctaagatttccgtcaatgactttattattaaagcttctgctttggcctgtctgaaagtcccagaagccaattcctcatggatggatacggtgatcaggcaaaaccacgtggtcgacgtgtctgtggcggtgtcgacaccagctggcctaattaccccaatcgtgttcaatgcacatatcaaaggtgtggaaaccatcgccaacgacgtggtgagcctagccacgaaagcccgcgaagggaagctgcagccccatgagttccagggaggaactttcactatcagtaatctgggaatgtttggaatcaagaacttctccgcaattatcaatcctcctcaggcttgtatcctcgctattggagctagcgaggataaactggttccagcagataatgagaagggctttgacgtcgcatccatgatgagtgtgacgctgtcgtgcgatcaccgggtcgtggatggagccgttggtgcccagtggctagcagaatttcgaaagtatctcgaaaaacctatcacgatgctgttgtag

SEQ ID NO: 114577 - DNA, 678 bp, synthetic construct
  misc_feature 1..678: note = Description of Artificial Sequence: Synthetic coding sequence
  source 1..678: mol_type = other DNA
atgtggcgcgtgtgcgcaaggagagcgcagaacgtcgccccttgggcaggtcttgaagcaaggtggactgctctgcaagaggtccccggaactccccgagtcactagtagaagcgggccagcccctgcaaggcgcaacagcgttaccaccgggtacggcggagtcagggcattgtgcggctggacacctagctccggtgctactccacggaatagattgctgctgcaacttctgggatctcccggccgaaggtattattctctcccaccccatcaaaaggtgcctttgccttccctttcacccactatgcaggcaggaaccatcgctcgatgggagaaaaaagaaggggacaaaatcaatgagggcgacctcattgccgaggtcgagactgataaagcaaccgtgggaaaacctgaggacattgaagctttcaagaactatacactagactcttccgccgctcctactcctcaagctgctccagctccaacaccggccgcaacagcatctccgccgaccccctctgcacaggctcccgggtcctcctaccccccacatatgcaggtgctgctgcccgcgctgagtccgacaatgaccatgggcacggtgcagcgctgggagaagaaagttggtgagaaattgtccgagggcgacttgttagctgagatgagcctatag

SEQ ID NO: 114578 - DNA, 1257 bp, synthetic construct
  misc_feature 1..1257: note = Description of Artificial Sequence: Synthetic coding sequence
  source 1..1257: mol_type = other DNA
atgcaggccggcacaatcgccaggtgggaaaaaaaagagggtgacaagatcaacgaaggcgatttgttggcagagattgaaaccgacaaagccacaatcgggttcgaggtgcaggaggaaggttacttggccaagatcctagtgcccgagggaaccagagatgtccctctgggaacgcccctctgtattatcgtggagaaggaagcagacatctcagccttcgccgactacaggcctacagaagtcaccgatctgaagccacaagtcccacctcccacccctcctcccgtcgctgccgtgccaccaacaccccagccattggctcccacccctagcgccccctgtcccgccacgccagccgggccaaaggggcgggttttcgtctccccgcttgccaaaaagcttgccgtggaaaagggcatcgacctcactcaggtcaaggggactggccctgatgggcggattacaaagaaagatattgatagcttcgtgccctcgaaggtagccccagctccagctgcggtagtccctcctacagggcctggcatggcccccgttcccaccggcgtctttactgatattcctatttctaatataaggcgcgtcattgcccagcgactcatgcagtctaagcagacaatcccgcattattacctctctatcgacgtgaacatgggcgaagtcctgctcgttcgtaaggagctaaacaagatccttgagggtaggagcaagatctccgtcaacgatttcatcattaaagcatctgccctggcatgcctgaaggtccctgaagcgaatagctcatggatggacaccgtgattcggcagaaccacgtagtggacgtatccgtcgcggtctccacgcctgccgggttaatcacccccattgtattcaacgcccatattaagggagtggagacgatcgcaaatgatgtggtgagcctagccactaaagccagagaagggaaattacagcctcacgagtttcaaggcggaacattcaccattagcaatcttggaatgtttggaattaaaaatttttctgcgatcattaatcccccgcaagcctgcatcctcgccatcggggcgtctgaagacaagctcgtcccagccgataatgaaaagggctttgacgtggcaagcatgatgtctgtgacactgtcctgcgaccatcgtgtcgtcgacggggctgtgggagcccagtggctggcagaattcaggaaataccttgagaagcccataaccatgctgctctag

SEQ ID NO: 114579 - DNA, 1104 bp, synthetic construct
  misc_feature 1..1104: note = Description of Artificial Sequence: Synthetic coding sequence
  source 1..1104: mol_type = other DNA
atgacctggctgcagagtaaaccacagcgcttacagaacctgtcccagagagagatgtcagggggacgcaaaacctccgtacaggtcccatccccagctaatggtgttattgaagcactgcttgtgcccgacggaggaaaagtagaaggaggcacgccactttttactctgcgcaagacaggggccgccccagcaaaagccaagccggccgaagcccctgcagccgctgctcctaaggccgaacctacggccgctgcagtgcctcctcccgctgctcctatccctacgcagatgccaccagtgcccagcccttcacagccacccagtggaaagcctgtgtccgctgtgaagcccacagttgcccccccgctggccgaacctggagcaggaaagggcctgcggtccgagcatcgagagaagatgaatcgcatgaggcagcgcatcgctcagcggctgaaagaggcacagaatacatgtgcgatgctgaccacgttcaacgagatcgatatgtcaaatatccaggaaatgcgagcaaggcataaagaggcattcttgaaaaaacataacctgaaactaggcttcatgtctgcattcgttaaggccagtgcgtttgcccttcaggagcagcccgtggtgaatgccgttatcgatgatacgacaaaggaggtggtctatagggattatatagacatctctgtggcagtcgccacgccgcgcgggctcgtggtgccagtcattaggaacgttgaagccatgaattttgctgatatcgaaagaacaatcactgagctgggcgagaaagctcgaaagaatgaactagctattgaggacatggacggcggcacatttaccatctcaaatgggggggtctttggttctttgtttgggacgcccatcattaaccctccacagtccgccatcttgggcatgcatggcatttttgacagacccgttgctattggcggaaaagtggaagttcgcccgatgatgtacgtggcactcacatatgatcatagactgatcgatggccgggaagcggtcacattcctgaggaagatcaaggctgccgttgaggacccgcgggttttgctgctggatctgtag

SEQ ID NO: 114580 - DNA, 1362 bp, synthetic construct
  misc_feature 1..1362: note = Description of Artificial Sequence: Synthetic coding sequence
  source 1..1362: mol_type = other DNA
atgctctcccggtcacggtgcgtttccagagcctttagccggagtttgagtgccttccaaaaaggcaactgtccactcggacgccgcagccttccaggtgtcagtctgtgtcaggggccaggatacccgaatagccgcaaggtggtcatcaacaactcagtgtttagtgttcgcttttttagaacaactgcggtgtgtaaagacgacctggtcactgttaagaccccagccttcgcggaaagtgtcactgaaggagacgttcgctgggagaaagccgtgggtgacactgtagcagaggatgaagtggtgtgcgaaatagagactgacaagacctcagtgcaagtgccatcaccagccaacggtgttatcgaagctctcctagtccctgatggagggaaggtagaaggtggaaccccactgttcactcttagaaagactggggctgcccccgctaaggccaagccagcggaggctccggccgccgctgctcctaaggccgagcccacggcagccgcagtccctccacctgcagcccccattcccacccaaatgccaccagtgccaagtccttcacagccgccatccggaaaacctgtgtccgccgtgaagcctacggtagcacctcccctagccgaacccggtgcggggaaaggattgcgcagtgagcacagagaaaaaatgaacagaatgagacagagaatcgcccaacggctcaaagaggcacaaaatacttgcgctatgttgacgacattcaatgagatcgacatgtcgaatattcaggagatgcgcgctaggcacaaagaagctttcctcaaaaagcataacctaaagctcggctttatgagcgcttttgtcaaggcatcagccttcgctctgcaagaacagccagtggttaatgctgtcatcgacgacaccacaaaagaggttgtgtatcgggactacatcgatatttccgtcgccgtcgccactccaagggggttagtcgttccagtaatccgcaatgtagaagccatgaacttcgccgatattgagcgaaccattactgaactgggcgagaaagctagaaagaacgagctcgccatcgaagatatggacggaggtacatttactatatctaacggtggggtgtttggctccctctttgggactccaatcattaatcctcctcagtccgccatactgggaatgcatggcatcttcgacagaccagtggctattggtgggaaagtcgaggtgcggcccatgatgtatgtggccctgacctatgatcatcgtctcatcgacggacgagaggcagtgacctttctgcgtaaaataaaagccgcagtggaagaccctcgggtgttgctgcttgacctgtag

SEQ ID NO: 114581 - DNA, 282 bp, synthetic construct
  misc_feature 1..282: note = Description of Artificial Sequence: Synthetic coding sequence
  source 1..282: mol_type = other DNA
atggacagattgcaaaccgctttactggtcgtcctggtgctgcttgccgtggcgctacaagccaccgaggccgggccatacggcgccaacatggaggatagcgtctgttgtcgtgactatgtccgttatcgtctcccgcttcgagtcgtgaaacacttctactggaccagtgactcttgccctcgtcccggggttgtgttactgacctttcgcgataaggagatctgcgccgatccgcgggtcccttgggtcaaaatgatcttaaacaagctgtcacagtag

SEQ ID NO: 114582 - DNA, 1560 bp, synthetic construct
  misc_feature 1..1560: note = Description of Artificial Sequence: Synthetic coding sequence
  source 1..1560: mol_type = other DNA
atggcagctccaagtcgccttctaattcgcggcggacgtgttgtgaatgatgatttcagcgaagttgccgacgtgctagtcgaggacggcgttgtccgggccctgggtcatgacctgctgccccctgggggcgcccccgctggcctgcgcgttctggatgctgctggtaagctggtgctcccaggtgggatcgacacccacacacatatgcaattcccttttatgggtagtagaagtatcgatgatttccaccaaggcaccaaagccgctctgagtggtggaaccacgatgataatcgattttgcaatccctcaaaaaggagggtctttgattgaggcttttgagacctggcgcagttgggctgatcccaaggtgtgctgcgactactctctgcacgttgccgttacctggtggtctgatcaggttaaggaagagatgaagatattggtgcaggataaaggagtaaactcattcaaaatgtttatggcctataaggacctatatatggtaaccgacctggaactctatgaagcatttagtaggtgcaaggagattggggcgatcgcacaggtgcatgctgagaacggcgacctaatcgccgagggagctaagaaaatgctggccctgggaatcacaggccctgaggggcacgagctgtgtcgccctgaggcagttgaagccgaggccactctgagagcaatcactatagcctctgccgtgaactgcccattatatattgtgcacgtaatgtccaagtccgcagcgaaggttatcgctgacgcacgacgggatggcaaagtcgtctatggcgagccgattgccgccagcctcggtacagatggcactcactactggaataaggaatggcatcacgcggcccatcacgtgatgggtccacccttacgccccgaccccagcactccagacttcctgatgaacctactggcaaacgacgatttaacaaccacagggacagataattgtacattcaacacctgccagaaagccctgggtaaggatgattttacaaaaattcccaatggagtgaacggagtggaggatcgcatgtcagttatctgggagaagggagtccacagtgggaagatggacgaaaatcgttttgtcgctgtcacttctaccaatgccgcaaaaattttcaatctttatcctaggaagggcagaatcgctgtaggatccgatgctgatatagtgatctgggatcccaaaggcacccggacgatcagcgcaaagacgcatcatcaggcagtgaattttaatatctttgagggaatggtgtgccacggtgtcccgctggtaacaatcagcagagggaaggtggtgtacgaggcaggggtgtttagtgtgacagcgggcgatggcaaattcattccgcgaaagccctttgctgagtacatctacaaaaggattaagcaaagagatagaacttgcacccccacacccgtcgaacgggccccgtacaagggcgaggtcgcaactctaaaaagcagggtgaccaaagaggacgctaccgccggtacaaggaagcaggcacatccttag

SEQ ID NO: 114583 - DNA, 1719 bp, synthetic construct
  misc_feature 1..1719: note = Description of Artificial Sequence: Synthetic coding sequence
  source 1..1719: mol_type = other DNA
atgtcctaccagggcaagaagaacattcctaggattacctcagacaggttgctgattaaaggcgggaagatcgtgaatgatgaccagtctttctacgccgatatatacatggaggacgggttgataaaacagattggggagaatcttattgtgcccggaggtgtgaagacaatcgaggcccatagccgcatggtaatcccgggggggatcgacgtacataccaggttccagatgcctgatcagggcatgactagcgcggatgatttcttccaaggaactaaggcggccttggccggcggcactacaatgatcattgatcatgtggtgcctgaaccgggaacttccctactggccgcttttgatcagtggcgcgagtgggcagacagtaagagttgctgcgattattctttgcacgtggatattagcgaatggcataaggggatccaggaagagatggaggcactcgtgaaggatcacggcgtaaactccttccttgtgtacatggcgttcaaagatagatttcagctgacagactgccagatttatgaggtcttaagtgttatccgcgacattggcgcaatcgctcaagttcatgccgaaaacggagacataatagcagaggagcagcagagaatcctcgacctggggatcaccgggcccgaaggccacgttctaagccgaccagaagaggttgaagctgaagccgtgaatagagccataaccatcgcaaaccaaactaattgtccactatatatcaccaaggtcatgtcaaaaagttcagccgaggtaatcgcgcaggcccgcaagaagggcaccgtcgtgtacggggaaccaatcactgccagcctgggcaccgacggttcacactactggtcaaaaaattgggcgaaggcggcagctttcgtgacttctcctcctttgtcccccgatcctaccacacctgatttcctgaattccttactctcctgcggcgatcttcaggtgactggttccgcccattgtacatttaacactgcgcagaaagccgtcggaaaagataattttacactgattcccgaaggcacgaacggcacagaggagagaatgtcggtcatttgggacaaggcagtggtgaccgggaaaatggatgagaaccagttcgttgccgtcacgagtaccaacgcggccaaggtgttcaacttataccctagaaaagggagaatcgcagtggggagcgatgctgacttagtgatttgggatcctgactcagtgaagactatttctgcaaagacacacaactcaagcctagaatataatatttttgagggaatggagtgtaggggtagccctttggtggtgattagccagggaaagatcgtcttagaggatgggacactgcacgtcacagagggaagcggcaggtatattccacgcaagccatttcctgattttgtatataagcggattaaagccaggtctagactggccgagctacgaggtgtgccacgcggcctctacgacggtccagtctgcgaagtgtcagtcacccccaagacagtcacgccggcctcctcagcaaagacaagccccgcgaagcagcaggctccgccagtgaggaacctgcaccagtcaggcttcagcttatctggagcccaaatagatgacaatattccccgcaggaccacccagcgtattgtcgctcctccaggtgggcgcgctaatattaccagtctgggatag

SEQ ID NO: 114584 - DNA, 1611 bp, synthetic construct
  misc_feature 1..1611: note = Description of Artificial Sequence: Synthetic coding sequence
  source 1..1611: mol_type = other DNA
atggaggacgggttgatcaaacagattggggagaacctcattgtcccaggcggtgtgaaaacgatagaggcccattcccgtatggtgatcccgggaggcatcgatgtccacactaggtttcagatgcctgaccaaggaatgacctctgccgatgatttttttcaggggacaaaggcagcgctggcaggtggcactactatgattattgaccatgtggtgcctgaacccggcacctctctgcttgctgccttcgatcagtggcgtgaatgggcggattccaagtcctgttgtgactactcccttcacgtggacatttccgagtggcataagggaatacaggaggagatggaagccctggtgaaggaccatggcgtaaactctttcttggtgtatatggccttcaaggatagatttcaattgaccgattgccagatctacgaggtcctgtcagtcattcgggacatcggggcaatagctcaggttcacgccgagaacggcgatatcatcgcagaagaacagcaacgcatactcgacctgggcattaccggccctgagggccacgtgctgtcacgccccgaagaagtggaggccgaggctgtgaaccgagcaattactatcgcaaatcagaccaactgtcctctgtacataacaaaggtgatgtccaaaagcagtgctgaggtgattgctcaagctaggaagaaaggaacggtggtttatggggagccgatcaccgcatcattggggactgacgggtcccactactggagtaagaactgggccaaagccgcggcattcgtcacaagtcctcctttgtcacccgatccaaccacgcccgacttcttgaacagcctcctcagctgcggtgatttacaagtgactggaagtgcccattgtacttttaataccgcgcagaaagccgttggaaaggacaacttcaccttgatccctgaaggcacaaatgggactgaagagaggatgtcagtgatttgggataaagccgtcgtcaccgggaaaatggatgaaaatcagtttgtggccgtgacctctactaatgccgccaaagtgtttaacctgtatccacgtaagggccggattgcggtgggatctgatgcagatctggtaatttgggatccagattctgtgaagacaatcagcgcgaagacgcacaattcttcattagaatataacatctttgaaggcatggagtgtagaggatcacccctcgtagtgattagtcagggtaagatcgtattagaggacggcactctccatgtgacagagggatccggtcggtacattccacgcaaacccttcccggatttcgtttataagagaatcaaggcccgaagtcgtctcgccgagttaagaggagtcccaagagggttgtacgatggcccagtgtgcgaggtctcggtaacccccaaaacagtgactcccgcttcgagtgcaaaaactagccccgcgaagcagcaggctccccctgtacgaaatttacatcagagtggtttcagtctatccggcgctcagatcgacgacaatataccacgacgaactacacagaggatcgttgccccccccggtggtagggctaatatcaccagtctcggatag

SEQ ID NO: 114585 - DNA, 1719 bp, synthetic construct
  misc_feature 1..1719: note = Description of Artificial Sequence: Synthetic coding sequence
  source 1..1719: mol_type = other DNA
atgagctaccagggcaaaaagaacatccccagaatcacatcggataggttacttatcaagggaggcaaaatcgtgaacgacgatcagagcttctacgcagacatctatatggaagatgggctaataaaacaaatcggtgagaaccttatcgtgcccggtggcgtgaaaactatcgaagcacactcccgaatggtgatccccggaggaatcgatgtccacacccggtttcaaatgccagaccagggcatgacatcggcagacgacttctttcaggggacaaaggccgcactggcaggtgggacaacgatgatcattgaccatgtggtgccggagccaggtacctccctacttgcagcattcgaccagtggcgggagtgggctgactccaaatcttgttgcgattattcgctacatgtagacatttcggaatggcacaaaggaattcaggaagaaatggaagccttggtgaaggaccatggagttaattcttttctagtgtatatggcgttcaaggatcggtttcagctgacagactgccagatctatgaagttctgtccgtgatccgcgatattggggcaatcgcacaagtgcatgccgaaaacggtgatatcatcgctgaggagcaacagcgaatcctcgaccttggtatcaccggacctgaggggcatgtgctgagcagaccagaggaggtagaggcggaggccgtaaatagagccattaccatcgcgaaccaaaccaactgtccattgtatattacaaaagttatgtcaaaatcgagtgctgaagtaatcgctcaggcaagaaaaaagggaacagtggtgtatggcgaacccatcacagcatccctcggcacagacggttctcactactggtccaagaattgggccaaggccgctgcatttgtgacatcaccccctctctctcccgaccctaccacacctgattttctgaactcccttctcagctgcggtgatcttcaggtgaccggaagcgctcattgtaccttcaacacagctcagaaggctgttgggaaagacaatttcactctcattcccgagggtacaaatggcaccgaggagcgtatgtccgtgatctgggataaggccgtagtcaccgggaaaatggacgaaaatcaatttgttgccgtgacctcgactaacgctgcaaaggtgtttaacctgtatccaagaaagggcagaattgcagttggatctgacgcggacctagtcatctgggacccggactctgtgaagaccatctccgccaaaacacataactcctctcttgagtataacatatttgaaggaatggaatgcagaggaagccctcttgtcgttattagccaggggaagattgttctggaggatgggaccttacacgtgactgaaggcagtggccggtatatacccagaaaaccctttccagactttgtttataaaagaattaaagcccggagccgactggcagaactcaggggtgtgccgcgcggcttgtacgatggacctgtgtgtgaggttagtgtgacacccaaaacagtcaccccagccagctcagctaagaccagtcccgctaagcaacaggcccctcccgtcaggaacctccaccagtcagggttcagtttatccggtgcacagatcgacgataacatcccgcgacgtacaacccaaagaattgtcgcgccaccgggaggcagagcaaatataacttccttgggttag

SEQ ID NO: 114586 - DNA, 1611 bp, synthetic construct
  misc_feature 1..1611: note = Description of Artificial Sequence: Synthetic coding sequence
  source 1..1611: mol_type = other DNA
atggaggatggacttataaaacagataggggaaaatctcatcgtccctgggggggtcaaaaccattgaagctcactcgagaatggtgattcctggcgggattgacgtacacacgaggttccagatgccagatcaaggcatgacctcagcagatgacttctttcagggtacaaaggctgcccttgccggaggcaccaccatgattattgaccacgttgtacctgagccgggaacctctctcttagccgcctttgatcagtggcgagagtgggccgacagtaaaagttgttgcgattactccctgcacgttgacatatccgagtggcataaaggcattcaggaagaaatggaggctctcgtcaaagatcacggagtgaattcattcctcgtgtacatggccttcaaggaccggttccagctcacagactgccagatttacgaggtgctgtccgtcattagagatatcggggcaatcgcgcaggtgcatgctgaaaacggcgatattattgccgaagagcagcagcgaatcctcgatcttgggattacaggcccagaaggccacgtgctctcacggcccgaagaggtagaggcagaggctgtgaaccgagcaattactatcgcaaatcaaactaactgcccactctatataacaaaagttatgtcaaaatctagcgcagaagtcatcgctcaggctaggaagaagggaacagttgtctacggtgagccaatcactgcaagtctgggcaccgacggctcgcattattggtccaagaattgggccaaggcagccgcctttgtgaccagccctcctctttctcctgaccctaccaccccggatttcctaaattcattgctcagctgtggggacctgcaagtgactggctccgctcactgcactttcaacaccgcccagaaggctgtgggcaaagataacttcacattgattcccgaagggactaatggcaccgaggaacgaatgtcggtgatctgggataaagcagtggtaacgggaaagatggacgagaaccagtttgtcgctgtcacaagcacaaacgccgctaaagtgtttaacctatacccgcgtaaagggcggattgcagtcgggagtgacgctgatttggtgatctgggatcctgattcagtcaaaacaatatctgccaagacacacaactcatcactcgagtacaatatcttcgaaggaatggagtgccgcggatcccctctggtagtgatctcccagggaaagatcgtcttggaggatggcactcttcacgtcacagagggcagcgggaggtatataccaagaaaaccctttccggatttcgtatacaagcgcataaaggcaagatctaggcttgccgagctgagaggcgtcccacgcggattgtacgacggccctgtgtgcgaggtgtctgtcactcctaaaacggtcacgcccgcctcttccgctaagacatcacctgcgaagcaacaggccccacccgtgcgtaaccttcaccagagcggcttctctctttccggagcccagatagacgataacattccacgcaggactacacagaggatagtggcccctccaggtggaagagccaatatcacctcactgggctag

SEQ ID NO: 114587 - DNA, 597 bp, synthetic construct
  misc_feature 1..597: note = Description of Artificial Sequence: Synthetic coding sequence
  source 1..597: mol_type = other DNA
atgtcagttatttgggataaggcggtcgtgaccggcaagatggatgagaatcaattcgtcgcggtcacctctaccaatgctgcaaaggtttttaatctgtatcctcgtaaaggcagaatcgccgtcggatctgatgccgaccttgtaatttgggatccagactcggtaaagaccatcttcgaaggcatggaatgtcggggtagccccctggtggttatctcccagggaaaaatagtgttggaggatggcactcttcacgttaccgaaggctctgggcggtacattccgcgaaaaccatttcctgactttgtttataaaaggatcaaggctagatcacgccttgccgagcttcgcggcgtccctagaggactctacgacggaccagtgtgcgaagtcagcgtgaccccaaagacagtaacccctgcatcctctgctaaaacaagccccgcgaaacagcaagcaccaccggttcgaaatttgcatcagtccggcttttctctgagtggggcacagatcgacgataatattcctaggaggactacacagcgcatcgtggctccaccgggggggagggcgaatataacatctcttgggtag

SEQ ID NO: 114588 - DNA, 2055 bp, synthetic construct
  misc_feature 1..2055: note = Description of Artificial Sequence: Synthetic coding sequence
  source 1..2055: mol_type = other DNA
atggcctcaggccgccggggatgggattccagccacgaagacgatctgccggtctacctggcccggcctggtacaaccgaccaagtccctcgacagaaatacggcggcatgttctgcaatgtggaaggtgcctttgaatctaagacactcgactttgacgccctcagcgttggccagaggggggcaaagacccctaggagcgggcagggctccgataggggatctggcagtagacccggcattgaaggggacacaccacgaagagggcagggccgtgaagagtccagggagcccgctcccgcctcacccgcacctgcaggggtggagattaggtctgccactggcaaagaggtgctccagaatctggggccgaaggacaagagtgacagactcctgattaaaggcggaaggatcgtaaacgacgaccagtccttctatgcagatatctacatggaggatggtctcatcaaacagataggggacaatctcatcgtgcccgggggagtgaaaacaatagaggctaatggtaagatggtcattccaggcgggatcgacgtgcacactcatttccaaatgccgtataagggcatgaccactgtagacgacttcttccaaggaactaaggcggcactggcagggggtactacaatgatcatcgatcacgttgtgccagagccagagtcaagcctgactgaagcctatgagaagtggagggagtgggcagatgggaaatcttgttgtgactacgccctccatgtcgacatcactcattggaacgacagtgtcaaacaggaagtgcagaatctgatcaaggacaagggcgtaaatagcttcatggtctacatggcttacaaggacttatatcaagtgtcgaatactgaactctatgaaatctttacttgcttaggtgagcttggagccatcgcccaggtacacgctgaaaatggagatatcatcgcccaggagcagacaagaatgttagagatgggtattaccgggccagaggggcatgtattgtcccgaccagaagagctggaagcagaggccgtcttccgtgccattacaattgccagtcagaccaattgtcctttgtatgttactaaggtgatgagcaagagtgccgccgacctgattagccaggcacgcaagaaggggaacgttgtgttcggcgagcctattacagcctccctgggcatcgacgggacgcactattggtccaaaaattgggccaaagccgccgctttcgtaacctctccccctctctcccccgatccaaccacacccgattatatcaattctttgctggcatcaggggatctgcaactgtctgggagcgcacactgcaccttctcaaccgcgcagaaggccataggaaaagacaattttaccgcaatccctgaagggacaaacggcgtggaggagaggatgtcagtgatctgggacaaagctgtcgccactggcaaaatggatgaaaaccagtttgtagccgtcacttccactaacgctgcgaagatattcaacttatatccacgtaaaggaaggatctcagttggttctgactccgatttggtcatttgggacccggatgccgtcaaaatagtcagcgccaaaaatcatcaatcagccgcggaatataatattttcgaaggtatggaattgcgaggagctcccctcgtggtgatttgtcaaggcaagatcatgttggaagacggaaatctccatgtgactcagggtgcaggaaggttcatcccgtgtagtcctttctctgattatgtgtataagagaatcaaggcccggcggaagatggcagacttgcatgcagtgcccagaggcatgtacgatggacctgtgttcgaccttacgaccacacccaagggaggcacacccgcaggatctgcgaggggtagcccgacaaggcctaatcccccagtgcgcaatctgcaccagagcgggttctcactgtctggcacccaggtggatgagggagtgcggagcgcctcgaaacggatcgtggccccgccaggcggtaggtcgaacatcacatctctgtcttag

SEQ ID NO: 114589 - DNA, 1713 bp, synthetic construct
  misc_feature 1..1713: note = Description of Artificial Sequence: Synthetic coding sequence
  source 1..1713: mol_type = other DNA
atgagctaccagggcaaaaagaatatcccaagaataacctctgaccggctgctgatcaagggaggaaggattgttaacgacgatcagagtttctatgctgatatttatatggaggacggattgatcaaacagattggcgataatctgattgtccccggcggcgtgaaaactatagaggcaaacggcaagatggtgatccccggtggcatagatgtccacacccacttccagatgccatataagggaatgaccacagtagatgatttttttcaggggacgaaggctgctctggcagggggaactactatgattattgatcacgtcgtgcctgagcccgagtccagcttaacagaggcctatgaaaagtggcgggaatgggcagatggcaaaagttgttgcgactatgcactccacgtcgatatcacgcactggaatgattctgtgaagcaggaggtgcagaatcttatcaaagacaagggtgtgaatagtttcatggtttacatggcttacaaagacctatatcaagtaagcaataccgaattgtacgagatattcacatgcttgggcgaactgggggctatcgcgcaggtccacgcggagaatggcgatattatcgctcaggaacagactcggatgctggagatgggaatcaccggccccgagggacatgtgctatcccggccagaagagctggaagccgaggccgtatttagagcgataactatcgcttctcagacgaactgccccttgtacgtcaccaaggtcatgagcaaatcagccgcagacttaatttcccaggctagaaagaaagggaatgtggttttcggggaacctattaccgccagcctcggcatcgatgggactcactattggtctaaaaactgggccaaagctgctgcgtttgtgacaagtccccctctcagccccgatccaacaactcccgactatatcaactctctcttagcgagcggagacttacagcttagcgggagcgcccactgtacattctcaaccgcccaaaaagcaatcggcaaggataattttaccgccatcccggagggcactaatggagtcgaggagagaatgagcgttatttgggataaggccgtggccaccgggaagatggatgagaaccagtttgtcgccgtgacaagcaccaatgcagcaaagatctttaatctatatcctcgaaaagggcgcatatcagtagggtccgatagcgacctcgtgatttgggaccccgacgcagtgaaaatcgtgagcgccaagaaccatcagagtgcagcagagtacaatatcttcgaaggcatggagctcaggggggccccgttagtggtcatatgtcaaggtaagatcatgctggaggatgggaaccttcacgtgacccaaggggctggaaggttcatcccctgctcccccttttctgactacgtctacaagcggataaaggctagaagaaagatggcagacttacatgccgtgccccgcggtatgtacgacgggcccgtattcgatttgacgactacaccgaaggggggtacccccgctggcagtgcgcgggggagtcctacccggccaaacccccccgtgcgcaacctgcaccagagtggttttagcctctcaggtacacaggtggacgaaggggtgcgcagtgccagtaaacgaatcgtggcaccacccggtggtcgctcaaacattacttctctgtcgtag

SEQ ID NO: 114590 - DNA, 279 bp, synthetic construct
  misc_feature 1..279: note = Description of Artificial Sequence: Synthetic coding sequence
  source 1..279: mol_type = other DNA
atgtcataccagggcaaaaaaaacatacctagaataacaagcgacagactgttaattaagggaggccgcatcgtgaacgatgatcagtctttctacgcagacatctatatggaagatggccttatcaagcagatcggggataacctaattgttcctggaggagttaagacaatcgaggctaacggaaagatggtaattccaggcggcatcgatgttcatacccatttccaaatgccatataaaggcatgactactgtggacgatttctttcagggctag

SEQ ID NO: 114591 - DNA, 591 bp, synthetic construct
  misc_feature 1..591: note = Description of Artificial Sequence: Synthetic coding sequence
  source 1..591: mol_type = other DNA
atggacgagaaccaattcgtggccgtgacgagcactaatgccgcgaagatctttaacctgtaccctaggaagggccgcataagcgtgggctctgatagcgaccttgtgatttgggatccagatgcagtcaagatcgtctctgcaaaaaaccatcaaagcgctgctgagtataacattttcgaagggatggagctgaggggggcgccactggtagtcatatgtcaggggaaaatcatgctggaagatggaaacctgcacgttacccagggagctggccgttttatcccctgttccccattttctgattatgtgtataaaagaatcaaggctcgccggaaaatggctgacctccatgcggtgccacgaggcatgtacgatggccctgtgtttgacctgacaactacccccaaaggaggcacccccgccgggtccgcacgtgggtcccctacacgacccaacccaccagtacggaacctgcaccagagtggcttctctctgtccggaactcaagtggacgaaggcgtgcggtctgcatccaagcgcatcgtagccccaccgggagggcggtcaaacatcacgtccctatcttag

SEQ ID NO: 114592 - DNA, 1719 bp, synthetic construct
  misc_feature 1..1719: note = Description of Artificial Sequence: Synthetic coding sequence
  source 1..1719: mol_type = other DNA
atgtcatttcaggggaaaaaatcaattccacgaataacatccgaccgcctgctgattcggggtgggcgcatcgtcaatgatgatcagagcttttatgcggacgtgcatgtggaggatggccttatcaaacagattggcgaaaacctgatcgtccctggggggattaaaacaatcgatgcccacggcctgatggtactgccggggggcgtggacgtccacacacgactccaaatgcccgtcctgggtatgaccccggctgatgacttttgccagggcactaaagccgcactcgccggcgggacaaccatgatactggatcatgtctttccagacacgggagtttccctgctggcagcgtatgagcagtggcgagagagagccgattccgctgcatgctgtgactattcacttcatgtagatattacacggtggcatgaatccatcaaggaagagctggaggccttggttaaagaaaagggggttaatagttttttggtctttatggcgtataaggatagatgtcagtgttcggatagccagatgtacgagatcttctcaattattagggaccttggcgccctggcgcaggtgcacgcagagaacggagatatcgtggaggaggagcagaaacgccttctggaactgggcatcacaggacctgaaggacacgtcctaagtcaccctgaggaggtagaagcagaggctgtataccgggctgtgactatcgcaaaacaggccaattgtccgctatacgtcacaaaagttatgtctaagggcgctgcagacgccatcgcccaggcaaaaaggcgtggggtagtggtgttcggcgaacccatcaccgcgtccctcggaaccgacggttcccactattggtccaagaactgggctaaggccgccgcatttgttaccagccctccagtgaaccccgaccctacgaccgctgaccacctcacgtgccttctctcttcaggggatttgcaggttaccgggtcggcacattgcaccttcacaacagctcaaaaagccgtaggcaaagataattttgcccttatccccgaaggcacaaatggcatcgaggaaaggatgtccatggtgtgggagaaatgcgtggcttctggcaagatggacgagaatgagtttgtggcagttacatctaccaatgccgctaagattttcaatttttaccccaggaagggtcgcgtggcggttggaagtgacgcggatttagtcatctggaatcccaaagctaccaagataattagcgctaaaacacataacctcaacgtggagtataacatattcgagggtgtcgaatgccgaggggctccagccgttgtgatctcacagggcagggtggccctggaggacggaaagatgtttgtgacgcctggggctggcaggtttgtcccacggaagactttcccagatttcgtatataaaaggattaaagccaggaataggctggctgagattcatggtgtgccaagagggctctacgacgggcccgtccacgaagttatggtgccagccaagcccgggtctggggccccagctcgtgcatcatgccctggtaagataagcgtgcctcccgtccgcaatctccatcagtcagggttttccctctctggctctcaggctgacgaccatatagcccgccgcactgcccagaagatcatggcgccacctggcggacgatcgaatatcactagcctatcctag

SEQ ID NO: 114593 - DNA, 1239 bp, synthetic construct
  misc_feature 1..1239: note = Description of Artificial Sequence: Synthetic coding sequence
  source 1..1239: mol_type = other DNA
atgccggttctggggatgacacccgccgacgacttttgccaagggaccaaagcagctctagccgggggcaccactatgatactcgaccacgtgttcccggataccggcgtttcattgctggccgcttatgagcaatggagggaaagagccgatagtgcggcttgctgcgattacagcctgcacgtggacatcaccaggtggcatgaatctataaaggaggagctggaagccctggtcaaggaaaaaggggtcaactcctttttagtgttcatggcttacaaagaccgctgccaatgcagtgattctcaaatgtatgaaatcttttcaatcatcagggatttgggggccctagcccaggtccacgccgaaaacggggatatagtggaagaggtggaagccgaagcagtctaccgagctgttaccatcgcaaagcaagctaactgtccattgtacgtcaccaaagtcatgagcaagggggctgccgacgcgatagcccaggctaagcggagaggggtagtagtttttggagagcccataacagcatctctgggcacagatggaagtcactactggtcaaagaattgggcaaaagccgctgccttcgttacgtccccaccggtgaatccagatcctacaaccgcagaccacctaacctgcctgctgtcaagcggcgacctgcaagttaccgggtccgcgcattgcacctttacaaccgcccaaaaggcagttggaaaggacaacttcgccctgatcccagagggcacgaatggcatcgaggagagaatgtctatggtctgggagaaatgtgtggctagtggaaagatggatgaaaatgagtttgtcgccgtgaccagcacaaacgcagccaagatttttaacttctaccctcggaagggacgggtggccgtaggttccgatgccgaccttgttatctggaacccaaaggccactaaaataatctccgcaaagactcacaatctcctggccgagatccacggggtgcccaggggactgtacgatgggccggtgcatgaagtgatggttccagcaaagccgggctccggagcccccgccagagcttcttgcccaggaaagatttctgttccgccagtgcgcaatttacaccaaagcggattctctttgtctggctcccaggcagacgaccacatcgcccgccgaaccgcgcaaaaaatcatggcccctcctggaggccggagcaacattacgtccctatcttag

SEQ ID NO: 114594 - DNA, 1239 bp, synthetic construct
  misc_feature 1..1239: note = Description of Artificial Sequence: Synthetic coding sequence
  source 1..1239: mol_type = other DNA
atgcccgtattgggcatgactcctgcagatgacttttgtcaggggactaaagctgccctggctggggggaccacgatgattctggaccacgtgtttccagacacaggggtgtctcttctcgctgcctatgaacagtggcgggaacgggcagacagtgcggcctgttgtgattacagcctgcacgttgatattactcgatggcacgagtctattaaagaggaactagaagccctagtgaaggaaaaaggggtgaattccttcttggtgttcatggcctataaggacagatgccaatgctccgacagccagatgtatgaaatcttttcgatcatcagagatctgggagctctagcccaggtccacgcagagaatggggacatcgttgaggaagtggaggcggaagccgtctaccgggccgtcaccatcgcaaaacaggccaattgcccactttatgtcacaaaggtgatgtcaaagggtgctgcagacgctatagcccaggccaagagacgaggcgtggtggtgttcggcgaacccattactgcctcgctcggaaccgatggctcacactactggtcaaagaactgggctaaagctgccgctttcgtgacttctccccctgttaaccctgaccccacaaccgctgatcatctgacatgcctgttgtcaagcggcgacctgcaagtgacaggaagtgcacactgtacgtttactactgcacagaaggccgtagggaaggacaactttgccctgatacccgaaggtacaaacgggattgaagaacggatgagcatggtttgggaaaagtgcgtggccagtgggaagatggatgagaatgagttcgtagctgttacctctaccaacgcagctaagatctttaacttctaccctcgcaaggggagagtagctgtggggtccgatgctgatctggtgatttggaatcctaaagcaactaaaatcatttccgccaaaacacacaatcttctggccgaaatccatggcgtcccccgcggactgtacgacggaccagtgcacgaagtaatggtgccggccaagcctggttccggtgctccagccagagcctcctgtcccggcaaaatctccgtaccgccagtgagaaacttgcaccaatcgggcttcagcttgtctggatcccaggccgacgatcatattgcccgccgaactgcgcaaaaaattatggcccctcccgggggaaggtctaatatcacttctctgagttag

SEQ ID NO: 114595 - DNA, 1695 bp, synthetic construct
  misc_feature 1..1695: note = Description of Artificial Sequence: Synthetic coding sequence
  source 1..1695: mol_type = other DNA
atgctcgctaattcagctagcgtgaggattctcattaaaggcggtaaagtagtcaacgacgactgtactcatgaagcggatgtctatattgagaatggtatcatccagcaggtcggccgggaacttatgatcccgggcggggccaaagtgatcgacgcaactgggaagctggtgattccgggggggattgacacctcaacccattttcaccagacattcatgaacgctacctgtgttgacgatttttaccatggaactaaagccgccttggtgggcggtactaccatgataattggccatgttttgcccgataaggagacatctctggtcgatgcgtatgagaagtgtcgcggcctcgcagacccaaaggtgtgttgtgactacgcattgcacgtgggtattacctggtgggcccctaaagtgaaggcggagatggaaacactggtacgggagaaaggagttaacagctttcagatgttcatgacctacaaggatctctacatgctgagggacagcgagctatatcaggtgctgcacgcctgcaaagacatcggagcaatagcccgggtccatgcggaaaatggcgagttagtggcagaaggggccaaagaagcgctggatttgggcatcaccgggcccgagggaattgagatcagtagaccagaagagctcgaagcggaggctacccaccgggtgatcactatcgctaaccgcacacattgtccaatctatctggtcaacgtatcatctatctctgccggtgacgtgatcgccgctgctaaaatgcaagggaaggtggtgttggcagaaaccaccaccgcccatgccactctgactggtcttcactattatcaccaggattggtctcatgccgccgcctatgttactgtgccaccgcttcgcctggacacaaacacatcaacatatctaatgagcctgcttgctaatgacacacttaacattgtagcgagtgaccaccgccctttcactacaaaacaaaaagcaatgggcaaagaagattttaccaagattccacacggggtctctggagttcaggacaggatgagcgttatttgggaacgcggcgtggttggggggaagatggacgaaaaccgctttgtggccgtgacatcctcgaacgccgccaagcttctgaacttgtatcctaggaaaggtcgcatcatcccgggtgctgatgcagacgttgtcgtgtgggatccagaggcaactaagacgatctcagcttccactcaggtgcaggggggcgactttaatctctatgagaacatgagatgccatggcgtgcctctggtcaccataagtcggggacgggtggtttatgaaaatggagttttcatgtgcgctgaggggactggcaagttctgtccactacgctcctttccagatactgtgtataaaaagcttgtgcagagagagaagacactgaaagtccgtggtgtggataggaccccttacctcggcgacgttgcagtggtcgttcatcccggcaagaaagagatgggcaccccccttgccgacactcctacgagacctgtaactcgccatggcggcatgagggaccttcacgagtcctccttttccctctctgggtcacagatcgatgatcacgtgcccaagcgtgcctccgccaggatcctggcccctccgggaggacgaagttcagggatctggtag

SEQ ID NO: 114596 - DNA, 1695 bp, synthetic construct
  misc_feature 1..1695: note = Description of Artificial Sequence: Synthetic coding sequence
  source 1..1695: mol_type = other DNA
atgcttgcaaatagcgcttctgtgagaatcctcattaagggtgggaaggtggtaaacgacgattgcacccacgaagctgatgtgtacatcgagaacggaattattcagcaggtcggccgggaattaatgatacccggaggagccaaagtcatagacgccactgggaaacttgtaattcccggaggaatcgacacgtcaacccattttcatcagacatttatgaacgctacttgcgtcgatgatttctatcatggaacaaaggcagcactcgtgggaggcactacgatgattattgggcacgttctgccagataaggaaaccagcttggtggacgcgtacgaaaaatgtagaggcttagctgaccctaaggtgtgctgcgactacgcattgcatgtggggattacttggtgggctccgaaagtgaaagcagaaatggagaccctggtgagggaaaagggcgtcaactcgttccagatgttcatgacctacaaagacttgtacatgttgagggactccgagctctatcaggtgctgcacgcatgtaaagatatcggagcaattgcgagggtgcacgcagagaacggtgagcttgtcgccgagggcgctaaagaggctcttgacttggggatcactggccccgaggggatcgaaatctcccggccggaggagctggaagcagaggccacccaccgcgtcattactattgcgaaccgcactcattgtccaatatatctggtaaacgtctctagcataagtgctggagatgtgatcgctgctgccaaaatgcaaggaaaagttgtactggccgaaaccacaacagctcatgccaccttaaccggcctgcactactatcatcaagattggtctcatgctgccgcttacgtgaccgtgccccctctgaggctggacacaaatacaagtacctaccttatgtccctcctggcaaatgatactctgaacatcgtggctagcgaccacaggcccttcaccacaaaacagaaggccatgggcaaagaagactttaccaagatcccccatggtgtgagcggcgtgcaggatagaatgagtgtcatttgggagcggggagtagtgggtggcaagatggacgaaaaccggttcgtggcggtcaccagttcaaatgccgccaagcttctgaacctctacccgagaaaaggacgcattatccccggggctgatgcagacgtcgttgtttgggatccagaggcgaccaagaccatctccgctagcactcaagtgcagggaggtgactttaatctgtacgagaacatgcgctgccacggcgtgcccctggtgaccattagtcgaggacgggtggtctatgagaacggcgttttcatgtgcgccgaaggcaccggcaaattctgccctttacgttcatttcctgacacagtctataaaaagcttgttcagcgcgagaaaaccttgaaagtaaggggcgttgataggaccccctatctaggtgacgtggcagtggttgtgcaccctggaaagaaagaaatgggaactcccctcgcagatacaccaactagacctgtgacgcgccacggtgggatgcgcgatcttcacgaatcctcttttagcctctccggatcacaaatcgatgaccacgtgccgaaaagggcatccgcgcgcatcctggctccaccaggaggaaggtcatccggaatctggtag

SEQ ID NO: 114597 - DNA, 573 bp, synthetic construct
  misc_feature 1..573: note = Description of Artificial Sequence: Synthetic coding sequence
  source 1..573: mol_type = other DNA
atgctggccaactctgcctccgtccgcattctgatcaaggggggtaaggtggtgaacgacgattgcacgcacgaagctgatgtctacatcgagaatggcatcattcaacaggttgggagagagctgatgattcccgggggagctaaagtgatcgatgccaccggaaaacttgtgataccgggggggatcgacacctccacccattttcaccagacatttatgaacgccacatgtgtcgacgacttttatcacggtactaaagccgctctcgtaggcggtactacaatgattatcggccacgttttgccggataaggaaacctccctggtcgatgcgtatgagaaatgccgtgggcttgcggatccgaaagtatgttgtgattacgctctgcacgtcggaatcacatggtgggctccaaaggttaaggccgagatggagaccctggtgcgggaaaagggagtgaacagctttcagatgtttatgacttacaaggacctgtacatgctgcgggacagcgaattgtatcaagtgctgcacgcttgcaaggacattggggctatcgcgagggtctag

SEQ ID NO: 114598 - DNA, 525 bp, synthetic construct
  misc_feature 1..525: note = Description of Artificial Sequence: Synthetic coding sequence
  source 1..525: mol_type = other DNA
atgctggcaaattctgctagtgtgcgaatcctcatcaagggaggtaaggtggtcaacgacgactgtacccatgaggccgatgtgtacatcgagaatggtattatacagcaggtggggcgtgaactaatgatccctgggggcgccaaggtcatagatgccaccggcaaacttgttattcctggggggattgatacctcaacacacttccaccagacctttatgaatgcgacctgtgttgacgatttttaccacggcaccaaagccgccctggtgggaggtacgacaatgatcatcggccatgtcctgcccgataaagagacctccttagttgatgcttatgagaagtgccgggggctcgccgaccccaaggtttgctgtgattatgccttacacgtgggtattacatggtgggcaccaaaggtcaaggctgaaatggagacactggttcgcgagaaaggcgtaaactcctttcagatgttcatgacctataaggacttgtacatgctgagagacagcgagctctag

SEQ ID NO: 114599 - DNA, 498 bp, synthetic construct
  misc_feature 1..498: note = Description of Artificial Sequence: Synthetic coding sequence
  source 1..498: mol_type = other DNA
atgctagccaatagtgcatccgtgcggatcctcatcaaaggcggcaaagtcgtaaacgacgattgtactcatgaagctgatgtgtatatagaaaacggcattattcaacaggtaggtcgtgagttaatgatacccggaggagccaaagtgattgatgctaccgggaagctcgtgattcctggcggcatcgataccagtacccacttccatcaaacttttatgaatgctacatgtgtggacgatttttaccacggcacgaaggctgccttggtggggggaacaaccatgattataggccatgtgttgcccgataaggagacaagtttggtggatgcatatgaaaagtgtcgcggtctggctgatccaaaagtctgctgcgactacgcccttcacgttggtattacttggtgggcccccaaggtcaaggccgaaatggaaactctagtgcgcgaaaagggcgtcaactcttttcagatgttcatgacttacaaggattag

SEQ ID NO: 114600 - DNA, 522 bp, synthetic construct
  misc_feature 1..522: note = Description of Artificial Sequence: Synthetic coding sequence
  source 1..522: mol_type = other DNA
atggcacctgtgctgagcaaagatagcgcagacatagagagcatactcgctttgaaccctagaacacaaacgcatgcaacactccgaagcacgagcgctaagaagcttgataaaaagcattggaagcggaaccccgacaaaaactgttttaattgcgagaagctggaaaataattttgacgatattaagcacactactttaggagagcgtggtgcactgcgagaggccatgcgctgcttgaaatgtgctgatgcaccttgccagaaatcttgcccaacaaatctggatattaagagtttcatcacctctatagccaacaaaaattactacggggcagccaagatgatctttagtgacaacccactggggctgacttgtggtatggtgtgccccacatcggacctctgtgtaggggggtgtaatctgtacgccactgaggaggggccaattaatattggcgggctgcagcagttcgccacggagacgttgatcctggcgttttccttgatgaatcatctctag

SEQ ID NO: 114601 - DNA, 3078 bp, synthetic construct
  misc_feature 1..3078: note = Description of Artificial Sequence: Synthetic coding sequence
  source 1..3078: mol_type = other DNA
atggcccccgtgctcagcaaagactctgctgatatagagtccatacttgctctgaatcctcgaacacaaacgcacgctaccctgagatcaacctctgcaaagaaactagacaagaagcactggaaaagaaacccagataaaaactgcttcaactgtgaaaaactcgagaataactttgacgatatcaagcatacaaccctgggtgagcgcggtgccttgcgagaggctatgcgttgtcttaagtgcgccgatgctccctgtcagaagagctgccccactaacttagacatcaaatccttcattacttctattgcaaataaaaattattatggggcagcgaagatgattttttctgacaatccactcggcttgacctgtggcatggtgtgccctacgagcgatctgtgcgttggagggtgcaacctttatgcaacagaagaaggacctatcaatattggtggcctgcagcagttcgcgactgaggtgttcaaagcgatgtccatcccacagatccggaacccgagcctgccaccgcctgaaaaaatgtctgaggcctacagtgctaagatcgccctgttcggtgcgggccctgcttctatttcgtgtgcctcgtttctggcccgactcgggtatagtgatattaccatcttcgaaaagcaggagtatgtcggcgggctctctacatcagaaattccccaatttaggctcccatacgatgtggttaattttgaaattgaactgatgaaggacctgggggtcaaaattatttgtggtaagtccctctccgtgaacgagatgaccctgagcacactgaaggaaaaaggatataaggcggccttcatcggcatcggcttgcccgagccaaataaagacgcaatcttccagggactaacccaagaccagggtttctacacgtccaaagacttcctgccgttagtggcaaaagggtccaaggctggcatgtgtgcttgtcatagccctctacccagcatccggggtgtggtgatcgtactgggtgccggggacaccgcattcgactgcgcaacatcagccctgagatgcggagcccgacgagtttttatcgtgttccggaaaggatttgtgaacatccgcgctgtgccagaagagatggaactggccaaggaagagaagtgcgagtttctgccttttttatctcccaggaaggtgatcgtgaagggcggcagaatagtggcaatgcagtttgttcgcacggagcaggacgagacaggtaagtggaatgaggatgaggatcagatggtgcatctcaaggccgacgttgtgatctcagcttttggcagtgtgttaagcgatccaaaagtcaaagaagccctctcgcccatcaagttcaacaggtgggggttgcctgaggtggaccccgagacaatgcagacttccgaagcctgggtgttcgccggcggagatgtggtcgggctggctaatactacagtcgaatctgtcaacgatggcaaacaggcttcctggtatattcacaaatacgtgcagtctcagtacggggcgtcagtttctgccaaaccggagctgcccctgttctataccccaatcgacctagttgacatttctgtggaaatggccggattgaaatttatcaatccttttgggctagcttccgcgactccagcaacctcaacgtctatgattcgtagagcctttgaggcaggatggggattcgcattaacgaagactttctccctcgacaaagacatcgtcaccaatgttagccctagaattattcggggcactacgtctggtcctatgtacggccccgggcaatcctccttcttgaatattgaactgatctctgaaaagaccgccgcctactggtgtcagtccgtcactgaactcaaggcggatttccccgacaatatcgtgatagcgagtattatgtgcagttacaacaagaacgattggactgagctggcaaaaaagtctgaggatagtggcgctgatgctctggaactgaatctcagctgtccgcacggaatgggcgagcgcgggatggggctggcctgtggtcaggatcctgaactcgtccggaatatttgccgctgggtccgtcaggctgttcagatccccttcttcgccaaacttaccccgaatgtaacagatattgtgtccatcgcacgggccgccaaggaaggcggagccaacggagtgaccgccaccaataccgtttctggtttaatgggactgaaaagcgatggaaccccgtggccagcagtagggattgccaaacgtaccacatatggaggagtgtctggaaccgctatacgcccaatcgccctcagagcggtgacatcaatcgctagagccctgcccgggtttccaattctggctacggggggaatagacagcgcagagagcgggctccagtttctccatagtggcgcaagcgtgctgcaggtgtgtagtgcaatacagaatcaggactttacggttattgaagactattgcactggcctcaaagctttgttgtacctcaagagcatcgaggagctgcaggactgggacggacaaagcccagcaacagtgagccatcagaaaggcaaaccagtaccccgcattgctgagttaatggataaaaaactcccctcttttggaccatatctagagcagagaaagaaaattatcgcagagaataaaatccggttaaaggagcagaacgtggctttctcacccttgaagcggaactgcttcatccctaaacgcccaattcccaccataaaagatgtgattggcaaggcactgcagtatctcgggaccttcggagaactctctaacgtcgaacaggtggtcgccatgatagacgaagaaatgtgcataaattgtgggaagtgttatatgacatgtaatgatagtggctatcaagccatacaattcgacccagagacgcacctgccaacgatcacagatacgtgtactggatgtaccttgtgcttgagcgtgtgccccattgtggattgtatcaaaatggtcagcaggaccactccctacgagcccaaaaggggagttcccctgagcgtgaacccagtatgctag

SEQ ID NO: 114602 - DNA, 471 bp, synthetic construct
  misc_feature 1..471: note = Description of Artificial Sequence: Synthetic coding sequence
  source 1..471: mol_type = other DNA
atggccccagtcttgagtaaagactctgctgatatagagaactgtgaaaagcttgagaacaatttcgacgacatcaagcacactaccctcggagagcgaggtgccctccgcgaggctatgagatgtctcaaatgcgccgacgctccttgtcagaagtcttgcccaacaaatctggatatcaaaagtttcatcacctccatcgccaacaagaactactacggggctgccaagatgatcttctcagataaccctctaggcctcacctgtggcatggtttgccccacttcagatttgtgtgttggtggttgcaatctctacgccactgaggaaggacccataaacatcggcgggctacagcagtttgcaaccgaggtcaacggactcttgcactttcaaaacagtgtgtccctttggtttcagaagactgccaatatttcatttttgagttgtggcagtctgcaggacgcgtag

SEQ ID NO: 114603 - DNA, 1482 bp, synthetic construct
  misc_feature 1..1482: note = Description of Artificial Sequence: Synthetic coding sequence
  source 1..1482: mol_type = other DNA
atgatcctgaacagcctgtctctgtgctaccataacaagcttattcttgctccaatggtgcgcgtaggcaccctgccgatgcgcttgttagcattggattacggcgcagacatagtatattgtgaggaacttatcgacttaaagatgatccagtgtaaaagggtcgtcaatgaggtgctgtccaccgttgatttcgttgcacctgacgatagagtagtgttccggacctgcgaaagagagcagaatcgcgtggtgttccaaatgggcacctcggacgcagaacgggcgctcgcggttgcaaggctcgtagagaatgatgtcgcggggattgatgtaaatatggggtgcccaaagcaatattcaactaaaggtggcatgggtgctgcacttctcagcgatcctgataagatcgaaaaaatactcagtacactagtgaagggcacacgccggcctgtgacttgtaagatccgaatattaccgtcactggaagacaccttgagtctcgtgaagaggattgagagaactgggatcgcagccatagcagttcacggaagaaagagagaggaaagacctcagcatcccgtttcatgcgaggtcatcaaggccatcgcagataccttatccattccagtcattgccaatggtggttcccatgatcacatccaacaatactcggacatcgaagacttccgccaagccaccgcagccagtagtgtgatggttgcacgcgcggcaatgtggaacccaagcatcttcctgaaggagggattgaggccactcgaggaagtgatgcagaaatatatacggtacgctgtgcagtatgacaaccattacacgaacaccaaatattgtctctgtcagatgctccgcgagcaattggaatctccccaggggaggctgctccatgcggctcagagctcacgcgaaatatgcgaagcattcggacttggagctttttacgaagaaacaacgcaggaactggacgctcaacaggccagactatcagctaagactagtgagcaaaccggggagcccgcagaggacacctctggggtcattaaaatggccgtaaagttcgatagaagagcctatcccgcccagataacaccaaagatgtgtctccttgaatggtgtcgtcgtgagaagctcgcccagccagtgtacgaaacggtgcagcgacccttggatcgactatttagttccatcgttacagtggccgaacagaaataccagtccaccttgtgggacaagtcaaagaagctggccgagcaagctgccgccatcgtctgtcttagatcccagggtctgccagagggccgcctcggggaagagtccccctcactgcacaagcgcaaaagggaggcccctgaccaggatccgggcggcccgcgggcacaggaacttgcacaacccggagacttgtgtaaaaagcctttcgtggccttagggagtggtgaggagtcccctctggagggctggtag

SEQ ID NO: 114604 - DNA, 1482 bp, synthetic construct
  misc_feature 1..1482: note = Description of Artificial Sequence: Synthetic coding sequence
  source 1..1482: mol_type = other DNA
atgatcctcaattcactgtcgctgtgctaccacaataagttgatcctggcgcctatggtgcgggttggaaccctccctatgcgcctattggcgctagattatggcgctgatattgtgtactgcgaagagcttattgatttaaaaatgattcagtgtaagcgcgtagttaacgaggtactgagtacagttgatttcgtggctccagacgacagggtggtctttaggacctgcgaaagagagcagaacagggtggtgtttcaaatgggtaccagcgacgccgaacgagccttggcagtggcacgacttgtggagaatgatgtggccggcattgatgtgaacatgggctgccctaaacagtacagtaccaagggaggcatgggggcagctctgctctccgatcctgacaagatagaaaagattctcagcactttggtcaagggaacccggagaccagtgacctgcaagattcggatactgcctagcctggaggacactctgagcctggtcaaacgcattgagcggaccggtatagccgcgatcgctgtgcacggcaggaaacgcgaagagaggcctcagcaccccgtgtcctgtgaggtcatcaaggctattgcagacactctcagcataccagttatcgccaatggcggttcacacgatcacattcagcagtatagcgacatcgaggattttcggcaggctacagctgcttcctcggtgatggttgcccgcgctgctatgtggaatccttcgatttttctgaaggaagggctccgccccctggaagaggttatgcagaaatatattcgctacgccgtgcagtacgacaaccactatactaacaccaaatattgtttgtgtcagatgttgcgcgaacaacttgaatctcctcaaggccggctgctccacgctgcacaaagctcacgggagatctgtgaagcattcggattgggagccttctacgaggaaaccacacaggagctggacgcacagcaggcccggctgtcggccaagaccagcgagcagacaggtgaacccgctgaggacaccagcggtgtgataaagatggcggttaagtttgatcggcgagcatatcctgcccagattacaccgaaaatgtgccttcttgagtggtgtcgtcgggaaaagctggcacaacccgtttacgaaaccgtgcaacggcccctggaccgcctcttttcctccatcgtaacagtcgccgagcagaaataccaatcgaccctctgggacaagtcaaaaaaacttgccgaacaggcagcagccattgtatgccttaggagccagggactcccggagggacggctcggcgaagagtccccttctctgcacaaaaggaagagagaagcacccgaccaggatcccggagggcctagggctcaggagctggctcagccgggggacttatgcaagaaaccttttgtggcactgggcagtggggaggagtcccctctagaagggtggtag

SEQ ID NO: 114605 - DNA, 1377 bp, synthetic construct
  misc_feature 1..1377: note = Description of Artificial Sequence: Synthetic coding sequence
  source 1..1377: mol_type = other DNA
atgatattgaattctctgtcgctctgctatcacaataaactcattctcgccccgatggtcagagtggggaccctacccatgcggctgctagccctggattatggggccgacattgtttattgtgaagagttgatcgatcttaaaatgatccaatgtaagcgtgtcgttaatgaggtgctgtctacagttgactttgtagcacctgatgatcgggtcgtgttcagaacatgtgagcgcgagcaaaaccgggtcgtgtttcagatgggcggcatgggggcagccctgctgtcggaccctgacaagattgaaaaaatcttgagtaccctggtgaaggggacgagacggcccgtcacatgcaaaatcaggattcttccgtctctggaagatacgctctccttggtcaaaagaatagagcgaactggtattgctgctatcgccgtccacggacgcaagcgcgaggaacgaccccagcaccctgtttcatgtgaggttattaaagccatcgccgacaccctatctatcccggtgatagctaacgggggctcccacgaccatatccagcaatactccgacatagaggactttcgacaagctactgccgcttctagcgttatggtcgcccgggccgcaatgtggaatccctctatatttctgaaagagggcctgcgccccctcgaagaggtcatgcagaagtatatccggtacgccgtgcagtacgacaatcattataccaacacaaaatactgtctctgtcagatgttgagggaacaattggagtctcctcaggggcgtctgctccacgccgctcagagcagtcgcgaaatctgcgaagcattcggtttgggcgccttctatgaggagacgactcaggaattagacgcccagcaggcccgcctctccgccaaaacatcggagcagacaggcgaacctgccgaagacacaagcggggtgattaagatggctgtaaagttcgacagacgcgcttacccggcccagatcactccaaaaatgtgcctcctggagtggtgccgcagggaaaagttagcacagccagtctacgagacagtgcagcgtccattagaccgactgttttcgtctattgtgaccgtcgccgaacagaaatatcaatcaaccctgtgggacaaaagtaaaaagctcgccgaacaggccgctgcgattgtttgtcttcgctctcagggccttccagagggccgtctgggagaggaaagcccaagtctgcacaagagaaaacgcgaggctcccgaccaggaccccggaggcccgagagcccaggaactagcccagcccggcgacctgtgcaagaaacccttcgtggcactgggctcaggggaagagtctcctctcgagggatggtag

SEQ ID NO: 114606 - DNA, 858 bp, synthetic construct
  misc_feature 1..858: note = Description of Artificial Sequence: Synthetic coding sequence
  source 1..858: mol_type = other DNA
atggcaggattagggcaccccgccgcctttgggagagccacacacgcagtcgtcagggctctccctgagtcacttggacaacacgcgctcaggtctgctaagggagaagaggtcgacgtagccagagcagaaaggcaacatcagctatatgtgggcgtgttgggctccaaactggggctacaggtcgtggagctccctgcggacgagagcctcccagactgtgtctttgtggaggacgtggctgtcgtttgtgaggaaactgcccttattaccaggccaggtgcaccctctcgacgcaaggaagtggatatgatgaaggaagccctcgaaaaactgcagcttaacatcgtcgaaatgaaggacgagaacgctacactcgatgggggggacgtcctgtttaccggacgggaattcttcgtgggcttaagtaaacgtacaaatcagagaggggccgaaatactggccgatacgttcaaagactatgcagtgtccaccgtccccgttgcagatggtttgcatttgaagtcgttttgctctatggccggtccaaatctgatcgcgattggatctagtgaatctgcacaaaaagcattgaaaatcatgcaacagatgtctgatcatcggtacgataagctgactgtccccgatgatatagcagccaattgtatctacctgaacatccccaataagggacacgtgctcttacataggactcccgaagaataccccgagtcggcaaaggtatacgagaagctaaaagaccacatgctgatccccgtgagcatgagtgaactagagaaagttgatggacttctgacctgctgtagcgtgctgataaacaaaaaggtcgacagttag

SEQ ID NO: 114607 - DNA, 579 bp, synthetic construct
  misc_feature 1..579: note = Description of Artificial Sequence: Synthetic coding sequence
  source 1..579: mol_type = other DNA
atgtggctgtatgggctgggccaagtggatatgatgaaggaggctctcgagaagctccaactcaatatagttgaaatgaaagatgagaacgccaccctagatggcggagacgtgttgttcactggccgtgagttcttcgttggactctcgaagagaacaaaccagaggggcgctgagatcttggccgacacatttaaagattatgccgtctccaccgtgccggttgccgatggactacaccttaagtccttttgctctatggccgggccgaacttgattgcaataggttcctccgagagcgcccagaaagctctcaagataatgcagcagatgagcgaccacaggtacgacaagcttacagtgcccgacgacattgctgccaattgcatttacttgaacattccaaataaaggccacgtcctgctgcaccgcacacctgaggagtatccagaatccgcaaaagtgtacgaaaaacttaaggaccacatgttgattccagtgtcgatgagcgagttggaaaaggttgacggccttctaacctgctgcagcgtgctaatcaataagaaggtggattcatag

SEQ ID NO: 114608 - DNA, 549 bp, synthetic construct
  misc_feature 1..549: note = Description of Artificial Sequence: Synthetic coding sequence
  source 1..549: mol_type = other DNA
atgatgaaggaggcgctggaaaagctacagttgaatattgtagaaatgaaagacgagaatgctactctcgatggcggcgatgttttattcaccggccgagaattctttgtaggcctgtcaaagcgcacaaatcagcggggcgccgagatccttgccgacacattcaaagattatgcagtatccactgtgcccgtcgctgacggcttgcatctgaaaagcttctgttctatggccggcccaaacctgattgctatcggttcttcagagtctgctcaaaaagctctaaagattatgcaacagatgtccgatcaccgctacgataagctgaccgtacctgacgacatagctgccaactgcatttacctaaatatcccaaacaaggggcacgtacttctacaccgaacaccagaggaatatcctgagagcgccaaagtctacgagaagcttaaggaccatatgctgattcctgtgtctatgagtgagttggagaaggtcgacggattgctgacgtgctgctcagtgctgatcaacaagaaagttgactcctag

SEQ ID NO: 114609 - DNA, 858 bp, synthetic construct
  misc_feature 1..858: note = Description of Artificial Sequence: Synthetic coding sequence
  source 1..858: mol_type = other DNA
atggccggcttaggacacccagcagccttcggtcgggccactcatgccgtggttcgtgcgctgccagagtcactcggtcaacatgccttgcgtagtgctaagggcgaagaagtggacgtggctcgagccgagaggcagcaccagctgtatgtgggcgtgctgggctcgaagcttggactccaggtggtagaattgccagcggatgagtctctcccagattgtgtgtttgttgaggatgtagcagtggtttgcgaggagacagcactcataacgcgtccaggggcaccatctcggaggaaagaagtagacatgatgaaggaggcgctggaaaagctccagctgaacatagtcgagatgaaagacgagaatgctactcttgatggaggtgacgtcctctttacaggtagggaatttttcgtcggcctgtctaagagaacgaatcagagaggagccgagatcctagctgatacctttaaggattatgcagtgtccacagtacctgtcgctgatgggctccacctgaagagcttctgcagcatggctggaccaaacttgatcgctataggttccagcgaatccgcccaaaaggctctgaagattatgcaacaaatgtctgatcacagatatgataagctcacagttccagacgacattgccgccaactgcatctatctcaatataccaaataaggggcacgttctgttgcatcggacacccgaagagtacccagaaagcgcaaaggtctacgagaaactgaaggaccacatgctgatacctgtcagtatgtcggaactggaaaaagtggatggcttgttgacgtgttgctctgtcctcatcaataagaaggtcgactcctag

SEQ ID NO: 114610 - DNA, 558 bp, synthetic construct
  misc_feature 1..558: note = Description of Artificial Sequence: Synthetic coding sequence
  source 1..558: mol_type = other DNA
atggtcgatatgatgaaagaggcacttgaaaagctgcagttgaacatcgttgagatgaaggacgagaatgctacattggacggcggagacgtactgttcacaggcagagagttctttgtcggtttgagcaaaaggaccaaccagcgcggcgccgagatcctggcggacacttttaaagactatgcagtgtcaactgtgcctgtagcagatggacttcaccttaaatctttttgtagtatggctggcccgaatctaattgccattgggtcatccgaatccgctcagaaagccctgaagattatgcagcagatgtctgatcaccgctatgacaagctcaccgtccccgacgacatcgcagctaattgcatatacctgaatatcccaaataaaggacacgtgctgctgcatcgaacaccagaggagtaccccgaatctgccaaggtctacgaaaaactgaaagatcacatgctaatccctgtcagcatgagcgagttggagaaggttgatggtctgcttacctgttgttctgtgctgatcaataaaaaggtggacagctag

SEQ ID NO: 114611 - DNA, 858 bp, synthetic construct
  misc_feature 1..858: note = Description of Artificial Sequence: Synthetic coding sequence
  source 1..858: mol_type = other DNA
atggggactcccggagagggacttggcaggtgctctcacgccctcatacggggtgtcccagagtctctggcttcgggagaaggggctggggctggtctgcctgctttagatctcgctaaagcccagagggagcacggcgtgctggggggtaagctgagacagcgcctcggcctacagctcctggagttgccgcccgaagagtctctgcctttggggccactgctcggcgataccgcagtcattcagggcgatactgctctgataactcggccgtggagccccgcacggcggcctgaggtggacggcgtgcgaaaagccttacaagacttggggctccggatcgtggagatcggtgatgaaaacgccacactggatggtactgacgtcctctttaccgggagagagtttttcgtgggcctctcaaaatggacaaatcacaggggggccgagatcgtggcagatacctttagagacttcgccgtgagtacagtacctgtgtccggccccagtcaccttcgtggcctatgcggtatgggcgggcctcgcaccgtggtggccggctcatccgatgccgcgcagaaggccgtccgggcaatggccgtgctgacggaccacccttacgcttccctcacactccctgacgatgccgctgccgattgcctgtttctccgccctggcctaccaggagtgcctcccttcctccttcaccgcggtggcggtgacctcccaaattctcaggaggccctgcagaagctatccgatgtgactctagtccctgtgagttgctccgagctagaaaaggctggggctggcctgagcagcctgtgtttagtgctgagcacccgtcctcacagttag

SEQ ID NO: 114612 - DNA, 858 bp, synthetic construct
  misc_feature 1..858: note = Description of Artificial Sequence: Synthetic coding sequence
  source 1..858: mol_type = other DNA
atgggcacccctggagagggcttaggacgttgcagtcatgccctgatacgcggggtacccgagtccctggcatctggagaaggtgccggggctgggctgccggccttagacctcgccaaagcacagagggaacacggcgtgctgggaggaaaattgcgtcaacgtctcgggctgcaactgctggaactacctccggaagagagcctccctctggggcccttgctgggggacacagcggtcattcagggggatacagccttaatcacgcgcccttggagtcccgctagaagacctgaggtggatggggttaggaaggctctgcaagacctgggtctgaggattgtggagatcggggatgagaacgccaccctggacggaacggacgtgctctttactgggagggagttctttgttgggcttagtaaatggactaaccaccggggcgctgaaatcgtcgcagacaccttcagggacttcgcagtgagtaccgttccagtgtctggcccctcgcacctgcggggcctgtgtgggatgggagggccacgcaccgtggtcgccggatcttccgacgcagcccagaaggccgtacgcgcgatggcagtcttaactgaccacccctacgccagcctgaccctgccagacgatgcagctgccgactgcctttttctgaggcccggattaccgggagtccctccctttctcttgcataggggaggtggggatctacccaactcacaggaggctctccaaaagctgtctgacgtaacgctcgtcccagtatcttgttctgagctggaaaaagcaggtgctggactgtcgagtctatgcttagtcctctctacgaggcctcatagctag

SEQ ID NO: 114613 - DNA, 858 bp, synthetic construct
  misc_feature 1..858: note = Description of Artificial Sequence: Synthetic coding sequence
  source 1..858: mol_type = other DNA
atggggacacccggtgaggggctaggccgctgctcccacgcactgatccggggagtacccgagtcccttgccagtggggagggcgcgggagctggcctcccggccctcgacttagcgaaagcccagcgtgaacatggggtcttgggtggaaaactgaggcagcggctgggcttgcagcttcttgaattaccacccgaggaatccttgccgctcggtcctcttctgggcgacacggcagtgattcagggggataccgccctgattacccgcccatggtcgcctgctcggagacccgaggtggatggcgtcagaaaggcacttcaagacctcggcctgagaatcgtggagatcggagatgagaatgccacccttgatggaacggacgtcctgttcactggtagggagttcttcgtgggtctgagcaaatggactaaccataggggagctgaaattgttgctgatacatttagggatttcgcggtgagcacagtgcctgtttctggacctagccacctgagaggcctttgtggcatgggtggaccccggaccgtggtagcaggtagctccgacgctgcccaaaaagctgtacgggcgatggccgttctgacggatcacccttatgctagcctcacactgcccgacgacgcggcagctgattgtctctttttacgcccaggtctgcccggcgtcccacctttcttactacaccggggcggaggggacctcccaaacagccaagaagcattgcagaaattgagtgacgtgacactagtgccagtgagctgcagcgagttggaaaaagcgggggcaggactttcatccctttgtctggtgctgagcacacgacctcatagctag

SEQ ID NO: 114614 - DNA, 858 bp, synthetic construct
  misc_feature 1..858: note = Description of Artificial Sequence: Synthetic coding sequence
  source 1..858: mol_type = other DNA
atgggaacacccggcgaaggattggggcgatgttctcacgccctgattcgcggcgttcccgaaagtcttgcttctggtgagggagccggagccggactccctgccctggacctggctaaagcccagagagagcacggcgtgctgggtggaaaactgcgacaaaggttaggtctccagctgctggagcttcctccagaggaaagtctaccactggggccactccttggagacaccgctgttatccaaggagatacagcactgatcacaaggccgtggtcccctgcccgcagaccagaagtcgacggggtacggaaggccctgcaggacctggggctgcgcatcgtcgagataggcgacgagaacgccacgctagacggaactgatgtgttattcacaggccgtgagttcttcgtggggctgagtaagtggaccaatcaccggggcgcagaaatcgtggccgacacatttagggactttgccgtcagtactgtgcctgtgagcgggccgagccacttacgaggcctttgcggcatgggtggccctcggaccgtggttgctggcagctctgacgccgcccagaaggccgttagggccatggctgtgcttacagaccacccttacgcctcactaaccttgcctgacgatgccgctgccgattgcctgttcttgaggcccggtctgcctggagtccccccctttttgctgcacaggggaggcggagatttgccgaacagccaggaggccctccagaagttatctgacgtgaccctggtgcccgtctcctgcagtgaactcgaaaaggcaggggcgggactgagcagtctctgtctggtgctgagtacacggcctcacagttag

SEQ ID NO: 114615 - DNA, 858 bp, synthetic construct
  misc_feature 1..858: note = Description of Artificial Sequence: Synthetic coding sequence
  source 1..858: mol_type = other DNA
atggggacccctggagagggtctagggaggtgtagccacgctctgatcagaggcgtgcccgagtctctcgcctctggcgaaggtgcaggagcgggcctgccggcactggacctggctaaagcccagcgggaacacggcgtgctcggcgggaagctgagacaaagattaggtctgcaactgctagaactaccacctgaggagagtttgcccctgggtccattactcggagatactgccgtgatccagggcgacaccgccctgatcaccaggccatggtcacccgctaggagaccagaagttgacggggtgcgtaaggccctacaggatcttggtctgcggatcgtggaaatcggagacgagaatgctactcttgatgggaccgacgtgttgtttactggaagggagttttttgtgggattgtcgaaatggactaatcacaggggggcagagattgttgctgatacattccgtgacttcgcagtttccactgtaccagtgtctggcccctctcatttgcgcgggttgtgtggtatggggggcccccgaacagtggttgcggggagtagtgatgcagcacagaaagcggtccgagccatggccgtgctgacagaccacccctacgccagcttgactctacccgatgacgctgccgctgattgtctttttttgagacccggactgcccggggtgcctccgttcctccttcatcggggaggaggagatctccctaattctcaggaggccctacaaaaactgtccgatgtcacgctcgttcctgtatcctgctcagagctggaaaaggccggtgcaggcctaagtagtttgtgcttagtccttagtaccagaccgcattcctag

SEQ ID NO: 114616 - DNA, 858 bp, synthetic construct
  misc_feature 1..858: note = Description of Artificial Sequence: Synthetic coding sequence
  source 1..858: mol_type = other DNA
atgggcacacccggggaaggtttgggaaggtgcagtcacgctctaattcggggcgttcctgaatcactcgcctctggcgagggcgcaggggccggcctccccgccttagatctcgcaaaagctcagagggaacacggcgttctgggtggcaagctccgtcaaaggttggggttgcaactgctcgagctgcctccagaggagagcttgcccctagggccattgctgggcgacaccgctgttattcaaggggacacggctctgatcactaggccctggagtccagctcgacggcctgaggtggacggtgtccgaaaggccctacaagatttgggcctgcgtatcgtggaaatcggcgacgaaaatgccactctggacggcaccgacgtccttttcacaggcagggaattctttgtgggactgagcaagtggaccaaccaccgcggggctgagatcgtggcagacacatttcgcgatttcgcagtgtccacggtccccgtgtctggcccctcacatctgcgtgggctttgtggcatggggggaccaagaacggtggtggctggcagtagcgacgcagctcagaaggccgtgagagccatggccgtcttgaccgatcacccctacgcctccctaacacttcccgacgacgcagccgctgattgtctcttcttgaggccagggctgccaggggtgccaccattcctcttacaccggggcggaggggacctgcctaactcccaggaggctctgcagaaactaagtgacgtcactcttgtgccagtgtcatgtagcgaattagagaaggcaggagctggcctctccagcttgtgcctggtgctctccacacgcccacacagctag

SEQ ID NO: 114617 - DNA, 858 bp, synthetic construct
  misc_feature 1..858: note = Description of Artificial Sequence: Synthetic coding sequence
  source 1..858: mol_type = other DNA
atgggaaccccaggggaggggctggggcggtgcagccacgctctgattagaggagttccagaatcactcgccagtggcgaaggcgccggcgcggggctcccggctttagacttggctaaagcccaaagggagcacggcgtgttaggcggaaagctccgacagaggctagggctgcagctgctggagttaccccctgaagagtccctgccattagggcccctcctgggcgacaccgcagttattcagggcgataccgcactgattacccgaccatggtcccccgcccgccggcctgaggtcgatggcgtgaggaaagccttacaggatttagggttgcggattgtcgaaatcggagacgagaatgctacgctcgacggaacggacgtgctcttcaccggacgtgagttttttgtgggccttagcaaatggactaatcatcggggcgccgagatcgtggccgatacttttagggactttgcagtgtcaactgtccccgtgtcaggtccttcccacctgagagggctatgcggcatgggaggccctagaacggtagtcgctggctcatcagatgccgcacagaaggcggtgcgggctatggccgtgcttacggaccatccttacgcatcgttaacgctcccagatgatgcagcagcggattgtctatttcttaggccaggtctccccggagtgccaccatttctgttacatcgcggcggcggggatttgcctaattcccaggaggcactccagaagctctccgatgtgaccctggtgccagtgtcctgcagcgagctagagaaagccggggccggcctgagttctctctgtctggtgctctccacgagaccccatagctag

SEQ ID NO: 114618 - DNA, 567 bp, synthetic construct
  misc_feature 1..567: note = Description of Artificial Sequence: Synthetic coding sequence
  source 1..567: mol_type = other DNA
tgaaggagacccgaggtggatggggtgcgaaaagctttacaggaccttggcctgcgaattgtggaaataggggatgagaacgctacgctggacgggactgacgtgttatttaccggccgggaatttttcgtcgggctcagcaagtggaccaatcatcgtggtgctgaaatcgtggccgacactttccgagactttgcggtcagcactgtccctgtgtccgggcctagtcatctccggggcctgtgtggcatgggcggccccagaacagttgttgctggcagcagcgatgcagctcagaaggcggttcgaatgacgcagctgcttacggtgtcttttttcgtgttaggctgcttagtatgtcccctttcctcttgcaccgtggaggtcggaatctgccctacagcacgcaggcattgcagatcatctctaatgagcccctggtatctgtgtccagctcagaattggcgtcgtctggcgcccgggtctgccccatccgcatggtgtagcgcacacgctcctacagcagaggggctggctttaggatactgctggcccggcgtggggtag

SEQ ID NO: 114619 - DNA, 567 bp, synthetic construct
  misc_feature 1..567: note = Description of Artificial Sequence: Synthetic coding sequence
  source 1..567: mol_type = other DNA
tgacgaaggcccgaggtggacggagttcgcaaggcacttcaggacctcggactgcggattgtggagatcggcgacgagaacgcaacactagatggcacagatgtccttttcaccggtcgggagtttttcgtgggcctctccaaatggactaatcaccggggggctgagatagtggcagacacgttcagggatttcgccgtaagcacggtcccagtctcaggtccttctcacctgaggggcctgtgcgggatgggaggtcctcggacagtggtggccggcagctccgacgcagcccaaaaagccgtgcgtatgacccagctacttacggtatcgttcttcgtcctgggctgcctcgtctgccccctgtcatcgtgtaccgtagaggtgggaatttgcccaaccgcgcggagacactgccgatctagcctgatgtccccctggtacctctgccccgcccagaactggcgaagactggccccaggctcagcccctagtgcttggtgcagcgcccatgctcctacagccgagggtctggcgctgggctactgttggcctggcgtggggtag

SEQ ID NO: 114620 - DNA, 858 bp, synthetic construct
  misc_feature 1..858: note = Description of Artificial Sequence: Synthetic coding sequence
  source 1..858: mol_type = other DNA
atgggtactcctggagagggcctgggccgctgcagccacgcgctgataagaggcgtgccggagtcgctcgccagcggcgaaggggctggagccgggctgcccgccctggacctcgccaaggcacagagagaacatggcgtattggggggaaaactacgacagcgcctgggactccagcttttagagttgccgcccgaggagtcgctgcccttaggccctttgctaggagacacggctgtgatccagggtgataccgcattgatcactcggccttggtctcccgctcgacgacctgaagtagacggtgtcaggaaagccctgcaggacctggggctgaggatcgtcgaaattggagacgaaaatgcgactctcgatggtactgacgtgttattcaccgggagggaatttttcgtgggcctgtcaaaatggaccaatcatcggggggcagagatcgttgcggatacatttcgtgatttcgcagtatctactgtgcccgtgagcggcccaagtcatcttcgaggcctgtgcggaatggggggtccccgcacagtggtagctgggagttctgacgccgcccagaaggccgttagagctatggccgtcttaaccgatcatccgtacgctagcctaacattaccagacgacgccgccgcagactgcctttttctgcgcccgggactacctggcgtgccaccattcctgcttcaccgcgggggcggtgacctgcccaacagccaggaggccctccagaaattgtccgatgtcactctcgtgcctgtctcttgttccgaactcgagaaggccggggctggcctctcatccctgtgccttgtgttgtcaacacggcctcacagttag

SEQ ID NO: 114621 - DNA, 858 bp, synthetic construct
  misc_feature 1..858: note = Description of Artificial Sequence: Synthetic coding sequence
  source 1..858: mol_type = other DNA
atggggaccccgggagagggtcttggccgttgtagccacgcactgatcagaggagtaccagaatctcttgctagtggcgagggagcaggagcaggattgcccgccttagatttggctaaagcacaacgggaacacggggtcttaggcgggaaactgcgccagaggctcggcttacagttactagagctgccccctgaggaatccctccccctgggtcccctcttgggggataccgcggtgatccagggcgacacagccctgatcactagaccctggtcccccgcccgccggcccgaagtggatggtgtgcgcaaggctctgcaggatttgggactgaggatagttgagatcggtgatgagaacgccacactggatggcactgacgtgctgtttacaggccgggagttcttcgtgggcctctctaagtggactaatcaccgaggcgctgagattgtcgctgacactttccgagatttcgctgtgagtacagtgcctgtgagcggcccaagccacctgcgaggcctctgcgggatgggcggaccgcgcaccgtggtggccggctcctccgacgcagcacaaaaagcggttcgggccatggctgtgttgacggaccacccgtatgcctctttgaccctccctgacgacgccgcagccgattgtctgtttctgaggcctggattgcccggggtgcctccctttcttcttcaccgtggcgggggcgaccttcccaatagtcaggaggcactgcagaaactttccgacgtcacattagtaccagtgagctgctccgagctcgagaaagccggagctggactgtcttcgctgtgcctggtgctgtccactcggccacatagctag

SEQ ID NO: 114622 - DNA, 858 bp, synthetic construct
  misc_feature 1..858: note = Description of Artificial Sequence: Synthetic coding sequence
  source 1..858: mol_type = other DNA
atggggaccccaggagaaggattgggccggtgctcacacgccctgatccgaggcgttccagaatccttggcctctggtgagggggccggagctggtttgcctgcgttagacctggcgaaagcccagcgtgagcacggtgtcttgggaggcaagctccgtcagagactggggttacagctgctcgagcttccgcccgaagaatcactcccattgggcccactactgggggatactgcggtcatccagggcgacacggctttaatcacgaggccgtggtctcccgcgcggaggcccgaagttgatggggtgcgcaaagccttgcaggacctggggctccggatagttgaaatcggtgatgagaacgcgaccctggacggaaccgatgtgctatttactggcagggagttctttgtgggactgtcaaagtggactaatcaccgaggagccgagatcgtggccgatacatttagggacttcgctgtctccacagttcccgtctcagggccttctcatcttcgaggactctgtggaatgggcggacctaggaccgtggtggccggctccagcgacgccgcccagaaggccgtgagagctatggcagttctcactgaccacccctacgcaagtttgactctgccagacgatgcagcagccgactgcctcttcttacgccccgggctgcccggagtccccccgttcctattgcatagaggcggtggtgacttgccaaactctcaggaagccctgcagaagctatctgatgttactcttgtgcctgtatcgtgttctgagctcgagaaggccggcgcaggtttgtcatccctatgtctggtcttgagtacccggccacacagttag

SEQ ID NO: 114623 - DNA, 711 bp, synthetic construct
  misc_feature 1..711: note = Description of Artificial Sequence: Synthetic coding sequence
  source 1..711: mol_type = other DNA
atgggaacccctggtgaaggactgggtcggtgtagccatgcactaatcaggggtgttccagagagtctggcaagcggtgagggggcaggcgccggcctgcccgctctggacttagctaaagctcagagagagcacggcgtgttaggcggcaagctccggcaacggctcgggctacagttactcgagcttcctccggaagaatctctacctctcgggcccctgctgggagataccgccgtgatccagggagacaccgccctgataactcggccctggtctccagcaaggagaccagaggtggatggagtcaggaaggctctacaagacctcggtcttcggatcgtggaaatcggagatgagaacgctactcttgacggcactgacgtgctgttcactgggagggaattctttgtcgggctttctaaatggaccaatcaccgcggcgctgagatcgttgctgacacatttcgcgactttgcagtgtccactgtgccagtttccggaccgtcccacctgcggggcttgtgcggcatgggtgggccacgcactgttgttgcaggcagttccgacgctgcccagaaggctgttcgagcgatggccgtcctgactgatcatccctacgcgtctcttacactccccgacgatgccgctgccgactgcctgttcctacggcctgggcttcccggagtacccccttttcttctgcattag

SEQ ID NO: 114624 - DNA, 681 bp, synthetic construct
  misc_feature 1..681: note = Description of Artificial Sequence: Synthetic coding sequence
  source 1..681: mol_type = other DNA
atggggactccgggtgaaggcctgggaaggtgtagccatgcactaataaggggcgtccccgagagcttggccagcggagaaggcgcaggggccggactccccgctttggatttagccaaggcccagagggaacatggcgttctgggagggaaattgcggcagagactgggccttcagctactggagctgcctccagaggagtctctgcctctgggtccgctactgggcgataccgcggtaatccagggagatacagccctgataactaggccatggtcacccgctaggaggcctgaggttgatggcgtccgaaaagccctccaggatcttgggcttagaatcgttgaaattggcgacgagaatgccaccctggatggcacagacgttttatttaccggtcgagagttcttcgtgggcctttccaaatggactaatcacagaggcgcagaaatcgtggcagatacttttcgcgattttgctgttagcacagtccccgtgagcggacctagccatctgcgaggactttgtggcatggggggtccgagaactgtcgtggcaggctccagcgacgccgcccagaaagcagtgagggctatggccgttctcactgatcatccctacgccagtctgaccctccccgacgacgccgccgcagactgtcttttcctgagaccggggtag

SEQ ID NO: 114625 - DNA, 711 bp, synthetic construct
  misc_feature 1..711: note = Description of Artificial Sequence: Synthetic coding sequence
  source 1..711: mol_type = other DNA
atgggaacccccggcgagggtctgggtcggtgctcacacgctctgattcggggcgtccctgaatcgctggccagcggtgagggcgctggggccgggctgcctgctctcgacctcgctaaggcccagcgggagcacggcgtcctgggaggtaagctccgccaacgcctggggctgcagcttcttgagctgccacctgaggaatcactgcccctgggcccactgctcggcgacacagcggtcatacagggggacaccgcattaattaccagaccatggtcacccgctagacggccagaggtagatggcgtgaggaaggcactgcaggatctgggccttcggattgttgaaatcggcgacgagaacgcaaccctggatgggaccgatgtgttgtttaccggcagagaattctttgtagggctgtcaaaatggacaaatcacagaggggctgagatcgtggccgataccttccgggatttcgcagttagcactgttccagtgtcagggccctctcatctcagaggtctgtgcggcatgggaggtcctagaaccgtcgtggcgggctcatcagacgccgctcaaaaggctgtcagagctatggccgttctaacagatcatccttatgcaagcttgactctacccgacgacgctgccgctgactgcctgttcctgcgaccaggcctgccaggagtgcccccgtttttgctccattag

SEQ ID NO: 114626 - DNA, 858 bp, synthetic construct
  misc_feature 1..858: note = Description of Artificial Sequence: Synthetic coding sequence
  source 1..858: mol_type = other DNA
atgggtactcccggcgagggcttaggacgctgctcccacgccctgatacgtggggtgcctgagtcgctagcctccggcgagggggccggggcaggcctgcctgcactggacctcgctaaggcccaacgcgaacacggggttctcggtggcaagctgaggcagcgcttgggcctccaactgctggaacttccacctgaagagagccttcccctgggaccactgctgggggacaccgccgtgatccagggggacacagcccttattactagaccatggtcaccagcaaggcgccctgaggttgatggggtgcggaaggccctgcaggacctcggcctgcggattgtggaaattggcgacgagaatgcaaccctagacggcacggatgtgcttttcactggacgagagttctttgtggggttgtccaaatggaccaaccatcgtggagctgaaatcgtcgccgatacattccgggatttcgccgtgagcacagtgcctgtctccggcccatcccacctgcgtggcttgtgtggaatgggcgggcctcggacagtggtggccgggtcctcagacgctgctcagaaggctgtgcgggcaatggccgttctgaccgatcacccgtatgctagcctgacactgccggacgatgctgcagctgactgtttatttctgcgacctggattaccaggagtcccaccattcctccttcatcgtggtggaggagacctccccaactcccaggaggctctgcagaagctatccgacgtgactctcgtacccgtgagctgctcagagctggaaaaggccggtgccggtctgtcctccctgtgcctcgtcttaagtactcggcctcactcttag

SEQ ID NO: 114627 - DNA, 858 bp, synthetic construct
  misc_feature 1..858: note = Description of Artificial Sequence: Synthetic coding sequence
  source 1..858: mol_type = other DNA
atggggaccccaggggaagggctaggccgttgcagccacgccttgatccggggagtacccgagtccttggcgagcggagagggagccggtgccggtttgccagccctggatctagcaaaagcccagcgggagcatggggtgttgggcgggaagctgaggcagaggctcggtctgcaactgctggagctgcctcccgaagagagtctccctctgggccctttactgggtgatactgccgtgatacagggtgataccgctctaattacgagaccctggtcgccggccagacggccagaggtggacggcgtgcggaaggccttacaggatctggggctgcgtatagtggaaatcggcgatgagaacgccacactggacggaacggatgttctgtttactggccgggagttcttcgtgggcctgtctaagtggacaaatcaccgaggggctgaaatcgtggctgataccttccgcgacttcgctgtcagcacggtgccggtctcaggcccatctcatcttcgtggtctgtgtggaatgggggggcctcggacggtagtggcaggttcttctgatgccgcccagaaagcagtacgggcgatggcagtgttaacggaccacccatacgcctcactgactctccccgacgatgccgccgctgattgcctgtttcttagacccggtcttccaggggtccctccatttttgctgcatcgagggggaggggacctccccaacagccaggaggccctgcaaaagttgtctgatgtgactttggtaccagtatcctgctccgagttagagaaggcgggcgctgggttgagctcactgtgcctcgtgttgtcaactcggccgcacagctag

SEQ ID NO: 114628 - DNA, 858 bp, synthetic construct
  misc_feature 1..858: note = Description of Artificial Sequence: Synthetic coding sequence
  source 1..858: mol_type = other DNA
atgggcactcccggggaaggtcttggacgatgtagtcatgctctaattcgcggggtgccagagagcttagcctcgggcgagggtgctggagcaggcttgcctgctctggaccttgccaaggcccagcgggagcatggcgtcctgggcgggaaactccggcagcgtctgggcctgcaacttctggaactcccgccagaagagtcactgcctttagggcctctgctcggggacacagccgtgatccagggtgacaccgctttgattacacgaccatggtcccccgcaaggcggccagaggtggacggcgtgcggaaagccctgcaagaccttggtcttcgaattgtcgagatcggggatgaaaatgctacgctggacggaacagacgtgctatttaccgggcgcgagttcttcgtgggactttccaaatggaccaatcacagaggcgctgaaatcgtggccgacacttttcgcgacttcgccgtgtccacagtcccagtgtccggccccagccacctcagagggctatgcggcatgggggggccaaggaccgtggttgcaggctcctcagacgctgcccaaaaggctgtgcgagcaatggccgtcctgaccgaccatccttacgccagtctcaccttgcccgatgatgcggccgcagactgcctgtttctgcgccccggcctcccaggggtgcccccattcttgcttcacagaggaggcggtgacttgcctaatagtcaggaagcgctccagaaactgtcagacgtgaccttagtaccagtgtcatgcagtgagttggagaaggccggggccgggctgtcctccctctgtctggtcctcagcaccaggccgcattcatag

SEQ ID NO: 114629 - DNA, 681 bp, synthetic construct
  misc_feature 1..681: note = Description of Artificial Sequence: Synthetic coding sequence
  source 1..681: mol_type = other DNA
atgggcacgcccggggaagggcttggccgttgcagccacgcgctgattaggggcgtccctgagagcctagccagtggtgagggggctggagccggcctccccgccctggacttggctaaggctcagcgcgagcatggcgtgctcgggggcaaattgcgccagcggctggggctccaattacttgaactcccccccgaggaatctctgcctctgggtcctctgcttggcgacaccgcggttattcagggagacacagctctgataacgagaccatggtcgcccgctagacgacctgaggtagacggggtgagaaaagcacttcaggacctcgggctgagaattgtggaaatcggagacgagaacgctactttggacggtacagacgtcctcttcaccggtcgggagttttttgtgggcctcagcaaatggaccaaccatcgcggtgcggagatcgtggctgacacgtttcgggactttgccgtttccacggtgcccgtatcgggaccctcccatctccgcggactgtgtggcatgggcggtcctcgaacagttgtagcgggatcaagcgatgctgcccagaaagcggtcagagccatggccgttctgaccgaccacccctacgccagtcttaccttgcctgacgacgccgccgccgactgtctcttccttcggccgggatag

SEQ ID NO: 114630 - DNA, 858 bp, synthetic construct
  misc_feature 1..858: note = Description of Artificial Sequence: Synthetic coding sequence
  source 1..858: mol_type = other DNA
atgggtaccccaggagagggcttgggacgatgctctcatgctctgataagaggcgtcccagaaagtctggcatccggcgagggcgcaggcgccggcctccccgcactggatcttgccaaagctcagcgggagcatggcgttctggggggtaagctccgccagcgcttgggtttgcaacttctggaactgccgcccgaggaatcgttacctctgggtcccctactaggcgatacagcagtgatacaaggcgatactgctctgattactcgtccctggagtccggcccgccggccagaggttgatggggttcgtaaggccttgcaggacctcgggctgagaatagtcgaaataggggatgaaaacgcaactctggacggtacagacgtcctgttcaccgggcgggagtttttcgtcggcttgtccaaatggaccaatcacaggggggctgagatcgttgccgacactttcagagattttgctgtgtctacagtgcctgtatcagggcctagccacctgagaggcttatgtggtatgggaggcccacggaccgtcgttgctggcagctcagacgccgcacagaaagccgtacgggccatggccgtgcttacagaccatccctatgcctcgctgactctccctgatgacgccgccgccgattgcctctttttgaggcccggtttgccaggggttccacccttcctactccaccgcggcggcggggatctgcccaattcacaggaagctctccagaagttgagtgatgtgacattagtgcctgtttcgtgtagtgagctcgagaaagccggagccgggctctcatccctgtgcctggtgttgtcaaccaggcctcattcatag

SEQ ID NO: 114631 - DNA, 681 bp, synthetic construct
  misc_feature 1..681: note = Description of Artificial Sequence: Synthetic coding sequence
  source 1..681: mol_type = other DNA
atgggcacaccaggggaaggactcggccgctgttcgcacgccctgatcagaggggtgccggagtctctggcctccggcgagggggccggagccgggcttccagctctggacttggcaaaagcgcagagggagcacggggtgctcggggggaagttgcggcagaggctcggattgcagctgttagagcttccccccgaggaaagcctgccgcttgggcctctcttaggcgatactgccgtgattcagggggacacggccttaattactaggccttggtcaccggcccggaggccagaggtggatggcgtccgcaaggctctccaagatctgggactgcggatcgtcgagattggcgacgaaaacgccacgttggatggaacagatgtcctgttcactggaagggaattcttcgttggtctgtcaaaatggactaatcaccgtggtgctgaaatagttgccgatacctttcgcgacttcgccgtgtcgacggtcccagtttcaggcccctcccacctaaggggactgtgtggaatgggagggccccgaacagtcgttgctggttcaagcgacgctgcccaaaaagcggtgcgtgctatggctgtcctgacagaccacccttacgcctcgctcacgctgcctgatgacgctgccgccgactgtcttttcctgcgaccaggctag

SEQ ID NO: 114632 - DNA, 681 bp, synthetic construct
  misc_feature 1..681: note = Description of Artificial Sequence: Synthetic coding sequence
  source 1..681: mol_type = other DNA
atggggaccccgggcgagggactgggtaggtgtagtcacgcattgattaggggggtacctgagagcctcgctagtggcgaaggagccggcgcagggctacccgctcttgatctggccaaggcgcaacgggagcatggagtcctgggagggaagctgcgacagcgactcggcctgcagcttctcgagctgccacccgaagaatcactgcctttgggtccacttctaggagatactgccgtgatccaaggagatacagccctgatcactagaccttggtcccccgctaggaggcctgaagtggacggagttagaaaggcccttcaggatctcggactcagaatcgtagagatcggtgatgagaatgccaccctcgatggcacagacgtgctgtttactgggcgcgagttcttcgtcggtctgtctaaatggacgaaccaccgaggggccgaaattgtggcggataccttcagggattttgctgtaagtaccgtgcccgtaagtggaccttcccacctcagaggattatgtggtatgggcggccccagaacagtggtggccggatcatccgacgccgctcagaaagcagttagagccatggccgtgctcacggatcacccatacgcatcgcttacccttcccgatgatgctgccgcagactgcctctttctgcggccaggttag

SEQ ID NO: 114633 - DNA, 858 bp, synthetic construct
  misc_feature 1..858: note = Description of Artificial Sequence: Synthetic coding sequence
  source 1..858: mol_type = other DNA
atgggcacgcctggagaaggcctggggagatgttcacatgctctgatcagaggggtgcccgaatctctcgcttctggggaaggagccggagctgggctccctgctctcgacctcgcaaaggcgcagagggaacatggtgtgctggggggcaaactgagacaaaggctgggcctgcagctgctcgagctcccgcctgaagaatccctccctcttggaccattgttaggggacaccgccgttattcagggggatactgctctaataacacgtccatggagcccagcccggagacccgaggtggatggcgtccggaaagcccttcaggacttgggcctgcggatcgttgaaattggtgatgagaacgctaccctcgatggaacagacgtgctgttcactggtcgcgaattctttgtaggtctttccaaatggaccaaccatagaggggcggagattgttgctgacacctttagagatttcgctgtctcaaccgtgcctgtgtccggtccctcccatctccgggggctatgtggtatgggcggccctcgcactgtagtagctggtagttctgacgcagcccagaaagccgtcagggctatggccgtgctgaccgatcacccctacgcgtcactgacactccccgatgacgcagctgccgattgtcttttcttgcggccgggactcccaggtgttccaccttttctgctacacaggggcggaggggatctgccaaacagccaggaggctctgcagaagctctcagatgtcaccctagtaccggtttcctgtagtgagctggaaaaggccggcgcagggctgagcagtttgtgtttagttctgagcaccaggccccacagctag

SEQ ID NO: 114634 - DNA, 681 bp, synthetic construct
  misc_feature 1..681: note = Description of Artificial Sequence: Synthetic coding sequence
  source 1..681: mol_type = other DNA
atggggactcccggtgaggggcttggaagatgctctcacgctctcatcaggggcgtgcctgaaagcctggcatcaggggagggagcgggggccggtcttcctgcacttgacttagccaaagcccagagggaacacggcgtgctggggggcaagctgcgtcagcgcttagggctccagctgcttgagctccctccggaagaatccctgccactcgggcctctgttgggcgatactgcagttatccaaggtgacacagcccttattacaagaccctggtcccccgccaggagacctgaagtggacggggtgaggaaggcccttcaagaccttggattaagaatagtagagatcggcgacgagaatgccacactggacggaactgacgtgttatttaccgggagggaatttttcgtcggactgagtaagtggaccaaccatcgtggagcggagattgtggctgatactttccgggatttcgcagtgagcacagtgccagtaagcggtcccagccacctgcggggattatgcggcatgggaggccccagaacggtggtggctggtagctccgacgccgcccagaaggctgtgcgcgctatggccgtgctgaccgatcacccttatgcttccctcacattacccgatgacgccgccgcggactgtttgtttttgcggcccgggtag

SEQ ID NO: 114635 - DNA, 567 bp, synthetic construct
  misc_feature 1..567: note = Description of Artificial Sequence: Synthetic coding sequence
  source 1..567: mol_type = other DNA
tgacggaggcccgaggtggatggggttaggaaagctcttcaggaccttgggctccgcattgtggagatcggtgacgagaacgccacactggatggaacagacgtgttgttcactggccgcgaatttttcgtgggcctgtcaaagtggaccaatcaccggggtgccgaaattgtggctgacacattccgggattttgccgtgtcgactgttcctgtatcaggtcctagccatctacgcggactctgtgggatgggcggaccaagaaccgtggtggcgggcagcagtgatgcagcgcagaaggctgtaaggatgacacagttacttaccgtgagctttttcgtgttgggatgcctcgtatgccccctgagctcctgtaccgtggaagtgggcatctgccccactgccagacgacactgtcgatctagcctgatgtccccatggtatctctgtcctgcccaaaactggaggcgtctggcccccggctccgccccttctgcatggtgctccgcacatgcccccactgcagaggggcttgccttggggtattgctggccaggtgttggatag

SEQ ID NO: 114636 - DNA, 567 bp, synthetic construct
  misc_feature 1..567: note = Description of Artificial Sequence: Synthetic coding sequence
  source 1..567: mol_type = other DNA
tgacgcaggcctgaggtggatggagtccgaaaagctcttcaggacctagggctccgtatcgtcgagataggcgacgaaaatgccacactggacggcactgacgtgctcttcacggggcgcgagtttttcgtcggactctctaaatggactaatcacagaggggccgaaattgtcgccgacacatttcgcgactttgctgttagcactgtacccgtctctggaccaagccacttacgagggctgtgcggaatgggcggtcccagaaccgtcgtagctggttctagtgatgccgctcagaaggccgtgagaatgacccagctgctcacagtctcattcttcgtactggggtgcctggtctgtccgctgagcagttgcaccgtggaagttggtatttgtcctaccgcccgccggcactgccggagtagcctgatgtcgccttggtatctgtgccccgctcaaaattggagacgactcgcaccaggatccgctccatccgcctggtgttctgcccacgcaccaaccgctgagggcctcgcattggggtactgctggccaggcgtcggctag

SEQ ID NO: 114637 - DNA, 681 bp, synthetic construct
  misc_feature 1..681: note = Description of Artificial Sequence: Synthetic coding sequence
  source 1..681: mol_type = other DNA
atgggcacacccggagaagggctgggacggtgctcgcacgcgctgattcgaggagttccagagagccttgcttctggtgaaggggcaggggcgggattgccggcattggaccttgctaaagctcagcgggaacatggtgtgctgggaggcaagctgcggcagcgactcggcctgcagcttctcgaactccctcccgaagagtccttgccactcggcccccttctgggtgacaccgctgtgattcagggggacacagcactcattactagaccctggtcaccagcccggagaccagaagtcgatggagtgcgcaaggccctccaggatctggggctccgcatagttgagataggggatgagaacgcaacgcttgacggcaccgacgtgctcttcaccggcagggagttttttgtcgggctctctaagtggaccaatcatagaggggccgagattgtggccgatacctttcgcgattttgctgtgagcactgttccagtgtccgggccatcgcacctgagggggctgtgtggcatgggtggccccaggaccgtagttgccggcagttccgacgccgctcagaaagcagtgagggctatggccgtgctgacggaccacccctatgcctctcttacacttcccgatgatgccgctgcagattgtttgtttttgaggcccgggtag

SEQ ID NO: 114638 - DNA, 858 bp, synthetic construct
  misc_feature 1..858: note = Description of Artificial Sequence: Synthetic coding sequence
  source 1..858: mol_type = other DNA
atgggcacccctggtgaaggcctgggccgctgctcacacgccctgattaggggggttcccgagagtctggcttctggggaaggcgccggtgcaggtttgcccgcccttgatcttgcaaaagcacagcgcgagcacggcgtcctgggcgggaaactgagacagaggctgggcttgcaactgttagaactcccccccgaggagtccctccctctcgggccacttctcggagacacagctgttatacaaggggacaccgctcttatcacccgtccgtggtccccggctagacgcccagaagttgacggggtccggaaagcacttcaggatttaggcctgcggattgtggagataggggacgaaaacgctacactcgacgggacggatgtgcttttcacaggccgggaattctttgtagggctgtctaaatggaccaatcatcggggagctgagattgtggctgatacatttcgagacttcgctgtgagtaccgtccctgtgtcaggaccgagtcatttgagagggctgtgcggcatgggagggcctagaaccgtagtggcgggctcctccgacgcagcccagaaggcagtcagagccatggctgttctcaccgaccacccatatgcctcactcactctcccagatgacgctgccgctgattgcctattcctcagaccaggcctgcccggggtacctcctttccttctccatcggggaggaggggatttgcccaacagccaggaagccctgcaaaagctgtccgatgtgactttagttcccgtctcttgcagcgaacttgagaaggcaggagccggcctctccagcctttgtctggttctttcaacccggccccattcttag

SEQ ID NO: 114639 - DNA, 711 bp, synthetic construct
  misc_feature 1..711: note = Description of Artificial Sequence: Synthetic coding sequence
  source 1..711: mol_type = other DNA
atgggcaccccaggcgaagggctcggtaggtgctcacacgccctcattcgaggcgtcccagaatctttggccagtggggagggcgctggtgccgggctccccgcactcgacctagcaaaggcccagcgcgagcatggggttttgggggggaagctcagacaacggctgggacttcagctcctggaactacctccagaagagtccctgcccctgggtcccctcttgggcgataccgctgtgattcagggcgatactgccttaataactcgcccttggtcccctgctcggagaccagaggtcgacggcgtcagaaaagcactccaggatctgggcttgagaatagttgagatcggtgacgagaacgccacactggatgggaccgacgtcttatttactgggagggagttttttgtgggactcagcaaatggacaaatcatcggggcgcagagatcgtggctgatactttcagggattttgcggtcagtactgtgccggtgagtggaccaagtcacctgcgcggattatgtggtatgggcggcccacggacagtcgtggctggctcaagtgatgctgcacagaaggccgtgcgggccatggccgtcctgaccgaccatccttacgcatcactgaccctccccgacgacgccgcagccgactgcctattcctgcggcctggcctccccggtgttccccccttcctgctccactag

SEQ ID NO: 114640 - DNA, 711 bp, synthetic construct
  misc_feature 1..711: note = Description of Artificial Sequence: Synthetic coding sequence
  source 1..711: mol_type = other DNA
atgggcaccccgggggaggggctcggtcgatgtagtcacgcattaattcgtggggttccagagagtctcgcctcgggtgagggtgcaggggctgggctgcctgcattagatttagcaaaggcacagcgggagcacggggtcctgggtggcaagctgcggcagcggttaggtttacagctgctggaactgccacctgaagagtcgctgcccctcgggcccctcttgggggacacagctgtgattcagggcgataccgctctgattactcgcccatggtcacctgcgcggcgcccggaagtcgacggcgtccgaaaggcccttcaggatctgggcctaagaattgtggagattggggacgaaaatgccacactggacggcaccgacgtgctcttcaccggtagggagttcttcgttgggctcagcaaatggacaaaccaccggggcgccgaaatcgttgctgacacttttcgagacttcgcagtttccactgtccccgtctcagggcctagtcaccttaggggcctgtgcggaatgggcgggccccgaactgttgtggcagggtcctccgatgccgctcagaaggcagtgcgggcgatggccgtactcaccgatcacccatatgcctcccttacgctgccagacgatgctgctgctgactgtctgtttctccgcccagggctaccgggagtgccccctttcctgctgcattag

SEQ ID NO: 114641 - DNA, 858 bp, synthetic construct
  misc_feature 1..858: note = Description of Artificial Sequence: Synthetic coding sequence
  source 1..858: mol_type = other DNA
atgggtacccccggggagggcctggggaggtgtagccacgccttaatacggggggtccctgaatcactcgcctctggggagggagccggcgccggcctgccggctttagatctggcgaaagcccagagggaacacggggtgctcggaggcaaactgcggcagagactgggcctccagctgctggaattgcccccagaagagagtcttccgctgggacccctccttggagacacagctgtaattcaaggagacaccgcattgatcacacgcccctggtcaccagctcggcgccccgaggtggacggagtgagaaaggccttgcaggacctaggactcagaatcgtcgaaattggggacgaaaacgctactctggacggaacagacgttttgttcacaggccgtgaattctttgttggactgtcgaaatggacaaatcaccgaggcgcagagattgtagcagacacctttcgggattttgctgtgagtaccgtgccagtgtcaggacccagccacctcaggggcttgtgcgggatgggcggaccacgcaccgtcgtagccggttcttccgatgcagcacagaaggcagtgagggccatggccgttctgactgaccatccatatgcaagcctgactctcccggatgatgctgctgctgactgcctttttttgaggcctggcctgcccggagtcccccctttcctgctccaccgcgggggcggagatcttcccaactcacaagaagcattgcagaagctgtcagacgttactcttgtaccagtgtcatgctcagagcttgagaaagcaggggccgggctaagcagcctttgcctcgtgctgtcaactaggccacattcctag

SEQ ID NO: 114642 - DNA, 678 bp, synthetic construct
  misc_feature 1..678: note = Description of Artificial Sequence: Synthetic coding sequence
  source 1..678: mol_type = other DNA
atgggtaccccaggggagggcttgggacggtgttctcacgcccttatcagaggggttcccgagtcgctggcctccggagaaggagccggtgccggcctccccgccttagacttagccaaagcacagagagagcatggggttcttggcggaaagttgcgacagcgactgggcctccaactgctggaactcccccctgaggagtctttacctctcgggcccttgcttggcgacaccgccgtaatccagggcgataccgcgctgataactaggccttggtcgcctgccagacgacctgaggtggatggggtcaggaaagccttgcaggatctcggtctacgtatcgttgagataggagatgagaacgccacacttgacggaaccgatgtgctctttacagggagggaattttttgtgggactgagcaaatggactaatcaccggggcgctgaaatcgtcgctgacaccttccgagacttcgccgtttcaaccgtgccagtatcaggaccaagccatttacgaggactgtgcggaatgggagggcctcgcaccgttgtggcaggttcttcagacgcggcgcaaaaggctgttagggccatggctgtgctaacagaccacccgtacgcaagtctcaccttgccagacgatgctgcagccgattgtcttttcctgcgaccatag

SEQ ID NO: 114643 - DNA, 858 bp, synthetic construct
  misc_feature 1..858: note = Description of Artificial Sequence: Synthetic coding sequence
  source 1..858: mol_type = other DNA
atgggaactcccggggaagggttagggaggtgtagccacgcattgataaggggggttcccgagagcctggcgtccggggaaggggcaggggccgggcttccagctctggatctggccaaggcacagagggagcatggagttctgggcgggaaactccgccagagactgggacttcagctgctggagctgcctcctgaggagtctctcccacttggaccgctcctgggggacacagccgtaatccagggagataccgctctgattacacggccctggagccccgctcggaggcccgaagttgatggtgtgcggaaagccttgcaggacctgggtcttcgcattgttgagatcggcgacgagaatgccactttggatggcacagacgtgctcttcaccgggcgcgaattcttcgttgggctttcaaagtggacaaatcacaggggagccgagatcgtggccgacaccttcagagactttgctgtgagtaccgtgccggtcagcggcccgagccatctgcggggcctttgtggaatgggtggcccgaggaccgtggtggccggctccagtgatgccgctcaaaaagcggtacgagctatggcagtcttgacagatcacccatacgcatccctcacactgcccgatgatgcagccgctgactgtttgtttcttcgtcccggattgcctggcgtacctcccttcctactccatagaggtgggggcgacctcccaaatagccaagaggctctgcagaagctgtccgacgtgacgcttgttccagtgtcttgttcggagctggaaaaagctggagccggcctgtcctccctttgccttgtcttgtcaacccggccacactcttag

SEQ ID NO: 114644 - DNA, 567 bp, synthetic construct
  misc_feature 1..567: note = Description of Artificial Sequence: Synthetic coding sequence
  source 1..567: mol_type = other DNA
tgaaggcgacctgaagtggacggtgtccgcaaggctcttcaggacctgggccttcgcatagtagagatcggcgacgaaaatgccacgctggacggcacagacgtgctcttcacaggccgagagttctttgttggtctgtcaaaatggaccaatcaccgcggagccgaaatcgtcgcagataccttccgcgactttgcggtaagcaccgtcccagtatcgggcccctcccacttgcggggcttatgcggcatgggggggccccgcacagtcgtcgccggtagcagtgatgccgcccagaaagccgtgaggatgacacaactgcttactgtgagtttttttgtgttgggatgtttggtctgccctctgtcctcatgtaccgtggaggtcggcatttgccctaccgcgcgtcgacactgccgtagctccctgatgtctccctggtacctgtgcccagcacagaattggcggaggctggccccaggcagtgctcctagtgcttggtgctctgcccacgccccaacggcagaggggttggcattgggctactgctggcccggcgtgggctag

SEQ ID NO: 114645 - DNA, 567 bp, synthetic construct
  misc_feature 1..567: note = Description of Artificial Sequence: Synthetic coding sequence
  source 1..567: mol_type = other DNA
taaagaaggcccgaggtggacggggtgagaaaggcccttcaggatttgggactccgcatcgtcgagattggggacgagaacgccacactggacgggactgacgtgctttttacggggagagaatttttcgtggggctgtccaagtggacgaaccacagaggggccgagatcgttgctgacaccttcagggatttcgcagtgtctactgtgcccgtgtcaggccccagtcacctccggggcctgtgtggaatggggggtcccagaacagtggtagccgggagttccgacgctgcccagaaggctgtgagaatgacgcagctcctcaccgtcagcttcttcgttctgggctgtctggtgtgcccactcagtagctgcaccgttgaggtaggcatttgtccaacggccagaagacattgccgaagcagtcttatgtcaccatggtacctatgcccagcgcagaactggcggcggctggcaccaggcagtgccccgagcgcatggtgttccgcacatgcccccacagcagagggcctggccttgggctattgctggcccggcgtgggatag

SEQ ID NO: 114646 - DNA, 858 bp, synthetic construct
  misc_feature 1..858: note = Description of Artificial Sequence: Synthetic coding sequence
  source 1..858: mol_type = other DNA
atggggactcccggggagggcttgggacgctgctctcacgccttgataaggggcgttccagagagtttggcttcaggtgaaggcgcaggagccggactccctgcactggacttggcaaaggctcagagggaacacggtgtgctgggaggaaaactgcgacagcgacttggtctccagcttctcgaattaccaccagaagagtccctgcccctgggccctcttcttggagataccgctgtgatccagggggatactgccctcattaccaggccatggtcccccgccaggcgcccagaagtggatggggtcaggaaagccctgcaggatttggggttgcgcattgtcgagattggtgatgagaacgccacattagatggaacggacgttctcttcaccggtagggagttctttgtcgggctgtccaaatggacaaatcacagaggtgcagaaattgtggccgatactttcagagactttgctgtttcaacagttcctgtgtccggaccctctcacctgcggggcctctgcggtatgggaggtccacgcacagtggttgcaggaagctccgatgccgcccagaaagcagtgagagccatggctgtcctgacagaccatccttacgccagcctcacactccctgacgatgccgccgccgattgcctcttcctgcgcccaggactgcctggcgtccctccttttctactgcaccgtggcgggggagacctgcctaatagtcaagaggcccttcagaagctttccgacgtgacactcgtcccagtgtcttgcagcgagttggaaaaggctggcgctggcttgtcctccttatgtttggttcttagtactaggcctcacagctag

SEQ ID NO: 114647 - DNA, 711 bp, synthetic construct
  misc_feature 1..711: note = Description of Artificial Sequence: Synthetic coding sequence
  source 1..711: mol_type = other DNA
atgggcactccaggtgaagggctcggtaggtgctctcacgcactgatcagaggcgtgcctgagagcctcgcatcaggagaaggtgccggggctggtctacccgctctggacttagccaaagcccagagagagcatggcgtcctgggaggtaaattgcggcaaaggctgggtctgcagttgctggaattgcctccggaggaaagtcttcctttgggtcctcttctgggagacaccgctgtgattcaaggcgacacagcattgatcaccagaccctggtcgcccgcccgtagaccggaggttgacggggtcaggaaggccctccaggacctgggcctgcggattgtggaaattggtgacgaaaatgctacccttgatgggactgacgtgctttttacagggcgcgagttcttcgttggtctgtctaagtggacgaaccacaggggagcagagatcgtagctgatacattcagggatttcgcagtgagtaccgtgccggttagcggaccttctcacctcaggggcctgtgtggaatggggggacccaggaccgtggtcgccgggagcagtgacgcagcccagaaagccgttcgggcgatggctgtgctaaccgatcacccatatgccagcctgacgctccccgacgacgccgcggcggactgtctgttcctgaggcctggtctgcccggggtcccgcccttcttgctgcactag

SEQ ID NO: 114648 - DNA, 567 bp, synthetic construct
  misc_feature 1..567: note = Description of Artificial Sequence: Synthetic coding sequence
  source 1..567: mol_type = other DNA
tgaaggcgccccgaagtggacggcgtacggaaagccctccaagaccttggcttgcggattgtcgaaatcggggatgaaaacgcaaccttggatgggactgatgtgctgttcactggtcgtgagttttttgtggggctgagcaaatggacaaaccatcgtggtgccgagatcgttgccgacacgtttcgcgacttcgccgtatcaactgtccccgtgagtggcccctcccacttgagagggctgtgcggtatgggggggcctagaactgtggtggccggctcctccgacgcagcacagaaggctgtacggatgacccagttgctgacggtgtcattctttgtgctggggtgcctggtatgtccactaagctcctgcactgtggaggtgggcatatgccccacagctcgacgacactgccgctcctctcttatgtccccctggtacctttgccctgctcagaattggagaaggctggcaccaggttcagccccctcagcatggtgctctgcccacgcacctaccgcagaaggcctggcactgggatattgttggcctggagtcggctag

SEQ ID NO: 114649 - DNA, 858 bp, synthetic construct
  misc_feature 1..858: note = Description of Artificial Sequence: Synthetic coding sequence
  source 1..858: mol_type = other DNA
atggggacccctggtgaggggttggggagatgttcccacgctctgattagaggcgtcccagagtccctggcgtcaggcgagggagccggggctggcctaccagcacttgatttagcaaaagctcagagggagcatggcgtgctcggcggcaagcttcgacagcgtctgggactacagctcctggagttaccaccggaggagagcctgcctctgggccctctgttgggggacaccgccgtgatccagggtgatactgccctgatcacacgcccttggtcacccgctcggcgaccagaagtggacggggtacggaaagcactgcaagatctcggcttaagaattgttgagatcggtgacgagaatgctactctcgatgggacggacgtgttattcaccgggcgggagttttttgtgggcctcagcaagtggacaaatcacagaggcgcagagattgttgctgatacctttcgtgatttcgcagtgtccacagttcccgtgagcggcccctcccaccttcgtgggctgtgtgggatggggggtccccgaacagtggtggccggaagttccgatgccgcccaaaaagctgtccgcgccatggccgtgctgactgaccacccttacgcctctttgaccctccctgatgatgcggccgcggactgtctgtttctcagaccaggcctgcccggagtaccgccgttcctgctccacaggggaggtggagatttgcctaattcccaggaagctctgcagaaactgtccgacgtcaccctcgtacctgtgtcctgttccgagctggagaaggccggcgcaggcctgtcatctttgtgcctcgttttatccactcgaccccacagctag

SEQ ID NO: 114650 - DNA, 858 bp, synthetic construct
  misc_feature 1..858: note = Description of Artificial Sequence: Synthetic coding sequence
  source 1..858: mol_type = other DNA
atgggcaccccaggagagggactcgggagatgctcacatgcgctaatccgaggggtcccggaatccctggctagcggggaaggcgccggagccgggttgcccgccctggatctcgccaaggcgcagcgagaacatggagtcctcggcgggaagctccggcagcggctggggctccaactgctggaattaccccccgaggagtccctccctctcggtccccttcttggtgatacagccgttatccagggcgacaccgccctgatcacccgtccctggagccccgccaggcggcccgaggtggacggagtacgcaaggcgcttcaggatctgggtcttcgcatagtcgagattggggacgagaatgccactctagatgggaccgacgtattatttactgggagagaatttttcgtcggacttagtaagtggacaaatcatagaggagcggagattgtggccgacacgtttagagacttcgccgtcagtactgtgcccgtctctggtcctagtcacctgcggggtctctgcggaatggggggaccgaggacagtggtcgccggcagctccgatgcagcgcagaaagctgtgcgtgctatggcagtgctgaccgaccacccatacgccagcttgaccctgcccgatgatgcggctgccgactgtctcttcctgcggccagggctgccaggggttcccccctttcttctgcaccggggcggaggagaccttcctaactctcaggaggccttgcagaagctgtcagatgtgaccctcgtgcccgtgtcctgctcagagcttgagaaggccggcgctgggctgtcttctctgtgcttagtcctctcgacgcggcctcattcttag

SEQ ID NO: 114651 - DNA, 711 bp, synthetic construct
  misc_feature 1..711: note = Description of Artificial Sequence: Synthetic coding sequence
  source 1..711: mol_type = other DNA
atgggcacccctggtgagggattaggtcggtgcagccatgctctgatccgaggagtccccgagagcctggcatccggtgaaggtgctggtgctgggttacccgccctagatttggctaaggcgcagagagaacacggcgtgctgggagggaagcttaggcagagactgggcctccagctgctggaactgccccctgaagagtcattaccattaggcccattgctcggggacaccgctgtgattcagggggatacagcattgatcacacgtccatggtctcctgccagacgccccgaggtggatggagtaagaaaggctcttcaagatttggggttgcgcatcgtggagattggcgacgagaacgccacgcttgacggaaccgacgtgctgtttaccggccgcgagttcttcgtcgggctaagtaaatggacgaatcataggggcgcggagatcgtcgccgatacattcagggactttgcagtgtctaccgtcccagtttccggaccgtcacatttacggggattgtgtgggatggggggtcccaggactgtggttgctgggagcagtgatgccgcgcagaaggcggtcagggcgatggcggtcctgactgaccacccgtacgcatccctcactctgcctgacgacgccgcagctgactgtctgttcctaagacctggtctacccggcgtgccgccctttctcttacactag

SEQ ID NO: 114652 - DNA, 711 bp, synthetic construct
  misc_feature 1..711: note = Description of Artificial Sequence: Synthetic coding sequence
  source 1..711: mol_type = other DNA
atggggacacccggcgaggggctgggacggtgcagtcatgccttgatcagaggggtgccagaatccctggcttccggagaaggggcgggcgcagggcttcccgctctggacctcgcaaaggcccagcgtgaacacggagtcctgggcgggaagctgaggcagcgcttaggtctccaacttttggagctgcctccagaagagagcctcccccttggtcccctgctgggagatacagccgtcatacagggtgacacagcgttgattacccgcccatggtcgccagccagaaggcccgaggtcgatggagtgaggaaagcactgcaggatctggggctgagaatcgtcgaaatcggagacgagaacgcaaccctggacggaacagatgtgctttttaccggccgagagttctttgtcgggcttagcaaatggacaaaccaccgcggagcagaaattgtggcagacacattcagagattttgcagtgtcaacggtgccggttagtgggccatcgcatctcagaggtctttgcggtatgggagggccgcggaccgtagtcgcaggcagctctgatgctgctcagaaggcggtgcgggcgatggccgtgctaactgatcacccttacgcgagcctaacgctgcccgatgacgccgctgcggattgcttgttcctcaggcccggtctgcccggcgtcccgccgtttctgctgcactag

SEQ ID NO: 114653 - DNA, 2601 bp, synthetic construct
  misc_feature 1..2601: note = Description of Artificial Sequence: Synthetic coding sequence
  source 1..2601: mol_type = other DNA
atgctcaggcccggcgcccagcttttaagggggcttctgctaaggtcttgtcccttacagggatctcctggcaggccgagaagcgtctgtggaagggagggggaggaaaagccccctctctccgccgaaacccaatggaaggacagggctgagacagtgatcattggcggtgggtgtgtgggcgtgtccttggcataccatctggccaaggcaggaatgaaggatgtggtgttgttggaaaagtctgagctgaccgccggatctacatggcacgcagccggtttaacgacctatttccaccctggcatcaatctgaaaaagattcattacgactccataaaactctacgagaagctcgaagaggagaccggacaggtggtgggcttccatcaaccaggatctattcggctggccaccactcctgtccgagtcgacgaatttaagtaccagatgaccagaacgggctggcatgcaacggaacagtacttgatcgaaccagaaaaaatacaggagatgtttccactcctgaatatgaataaagtactcgctgggctatataaccccggtgatgggcacatagatccctatagcctcacaatggctctggctgctggggcaaggaagtgcggcgcccttctgaaatacccagctcctgttacatcactgaaagcgagaagtgatgggacctgggatgtcgaaacaccacaagggagtatgcgagccaatcgcattgtgaatgccgcaggtttctgggctcgggaggttggaaagatgataggactggagcatccattgatccctgtgcaacaccagtatgtcgttacctctaccatctctgaggtcaaagccctgaagcgcgagctccccgtccttagggacctcgagggctcctattacttgagacaggaaagagatggcctactgttcggaccttacgagtcccaagaaaaaatgaaagtccaagattcttgggtcactaacggcgtcccacctggattcggtaaggagctattcgaatcggacttggatagaatcatggaacacatcaaagcggctatggagatggtgcccgtgctgaaaaaagccgacattataaacgttgtgaatggacctatcacttattccccagacatcttgccaatggtcggacctcaccagggagtgaggaattactgggttgccattggatttggctacgggattatccacgccggaggagtgggcaaatatctatctgattggatcctacacggcgaaccacctttcgacctgatcgagctcgatccgaaccgctacggcaaatggacaacgacccagtataccgaggccaaggctagggaatcctatgggttcaacaatatcgtaggataccccaaggaagagcgttttgcggggcgcccaacccagcgcgtgagcggcctctaccagcggttggagagtaagtgttccatgggctttcacgctggatgggagcagccgcattggttttataaacctgggcaggacacgcagtataggcccagcttcagacgaactaattggtttgagcctgtagggtccgaatacaagcaggttatgcagcgagtagctgttactgatctgtcacccttcggcaagtttaacatcaaggggcaggatagcatccgtttgctagatcacctgttcgccaatgtaattccaaaagtcggctttaccaatattagccacatgttgacgcctaaaggccgggtgtacgctgagcttaccgtgagtcatcagtcccccggggaatttctgctcatcacaggtagtggctctgagctccatgaccttaggtggattgaagaggaggccgtgaagggcgggtacgatgtggaaatcaagaacatcactgatgaactcggagtcctgggggtggccgggccacaagccagaaaagtcctccaaaaactcacttccgaggatttgagcgatgatgtgtttaaatttctccaaactaaaagtctgaaggtctcaaatatccctgtgacggccattcgcatcagctacacaggtgagctcggatgggagctgtaccaccggcgggaggactccgttgcgctctatgacgccataatgaatgccggacaggaagagggtatcgataattttggaacttacgcaatgaatgccttgagactcgagaaagccttccgtgcgtgggggttggagatgaattgcgacacgaaccctttggaagcaggactggagtactttgtgaagctcaataaaccagccgattttattgggaagcaggcactaaagcagattaaggccaaggggctgaagaggcggctggtgtgcctgacactggcaactgacgacgttgatccagagggaaatgagagcatttggtataatggcaaggtggtcggcaatactaccagcggctcctactcctatagtatccagaaatccctggcctttgcctatgtgccagtgcagctttctgaagttgggcaacaagtggaagtcgagcttcttgggaagaattaccccgctgtgatcatacaggaacctctggtgctcacagagccaacccgcaatcgtttgcagaagaaaggcggtaaagacaaaacatag

SEQ ID NO: 114654 - DNA, 1722 bp, synthetic construct
  misc_feature 1..1722: note = Description of Artificial Sequence: Synthetic coding sequence
  source 1..1722: mol_type = other DNA
atggagcggcagtctcggaatagtgataattggcgttggctgtgctggtgcgaatccggcctgtcacccgggcagagcagggacgagaggtgtggtcccgctggtgaaatccgagcgcatggatggatttatttagcccggaggttttgggccagagaggtgggtaagatgattggtttagagcacccgcttatccctgttcagcaccaatacgtggtcactagcaccataagcgaagttaaggctctgaaaagggagttgccggtactgcgggacttggaaggctcatactacttgcgccaggagcgtgatggactactctttgggccctatgagagccaggaaaagatgaaggtgcaggattcctgggtgaccaatggtgtgcctccagggtttggaaaagaactgttcgaaagcgaccttgaccggattatggagcacattaaagcggcaatggaaatggtgccagttctgaaaaaggccgatatcattaacgtagtgaacgggccgatcacatacagccctgatatcctgcctatggtcgggccgcatcagggcgtgagaaactactgggtggccatagggttcgggtatggtattatccacgcaggaggagtcggaaagtatctgagcgattggattctgcacggagaacccccctttgacctgatagaacttgaccccaaccggtacggcaaatggacaactacacagtatacggaagctaaggcgcgggagtcgtacggcttcaacaatatcgtcggttaccccaaggaggaacgctttgcagggcgtccaactcagcgggtgagtggcctgtaccagcgcttggaaagcaagtgttctatgggctttcatgcaggctgggagcagcctcactggttctataagcctgggcaagacactcagtaccgcccttccttccgcagaaccaattggtttgagcctgtggggtcggagtataagcaggtaatgcagcgagtggccgttaccgacctgagtcccttcgggaaattcaatatcaagggacaagattccattcgtttactggaccacctgttcgctaatgtgatacctaaggttgggttcaccaacatttcccatatgctgacgcctaaagggcgggtgtacgccgaacttactgtgtcacaccagagcccaggcgagtttctactgatcactggatccgggagtgagcttcacgacctgaggtggattgaggaggaggccgttaagggggggtacgatgtggagatcaaaaacatcaccgacgagttaggagtgttgggggtggcgggcccccaagctcggaaagtgctgcagaagttgactagtgaggatctgtcagatgacgtcttcaagttccttcagaccaagtcactaaaggtcagcaacatccctgtaacagctatccgcatcagttataccggcgaactgggatgggagctctaccacagaagagaggacagcgtcgcgctgtatgacgcaataatgaacgcagggcaggaagaaggcattgacaactttggcacttatgccatgaacgctttgaggctcgagaaagctttccgggcctggggtctggaaatgaattgcgatacaaacccattggaggctggactagaatactttgtgaaattaaacaaggaccagaatagctgcttcgctcatttcaaagaagagaacggttgggtgtctcggtgggccatccgtccctattag

SEQ ID NO: 114655 - DNA, 1842 bp, synthetic construct
  misc_feature 1..1842: note = Description of Artificial Sequence: Synthetic coding sequence
  source 1..1842: mol_type = other DNA
tacttgatcgaaccagagaaaatacaggaaatgttcccgcttcttaacatgaataaggtcctcgctggactgtacaatccgggcgatggacatattgacccatacagcctcactatggctctcgcggcgggagctaggaagtgcggggcactcctgaaatatcctgcccccgtaacaagcttaaaggcaagatccgatgggacctgggatgtcgagacacctcaaggctctatgcgcgccaatcgcatcgtgaacgccgccggcttctgggcacgtgaggttggcaagatgatcggcttggagcatccccttatcccagtgcagcaccaatatgttgttacatccaccatttcagaggtaaaggccctcaagcgcgagctcccagtattgcgcgatctcgaggggtcttattatctcaggcaggagcgagacggcctgttatttggaccttatgagtcccaagagaagatgaaagttcaggatagttgggttaccaacggggtgccgcccggcttcggaaaggaactctttgagtcggacctggaccggattatggaacacatcaaggcggcgatggagatggttcctgtgctgaaaaaagcagacattatcaatgtggtgaatgggcccataacatattccccagacatcctacccatggttggaccacatcaaggcgtcaggaattactgggtggctattggctttggttatggtatcattcacgctggtggggtgggcaaatacttgagtgactggattctgcatggggaacctccctttgatttgatcgagttagacccgaacagatacggaaaatggactaccacccaatacaccgaggccaaggctcgcgagtcttacggctttaataacattgtgggttatccaaaagaggaacggtttgcaggccgcccgacacaacgtgtgagcgggctctatcaacgactggaatctaagtgcagcatgggattccacgccgggtgggagcaaccgcactggttctataagcctggacaggatacacagtatcgccctagcttccgccggacaaattggttcgagcccgtaggctccgagtataagcaagtgatgcagagggtcgcagttacagacctgagccctttcggaaagtttaacatcaagggacaggacagcatcagattgcttgatcatctcttcgcaaatgtcatccctaaagttggtttcactaatatctcccatatgctgacaccaaagggtcgcgtatacgccgaacttaccgtatcccaccagagtcctggagaattcttacttattacaggttccggaagtgagcttcatgacctgcggtggatcgaggaagaggcggtaaagggtgggtacgacgtagagattaaaaatatcacagatgagctaggtgtcttaggtgtagccggcccgcaggcaaggaaagtgcttcagaagttgacatccgaagacctgtccgatgacgtgttcaagtttctccagaccaagtctctgaaagtgagcaatattcctgtgacagcgattcgaattagttatacaggtgagttgggctgggagctgtatcataggcgcgaggattctgtggctctgtacgatgccataatgaatgccgggcaggaagaaggaatcgacaattttgggacttatgctatgaatgcgctgagactggaaaaagcttttcgtgcttggggattggagatgaattgcgataccaaccccttggaggccggccttgagtattttgtcaagttgaacaaggaccagaatagttgctttgctcattttaaagaggaaaacggatgggtctcacgttgggcaatccgcccgtattag

SEQ ID NO: 114656 - DNA, 1875 bp, synthetic construct
  misc_feature 1..1875: note = Description of Artificial Sequence: Synthetic coding sequence
  source 1..1875: mol_type = other DNA
atgacaaggacaggatggcatgccaccgaacagtatctgatcgaaccggaaaagattcaggaaatgttcccactgctcaatatgaataaggtgctcgccggtctttataatcctggggacggccacattgacccgtattctttgaccatggccctggccgctggcgctagaaaatgcggcgccctgctaaagtacccggccccagtcaccagcctaaaagccagaagcgacggaacatgggacgtggagaccccacagggcagtatgcgagccaatagaatcgtgaacgcggcagggttctgggcacgcgaggtggggaagatgatcggcctggagcatccacttattcccgtgcagcaccagtatgttgtcacctctacaatttccgaggtgaaagccttgaagcgcgaactgcccgtactgcgagacctcgagggttcctattacctgcgacaggagagggacgggttactgttcgggccttacgagtcacaagaaaaaatgaaggttcaggattcttgggtgaccaacggcgtgcccccgggatttggaaaggaattgtttgaatccgatctggaccgtataatggaacacataaaggctgccatggagatggtgcccgtgctcaagaaggccgacatcatcaatgtggttaacggtcccatcacttacagcccggatatcttgcccatggtgggccctcaccagggagtgcgcaactattgggtggcgattgggtttgggtatgggatcatccacgctggcggcgtgggcaagtatctcagtgattggattctgcacggcgaacctccgtttgacctgatcgagctggatccaaatagatatggaaaatggaccaccacacagtatactgaggcaaaggcccgggagagctatggttttaataatattgtcggataccccaaagaggaacggttcgctggccgaccgactcagcgggtttcagggctctaccagagactggaaagcaaatgttctatgggtttccatgctggatgggagcagccacactggttttacaaacccggtcaagatacacagtaccgcccttcttttcgacgaaccaactggtttgagccagtcggctctgagtataagcaggtcatgcaaagagtggcagttacagacctgagccccttcggcaagtttaatattaaaggccaagactcgattcggctgttggaccacttgtttgcaaatgtcatccccaaagtgggcttcactaacatctctcatatgctgacgcctaaaggaagagtatacgctgagttaactgtgtcccaccagtcacccggtgagtttctgctgatcaccggatccggttcggaactgcatgacctccgctggatagaagaggaagcagtcaaggggggatatgacgtggagatcaagaatatcactgatgaattaggcgttcttggagtggccggccctcaggcaagaaaagtcctgcaaaaacttaccagtgaggacttgtcagatgatgttttcaaattcctgcagactaaaagtctgaaggtgtctaacatccccgtgaccgccataaggataagctacactggcgagcttggctgggagttgtatcacaggcgtgaggatagcgtggctctgtatgatgctatcatgaatgcgggacaagaagaagggatagataacttcggaacctatgctatgaatgctctccggctggagaaggcgtttcgggcttggggtctcgagatgaattgtgacaccaaccctctcgaggctgggcttgaatattttgtaaaactgaataaggaccagaactcgtgctttgcccactttaaagaggaaaacgggtgggtctcaaggtgggcgatcagaccgtattag

SEQ ID NO: 114657 - DNA, 1185 bp, synthetic construct
  misc_feature 1..1185: note = Description of Artificial Sequence: Synthetic coding sequence
  source 1..1185: mol_type = other DNA
atgtggagttgctggcggaatcagtcaagtagactcgatctgcctggcacccagtatgggattatccacgcgggcggggtgggaaagtacctgtccgattggattctccacggagaaccgccatttgatctcattgagctggacccaaaccggtacggcaagtggaccaccactcagtacaccgaagctaaagctcgggagagttacggtttcaacaatatagtcgggtaccctaaggaggagcggtttgctggtagacccacacagcgcgtcagtggcttataccaaaggttggagagtaaatgctcaatggggtttcacgccggatgggaacagcctcactggttttataaacctggccaggatacccagtaccggcctagcttcaggaggaccaattggttcgagcctgttggctccgagtataagcaagtcatgcagcgggtggccgtgacagacctgtctcccttcggcaaatttaacattaaaggacaggatagcatcaggttgctggaccacctcttcgccaatgtaatccccaaggtagggtttacgaacatatctcatatgctgacccctaagggccgcgtctacgcagagctgaccgtaagtcatcagagcccaggcgagtttttgctgatcacgggctcaggctcagagctacacgatctgaggtggatagaggaagaagcggtaaaaggcggatacgacgtggagatcaagaacataaccgatgagctcggtgtcctgggtgtggcggggccacaggctaggaaggtgttacaaaagctcacttcagaggacctgtctgacgatgtgtttaagttcctgcagaccaagagcctgaaggtgtccaatataccagtcacggccattcgcatcagctacaccggtgagctcggatgggaactttaccacaggagagaagattccgtggccctctacgatgcaattatgaacgcagggcaggaggaagggattgataacttcggaacctacgcaatgaacgctctccgtcttgagaaagccttccgggcgtggggtctcgagatgaactgtgacaccaaccccctggaggccggactggagtacttcgtgaaactcaataaagatcaaaactcctgctttgcacattttaaagaggagaacggctgggtctccagatgggccatcagaccatattag

SEQ ID NO: 114658 - DNA, 4731 bp, synthetic construct
  misc_feature 1..4731: note = Description of Artificial Sequence: Synthetic coding sequence
  source 1..4731: mol_type = other DNA
atggcagaacgcggtcttgaacccagccctgcagcagtggctgccctgccgccagaagtccgggcgcagctcgctgaattggagctcgaactctctgaaggagatatcacacaaaaaggatatgagaagaagaggtcaaaacttctgtctccctattctcctcagacacaggaaaccgactccgctgttcagaaggagctgcgcaaccagacacccgctccatcggcggcgcagacaagcgcccccagcaagtaccacaggacccggagcgggggggcgagagacgagcgataccgctcagatattcacacagaggctgtgcaagctgccctggccaaacacaaagagcagaagatggcactgcctatgccgactaagagaagaagtacatttgtccagtcgccagctgacgcatgcactcctccagacacatccagtgcctcagaagacgagggaagccttagacgccaggccgccctctccgccgctcttcagcagtcactgcagaacgccgaatcgtggattaacaggtccattcaggggagcagcacctcttcttccgcctctagcaccctgtctcacggcgaagtcaaaggtacctccggctccctggccgacgtcttcgccaacacacgcattgagaatttctcggcgcctcctgatgtgactaccacaacttccagctcgtcttcatcgtcttctatcagaccagcaaatatcgatctgcctccatcaggcattgtgaaaggcatgcataaaggatccaaccggtctagcctaatggacaccgccgacggagtgcctgtgagctcacgagtttccacaaagattcagcagttattaaatactttgaagcgcccgaagcgacccccgttaaaagagttcttcgtggatgattccgaggaaatcgttgaagtcccgcaaccagaccccaatcagcccaaacctgagggaagacaaatgactcctgtgaaaggcgagccacttggagttatttgtaactggccccccgccctggaatccgccctgcagcggtggggaacaacgcaggcaaaatgctcctgcttaaccgcactggatatgacgggcaaaccagtctataccctgacgtacggaaagctgtggtctcggtccctgaagttggcatatacgcttctaaataagctcggcacgaaaaatgaaccagtgctcaagcccggggatagagtggccctggtctatcccaacaacgatccagtgatgtttatggtggctttctacggatgcctgctggctgaggtgatccctgtccctatagaggtccccctgacacgaaaagacgccggcggccagcagataggatttctgctgggctcttgcggtatcgcactggctctgacatcagaagtttgtctgaaaggtctccctaaaactcaaaacggagaaatcgttcagtttaagggttggcccagactgaaatgggtggtaacagactcaaaatacctctccaaacctccgaaggattggcagcctcacatttctccggctgggacagagccagcctatattgagtataagacgtccaaagagggcagtgttatgggggtgactgtctcaaggctggccatgctgagccattgccaggctttgtcccaggcatgtaattatagtgagggcgagacaatcgtcaacgttctggattttaaaaaggacgccggcctgtggcatggcatgttcgccaacgtgatgaataaaatgcacaccatcagcgtcccctactcagtcatgaagacctgccctctttcttgggtacagcgcgtgcacgcacacaaagctaaagtggctctagtcaaatgccgcgacctgcactgggccatgatggctcaccgggatcaaagagacgtgtctcttagctctctgaggatgttgatagttaccgatggcgcgaacccttggtcagtgtcctcatgcgatgctttcttgtccctattccagtctcacggtttgaaacctgaagcaatctgtccttgcgccacgagtgccgaggcaatgaccgtcgccatccgacggcctggcgtcccaggggcgcctctacctgggcgggctatcctgagcatgaatggcttaagctacggggttatcagagtaaacaccgaagataagaactctgccctgacagtgcaggacgtcggacacgtgatgccgggcggaatgatgtgcatcgtgaagcccgacggaccgccacagctctgtaagacagatgaaataggggagatatgtgtgtccagcaggactggtggtatgatgtatttcggccttgcaggcgtgaccaagaacacgtttgaagtcatccctgtaaacagcgctggttcccccgttggggatgtcccctttatcagaagcggactgctgggttttgtcgggccaggctctcttgtgttcgtggtcggaaagatggatggtcttctgatggtatcagggagaaggcacaatgccgacgatatcgttgctaccgggctcgctgtggaatccatcaagacggtgtatcggggaagaattgccgtcttctcagtgtctgtcttctacgatgagagaattgttgtcgtggcagagcagcggcccgatgctagtgaagaagactctttccaatggatgagtcgggtcttgcaggctattgactcaattcaccaagttggagtctactgcctagctttggtgcctgcaaacactctgcccaaaacccctcttggagggatccacatttcccagaccaagcagttattcctggagggcagcctgcacccctgcaatatcctcatgtgcccccacacctgtgtcactaaccttccaaagcctagacaaaagcaacctggagtcggacctgccagtgttatggtcggcaacctggtggcaggcaaacgaatcgctcaggccgccggtcgcgaccttggacagatcgaggaaaatgatctggtcagaaagcaccagtttctggccgagattcttcagtggcgggcccaggctacacccgatcacgttctcttcatgctgcttaatgccaaagggactacagtgtgtaccgcatcttgcctccaattgcacaagagagctgagcggatcgcctcagtgttgggtgataagggtcacctgaacgccggcgataacgtggtgttgttgtacccaccaggtattgagctgatagctgccttctatggctgcctgtacgcagggtgcatccctgtcactgtccgacccccccacgcccaaaaccttaccgcaacactccccaccgtgcgcatgatagttgatgtgagcaaagctgcatgtattctcacctcacagaccctgatgaggttactgagatcacgagaggcggctgctgccgtcgacgtaaagacctggcctactataatcgacactgacgatctgcctcggaaaaggcttccccagctatataaacctccgactcctgagatgctggcctacttggatttcagcgtttcaacgaccggcatgctgaccggggtcaagatgtcacactccgctgtgaacgctttatgcagggccattaaactgcagtgtgaactctacagttctcggcagatcgcaatttgtctagacccttattgtgggctggggttcgccctatggtgtctttgctcggtatattctggacatcagagcgtactgataccccctatggagctcgagaacaaccttttcctgtggcttagtaccgtcaaccagtacaagatcagagatacgttttgttcttacagcgtcatggagctatgtacgaagggattgggaaatcaagtggaggtactgaagaccagaggtattaacctgtcatgcgtgcgcacctgtgttgttgtggcggaggaacgtccccgcgtagcactgcaacagtcattcagcaagctgttcaaggatataggcctgtcccctagggcagtttctactacttttggctccagagtaaatgttgccatatgtttgcagggcacgtctggacctgatccaacaaccgtctacgtcgatctgaagtccctgcggcatgatcgcgtcaggctggtagagcgtggcgccccccagtccctgctgctctccgaaagtggtaagattcttcctggagtgaaagtggtcatcgtaaatcccgaaaccaagggaccggtgggcgattcccatctgggggaaatctgggttaactcgccccacaccgcatctggctactacacaatttatgactccgaaacgctccaggccgaccatttcaatactaggttgtctttcggtgacgccgcccagacgctgtgggcccgaactgggtacctggggttcgtgcgtcgcaccgagctgaccgctgcgaccggagaacggcatgacgcactctacgtcgtgggtgctctggacgaaaccctcgagctgcggggcctacggtaccatccaatcgacatcgagaccagcgtaagccgcatccatagatcgatcgcagaatgtgctgtcttcacgtggacaaatttacttgtagtcgtggtcgaattgtgcggatcagaacaggaggcactggaccttgtgcctctggtaactaacgtggttctggaggaacattatctaattgtcggggtggtagtggtggtggatcccggagttatcccgatcaatagtaggggtgagaaacaaagaatgcatcttagagactcgttcctggctgaccagcttgatcccatctacgtggcatacaacatgtag

SEQ ID NO: 114659 - DNA, 1179 bp, synthetic construct
  misc_feature 1..1179: note = Description of Artificial Sequence: Synthetic coding sequence
  source 1..1179: mol_type = other DNA
atggcagaacgggggctggaacctagccccgccgccgtggcggcacttcctccagaagttcgcgcgcagttggctgaacttgagttggaacttagcgagggcgatataactcaaaagggatatgagaagaagcgctctaaactgctgagtccctatagcccccagactcaggaaactgattcagcagttcaaaaggaactccgaaaccagacccccgcccccagcgccgcccaaacaagcgctcctagcaaataccaccggacgagaagcggtggggctcgcgacgagcggtatcgaagcgagttttcactagtccgcatctactcagaagatatccacactgaagccgtacaggcggcactcgcaaaacacaaggagcaaaaaatggctctgccaatgccaaccaagcggaggtcaacattcgtccagagccctgctgatgcctgcaccccacctgacacgagcagtgccagtgaggatgagggctccctaaggagacaggcagccctttccgcagctctgcaacagagcctgcaaaacgcggaaagttggatcaatcggagtatccagggatccagtacgtcgagctccgcgtcctcaactctcagccacggtgaagtgaaaggcacatccggatctctggccgatgtgttcgcaaataccagaattgagaatttttcagcacctccagacgtgaccaccaccacgtcaagctcttccagcagcagtagcatccggccagctaatattgatttacccccatcaggcatagtcaaaggtatgcacaagggcagtaacaggagttcactgatggacaccgcggacggcgtgcctgttagctctcgtgtgtccaccaaaattcaacagttgctcaatactctaaaaagaccaaagagaccacctttgaaagaatttttcgtggacgactccgaggaaatcgtagaagtgccccagcccgaccctaaccaaccgaagccagaggggagacagatgacccccgttaagggcgaaccattaggggttatttgcaactggccacctgcactcgagtccgccctgcagagatggggcaccacccaggccaagtgttcctgcttgacggcgctggatatgaccggtaaaccagtatacaccctcacttacggtgaatctgcccgatttcagattctactgagttag

SEQ ID NO: 114660 - DNA, 4671 bp, synthetic construct
  misc_feature 1..4671: note = Description of Artificial Sequence: Synthetic coding sequence
  source 1..4671: mol_type = other DNA
atggccgacagaagtctggaggggatggcccttccactagaggtgcgagccaggctggctgagctggagctcgagctgagcgagggagacatcactcaaaagggctatgagaaaaaaaggagtaaactgatcggtgcttatctgcctcagcctccaagagtggatcaggccctccctcaggaaaggagggcccctgtaacccccagctccgccagccgctaccacagacgccggtcttccggatcccgagacgagagatatagaagtgacgttcatacagaggcagttcaggctgccttggcaaagcataaagagagaaagatggccgtgccgatgcctagcaaaagaagatctcttgtcgtgcagacatccatggatgcgtatacaccgccagatacaagttctgggagtgaggacgagggcagcgtgcagggcgacagccagggcacaccaacatcatcccaagggtcgatcaacatggaacactggatcagccaggcgatccacgggtctaccactagcaccacaagttcctcttcaacacagtcaggcggatccggagccgcccatcgtctggccgacgtcatggcccagacacatatagagaaccactcagccccaccggatgtcacaacatatacgtccgagcactccatccaagtagagcgccctcagggatcaactgggtctaggacagccccgaagtacggaaatgccgaactgatggaaacaggcgatggcgtcccagtgtctagccgggtctcggccaaaattcagcaactggtgaacacactgaaacggcccaaacggcctcctctgcgcgagttttttgtggatgacttcgaggaattgctggaggttcagcagcctgatccgaaccagccaaagcctgagggggctcagatgttagctatgcgtggagagcagttaggcgtagtaacaaactggcccccaagcctcgaggcggcacttcagcgttgggggaccattagcccaaaagccccttgccttacgacaatggataccaacgggaaacctctctacattctgacatacggcaagctgtggacccggagtatgaaagtcgcctattcaatcctgcacaagctgggaacaaagcaggagcctatggtccggcccggtgacagggtcgccctggtcttcccaaacaatgacccagccgccttcatggcagccttctatggctgcctgctggctgaggtagtcccagttccaattgaggtgcccctgacccggaaggatgctggcagtcaacagattgggtttttattaggatcctgcggggttaccgtggctctgaccagtgacgcctgtcataagggcctgcccaagagtcctaccggggaaatcccgcagttcaaaggatggccaaaactgctctggttcgtaactgaatccaaacatttgagtaagcctccgagagactggtttccccatattaaggatgctaataatgacaccgcttacatagagtataaaacttgtaaggacggtagcgttctgggtgtaacagtcacgagaaccgcactcttaacccattgccaggccctgactcaggcttgcgggtacacggaggccgaaaccattgtaaacgtgctggacttcaaaaaggacgtcggtctgtggcatgggattctaacttctgtgatgaacatgatgcatgttatcagcattccctatagcctgatgaaggtcaatccactatcctggatccaaaaggtatgccagtacaaagctaaggtggcatgtgtcaaatctagagacatgcattgggccctagtagctcaccgcgatcagcgggacatcaatctatccagcctgcgcatgctgattgtagccgacggggccaacccctggagcatttcttcgtgcgatgccttcctcaacgtttttcaatccaagggcttgcggcaggaggtcatctgtccctgtgcctcctcccccgaagctttgaccgttgctatcagacggcccacagacgatagcaaccagccacccggcagaggcgtattgagcatgcatggactgacttacggcgtcattcgagtcgacagcgaagaaaagctatcggtcttaactgtgcaggacgtgggcctggttatgcccggggccattatgtgctccgtgaaacctgacggggtgcctcagttgtgccgcacagacgagatcggtgagttatgcgtttgtgcagttgccacgggaaccagctactatggtctgtctgggatgaccaaaaacacatttgaagtcttcccaatgacaagcagcggcgctcccatttccgagtacccatttattaggacgggtcttttggggttcgtgggccctggcggcttggtcttcgtggtcggcaagatggatggtttgatggtcgtaagtggccgcaggcataatgcggacgacatagtagccacagccctggcagtggagcctatgaagttcgtataccgagggcgtatcgctgtattttctgttaccgtattgcacgatgaacggatcgtgatagtcgctgagcaacgccctgactccacagaggaggactccttccagtggatgtcaagagtccttcaggcaatagacagcatacatcaggtaggagtttattgcctggcacttgtcccagcaaatactctccctaaaacccctctgggaggaatccacctctctgagaccaagcagttgttcctggagggttctctgcacccttgcaatgtcctgatgtgtcctcacacttgcgttactaatcttcccaagcctcggcaaaaacagcccgaaattggtcccgccagcgtaatggtggggaatctggtgagcggaaagaggattgctcaagcttctggtcgcgatttggggcagatcgaggataacgatcaagcgcgaaagttcctgtttctgagtgaggtgctacagtggagagcgcaaactacccccgaccatattttatacacgctcctcaactgcagaggcgcaatcgctaactccctcacatgcgtgcaactgcacaaacgtgcagaaaagatcgcagtgatgttgatggagaggggacatctgcaagatggggatcacgtggccttggtttacccccccggaatagatctgatcgcggccttttacgggtgcctttacgctggatgcgtgccaatcaccgtgcggccccctcacccccaaaatattgcaactacattgcccacagtgaaaatgattgtagaagtgtcgcgaagcgcctgcctgatgactacacaactcatatgtaagttgcttaggtcgagggaggccgcagctgcagtggacgtgcgcacatggccccttattctcgataccgacgatctgccaaagaaacggcccgcgcagatatgcaagccctgcaatcctgacaccttagcgtacctcgacttctcggtgagcacaactggcatgctggcgggggtcaagatgagccatgctgccacctctgcattttgcaggagcattaagttgcagtgcgaattataccccagccgggaagtggctatctgtttggatccatactgcggtctgggtttcgtattatggtgtctatgtagcgtctattccggacaccagagtatccttatcccaccgagcgagctagaaacaaaccccgctctgtggctccttgcagtgagccaatataaggtgcgcgacacattttgttcttactctgttatggaactgtgtacaaagggcttgggaagtcagacggaatcattaaaggcaagggggcttgacttaagtcgggtaagaacctgcgtggtggtcgccgaggaacgccctaggatcgccctaacacaaagcttttccaaattgtttaaggatctaggactgcaccccagggcagtgtccactagcttcggctgccgagtcaatctggctatttgccttcaaggtacgtcgggcccggacccaaccaccgtgtacgtggacatgagagctttgagacatgacagagtgcgactggttgagaggggcagcccccattccctgccactcatggagagcggtaagatactgccaggggtgaggattataattgctaacccagaaactaaaggcccccttggtgactctcatctcggcgagatttgggtgcactcagctcataacgcgtcaggctatttcacaatctacggagacgaatcattgcaaagtgatcatttcaatagtaggctcagcttcggggacacacaaaccatctgggccagaacgggatatctcggattcttacgacggacagaactcaccgatgcaaatggtgagaggcacgatgctctttacgttgttggcgcgctggatgaggccatggagttacgagggatgaggtaccatccaatcgatattgagacttcagtgatacgggcgcacaagtccgtgactgagtgtgcggtttttacatggactaacctcctggtggtggtggtcgaactcgatgggtcagagcaggaagctttggatttggtcccgctagtgaccaatgtggtcctggaagaacattaccttattgtcggcgtagtcgttgtggtcgatatcggcgtcattcccataaatagtagaggggaaaaacagcgcatgcacctgcgcgacggctttctggctgatcagctggatccgatctatgtcgcctataacatgtag

SEQ ID NO: 114661 - DNA, 1971 bp, synthetic construct
  misc_feature 1..1971: note = Description of Artificial Sequence: Synthetic coding sequence
  source 1..1971: mol_type = other DNA
atggcagttcctatgccgtccaagcgccggtcactggtggttcaaacctcaatggacgcgtacacacccccggatacatccagtgggtcagaggatgagggatctgtgcagggagacagccagggcaccccaacctcatcacagggttccatcaatatggaacattggataagtcaagctatccatggctccacaacatctaccacctccagtagctccactcagagcggcgggagtggagctgcgcatcgcttggctgacgttatggcccagacacacatagagaatcactccgcaccacccgacgtcacaacatacacctccgagcattcaatccaggttgagagacctcagggtagcacagggtcaaggacagcacctaaatatggtaacgcggaactcatggagacaggagatggcgtacctgtctcgtctagggtgagcgccaaaatccagcagctggtgaataccttgaagaggccaaaaagacctcctctacgcgagttcttcgtggatgatttcgaagagctgctagaagtgcaacagcctgaccccaaccagcctaaaccagagggtgcacagatgcttgctatgcgtggtgagcagctgggggtcgtgaccaactggcccccttcactagaagctgctctgcagcggtggggtacaatctcccccaaggccccttgcttgaccactatggacaccaatgggaagcctctctatattctgacttacggcaagctgtggacacgcagtatgaaagtcgcctattcgatcctccataagttgggtaccaagcaagaacccatggtacgccctggcgaccgggttgctctggtgttccctaacaacgaccccgcagccttcatggccgccttctacggttgtctgctcgcagaggttgtgcctgtgccaattgaagtccccctgacaaggaaagacgctggctctcagcagatcggtttccttttaggctcgtgtggagtgaccgtagccttaacctccgacgcctgtcacaagggactgccaaagagcccaacgggcgaaattccacagttcaaaggatggccaaaacttctttggtttgtgacagagagcaagcacctgagtaagcctccccgagattggttcccacatatcaaagacgctaataacgacacagcctatatcgaatataaaacctgcaaagacgggagtgtgctcggtgtaactgtcaccagaacagcactgctgacacactgccaggcacttacacaggcatgcggctacacagaggccgagaccatcgtgaacgtgctcgatttcaaaaaggacgtaggcttatggcacggtattcttacgagtgtgatgaacatgatgcacgtgatatctattccctattctctgatgaaagttaaccccctgtcttggatccagaaagtctgtcagtacaaggcgaaggtggcatgcgtaaagtcccgggacatgcactgggcactggtggcacaccgcgatcagcgggatatcaacctgtcgagcctgcgcatgctcatcgtggctgacggcgccaacccttggagcatctcctcttgtgatgccttcctaaatgtcttccaatcaaaaggactgagacaggaggtcatctgtccctgcgcctccagtcccgaggcactcaccgtggcaatacgccgaccgactgatgattcaaatcagcccccgggaaggggtgtgctctctatgcacgggctgacctacggtgtgattcgagtagattcagaagaaaaactgtcagtgctgactgtacaggacgtaggcctggtgatgcctggagcgatcatgtgcagcgtgaaacccgatggggtcccccagttatgcaggaccgatgagattggagagctgtgcgtctgcgcagtggcaacaggcacctcatactacggcctctctgggatgacaaagaatacgtttgagcacacaagtaacaaaggaaaatag

SEQ ID NO: 114662 - DNA, 597 bp, synthetic construct
  misc_feature 1..597: note = Description of Artificial Sequence: Synthetic coding sequence
  source 1..597: mol_type = other DNA
atgtcccatgctgctacctccgccttctgccgtagcattaagctgcaatgtgagctctatccatcccgcgaggtggcaatatgcctcgatccatactgcggcctgggctttgtgctgtggtgcttatgttcagtgtactcgggacatcagtccatcctcattcctccatctgaacttgagaccaaccctgctttatggctgctggccgttagccagtataaagttcgggacacattttgcagctattcggtaatggaactctgcactaaagggctgggctctcagacagagagcctgaaggctaggggactagacttaagtcgtgtgagaacatgcgtcgtcgtggccgaagagcgtccccgcatagctctgacccagtccttctctaaactctttaaggacctcgggcttcatccaagagcggtgtcaacatcattcggctgccgggtgaacctggctatatgcctccagtgttgggattacagacacgagccacctaggcccgccccaaaatgctttaagatggtttacaaggagggggtgcgctccgtgggagaagacaagatcagagaaaaacgcacaaagacatggagatag

SEQ ID NO: 114663 - DNA, 696 bp, synthetic construct
  misc_feature 1..696: note = Description of Artificial Sequence: Synthetic coding sequence
  source 1..696: mol_type = other DNA
taggagacgatcgtcaatgtgcttgactttaagaaggatgtcggcctctggcacgggattttgaccagcgtgatgaacatgatgcatgtgatctctattccctacagcctgatgaaagttaaccccctgagttggatccagaaggtgtgtcagtataaagctaaagtggcctgcgtaaagagccgggatatgcactgggcactggtagcgcacagagaccagagagacattaacctgtcctccttgagaatgctaattgtggcagacggggcgaacccctggtctatttccagctgcgacgcttttctgaatgtgttccagtccaaaggacttcgccaggaagtgatttgcccatgtgcaagttcaccagaggctctgaccgttgctatacgaagacccactgacgatagtaatcagcctccagggcgaggcgtactgtcaatgcatgggcttacgtacggagttattagagtagactcagaagagaagctctcagtgctcactgtacaggatgttggcctcgtgatgcccggcgcaattatgtgttcggtaaagccagatggcgtccctcaactgtgcaggacggacgagatcggcgaactgtgcgtgtgcgcggtagccaccggcacatcgtactatgggctgagcggcatgacaaaaaatacctttgaacacacctctaacaaaggcaaatag

SEQ ID NO: 114664 - DNA, 564 bp, synthetic construct
  misc_feature 1..564: note = Description of Artificial Sequence: Synthetic coding sequence
  source 1..564: mol_type = other DNA
atggccgatcgcagtctagaggggatggcactgccattagaagtgagggcccggttagctgagctcgagcttgagcttagcgagggtgatatcacacaaaaaggatacgaaaaaaagcgctccaaactgattggagcctacctaccccaaccacccacagctaacggagcggctgttgtacgttgtcgcctgcaacatagcgaaggcgcgccaagacggacttttaggtccgcccacatcggcgtgtgcgatgtgcgagaggcagctgcccgagagagagttgcctcaactgccggtaatcgtccactattttattttcgatttggagtagaccaggccttgccccaggaacgcagggcgcccgtgaccccttcgtcggcttccaggtatcataggagaagaagctccggcagtagagatgaaagatataggtccgacgtgcatacggaagctgtgcaggctgccttagctaaacacaaagagagaaagatggctgtcccaatgccgtcaaaacgacgtagtcttgtcgtgcagacctctatggatgcctatacaccaccttag

SEQ ID NO: 114665 - DNA, 468 bp, synthetic construct
  misc_feature 1..468: note = Description of Artificial Sequence: Synthetic coding sequence
  source 1..468: mol_type = other DNA
tgagtgtacagcggccatcagtccattttaattccgcccagtgagctcgaaacaaacccagccctgtggctgctcgcagtgagccagtataaggttcgggatactttctgcagctactctgtgatggaactttgcaccaagggattgggtagtcagactgagtcgctgaaagccagaggcctggacctttcgcgggtgagaacttgcgtggttgttgccgaagaaaggccaaggatagctttgacccagtcctttagcaaactgttcaaggatttaggactgcatccccgagccgtgtccacctcctttgggtgtagagtaaacctagcaatttgtttgcagtgctgggattaccgccacgaacccccaaggccagctcccaagtgttttaagatggtctacaaggaaggcgttagatctgtgggagaggacaagatcagagaaaaaaggacgaaaacgtggcgctag

SEQ ID NO: 114666 - DNA, 1446 bp, synthetic construct
  misc_feature 1..1446: note = Description of Artificial Sequence: Synthetic coding sequence
  source 1..1446: mol_type = other DNA
atttgggtgagtagaagtgcgtgcctcatgactactcagttaatttgtaagctcctccgaagtcgcgaggctgcagcagcagtagacgtgcggacctggccgctaatcctggacacggatgacctccccaaaaaacgccctgctcaaatttgtaaaccatgcaatcctgacacactggcttatctagatttttccgtgtcaacgacgggaatgttagctggagtgaaaatgtctcatgccgccacgagcgcattctgtcgttccattaagctgcagtgcgagctgtatccatccagagaggtggcaatttgcttggacccgtactgcgggctcggctttgtcctttggtgtctttgtagcgtttatagcggccaccagtctattttgatacccccttctgaactcgagactaacccagctctctggctgctcgcggtctcacagtataaggtgagagacaccttttgctcatattccgtgatggagctgtgtaccaagggtctgggcagccagaccgaatctctgaaagcgcgaggtctggatctgagccgagtgaggacttgtgtagttgttgccgaagagcgtccgagaattgctcttacacagtccttttctaaattattcaaggacctgggacttcaccctcgggcagtaagtaccagttttggctgccgggtgaatctggccatttgtctgcagggtaccagcggacctgaccctactaccgtatatgtggacatgagagctctgcggcacgatagagttcgactggttgagcggggaagcccccactccttacccctgatggagagcggtaagatcctgccaggggtgcgcattattattgccaacccagagactaagggtcccctcggcgattctcacctgggtgagatttgggtccattcagcccacaacgcttctggttactttacgatctacggagacgagagccttcagagcgatcacttcaactcacgattaagcttcggtgatacacagacaatctgggctagaactggctacctaggcttcctccggcggactgagcttaccgacgcaaatggcgaaaggcatgacgcgttgtacgttgttggcgctctcgatgaagccatggagctccggggaatgaggtatcacccgattgatatcgaaacctctgtgattcgggcacacaaatctgttacggaatgcgccgtgttcacttggactaatctgctcgttgtggttgtggaactggatggctccgagcaggaagccctcgacctggtccctttggtgaccaatgtcgtcttggaagagcattacctgatcgtgggggttgttgtggtagttgatatcggagtgataccgattaattccaggggagagaagcagcgcatgcacttgcgtgatggatttctcgctgaccagctagacccaatatacgtcgcctacaatatgtag

SEQ ID NO: 114667 - DNA, 1116 bp, synthetic construct
  misc_feature 1..1116: note = Description of Artificial Sequence: Synthetic coding sequence
  source 1..1116: mol_type = other DNA
atgcacggcctgacatacggggtgattagggtcgattccgaagagaaactgtcagtcctgacagtgcaggatgtcggattggtgatgcctggagccatcatgtgcagcgttaaacctgatggagtgccacagctttgtcgaacagatgaaattggcgagctgtgcgtatgcgcagtcgcaactggcacttcatactacggactatctggcatgaccaaaaatacctttgaggtgttccctatgacgtcatccggcgcccctattagtgagtatccctttatacgaactgggctgcttggtttcgtagggcccggtgggctggtgttcgtggtcgggaagatggatggcttaatggtggtgtcagggagacgacataacgcagatgacatcgtggccactgctttggccgtggaacctatgaagttcgtctatcgaggtcgaatcgccgtgttctctgtgaccgtgttacacgacgaacgaattgtcattgtggccgaacagagacctgattcaacagaggaagatagtttccagtggatgtctagagtgcttcaggccatcgactctattcatcaggtaggtgtgtactgtctggccctggtgccagcaaataccctgcccaaaacacctctggggggaattcatctctctgaaacgaagcagctcttcctggaaggcagtctccatccttgcaacgtcctgatgtgccctcacacatgcgtgaccaatcttccgaagccacgccagaaacagccagagattgggccggccagcgttatggttggtaacctcgtgagtgggaagcgcattgcccaagcttccggccgggacctgggacagatcgaggataatgatcaggcccgcaagtttctttttctttcagaggtactgcagtggcgcgctcagactactcctgaccacatattatataccctcctcaactgtagggtgcgccggggtgccgggctgccctggttgctggcttcacgcgggctcgcttggtttttaggtgccctcctcctgttgagcctaaatccgttcgcatccgtgctctgggaattttttctttgttttgcgatcttaactgaaacgtttgtcccaagggactgtttctag

SEQ ID NO: 114668 - DNA, 1236 bp, synthetic construct
  misc_feature 1..1236: note = Description of Artificial Sequence: Synthetic coding sequence
  source 1..1236: mol_type = other DNA
atgtggtcaggttggtggctgtggcctttggtggccgtttgcactgccgatttcttccgtgatgaggctgagcgcattatgagagattcaccggtgatagacgggcacaacgacctgccctggcagctgctggatatgtttaacaatcgactccaggacgaaagagccaacctcaccacactggccggcacacataccaatatccctaaactccgggcaggtttcgtaggaggacagttctggtcagtctacaccccctgtgacacgcaaaacaaagacgccgtcagacggacattggagcagatggatgtggtccaccggatgtgccggatgtatccggagacttttctctacgttacctcttcggccggcatcaggcaggccttcagggaaggaaaggttgcctccctgatcggcgttgaaggaggccactcaatagactcttccctgggagtgctgcgagcactgtatcagctcgggatgagatacctgacactgacccattcatgtaataccccttgggcagacaattggcttgttgacaccggggactcagaaccccagtctcagggcttatctcccttcggtcaacgggttgtcaaggaattgaacaggctgggagtccttattgacctcgcccacgtaagcgtcgctactatgaaggcgactcttcagctatcgcgagctccagtgattttttcacactcctcagcttattccgtttgcgcaagcagaagaaacgtccctgacgacgtgctgaggctcgtcaagcagaccgatagcctggtcatggtgaatttctataacaactacatctcctgtactaataaagccaatctgagccaggtggctgaccacctggatcatataaaagaggtggctggcgcacgcgccgtgggattcggcggtgacttcgatggagtcccgcgcgttccagaaggcctcgaggacgtgagtaaataccccgatctgattgcagagctcctgcggcgtaactggactgaggccgaagtcaaaggggctctcgctgacaacttgttgcgggtttttgaagcagttgagcaggcttccaatttgacccaagcgcccgaagaagaacctatccctcttgatcaactgggaggctcttgcagaacccattatgggtattcgtcaggggcctccagcctgcaccggcattggggactgctgttggcaagcctggccccgctcgttctgtgcctgagccttttatag

SEQ ID NO: 114669 - DNA, 1236 bp, synthetic construct
  misc_feature 1..1236: note = Description of Artificial Sequence: Synthetic coding sequence
  source 1..1236: mol_type = other DNA
atgtggtctgggtggtggttgtggcctttagttgctgtctgcacggctgacttctttagggatgaggccgagaggatcatgcgcgattctccagtcatcgacggtcacaatgaccttccgtggcagttgctcgacatgtttaacaaccgcctgcaggatgaacgtgctaacttaacaaccctggccggaactcacacgaatatccctaagctgagagctggctttgtcggaggacaattctggtccgtctacacgccatgcgacacccagaataaagacgctgtccgtcgcaccctggaacagatggacgtcgtgcatcggatgtgtaggatgtaccccgagacattcttgtatgttacatcatctgcaggtatccggcaggcatttagagaaggtaaggtagcctcccttattggagttgaaggcggtcactcaatagattcttcactaggggtgctacgggccctatatcaacttggcatgcgttatctcacactgacacattcttgcaatacaccatgggcggacaattggctcgtggacactggcgactcagagccacagtcccaggggctctcccctttcggccagcgtgtggttaaggaattgaatcgcctcggcgtgctcattgacctggctcacgtatccgtggcaacaatgaaagccactctgcagttgtcgcgagcccccgtaatattctctcacagctcagcttatagcgtatgcgcatctcggagaaatgtgcccgatgatgtcctcaggctagtcaagcagacagatagtttggtgatggttaatttctacaataactacatcagctgtactaacaaggccaatctgtctcaggtggcagaccacctcgaccatatcaaagaagtggcgggggcccgggccgtggggtttggaggggacttcgatggtgtgcctagggtgcccgagggcctggaagatgtctcgaagtatcctgatctcatcgcggaactcctcagacgaaattggactgaggccgaagtgaagggggcccttgccgataacttactccgagtttttgaggcagttgaacaggcttccaacctaactcaagccccagaagaagaacccattcccctagaccaactcggagggtcttgcagaacccactacggatactcttccggggccagctcgctgcaccgccattggggcctgttgctagcgagtctggccccgctcgtcctctgtttgtcgctgctgtag

SEQ ID NO: 114670 - DNA, 1236 bp, synthetic construct
  misc_feature 1..1236: note = Description of Artificial Sequence: Synthetic coding sequence
  source 1..1236: mol_type = other DNA
atgtggagtgggtggtggctctggcccctggtcgcagtgtgtacagcagacttctttcgggacgaagcagagagaattatgagggattcccctgtgatcgatgggcacaacgatctcccttggcagctactcgacatgttcaataaccggttgcaggatgagcgggcaaatctgaccacgcttgccggtacccacactaatatccccaagctaagggccgggtttgtcggcggacagttctggtcggtctacactccttgcgacacccaaaataaggacgccgtcagaaggacgctggagcagatggacgtggttcacaggatgtgcaggatgtatccggagactttcctgtatgttacctcttcagctggcatccgtcaggccttcagagaaggtaaagtggccagtctgattggtgtggagggcggacactctattgacagttcattaggcgttctccgcgcattataccagttgggtatgaggtatctcaccctaacacatagttgcaacactccatgggcagacaactggttagtggacactggggactccgaacctcagtcccagggactcagtccgttcggccaacgggtcgtgaaggagctgaatagactgggggtcctgattgatcttgcccacgtgtcagtggctacaatgaaggccacgctgcaactgtcccgggctccggtgatcttttctcattcttccgcttattccgtgtgcgccagccggcgcaacgttcctgacgatgtgctccgacttgtgaaacaaaccgactctctagtgatggttaacttctataataactatataagctgcacaaacaaggctaacctttcccaggtggcggaccatctggatcacatcaaggaagtcgcgggtgcgagagccgttggctttggaggcgacttcgatggagtgccccgggtccccgaaggcttggaggatgtctcaaagtacccagatctgattgccgaactcctccgaagaaactggaccgaagccgaggtgaagggtgctctcgcagacaacctgctccgggtgtttgaggcagtggaacaggcctctaatctgacgcaggctcctgaggaagaacctatccctctggaccagcttgggggaagctgcaggacccattatgggtatagtagcggggcttcatccctgcatagacattgggggctactgctcgctagtctggcaccactggtcctttgcctcagcctgctctag

SEQ ID NO: 114671 - DNA, 381 bp, synthetic construct
  misc_feature 1..381: note = Description of Artificial Sequence: Synthetic coding sequence
  source 1..381: mol_type = other DNA
atgcagccgtcaggcctagagggaccaggcacctttggtcgctggcccctgctctccctgctcctgttgctgttgttgctgcagccagttacctgtgcatatactacacctgggccaccccgagctctgactactcttggcgcccccagagcccacacaatgcccggcacatatgcccccagtacaacattgtcttctccctcaactcaggggctgcaggaacaggcaagggcactgatgagagatttccctctggtagacggttcaggtcaacccatgtgccatgcccggcccagaactggcatgccttgtgcctctccctggagccggctcacttcatacgctgcctgcgtgcctccaatattgagctggtccctctag

SEQ ID NO: 114672 - DNA, 1200 bp, synthetic construct
  misc_feature 1..1200: note = Description of Artificial Sequence: Synthetic coding sequence
  source 1..1200: mol_type = other DNA
atgcagcctagtggtttggaaggacccggaacttttggcagatggcctctcctgagcctcctgctgctgctgctccttctccagccagtgacctgtgcatatactacgccggggcctcctcgggcattgttttggagtgcatacgtaccatgccagacgcaggaccgcgacgctctgcgacttaccctcgaacaaattgacttaatcagacggatgtgcgcatcatacagcgagctagagctagtgactagcgcaaaggccctaaatgatactcagaaactggcatgcctgatcggagtagagggtgggcacagcctggataattctttgagcattttacctacgttttacatgctgggcgttcgatacctcactctgacacatacctgcaacaccccttgggccgagtcaagtgctaagggagtccacagtttttacaataacatctctgggctcacggattttggagagaaggtagtagccgaaatgaacaggctgggaatgatggtggatctcagccatgtgtccgacgcggtggcaagaagagctctcgaggtctctcaggcaccagtgatttttagccattctgctgctcggggtgtgtgcaactccgcaaggaatgtgcctgatgatatcttacagctccttaagaagaatggcggcgtagtcatggtgagcctctccatgggcgtgatacagtgcaacccatccgccaatgtatccaccgtcgctgaccacttcgaccatattaaagctgtgatcggttccaagttcattgggatcgggggggattacgacggcgctggcaaattccctcagggactggaagacgttagcacatatccggtcttgattgaagagttgctgagcagagggtggagcgaagaggagctgcaaggtgtgctgcggggcaacctgctgagggtatttcggcaggttgaaaaggtgcaggaggagaacaaatggcaaagccccctggaagacaaatttccagacgaacagctgagctcaagctgtcactcagacctcagtagactgcggcagcgccagtcactgactagtgggcaggaattaacagagatcccgattcattggacagcaaagttaccagcgaaatggagtgtgtcagaatctagcccccacatggcgcctgtattggccgtcgtcgccacattccctgtgctgatcctctggctttag

SEQ ID NO: 114673 - DNA, 1461 bp, synthetic construct
  misc_feature 1..1461: note = Description of Artificial Sequence: Synthetic coding sequence
  source 1..1461: mol_type = other DNA
atgcagccaagcggtctagaaggccccggtaccttcggccgctggccgttattgtcactattgttattgttgctgctgctccagcccgttacatgtgcatatacaactccaggaccgcccagagcactaaccacactgggagctccacgagcacataccatgcctggaacctacgccccttccacaaccttgtccagccccagtacccaagggttgcaggagcaggccagggcattaatgagagattttccactcgtcgacggacacaacgatctgccacttgtccttagacaggtgtatcagaagggcctgcaggatgtcaaccttaggaacttcagctacgggcagacctctttggaccggttaagggatggactagtgggggcacagttctggagtgcatatgtcccttgtcagacccaggacagagatgccctgcgactcactctggaacagatcgacctgatccgccggatgtgcgcaagctacagcgaacttgaactagtgacttctgctaaggccctgaacgacacacagaaactcgcttgcctgattggcgtagaaggaggtcactctcttgataattccctcagtatcttgcccacattctatatgctgggggtgcgctacctcactttgacacacacatgtaacacaccctgggcggagagctcagccaagggggtccatagtttttacaacaatatctccgggctgacagactttggtgagaaagtagtcgctgaaatgaacagattgggcatgatggttgatctgtctcacgtcagcgatgcagtggcaaggagggccctcgaggtctcccaggctcctgtcatcttctctcacagcgcagccagaggggtgtgtaatagtgctcgaaacgttcctgatgatattcttcaattgctgaagaagaatggcggagttgtaatggtctcactgagcatgggagtgatccagtgtaatcctagcgccaatgtgtcgacggtggcggatcatttcgaccatatcaaggccgtcataggaagtaaattcatcgggatcggcggcgactacgatggcgctgggaagttccctcaagggctggaggacgtctccacatatccagttttgatagaggagttgctgagtcgggggtggagcgaagaagagttacagggcgttctgcgaggtaacctgctgagggtgttcaggcaggtggaaaaggtccaggaggagaacaaatggcagtcaccactggaggataaattccccgacgagcaactgtcaagctcgtgccacagcgatctgtcgcgcctgcgccagcggcagagcctaacaagtggccaagaactcacagaaatccccattcactggacagctaaattgccagctaaatggtctgtcagtgagtcttcaccgcatatggcccccgtcctcgctgtagttgcaacctttcccgtgttaattctatggctctag

SEQ ID NO: 114674 - DNA, 1461 bp, synthetic construct
  misc_feature 1..1461: note = Description of Artificial Sequence: Synthetic coding sequence
  source 1..1461: mol_type = other DNA
atgcaaccgtctggtttggaggggcctgggacttttggacgctggcctttactgagtctcctcctcttgttgctgctgcttcagcccgtgacgtgcgcctacaccacccccggtccgccccgggcactgactacgctgggcgcaccaagggcacatacaatgcccggcacatacgccccctcaaccacactgagcagccctagcacgcagggactgcaggagcaggcacgtgccctgatgcgagacttccctctggtcgatggccacaacgacctacccctggttttacgtcaggtgtaccagaaggggctacaggatgttaacctaaggaacttctcctacggtcagactagcctggatcgtcttagagacggcctcgtgggcgcccaattctggagtgcttatgtcccctgtcaaacacaagatcgcgatgctctacgcttaacgctggagcaaatcgatctgattagaaggatgtgtgccagttacagtgagttagagctggtgaccagtgcaaaggctctcaacgatacacaaaagctcgcttgcttgattggcgtcgagggggggcactccctcgacaatagtctgagcatcctgccaaccttttatatgctaggagttcggtatctcactctcactcacacatgcaacacaccatgggctgagtcatcagccaagggagttcattctttttacaacaacatctccggcctgaccgatttcggagagaaggtcgtggctgagatgaatagactggggatgatggtcgacctcagccacgtgtctgatgctgttgcccggcgggctctagaagtaagtcaggcccctgtcatattcagccactccgccgcgcgcggggtgtgtaactctgccaggaatgtgcctgacgacatcctgcagctccttaagaagaacggaggggtcgttatggtgtcactgtccatgggcgtaatccagtgtaatccctccgctaatgtgagcaccgttgctgaccatttcgaccacattaaagcagtcatcggttctaagtttattggcatcggtggggactatgacggagctggcaagttcccccagggcctggaggacgtgtcgacataccccgtgctaatcgaagagttgctgtcccgcggctggtccgaggaggaactgcagggagtgcttagaggcaacttgctcagagtatttaggcaagtggaaaaagtgcaggaagaaaataaatggcagagtccattggaggacaagtttcccgacgagcagctgagctctagctgtcatagcgacctcagtagactacgccagcggcagtcgctgacaagcggacaggaattaacagaaattcccattcactggacagccaaattacctgcaaaatggtcagtctctgagtcatctccgcatatggcgcccgtacttgcggtcgtggctaccttccccgtcctgatcctgtggctctag

SEQ ID NO: 114675 - DNA, 1542 bp, synthetic construct
  misc_feature 1..1542: note = Description of Artificial Sequence: Synthetic coding sequence
  source 1..1542: mol_type = other DNA
atgataaggacccctttgagtgctagcgcgcataggcttttacttcccgggtctagaggcaggcctccaagaaatatgcaacccacgggcagggaagggtctcgcgccctgagccggcgctacttacgtaggctactgctgttgctgctcctgcttcttttacgtcaacctgtcacaagggcagagactactcccggtgccccccgagcgttgagcacactcgggtcccctagtctgtttacaaccccgggggtgccttccgcgttgactactcccggcctcaccactccggggacgccgaaaacactcgacctcagaggccgtgcccaggccctgatgcgctcctttccccttgtggacgggcataacgatttgccgcaggttcttagacagcgttataagaacgtcctgcaggacgtgaacctgaggaatttttcccacggacagaccagcctagatcgactgagggacgggctggtcggcgcacagttctggagcgcctcggtgtcttgccagagtcaagatcagaccgccgtcagacttgcactggagcagatcgatctgatccacagaatgtgcgctagttattcagaactggaactggttacgagtgccgagggtctgaattcctcacaaaagctggcttgcctgatcggggtagaagggggacattccctcgatagcagcctgtctgtccttaggagtttctacgtgctgggagtgcgatatctgacccttacattcacatgcagtacaccctgggcagaatcctctaccaagtttcggcatcatatgtatacgaatgtgagtgggctgacatctttcggcgaaaaggtggtggaagaactgaacaggttggggatgatgatcgatctgtcttatgcttccgacacgctcattagaagggtgctggaggtcagtcaggcccccgtgattttcagtcacagcgcggcccgggctgtctgcgataatctattaaacgtccccgacgacattcttcaattgcttaaaaagaatggtggcattgtgatggtaacgctcagcatgggagttttgcagtgcaacctgctggctaatgtgtcaacggtagccgaccacttcgaccacattagagctgtgatcggcagcgagtttattgggatcggcggcaactacgacggcaccgggcggtttcctcagggcttggaagacgtgtctacttaccctgtcctcatcgaagagctcctctctaggtcttggtccgaggaggagctgcagggggtgctgcgaggtaatcttctcagagtgtttcggcaggtggagaaagtgagggaagagagtcgggcacaaagtcccgtggaggccgagttcccctacggacaactctccacctcttgtcattcccatctggtcccccagaatgggcatcaggccacacacctggaggttacaaaacagccaaccaatcgagtgccatggcgcagttctaatgcctccccctacttggtcccgggactggtcgctgccgcaactataccgacattcacccagtggctctgctag

SEQ ID NO: 114676 - DNA, 2370 bp, synthetic construct
  misc_feature 1..2370: note = Description of Artificial Sequence: Synthetic coding sequence
  source 1..2370: mol_type = other DNA
atgcgaaaagtagaaagtaggggggaaggggggcgtgaggaactaggaagtaactcccctcctcaaaggaactggaaaggaatcgccatcgccctgctcgtaattttggtggtgtgcagcttgattactatgagtgtgattctcctgacccctgatgagctaaccaacagttctgagacacgcctgagtctcgaggacctcttcagaaaggacttcgtgttacacgatccagaggccagatggattaacgataccgatgtcgtgtacaaaagcgagaacggccacgttatcaagcttaacatcgaaaccaatgccactacccttcttttggagaacaccaccttcgtcacatttaaagctagtcgtcattctgtcagccctgacctgaagtatgttctacttgcttatgatgtaaaacagatttttcattacagctacacggcatcctatgttatttataacattcacactcgagaggtgtgggaactcaatcccccagaggtggaagattccgtgctgcagtatgccgcatggggagtccagggccaacagttgatctacatatttgagaataatatttactaccagcctgacattaagtccagctctctaagactgacgtcttccggaaaggaagagatcatttttaacgggattgcagactggctctacgaggaggaacttctccacagtcatatcgctcactggtggtctcctgatggggagcggctagcattccttatgattaacgactcgctggtgcctactatggtaatcccccggttcaccggcgccctgtatccaaagggcaagcaatacccttatccaaaagctgggcaagtaaaccctaccattaagctttatgtggttaacctgtacggccccacccacacgttagagcttatgccccccgactctttcaagtccagggaatactacataactatggttaagtgggtgagtaacactaagacagttgttagatggctgaatagggcccagaacatatccattctgacagtgtgcgagacaacaaccggagcttgctccaagaagtatgagatgacgtccgacacttggcttagccagcagaacgaggaacctgtgttttctcgagatgggtcaaaattctttatgaccgttcctgttaaacagggtgggaggggcgagttccatcacgtcgccatgtttcttatccagtccaagagcgagcagattactgtgcggcacctcacgtccggaaattgggaggtgattaagatcttggcatatgatgagacaacccagaaaatttattttttgagtacagaatcttcaccccgcggccggcagctgtattccgctagcaccgagggtctcctgaaccgccagtgtatcagctgcaactttatgaaggagcagtgtacctattttgatgcatcgttcagtccaatgaatcagcacttcctgctgttctgtgaggggccaagggtcccagtagtgagtttacattcgacagataatccggccaagtatttcatattggagagtaacagcatgcttaaagaggcaattctgaagaagaagattggcaaacctgagatcaagatcctgcacatagatgattatgagctgcctctgcagctgagcttgccgaaggactttatggaccggaaccagtatgctctgctgcttatcatggatgaggagcctggtggacagctggtaaccgataaatttcacattgactgggatagtgtcctgatcgacatggataacgttattgtcgcaagatttgacggacgggggtccggctttcaggggctgaaaattctgcaagaaattcatcgccgcttgggctcagtggaggtgaaagatcaaattaccgctgtgaaatttttgctcaagctaccctacatcgattcaaagaggctttctatattcgggaaaggatacgggggatatatcgcctcaatgattctgaaatctgatgagaagctgttcaagtgtggatctgttgtcgcgcccataaccgacctcaagctgtacgcctctgcttttagcgaacgttacctgggaatgccaagtaaggaagagtctacctaccaggctgctagcgtgctgcacaatgtccatgggctcaaagaggagaatatcctgattatccacgggactgcagacacaaaggtgcacttccagcattccgcagagctgataaagcatctgatcaaagcaggcgttaattataccatgcaagtgtaccctgacgaagggcataatgtgtccgaaaaaagtaagtaccacttatattctaccatcctgaagttttttagcgattgtctgaaggaggagatatctgtgctaccccaggagcctgaagaagacgaatag

SEQ ID NO: 114677 - DNA, 2403 bp, synthetic construct
  misc_feature 1..2403: note = Description of Artificial Sequence: Synthetic coding sequence
  source 1..2403: mol_type = other DNA
atgaccgctgccaaacaggagccacagccaacacccggcgcccgtgcaagccaggcccagccggccgaccaggagctgggtagcaacagcccccctcagcggaattggaagggtatcgcgattgctctgcttgtcatactggtagtctgctccctgataaccatgtctgtgatcctgctaactcccgatgagttgaccaattctagcgaaacgcgcctctctcttgaagatctcttccggaaagactttgtccttcacgatcctgaggcccgctggattaacgatactgacgtcgtatataagtctgagaatggacatgtcatcaagttaaacattgaaacgaatgcaacaaccctactgctggagaatacaactttcgtcaccttcaaggcatcacgacactccgtctctccagatctgaaatacgtactcctggcctacgatgtgaaacaaatcttccactactcgtacactgcatcttacgtgatctacaacatacacacgcgggaagtgtgggaactcaatccccccgaagtcgaggacagtgtgctacagtatgcggcctggggggtccagggccagcagctgatctacatttttgagaacaacatatactaccaacccgatatcaaaagctcatccctccgcttaactagtagcggaaaggaagagatcatatttaatggcattgctgactggctttacgaggaagagctactgcactcccacattgcacattggtggtctccagatggtgagcggctggcattccttatgatcaatgacagtttagtgccaacaatggtgatccctaggtttactggagccctgtacccaaagggcaaacagtatccttacccaaaagctgggcaggtgaaccccaccataaagctgtatgttgtgaacttatacggtccaacacacactcttgaacttatgccgccagacagctttaagtctagggagtactacattacaatggtgaaatgggtatcaaacactaagacagtggtacggtggctcaatcgggctcagaatatctctatattaacagtttgcgagacaacgaccggtgcctgcagtaaaaaatacgagatgacatctgacacatggttgtcgcagcagaacgaggagcccgtctttagcagggatggctcaaaattcttcatgacggtgcctgttaaacaaggagggaggggcgaatttcaccatgtcgcaatgtttttgatccagtcaaagagtgagcagattacggtcaggcatttaactagcggtaactgggaggttatcaagatcctcgcatatgatgaaaccacccagaaaatatacttcctgtctactgaaagctccccgcgaggacggcaactgtactctgcctctacagaggggctcctgaacagacagtgtatttcctgtaacttcatgaaggagcagtgcacatactttgacgcaagcttttccccaatgaaccaacacttcctgctgttttgtgaaggtccccgcgttcccgtggtgagcctgcacagtactgacaaccccgccaaatattttattttggagtctaactcaatgcttaaagaagccatcctgaaaaaaaaaatcgggaagccagaaatcaaaatcctgcacattgacgattatgaactgccattgcaattgagtcttccaaaggatttcatggacaggaaccagtatgcacttctgctaatcatggacgaggagccaggcgggcagctcgtcacggataaatttcacatcgattgggacagcgtgctgattgatatggacaatgttatcgtggctagatttgatggcaggggatccgggttccagggattgaagattttacaggagatccatcgtcgcctgggtagtgtggaggtcaaggaccagataacagctgtcaaattcctcctgaaacttccgtacattgacagtaagaggctgtcaattttcggcaagggctacgggggatatatcgccagcatgattctcaagtctgatgaaaagcttttcaaatgcggttctgtggtggccccgattactgacctgaagttatacgcctcagcgttcagtgagaggtatctcggcatgccaagtaaagaggaaagcacttaccaggcggccagtgtgctgcataatgtgcatgggctcaaggaggagaatattttgatcatccacggcacagcggacaccaaggtgcattttcaacacagtgccgaactgattaagcatcttataaaggccggggtcaactatactatgcaggtgtacccagatgaaggtcacaacgtctccgagaagagtaaatatcatctgtattccacaatactcaagttctttagcgattgcttaaaagaggagatcagtgtgttaccgcaggaacccgaggaagacgaatag

SEQ ID NO: 114678 - DNA, 2391 bp, synthetic construct
  misc_feature 1..2391: note = Description of Artificial Sequence: Synthetic coding sequence
  source 1..2391: mol_type = other DNA
atgaaccagactgcaagtgtctcacaccacataaaatgtcagccaagcaaaaccataaaggagcttgggagtaatagcccaccacaacggaattggaagggtatcgcgatagctttgcttgtgatcctggtggtatgtagcctcattacaatgtctgttattctcctgactcccgacgaattgacaaacagctccgagacaagattatcacttgaagatctatttaggaaagatttcgtgctgcatgatcctgaggcaagatggattaatgacacagacgtggtgtataagtccgaaaatgggcacgttatcaagctaaacatagaaacaaatgctacaaccctcctcctggagaacacaaccttcgtcaccttcaaggcttccagacattcagtgtccccagacctgaaatacgttctgcttgcatatgatgttaagcagattttccactactcctacaccgcgtcctacgtgatctataatattcatacacgggaggtatgggagcttaatcctcccgaggtggaggatagtgtcctgcaatacgctgcttggggcgtgcagggacagcagttgatctacatctttgaaaacaacatctactatcagcctgacattaagtcctcgagcctgcgtctgaccagttctgggaaggaggagatcatcttcaacggaattgcagactggctttacgaggaggaactccttcattctcacatagcgcactggtggtctcccgacggagaaaggctggctttcctgatgatcaatgacagcctggtaccaaccatggtcatccctagattcactggagctctatacccaaagggaaagcagtacccctaccccaaggccggtcaagtcaaccccacaataaagctctacgtggtcaacctttacggaccgacccacacactggagttaatgccgcccgattccttcaaaagtagggagtattacattaccatggtaaaatgggtgtctaatactaagaccgtcgtgcgctggctaaaccgcgctcaaaatatatctatcttgacggtgtgtgagaccacaacaggagcatgcagtaagaaatacgaaatgacatcagatacgtggttgtcacagcagaatgaggagcccgtgttttcccgggatggcagcaagttttttatgaccgtccctgtgaaacagggtggccgaggtgagtttcaccatgtggcgatgttccttatccagagcaagtccgaacagattacagttcgccacctgacaagcggtaactgggaggtgatcaagattttagcttatgacgagaccacacagaaaatctatttcctctctaccgagagcagcccacgcggtagacaactgtattccgcatcaactgagggactgctgaaccgacagtgtattagctgcaatttcatgaaggagcagtgcacctacttcgatgccagcttcagtcccatgaatcaacatttcctgctgttctgtgaaggacccagagtcccagttgtgtctcttcattctaccgacaatcctgccaagtatttcatcctggagtcgaattctatgctgaaggaagcaattctgaagaaaaagatcggtaagcccgaaattaaaattcttcacatagatgattatgagctccctcttcagctgagcctgccaaaagatttcatggatagaaatcagtacgccctgctgctcattatggacgaggaacctggggggcagttggtgaccgacaaattccacatagactgggacagtgtgctaatcgacatggataatgtgatcgtggcgcgcttcgacggcaggggatcagggtttcagggcctgaagatccttcaggagatccacagacgactgggcagcgtggaggtcaaggaccagatcacagcagttaagtttctgctgaagctaccctatatcgattctaagcgactgtccatcttcggtaagggatacggaggctacatcgccagtatgattctgaaaagtgacgagaagctttttaagtgcggatccgtcgtcgcacctattactgatctcaaattgtatgcgagtgccttttcagaaaggtatctcggcatgccaagtaaggaagaaagcacttaccaggctgctagtgtgctccataacgtccatggactgaaagaggaaaatatactcatcattcacggcactgccgatacgaaggtccattttcagcatagcgcagagcttattaagcatctgatcaaggcaggagttaactacacaatgcaggtctaccccgacgagggccacaatgtgtctgaaaagagcaagtaccatttgtacagcaccatacttaagttcttctcggactgtctgaaggaagaaatcagtgtgctgccacaggagcccgaggaggatgaatag

SEQ ID NO: 114679 - DNA, 294 bp, synthetic construct
  misc_feature 1..294: note = Description of Artificial Sequence: Synthetic coding sequence
  source 1..294: mol_type = other DNA
atgagtgtgattctactgactcctgatgagctgactaactcctcggagactcgcctctctctcgaagacttgtttcggaaagactttgtcctgcacgacccagaagcccgctggatcaacgacactgacgttgtctataaaagcgagaatggtcacgtgatcaagttgaacatcgagacaaatgccaccacacttcttttagagaatacgacattcgtgacttttaaagcgagtcgccattccgtcagtcctgatctcaagtatgttttgctcgcgtatgatgtcaaacagtag

SEQ ID NO: 114680 - DNA, 1803 bp, synthetic construct
  misc_feature 1..1803: note = Description of Artificial Sequence: Synthetic coding sequence
  source 1..1803: mol_type = other DNA
ctcagtattctgatcttgaccagtaacgagttgacaaattcttccgagacgcgcctttccttggaggatctgtttagaaaggatttcgtgctgcacgatccagaagcgagatggataaatgataccgacgtagtatataaaagcgagaacggccatgtgattaaactcaacatcgagaccaacgccactactctgctactcgaaaataccacttttgtcaccttcaaggcatctaggcactctgtatcgccagacttaaaatacgtcttgcttgcgtatgatgtgaagcagatcttccactacagctatacagcatcgtacgtcatttacaatattcatacgagagaagtgtgggaactcaaccccccggaagttgaggacagcgtactgcagtacgccgcctggggcgtgcaggggcaacagctcatctatatcttcgagaataatatttattatcagcccgacatcaagtcctcaagtcttaggcttacaagttccggaaaagaagaaatcatcttcaatggcatcgccgactggctgtacgaagaggagctgttgcatagtcatatcgcacattggtggagcccagatggggaaaggctcgcctttctcatgataaacgacagcctggttccgactatggtgattccccgtttcactggcgccctttatccgaagggaaagcagtatccttaccctaaagcaggtcaggtcaaccctaccatcaagctgtatgtcgtcaacctgtatggcccaacacacaccctggagctcatgcctcccgactcctttaaatctcgggagtactacataaccatggtgaagtgggtatcaaatacaaaaactgtagtgcgctggttgaacagagcccagaacatctccatccttacagtctgcgagacaacaactggagcttgtagcaagaagtacgagatgacatccgatacttggcttagtcagcaaaacgaggaaccggtttttagccgcgacggctctaaattcttcatgacagtacctgtgaagcaagggggaaggggagaattccaccacgtagcaatgtttcttatacagagcaaaagcgaacagattacggtgagacacctgacctccggaaactgggaagtgatcaagatactggcctatgacgagacaactcaaaaaatctacttcctctccactgagagtagtccccgcggcagacagctgtactccgcttccactgaaggactcctgaacaggcagtgtatctcttgcaattttatgaaggagcagtgtacctatttcgatgctagcttctctcccatgaaccagcattttctcctattctgtgagggacccagggtgcctgtggtatccctccactccacagataacccagccaagtattttattctcgaatcaaactcaatgctgaaggaagctatactgaagaaaaaaattggcaaacctgagatcaagattctgcatatcgacgactatgagctgccacttcaactcagtcttccaaaggactttatggaccgcaatcaatatgctttgctgctgattatggatgaagaacccgggggccagctggtgactgataagtttcacattgactgggactcggtattgatcgatatggataatgtgattgtagcccggtttgacggtaggggctccggcttccagggactgaaaatcttacaggagattcaccgacgtttggggagcgttgaagtaaaggaccagattacggccgtgaaatttctgctgaaactgccttatatcgattctaaaagactgtcaattttcggaaagtag

SEQ ID NO: 114681 - DNA, 2241 bp, synthetic construct
  misc_feature 1..2241: note = Description of Artificial Sequence: Synthetic coding sequence
  source 1..2241: mol_type = other DNA
atgtctgttatcctgctgactccagacgaactgacaaacagctccgagactcggctgagtttagaggacctgtttcggaaagactttgttctgcatgatcccgaggcaagatggattaatgatactgacgtcgtttacaaaagcgaaaatgggcacgtgatcaagctgaacatagagacaaatgctaccaccttgttactcgaaaatactacattcgtcacattcaaggcttcaaggcactctgtttcccctgatctgaagtacgttcttctcgcctacgacgttaagcagatatttcactattcttacaccgcctcatatgtaatatacaatatccacactcgcgaagtgtgggaactcaatcctcctgaggtcgaagatagtgttctgcaatacgcagcctggggcgtccaaggtcagcagctgatttatatttttgagaacaacatctactaccagcccgatatcaagtccagcagtctacggcttactagtagcggaaaggaagagatcatattcaatggcatcgcagactggctttatgaagaggaactactgcactctcatatcgcacactggtggagtccagacggcgaaagactggccttcttgatgatcaatgactcactcgttccaactatggtcattccaagattcacgggagcgctgtatcctaaggggaaacagtacccctacccgaaagcgggacaggttaatccaacaattaagctgtacgtagtgaacctttatggtcccacacatacactggaactgatgccgcctgattcattcaagtcaagggaatactatataacaatggtgaaatgggtttccaacacaaaaaccgtcgttaggtggttaaatagagcacaaaacatttccattctgaccgtgtgtgagaccacaaccggagcttgttctaagaaatatgagatgaccagtgacacgtggctgtcccagcagaacgaagaacccgtgttcagccgtgacgggtctaagttctttatgactgttcccgtgaagcaggggggcaggggtgagttccaccacgtggcaatgttcttaatccaatcaaaaagtgaacagataacagttaggcatctcacctccggcaactgggaagtgattaaaattttggcctatgacgagaccacccagaagatttacttcctctcaaccgagagttccccccgtggtcgtcagctttactctgctagcacggagggattactgaatcgccagtgcatctcatgcaatttcatgaaggagcagtgtacttactttgatgcctctttttccccaatgaatcagcattttctgctcttctgtgagggcccccgtgttcctgttgtttctctccattctaccgacaaccccgctaaatactttatcctggaatctaacagcatgctgaaagaagcgattctgaaaaagaaaattggcaagcctgaaatcaagatcctgcacattgacgattatgagctgcctctacagctgtccctgccaaaggacttcatggaccggaaccagtacgcactgctactgatcatggatgaggagcccggcgggcagcttgtgactgataagttccacattgactgggactccgtgctgatcgacatggacaatgtgatagttgcccgttttgatggccggggctcaggctttcaaggactgaaaatccttcaggagattcaccgccgcctcggttccgtggaagtgaaagaccagatcacagccgtcaaattcctcctgaaactcccatatatcgacagcaagcggttatccattttcggtaaaggttatggaggttacatcgcttctatgatccttaagtctgatgagaaactgttcaagtgtggttcggtggtcgctccaattaccgacctgaaactctatgcctcagcgttttccgaacggtatctgggcatgccttctaaagaggagtctacctatcaggcagcatcagttctacataacgtccacggcttgaaggaggagaatatcctaattatacacggcaccgctgataccaaggtgcatttccagcactcagctgaactaatcaagcaccttattaaggccggggtgaattacaccatgcaggtgtatcctgatgaggggcataacgtaagcgagaagagtaagtaccacctctactcgaccatcctcaaattctttagcgactgcctgaaagaggagatcagtgtgctgccccaggaacctgaagaagatgaatag

SEQ ID NO: 114682 - DNA, 954 bp, synthetic construct
  misc_feature 1..954: note = Description of Artificial Sequence: Synthetic coding sequence
  source 1..954: mol_type = other DNA
atggcagacacgcagtacattctccccaacgacattggggtaagcagcctcgactgtagggaggcctttcggctcctcagcccaaccgaaagactgtacgcgtaccacctgtcaagggctgcgtggtatggcgggcttgctgtgctgttacagacctcacccgaagctccttacatttatgctctgctgagccggcttttccgggcacaggatccggaccagctgagacagcatgctctggcagaaggcctaaccgaggaagagtaccaagccttcctcgtgtacgctgccggagtctattccaacatggggaactacaaatcatttggcgatacaaagttcgtacctaacctgccaaaagaaaaactagaaagagttatccttgggtctgaagccgcccaacagcatcctgaagaggtccgaggactgtggcagacctgtggagaattgatgttcagtctggagccccggttacgccatctcggcctgggcaaggaaggcatcaccacctacttttcagggaactgtacgatggaagatgcccgggttcgtctggataggtccaagatccggtctgttggcaaaccagcactggagcggttcctgcggcgcctgcaggtgctaaagtcaacgggggatgtggccgggggcagggctctgtacgagggttatgctacggtaacagacgcacccccggaatgctttctcactctgcgcgatacggtgctgctgcgcaaggaatccagaaagctgatcgtgcagcctaacacccgcttggagggcagtgacgtgcagctattagagtacgaagcctccgcagcgggcctcattcgtagtttctccgagagattcccggaggacgggcctgaactggaggagatcctcacacagctagctactgcagatgccaggttttggaaaggacctagcgaagcccccagcgggcaggcatag

SEQ ID NO: 114683 - DNA, 2214 bp, synthetic construct
  misc_feature 1..2214: note = Description of Artificial Sequence: Synthetic coding sequence
  source 1..2214: mol_type = other DNA
atggcggatacacagtatatactgcctaacgatattggggtgtcaagcttagactgtagagaagcgttccgtctgctgagccccacagaacggttatacgcttaccacttgtcaagggcggcctggtacggcggcctagcggtattgttgcagaccagcccagaggcaccttatatttacgcattacttagtagattgttccgcgcgcaggaccctgaccagctccggcagcacgcactggccgagggcctgactgaggaggagtatcaggcttttctcgtgtacgcggccggggtgtattccaatatggggaactataaatccttcggcgataccaagttcgtcccaaatttacccaaagagaagcttgagcgggtgattttgggatctgaagccgctcagcagcaccctgaagaagtgcgcggattatggcaaacctgcggcgagctcatgttctccctggagccaaggctcaggcatctgggccttggcaaagaagggatcaccacttatttcagcgggaattgtacaatggaggatgctaagctggcccaggactttcttgattcccagaacctgtccgcttacaatactagattattcaaggaagtggatggcgagggaaaaccttactacgaggtgagactggctagtgtgctaggctccgagcctagcctagactctgaagtaacctctaaactgaaatcatatgagttcagggggtctcctttccaagtgacccgaggagattacgcacctattctgcagaaggtagttgagcagctggagaaagctaaggcctacgccgctaatagccaccagggccagatgttagctcagtacattgagagcttcacgcagggtagtattgaagcccataagaggggttctagattctggatacaggataagggacctattgttgagagctatataggctttatcgagtcttaccgagatccatttggctcgagaggtgagtttgaggggtttgtcgccgtagtgaataaggctatgagcgccaagttcgaaagactggtggcctcggccgaacagctgctaaaggaattgccctggccccctacgttcgagaaagacaagttcctgacacctgacttcacatcactcgacgtgctcacatttgccggatctggcatacctgccggaattaacattccaaattacgatgatctgcgccagaccgaaggtttcaagaacgtttctctcggcaatgttttagcagtcgcatatgcaacccagcgcgagaaattgaccttcctggaggaggacgataaagatctgtatattctgtggaaggggccatcattcgacgtccaggtgggtctgcacgagctccttggtcatggatcagggaagctcttcgtgcaggacgaaaagggggcattcaatttcgaccaggaaacagttattaaccccgagacgggagagcagattcagtcctggtatcgcagtggcgagacctgggacagcaaattctctacaattgcaagctcttatgaagaatgccgcgccgaatcagtgggtctgtacctgtgtctccatccacaggtcttagagattttcggttttgaaggtgcagacgcggaagacgttatctacgtgaactggctgaacatggtgcgggccggactcctggccctggagttctatacccccgaggcttttaattggaggcaggctcacatgcaggccagatttgttatcctgcgggtcctgctcgaagccggagagggcctggtgacaattaccccgactaccggctcagatggtagacccgatgcacgtgtacgcctggaccgaagcaagattcggagtgtcggaaaacccgcgcttgagcgatttttgcgacgccttcaggtcttaaagagtacaggggacgttgcaggaggcagagcgctgtacgaaggctatgcaaccgtgacagatgctcccccagagtgctttcttactctgagagatactgtgttactcagaaaagaaagtaggaaactgatcgtccagcctaacaccaggctggagggaagtgatgtgcagctgctagagtacgaggctagcgctgccggactcatccgctcattcagcgagcggttccctgaggatggcccggaactggaggaaattctgacgcagctggctaccgccgatgctaggttctggaagggcccgagcgaggctccatcaggacaggcctag

SEQ ID NO: 114684 - DNA, 2214 bp, synthetic construct
  misc_feature 1..2214: note = Description of Artificial Sequence: Synthetic coding sequence
  source 1..2214: mol_type = other DNA
atggccgatacccagtatatcttgccaaacgacatcggcgtaagctccctcgactgtcgggaggctttcaggcttttaagtccaacagaaagattgtacgcgtaccacctctcaagggctgcctggtacggtggcctggctgtgctgctgcagacaagtcccgaagccccctacatctacgcattgctgagcagattgtttcgggcccaggacccagatcagctgcgacagcacgcactggcagagggtctgacggaggaggagtatcaggcctttttggtttacgctgcaggagtgtacagcaacatgggtaattataaaagcttcggtgacacaaagttcgtgcctaacctgcccaaggaaaagctagaacgtgtaatcttgggcagcgaggctgcccagcagcaccctgaggaggtcagggggctgtggcagacatgtggcgagctgatgttttccctcgagccccgtctgagacatttgggcttgggtaaggagggcattaccacatacttttctggaaactgtaccatggaggacgccaagctagcccaggactttctggacagtcagaacctgtccgcgtacaacaccaggttgttcaaagaggttgacggcgaggggaaaccctactatgaggtacgcctggcttcagtattagggagcgaacctagcctggacagcgaagtcacgagcaagctcaaatcttacgagttccgtgggtctccattccaggtgactaggggcgactacgcaccaattttacagaaagtagtggagcaactggaaaaagccaaggcttacgccgccaactcccaccaggggcagatgctcgctcagtatatagagagtttcactcaggggagcattgaggcacacaagcgcgggagtaggttctggattcaggataagggacccatcgttgaatcctacattggcttcatcgaatcctacagagaccccttcggtagtaggggcgagttcgagggatttgtggcagtggttaacaaagctatgtccgcgaagtttgaaaggctagttgcctccgccgagcagctcctgaaagaactcccttggcctcctacattcgaaaaagataagttcttgactcccgactttaccagcctggatgtgcttacctttgcaggatcgggaatcccagctggcatcaacattccaaactatgatgacctgagacagactgaaggttttaagaatgtgtcactggggaacgttctggctgtggcgtatgctacccaaagggagaaactgacgttcctggaggaggacgataaagatctttatatcctgtggaaaggcccgtccttcgatgttcaggttggtctgcatgagctgcttgggcacgggtctggcaagctgttcgtgcaagacgaaaaaggtgcattcaacttcgaccaggaaaccgtaattaaccctgagacaggcgaacagatccaatcatggtacaggagcggggaaacatgggactctaaattctccacaatcgcatcctcatatgaagaatgccgggcggagtcggtagggctgtacctgtgtctccacccacaagtcttggaaatttttgggttcgagggcgccgacgcggaggatgtgatttacgtgaactggctcaatatggttagggccggtctcttggcgctcgagttctacactcctgaggctttcaactggaggcaggcccatatgcaggctcgctttgtaatcctgcgggtcctcctggaagctggggaagggttggtgaccatcacacccaccaccgggagcgacggcagaccagacgcccgagtgcgcttagatcgaagtaaaatcagatccgtaggtaaacccgccttggagagatttctgcgcagattacaggtcctgaaatcaacgggcgatgtggccggtggtcgggccttgtatgaggggtacgccacagtgacggatgctccccccgaatgcttcctgaccctgagagacacagttctactgagaaaagaaagtcgaaagctaatcgtgcagcccaatacacgtctagaaggctccgatgtgcagctacttgagtatgaggcctccgcggccgggctgattcgctctttctccgaacggtttccagaggacggcccagaattagaggaaatcctgacgcagctagccacagccgacgcgagattttggaagggcccttccgaagcaccctctggacaagcttag

SEQ ID NO: 114685 - DNA, 273 bp, synthetic construct
  misc_feature 1..273: note = Description of Artificial Sequence: Synthetic coding sequence
  source 1..273: mol_type = other DNA
atggccgacacacagtacattctgcctaatgatattggggtgagttctttggattgccgtgaggctttccgactgctgagccctaccgagcgactatacgcctatcaccttagtcgcgcagcctggtatgggggattggccgtattgctccagaccagccctgaagctccttatatatacgctctactgtctcggctcttccgtgcccaagatcccgatcagctcagacagcacgctctggctgaggggctcactgaagaggaatatcagtag

SEQ ID NO: 114686 - DNA, 606 bp, synthetic construct
  misc_feature 1..606: note = Description of Artificial Sequence: Synthetic coding sequence
  source 1..606: mol_type = other DNA
atggctgatacgcagtatattctccccaacgacatcggtgtgtcgtctctggattgtcgcgaggcattccggctgttgtcacctactgaaagactttatgcctatcacttatcccgcgccgcatggtatggcggtctggccgtacttctccaaacgtctccagaggccccctacatttacgcgctcctttctagactgtttagagcacaggatcctgaccagttgcgacagcacgccttggccgaggggttgactgaggaggagtaccaggcttttctggtgtatgctgctggagtctattcgaatatgggtaattacaagagtttcggggataccaaatttgtgcccaatttaccaaaagagaagcttgaacgcgtaatcttaggctccgaagctgcccaacagcatcctgaggaggtgaggggcttgtggcagacttgcggggaactcatgttttctctggagcccagactgaggcacctaggcctcggtaaagagggtataactacatacttcagcggaaattgcacgatggaagacgccaagctcgcacaagactttctggactctcagaatttgtcagcttacaataccagactcttctag

SEQ ID NO: 114687 - DNA, 2274 bp, synthetic construct
  misc_feature 1..2274: note = Description of Artificial Sequence: Synthetic coding sequence
  source 1..2274: mol_type = other DNA
atgggtgagcccgaggcaggttcggagttcgctaatggagccgctgcagccgccggccccatggctgacactcagtatattctgcctaacgatatcggagtgtcatcgctagattgccgggaggcattccgccttctctcgcccacagagagactgtatgcataccacctcagcagagccgcctggtacggcggtctggctgtgcttctacaaaccagccctgaggcaccttacatttatgctttgttgtctcgactgtttcgagcccaggaccctgatcaactacgacaacacgcattagctgaaggcctgacagaagaggaataccaggcatttctagtttacgcggccggtgtctactccaacatgggtaattataagagttttggcgacacgaaattcgtaccgaatttgcccaaggagaaactggaaagagtgattctgggcagcgaagcggctcagcagcacccagaagaggtgaggggactttggcagacctgcggagagctgatgttcagcttggaaccacgtctccgccacttgggcctggggaaagagggtataacaacatacttctcaggaaattgcactatggaggacgccaagctggctcaagacttccttgattcacagaacttatcggcctataatactcgcttatttaaagaagtggatggcgagggaaaaccctattatgaagtccgactcgccagtgtgctgggctccgaacctagcctggattcagaagtgacatctaagctgaagtcctatgagtttcgtggttctccattccaggtcacccgcggtgactatgctccaattctacaaaaggtcgtcgagcagcttgagaaggcgaaggcatatgctgccaattcacaccagggacagatgctcgctcaatacatcgagagcttcacacaggggtcgatcgaagcccataaaagggggtctcggttttggatccaggataaaggacccatagtggagagctacatcggatttatcgagagttacagggatccattcggatctcggggagaattcgagggctttgtcgccgtggtgaataaggcaatgagcgcaaagtttgagcggttggttgctagcgcagaacaattgttaaaagagctgccctggcctcctacctttgaaaaggataagttccttaccccagacttcacctccctggacgttttaacatttgctgggtctggcattccagccggcattaacattcctaactacgacgacctgagacaaaccgaaggattcaagaacgtgagcctgggtaatgtgcttgcagtcgcctacgccacgcagagggagaaactgactttcctcgaagaagacgataaagacctctacatcttatggaaggggcctagttttgacgtgcaggtggggctccacgaactcttgggtcacggaagcgggaaactgttcgtgcaagatgaaaaaggagcctttaactttgatcaagaaacagtgatcaaccccgagaccggagaacaaatccagagctggtatcgatcaggggaaacctgggacagtaagttttccactatcgcaagttcctacgaagagtgccgcgctgagtccgtggggctctacttgtgcctgcatccccaagttcttgagattttcgggttcgagggtgcggatgccgaggatgtgatttacgtgaattggctgaacatggtgcgagccggattgctagccctggaattctacactcccgaggcttttaattggaggcaggcacatatgcaagcaagatttgtgatactcagggttctgctcgaggcaggcgagggcctggtgacaatcacccctaccacaggatcagacggaaggccagatgctcgagtccgcttggaccgaagtaagattagatctgtcggaaagccagcattggaaagatttctgcggaggctgcaggttttgaaatcaacaggggatgtggctggaggcagggcattgtacgaggggtatgctacagttacggatgcccctcctgagtgcttcctgaccctgcgggatacagtgcttcttagaaaagagtctagaaagctgattgttcagcctaatactcggctcgaggggagtgatgttcagctgctggagtacgaagcatcggccgcaggtctgatccggtctttcagcgagagattccccgaggatggacccgagttggaagaaattctgactcaactggctacggctgatgctcgcttctggaaaggaccatccgaggccccttcaggccaggcatag

SEQ ID NO: 114688 - DNA, 2271 bp, synthetic construct
  misc_feature 1..2271: note = Description of Artificial Sequence: Synthetic coding sequence
  source 1..2271: mol_type = other DNA
atgggggagcccgaggccggttcagaattcgccaacggggccgccgctgctgggcctatggcagatactcagtacattttgcccaacgatatcggtgtgtctagcctcgattgtcgagaagcttttcgactgctgtctccaacagagaggctctatgcgtatcatctgagtcgggctgcctggtacggaggattggctgtcttgctgcagacttcacctgaagcgccgtacatctatgctttactcagccgcctgtttagggctcaagatcctgaccagttaagacaacatgcactggctgaaggcctcactgaggaagagtatcaggcatttctggtgtatgctgctggagtgtacagcaatatggggaattacaagtctttcggcgacacaaagtttgttcctaacctacccaaggaaaagctggagagagtgatactggggtccgaggccgcacagcagcatccagaagaagttcggggactgtggcaaacctgtggggagctgatgttctctttagagcctcggctgaggcatctgggattgggtaaagagggaattaccacttacttttcgggaaactgtaccatggaagatgccaagctggcacaggacttcttggattctcagaatctttccgcatataatacacggctctttaaagaagtcgatggagaaggaaaaccctactatgaggtgcgcctcgcttcggtactaggatccgaaccatccctggatagcgaggtaacttcgaaactgaagtcctacgaatttaggggctcaccatttcaagtcacccgtggagactatgctcctatcttgcaaaaggtggtcgagcagctagagaaggcgaaggcttatgccgccaattcgcatcaggggcagatgctggcccaatatatcgaaagcttcacacaaggttccattgaggcgcacaagcgcgggtccaggttctggattcaggacaagggacccatcgtggaatcgtatatagggttcattgagtcatatagggacccattcgggtccaggggcgagtttgagggtttcgtggccgtggtgaataaagctatgtcagccaaattcgaaagactggtggccagcgcagagcagctattgaaagagctgccgtggccaccaacattcgagaaagataaatttctgaccccggattttacctccctggacgtactcaccttcgcaggttcaggtatccctgcagggataaacatcccaaactacgatgatcttagacaaacggaggggttcaagaatgtttccctggggaacgtgctcgcggtcgcttacgcaacacagcgcgaaaagctgacttttcttgaggaggacgacaaggatttgtatatattatggaaggggccaagtttcgacgtccaagtgggactgcacgaactgcttggccacggctctggtaagcttttcgtccaggacgaaaagggggcttttaattttgaccaagagactgtgattaatcccgaaacaggagaacagatacagtcatggtacagaagcggagagacttgggactctaagttcagcactatcgcatcgtcctatgaagagtgtcgggccgagtccgtcggactttatctttgcctgcacccacaggttctcgagatttttggcttcgagggcgctgatgctgaggatgtcatctatgtgaattggctgaatatggtcagggctggcctgctggcactcgaattttatacccccgaagcctttaattggcggcaggctcacatgcaggcgaggtttgtgatcctgcgggtgctgctggaggctggcgagggcttggtaactatcactcccacaacgggatcagatggacggcccgatgctagagtacggttagataggtcaaaaatccgctccgtggggaaaccggctctcgagaggttccttagacgcctccaggtgctcaaatcaaccggagatgtcgctggcgggcgggccctgtacgagggatatgcgaccgttactgatgctccaccagagtgctttttgacccttcgagacacagtgctgctccggaaggaatctaggaaactaatcgtccaacctaacactagactggaaggctctgatgtgcagcttctggagtacgaggccagcgctgccgggctcatccgcagtttttccgaacgtttcccagaagatggtccggagcttgaggaaatcttgactcagctagcaactgcagatgcccgtttctggaaggggccgagtgaagctccctccgggcaggcttag

SEQ ID NO: 114689 - DNA, 2214 bp, synthetic construct
  misc_feature 1..2214: note = Description of Artificial Sequence: Synthetic coding sequence
  source 1..2214: mol_type = other DNA
atggctgacacccagtatatcctgccgaatgacattggcgtgtcatctcttgattgcagagaagcgtttcggcttctctctcctactgagagactgtatgcttatcatctctctagggcagcctggtacggcggattggcagtgttactgcagactagtcctgaggccccatacatatatgccctgttatccagactcttcagggcacaggatccagatcaattgaggcagcatgccctcgcagagggactcaccgaggaagagtatcaggcgttcctggtctatgcggcaggggtgtactccaacatgggcaactataagagttttggcgacacgaaattcgtccccaacctgccaaaagaaaagctcgaacgggtgatcctcggaagcgaagctgcgcagcaacatcctgaggaggtgagagggttatggcagacttgtggagaactcatgttctctctcgagccacggttgagacatctcgggcttggaaaagagggtattaccacctacttttcaggaaattgcaccatggaggatgcaaagctagcccaagattttctcgacagtcaaaacctgtccgcttataacacaaggcttttcaaggaggtagacggagagggtaagccctactatgaggtaaggctcgcctcagtactcggctccgaaccatcactagattccgaggtaacaagtaaactaaagtcatacgagtttcggggctccccatttcaggtcactagaggggactatgccccaatcctccaaaaagttgtggagcagttagaaaaagcaaaggcctatgctgcgaattcacatcagggccagatgctggctcaatatatagagtcctttacgcagggatcaatcgaggcccataaaagggggtccagattttggattcaggacaagggacccatagtcgaatcctacatcggctttatcgaatcttaccgggacccttttggttctaggggcgagtttgagggcttcgtggctgtggtcaacaaggctatgtcggcgaagtttgaaagactggtggctagcgcagagcagctgttgaaggagctgccttggccacccaccttcgagaaggataagttcctgacacccgacttcaccagtctggacgtactaaccttcgctggttctggaatcccggcaggcattaatattcccaactacgacgacttaaggcaaacggagggtttcaagaatgtaagcctaggtaatgtgctggctgtggcgtacgccacccagcgggagaagcttacatttcttgaggaagacgataaggatttatacatactgtggaaaggcccctctttcgacgtgcaagttggtctgcatgaactgctgggacacgggtctggtaagcttttcgtccaggatgagaaaggcgctttcaatttcgatcaggaaactgttataaatccagagacaggtgagcaaattcagtcctggtatagatcaggagaaacatgggactccaagttctctacaatcgcttccagctatgaagagtgccgcgctgaatcagtaggactctacctgtgcctgcaccctcaggttctggagattttcgggttcgaaggcgcagacgcagaggacgtaatctatgtgaactggttgaacatggtccgggctgggctcctggctctagagttttacacgcctgaagcctttaactggaggcaggcccatatgcaagctaggttcgtgattctgagagtcctgttggaagcaggcgaagggttagtgacaattactccaacgaccgggagcgatggccgccccgatgcacgcgtgagactcgacaggagtaagattcggtccgttggtaagcccgcactcgaaagatttctccggagattgcaggtgcttaagagcaccggcgatgtggctggcggtagagcgctgtacgagggatacgcaaccgtcaccgacgccccaccggagtgcttcttaactttaagggacacggtgcttcttcggaaggagtcccgaaaactgatcgtccagcccaacacacgactcgagggctctgatgtgcagctgcttgagtatgaagctagcgctgccggattgatccggtcatttagcgagcgattccccgaagacggcccggagcttgaggagatcctcactcaactcgccaccgctgacgcccgtttctggaagggaccttccgaagcaccatcggggcaggcatag

SEQ ID NO: 114690 - DNA, 1908 bp, synthetic construct
  misc_feature 1..1908: note = Description of Artificial Sequence: Synthetic coding sequence
  source 1..1908: mol_type = other DNA
atgggaaactacaaatctttcggcgacacgaagttcgtgccaaatctcccaaaggagaagctagaacgggttattcttggatcggaggccgcccagcagcaccccgaagaggtacgtggcctatggcaaacatgtggtgagttgatgtttagtttggagcccaggctgcgccatctgggacttggcaaggagggaatcacaacttatttttccggaaattgcaccatggaggatgcgaagctcgcccaagactttctcgatagtcaaaatctgtcagcttataacacacgtttgtttaaagaggtcgatggcgagggtaagccttattatgaggtgaggctggcgagtgttttaggatccgaaccttcactcgatagcgaagttacttctaaactcaaatcctacgagtttcgcgggagccccttccaggtaacccggggtgattatgctccaattctacagaaagtcgttgaacagctggaaaaagctaaggcctacgccgcgaactcccatcagggacaaatgctcgctcagtacatcgagagctttacgcaagggagcattgaggctcataagagagggagcaggttctggattcaggataagggtcccattgttgagtcctacattggattcattgaatcatatagagaccctttcggctctcgcggtgaatttgaaggcttcgtggctgttgtgaataaggcgatgtcagcgaagttcgagaggctcgtggcgtccgccgagcagctcctgaaagagctcccctggcctccaactttcgaaaaggacaagttccttacgcccgactttacgtccctcgatgtgctcaccttcgcaggctccggcatccctgccggaatcaatattcctaactatgacgatctgaggcaaacagagggattcaagaacgtcagcctaggaaacgtgctggctgtcgcctacgccacacagcgggagaaactcacttttctggaggaagacgataaggacctgtacattctatggaaggggccctcctttgatgtgcaggtggggctgcacgagctcctgggacatggctcaggaaagctgttcgttcaggacgagaagggcgcttttaacttcgatcaggagacagtcattaaccccgaaacaggcgagcagattcaaagctggtacagaagtggggagacgtgggattctaagttttctacaatagcatcttcttatgaggagtgccgggccgagtctgtggggctctatttatgtcttcatccacaggtgctcgagatctttggcttcgaaggtgccgacgcggaggatgtcatttacgtcaattggctaaacatggtcagggcgggccttctggccctggagttctatactccggaggcgtttaattggcgccaggctcacatgcaggcccgcttcgtcatcctgcgggtgctcctcgaggctggggaagggctcgtgacaataacgcctaccactgggagcgacgggcgaccagacgctcgggtgagactggatagatcaaagatccgatcagtgggtaagcctgcactcgaaaggttcctgaggagattacaggtgcttaaatcaaccggtgatgtggcaggaggtagggctctttatgagggctatgccacagtgaccgacgctcctcccgagtgcttccttacgctacgggataccgttctccttaggaaagagtccaggaagttgattgtgcagcccaacacccggctggaaggtagcgacgtccagctgctggagtatgaagctagcgccgctgggctgatccgttcttttagcgagcgattccccgaggatggtcccgaactggaggaaattctgacgcagctcgccaccgccgatgcgcggttctggaagggaccaagtgaagcacctagcggccaagcctag

SEQ ID NO: 114691 - DNA, 2412 bp, synthetic construct
  misc_feature 1..2412: note = Description of Artificial Sequence: Synthetic coding sequence
  source 1..2412: mol_type = other DNA
atgactacagccaaagagccaagtgccagtggaaagtctgtgcagcagcaagaacaagagttggtgggctctaatcctccacaacggaactggaagggcatcgctatcgccctattagtgattctggtcatctgctccctgatagtgaccagtgtgatcttgctgacccccgcggaagataacagtctgagccaaaagaaaaaagtcaccgttgaagatctcttctctgaggactttaaaattcatgatcccgaagctaagtggatctcagacacagaatttatttatagagaacagaagggaacagtcagactctggaacgtggagacaaatacttcaacagtgctcatagaaggaaagaagattgaatccctccgcgccattcggtacgaaatttccccagatagagaatatgccctcttcagttataatgtggagcccatctaccagcacagctacaccggctattatgtgctgtccaagatccctcacggagatccccaatcactggaccctcctgaagtttctaacgccaagttacagtacgcaggctggggccccaaagggcaacagctgatcttcatctttgagaacaacatttattactgcgcccacgtgggaaagcaggctataagggtagtgtcaactggcaaagagggtgtcatttataatggtttgtcagattggctgtatgaggaagagatactgaaaacccatatcgctcactggtggtctccagacgggacgaggctggcgtatgcggctataaacgacagcagagtccccattatggagcttcctacatataccggcagtatatatcccactgtgaagccgtatcattatccaaaggccgggtccgaaaatccaagcatctccctacacgtcatcggccttaacggaccaactcatgatttagagatgatgccgcctgatgacccaagaatgcgtgaatattatatcacaatggttaaatgggcaacctcaacaaaggttgcagtcacgtggttaaatagggcccagaatgtttcaattctaactctgtgtgacgctaccaccggggtgtgtactaagaaacatgaggacgaatccgaggcctggctgcaccgccaaaatgaggaacctgtatttagcaaggatggaagaaaatttttttttataagagctatcccacagggcggaaggggtaagttctaccacatcacagtgtcctcatcacagcccaattcttccaatgataatattcagtcaattacctctggagactgggacgtgacaaaaatcctggcctatgacgaaaaaggtaataagatttatttcctttctacagaggatctacctagacgcaggcagctgtacagcgcaaataccgtcggcaattttaataggcagtgtctgtcctgcgacctggtggaaaactgcacctacttctccgccagctttagccattctatggacttcttcttgctgaagtgcgagggaccgggcgtgccaatggttacagtgcacaatactacggataagaagaagatgttcgatctggaaactaatgagcatgtgaagaaggccattaacgatcgacagatgcccaaagtggagtatcgggatatcgaaattgatgattacaacctccccatgcagatcctgaaaccagcaacatttactgacactacacactacccactgctgttagtggtggatggaacaccgggttcccaatcggtggcagaaaaattcgaggtatcctgggagacggttatggtgagctcccatggtgccgtagttgtaaaatgtgatgggcgtggctctggattccagggcaccaaactgttgcacgaggtgagaaggcgactggggctcctggaggagaaggatcaaatggaagctgtccgcactatgttgaaggaacagtacattgatagaaccagagtcgccgtctttggcaaggactatggagggtatttatctacctatatcttgcctgctaagggagagaatcaggggcagacctttacgtgtggatcagccttgagcccaattaccgattttaagctctacgctagcgctttttcagagagatacctgggacttcatgggctggataatcgcgcctatgagatgaccaaggtagcacatagagttagcgccttagaagagcagcaattcctgattattcatcctacagccgatgaaaaaatccacttccagcataccgcagaactgatcacccagttgattagagggaaggccaattattctctgcagatctacccagatgagtcccactacttcacttcaagctccctgaaacaacatctttacagaagcataattaacttctttgttgagtgtttccgtattcaggacaagcttctgacggtcaccgctaaagaagatgaggaagaagactag

SEQ ID NO: 114692 - DNA, 2598 bp, synthetic construct
  misc_feature 1..2598: note = Description of Artificial Sequence: Synthetic coding sequence
  source 1..2598: mol_type = other DNA
atggcaagcctctaccagaggtttaccggaaagatcaacacctcaaggagcttccccgccccaccagaggcctcacacctgctaggaggccagggcccggaagaggatggtggggccggagccaaacccctgggacctagagcacaggcagctgctcctcgggagaggggaggtggcggcgggggtgccgggggtcgcccacgctttcagtaccaggcccgaagtgatggggacgaagaggacgagctggttggcagcaaccccccacagaggaattggaaaggtatagccatcgccctgcttgtaatactcgtcatttgttccctgatcgtgacatccgtgattctgctaacacctgctgaggacaactccctgtcccagaaaaaaaaagtcacggtcgaggacctgttcagcgaggatttcaagattcacgatcctgaggctaagtggatctctgatactgaattcatctaccgagagcaaaaagggaccgtgcgcctgtggaacgtggagactaacacctctacagttttaattgagggtaagaagatcgaatcgttacgggccatcaggtatgagatctcccctgaccgcgaatatgccctcttttcttacaacgtggaacccatttatcaacactcttataccgggtactacgtgctctccaagataccccacggagatccccaaagcctcgatcctccagaagtgtctaatgccaagctccaatacgcagggtggggacctaaaggccagcagctcatttttatattcgaaaataacatctattattgcgcacacgttgggaagcaggccatcagagtcgtcagtaccggaaaagaaggagtgatttataatgggttgtccgactggctatacgaagaggagatcctgaagacccacatagcccactggtggtcccctgacgggactagactggcctacgccgctatcaatgatagccgagtgccaatcatggaactgccaacttatacaggctctatttatccgaccgtcaagccataccattatccaaaggcagggagtgagaatccctctatcagtctgcatgtgattggtctgaacggccccacccatgacctggagatgatgcctcccgacgacccacgaatgcgggaatattacattacaatggtgaagtgggcaacgtccactaaagttgcggttacatggctgaatagggcacaaaatgtctctatactcactctctgcgacgctacaaccggagtgtgtacaaaaaaacacgaggacgaatccgaggcgtggctgcacagacagaatgaagaaccagtcttcagcaaggacggcaggaaattcttttttattcgagccattccacaaggaggaagaggaaaattctatcacatcacggtctcgtcatcacagccgaactcatccaatgataacattcaaagtatcacgtccggagactgggacgtaactaaaatactcgcgtatgacgaaaaaggaaacaagatctattttctttcaactgaagacctgcccagacgcaggcagctgtacagtgccaataccgtcgggaatttcaatagacaatgtctgtcctgcgatctcgtggagaattgcacctacttcagcgctagctttagccacagcatggatttctttttactgaaatgcgaaggacccggcgttcccatggtaacagtgcataacacaactgacaaaaaaaagatgtttgacttggaaaccaacgagcacgtgaaaaaggccattaacgataggcaaatgcctaaagtggagtatcgagatatcgaaattgacgactataatctgcccatgcagatcctgaagccagccacgtttactgatacaacacattatccactccttcttgtcgtcgatgggacacccgggagtcagtctgtggctgagaaattcgaggtctcgtgggaaactgttatggtctcttcccatggcgccgtggtggtgaagtgcgacgggcgcggttctggtttccagggcactaaactgcttcatgaggtgcgacggagattgggcctcctagaagaaaaggaccagatggaggccgttcgaacaatgttaaaggagcaatacatcgataggactcgcgtcgcagtctttggaaaagactatggtggatatctcagcacctacattctgcctgccaagggcgagaatcaaggacaaacctttacatgcgggtccgccctgagcccaattaccgatttcaaactctacgcttcagccttttcggagcggtatttggggctgcacggcttagataatagagcctacgagatgactaaggtggcccaccgtgtttccgcattggaggaacagcagttcctgataatccacccaaccgcagacgagaaaatccatttccaacatacagccgagttgataacgcagctaattcggggaaaggctaattattcactgcaaatttaccctgatgaatcccactatttcacaagtagttctctgaagcagcatctgtatcgctccataatcaattttttcgttgaatgctttcggattcaagacaaattgctcaccgtgacagcaaaggaggacgaagaggaggattag

SEQ ID NO: 114693 - DNA, 2406 bp, synthetic construct
  misc_feature 1..2406: note = Description of Artificial Sequence: Synthetic coding sequence
  source 1..2406: mol_type = other DNA
atgaaagaaaaggccatgattaagacggcaaagatgcaaggcaacgttatggaactcgttggttctaacccgccccaaaggaactggaagggcatcgcaattgccctgctcgttattctcgttatatgttctctgatcgttacctctgtgatcctcctgactcctgccgaggataacagcctgtctcagaagaaaaaagttacagtcgaggatcttttctctgaagacttcaaaattcatgacccagaagccaagtggatcagcgacaccgaattcatctacagggaacagaaagggactgtgcgcctgtggaatgtggaaactaatacctctaccgtcctgatcgaaggcaaaaaaatagagtctctacgggcaataagatatgagataagtccggatagggaatacgccttgtttagttacaatgtggagcctatttaccagcacagctacaccggttattatgtcctgagcaaaataccacacggcgaccctcagtcgctcgaccctcccgaggtgagtaatgcaaagctccaatatgctggctgggggccgaagggtcagcagcttatcttcatctttgaaaataacatctactattgcgcccacgtgggcaaacaagccatccgtgtcgtgagtacgggaaaggagggggttatctacaacggcttgagcgattggctctatgaagaggagatcctcaagacccacatagcccactggtggtccccagatggaacacgtttagcctatgccgctattaatgacagtcgtgtcccaatcatggagctcccaacatacaccgggtccatctatcctactgtgaaaccttaccactacccaaaagcaggcagtgagaatccttctatcagtctccatgtgattggcctcaacgggcccacacacgacctagaaatgatgcccccggacgatcctaggatgagagaatattatatcaccatggtcaagtgggccactagtacgaaggtggcagttacgtggctgaatagagcccagaatgtcagcattctgaccctgtgcgacgcaacgaccggggtgtgcaccaagaaacacgaggatgaaagtgaggcctggcttcaccgccagaatgaggaacctgtgttttcaaaagacggccgtaaatttttttttatccgggctatcccacagggcggaaggggtaaattctaccacattactgtgagctcttctcaaccaaattcgtccaatgataatattcagtctataactagcggggactgggatgtcacaaaaatcctggcctacgacgagaaagggaataaaatctattttctctcgacagaagatcttcccagaaggcggcaactgtacagcgcgaatacagtcggcaactttaacagacaatgcctatcttgcgacctggtggagaactgtacctacttctccgcttccttttcacattcgatggatttcttcctcctgaaatgcgaaggcccaggagtgcccatggtcactgtacacaatacaaccgataagaaaaagatgtttgatttggaaactaatgaacacgtcaaaaaagctatcaacgatcgacagatgccaaaagtcgagtacagggacatagaaatagacgattacaacttgccaatgcagatccttaagcccgctacttttacagacactactcactaccctttgttgttagtagtagatggaacccctggcagccagagcgttgcagagaagttcgaagttagctgggagaccgtcatggttagctcccacggtgccgtggtggtcaagtgcgatggaaggggcagcggattccagggaaccaagcttttgcatgaagtccgtcgccgcttggggctcttagaggaaaaagaccagatggaagcagtgcggaccatgctgaaggaacagtacatagacagaacaagggtcgccgtgtttgggaaagactatggaggatacctgtccacctacatcctgcctgctaagggagaaaatcaaggccagaccttcacatgtggatccgctttatccccgatcacagattttaagctgtacgcatctgcattcagtgagaggtatcttggcctgcacggtcttgacaatcgcgcctatgagatgacaaaggtggctcacagagtaagcgccctggaggagcagcagttcctcatcatccatccgactgcggatgagaagattcattttcagcatacggccgagcttattacacagctcatccgcggtaaagctaattactcgcttcaaatttatcccgatgagagtcattacttcaccagtagtagcttaaagcagcacttgtacagatctatcattaacttctttgtggagtgctttagaattcaagataaattgctgaccgtaactgccaaggaggacgaagaagaagactag

SEQ ID NO: 114694 - DNA, 2277 bp, synthetic construct
  misc_feature 1..2277: note = Description of Artificial Sequence: Synthetic coding sequence
  source 1..2277: mol_type = other DNA
atgaccaccgctaaggagccaagcgcgtccggtaaaagcgtgcagcagcaggaacaggaactagtaggtagcaacccgccacagcgcaactggaagggaattgctattgccttgctggtgattcttgtgatatgttcgttgatcgtgaccagcgtgattctcctcactcctgctgaggacaattcactgagtcagaagaagaaggtgacagtggaggatcttttcagcgaggattttaaaatccacgaccccgaggctaagtggatctccgataccgagtttatctaccgcgagcagaagggaacagttaggttgtggaacgtcgaaacaaacacttctaccgtccttattgaggggaagaaaatagaaagtctgcgagctatcagatacgagatatcaccagaccgggagtatgctcttttttcctacaacgtcgagccaatatttattttcgagaacaatatttactactgcgcccatgtgggtaagcaggccatacgcgtagtgtcaacggggaaagagggggtaatttacaacggcctttcggactggctctacgaggaagagatcttaaaaacacacatagcacactggtggtctcccgatggcacccgattggcctatgccgccatcaatgacagtcgggtccctatcatggagctccccacgtacacagggtcaatttatccaaccgtgaagccatatcactaccctaaggcagggtcagagaatccctcaatttccctgcacgtcatcggcctgaatggtcctacacacgacctcgaaatgatgcctccggacgacccgagaatgcgcgagtattatataacaatggtgaaatgggccaccagcactaaagtggccgtaacctggctcaatcgggcccagaacgtgtctattctgacactgtgcgacgccacgaccggggtttgcacaaaaaagcacgaagacgagtccgaagcgtggctgcacaggcagaatgaagaaccagtgttctctaaggatggccggaagtttttcttcatccgcgccattccccaaggcgggcgtggaaaattctatcacatcaccgtgtcctcctctcagcccaacagcagcaatgacaatatccagtccataacaagtggtgactgggatgtcacaaagatactggcctacgatgaaaaaggcaataagatatacttcttatccacagaagacttacctaggcgccgtcagctctacagcgctaacaccgtcggcaatttcaatcggcagtgtttgtcttgcgatcttgtggagaactgcacttacttcagcgcgagttttagtcacagtatggatttttttctgctgaaatgcgaggggcctggagtacccatggttactgtgcataacaccactgataaaaagaagatgtttgatcttgaaaccaatgaacacgtcaaaaaagccattaacgaccgccagatgcccaaagtggaatatagggacatcgaaattgacgattacaacctgcctatgcaaatactcaagcctgctacattcacagacacaacccactacccactcctcttggtggtggacgggacacctgggtcacagtctgttgctgagaagtttgaggtcagttgggaaactgtaatggtgtcctcccatggagccgtggtggtgaagtgcgatggcagaggcagtgggttccaggggacaaaattgctgcacgaagtccggaggagacttggtttgctggaagaaaaggaccaaatggaagcagtgaggactatgttgaaagagcaatacatagaccgtaccagagtcgcagtgttcggcaaggattatggaggatatctctccacctacatactcccagccaaaggagagaaccaaggacagacattcacttgtggatccgccctgtcccccatcacagattttaaattatacgcctctgctttctctgagagataccttggactacatggactggacaatcgggcgtacgaaatgaccaaagtggcccacagggtgtccgccctggaggaacaacagtttctcataattcacccaactgctgatgaaaagattcactttcaacataccgcagagctgatcacacagctcattaggggcaaggccaattattcactgcagatctatcccgacgaatcccactactttacaagttcctccctaaagcagcatctctaccgaagcatcatcaacttttttgtggagtgttttcgcatccaagacaagctgctgacagtcaccgcaaaggaggatgaagaagaggactag

SEQ ID NO: 114695 - DNA, 2649 bp, synthetic construct
  misc_feature 1..2649: note = Description of Artificial Sequence: Synthetic coding sequence
  source 1..2649: mol_type = other DNA
atggccgccgccatggagactgaacagctaggtgtcgagatttttgagactgcagactgtgaggagaacatcgagagtcaagatagacctaagttggaaccattctatgtcgagaggtattcttggagccaattgaagaagctgctggctgacactcggaagtaccacggctacatgatggctaaggctccccatgactttatgtttgtcaagaggaacgaccctgacgggcctcactcggacaggatttactacctcgctatgtccggtgaaaaccgggagaacactttgttctattctgagatacctaaaacaattaaccgggccgccgtccttatgttgtcgtggaagcctttactcgacctgtttcaagccacgctggactatggaatgtatagtcgcgaggaagaactgcttcgagaacgcaagcgcatcggaacagtgggaatcgcctcttatgactatcaccagggatccggaacctttctgttccaggcagggtccggcatctaccacgttaaagacggtggaccccaggggttcacccagcagccgcttcggccaaacttggtggagactagctgccccaatatccggatggatccaaaactctgcccagcagatccggactggattgcctttattcacagcaacgatatttggatatccaatatcgtaacccgggaggaacgacgtcttacttatgttcataacgagctggccaatatggaggaggatgccaggtccgctggggtcgccacttttgttctacaggaagaattcgacaggtatagcggatactggtggtgtccaaaagcggagactactccaagcgggggcaaaatattacgtattctctacgaagagaacgatgaatccgaggtcgagatcatccatgtgacctctcccatgctggagaccaggcgcgcagatagcttccgttaccccaagactggcaccgccaaccctaaagtaaccttcaagatgagcgagattatgatcgacgccgagggtcgtatcattgatgtcattgataaggaattgatacagccttttgagatcctatttgagggcgtggagtatatcgctcgcgctggctggacccccgagggtaaatatgcatggtccatccttcttgataggagccagacccgattgcaaattgtattgatatcgcctgagctatttatcccagttgaagacgatgtgatggagcgtcagaggttgattgagagcgtgccggactccgtgacgcctctgattatctatgaggagaccactgacatttggattaatatccacgatatttttcacgtatttccacaaagccacgaggaagaaattgaatttattttcgcttcagagtgcaagactggatttagacacctgtacaaaattacatcaatccttaaggagtccaaatataaaagatcgtctggggggctgcccgcaccttcagactttaagtgtcccattaaggaagaaatcgctatcactagtggtgaatgggaggttcttggacggcacggctctaacattcaggttgacgaagtcagacggttggtgtattttgaggggacaaaagattccccactcgaacatcacctctacgtggtatcatacgtgaacccaggcgaggtaactcgcttgactgatcgcgggtacagtcattcgtgctgcatttcacagcactgcgatttttttatctctaaatattctaatcagaaaaaccctcactgcgtgtcactgtataagctgagttccccagaagatgacccgacatgcaaaaccaaagaattttgggctacgatcttagatagtgccgggcctctgccagactatacacctccagagattttctctttcgagtcaacaactggttttacactatatggcatgctgtataagcctcacgacctgcagccaggcaagaaatacccaacagtcctattcatctacggcgggccgcaggtccagctcgtaaacaacaggtttaaaggagttaagtattttcgcctgaacacactggcttcccttggttatgtggtcgtcgtcattgacaatcggggatcatgtcaccggggcttgaagttcgaaggcgcattcaaatacaaaatgggccagatcgaaatcgatgatcaggtggaaggtctgcagtacctcgcttcacgctacgatttcatcgacctcgatagggtagggattcacggatggtcttatggaggttacctgagccttatggctcttatgcagcggagcgacattttccgcgtagcgatcgcgggcgcgccagttaccctctggattttctacgacacgggctacaccgagaggtatatggggcaccctgatcagaacgagcagggttactacctggggtccgtggcaatgcaagccgaaaagttcccgagtgaaccaaatcgattactgttgctgcatggttttctagatgaaaatgtgcatttcgcgcacactagcattcttctgtccttcttagttcgcgctggaaagccttacgatctacagatataccctcaggaacggcactctatacgcgtgccagagtctggcgaacattacgagctgcacttactgcactatctgcaagaaaacctcggctctagaattgccgcactgaaagtcatctag

SEQ ID NO: 114696 - DNA, 2550 bp, synthetic construct
  misc_feature 1..2550: note = Description of Artificial Sequence: Synthetic coding sequence
  source 1..2550: mol_type = other DNA
atgtggaaacggtcagagcagatgaagataaagtctggcaaatgtaacatggctgctgccatggagaccgaacagctgggggttgaaatcttcgagactgccgattgcgaggagaacatcgaaagtcaggaccgcccaaagctagaacccttttatgtggagaggtactcatggagccagcttaagaaattgttagcagacacccggaaataccacggttatatgatggccaaagcaccccacgatttcatgttcgtgaagagaaacgacccggacggcccccactctgacagaatatattacctggctatgtccggagaaaaccgcgagaatactctgttctacagcgagatccctaaaaccatcaaccgggcagctgtgctgatgttgtcctggaaacctctcttagacttgtttcaggcgaccttggactacggcatgtatagtagggaggaagagctgcttcgcgaacggaaacggatcggaactgttggaattgcaagttatgattatcaccaaggctcgggcacatttttgtttcaggcaggctccggaatataccacgttaaggatggaggacctcagggtttcactcaacagcctcttcgccccaaccttgtggaaactagctgcccaaatatcaggatggatccaaagctctgtcccgccgatccggattggattgccttcattcattccaatgacatttggatttccaacattgtgacccgagaagagcgcagacttacttatgtgcataatgaactcgccaatatggaagaggacgcgaggagcgcaggagtggccacctttgtgttgcaggaggagtttgatcgctacagcgggtactggtggtgtcctaaggcagagactaccccttctggcggaaagattctgcgcattctgtatgaggaaaacgacgagtctgaagttgagataatccatgtgactagtccaatgcttgagacgcggcgggcggatagctttcggtacccaaagacaggaaccgccaacccaaaagtgaccttcaagatgagcgagattatgattgacgcggaaggccgcataattgatgtgatcgataaggaacttattcagcctttcgaaattcttttcgaaggtgtggaatacatcgcacgcgcaggctggacacctgagggcaagtatgcctggtcaattttgctggaccggagtcagactaggttgcagatcgtgctgatcagcccagagttatttattccagtggaggatgacgtaatggagcgacagcgattgatcgagagtgtcccagactctgtcacacccctgatcatctacgaggaaaccacggacatctggataaacatacacgacatcttccatgtctttcctcaaagtcatgaggaagagatcgagttcattttcgcctcagaatgcaagacggggttccggcacctgtacaagattaccagcattcttaaagagtcaaaatacaaaagaagttcgggcggactgccggctccttccgacttcaaatgtccaatcaaggaggagatagccattacctctggcgagtgggaggtgctgggtcgacacggctcaaatatacaggtggatgaagttaggagactggtgtatttcgaaggtaccaaagattcccctctcgaacaccacctctacgtagtgtcgtatgttaaccctggcgaggtgacaagactcacagacaggggctattctcatagttgttgtataagccagcattgtgatttttttatcagcaagtatagcaaccagaaaaaccctcactgcgtttctctctataagctctctagtcctgaagacgaccctacgtgtaagaccaaggagttttgggccactattctcgacagcgcagggcctctgcccgattatactccaccagaaatattttcctttgaatccacaacaggcttcaccctgtatggtatgctttacaagcctcatgatctccagccagggaagaagtatccgactgtcctgttcatctatggtggtccacagggtcagattgagattgacgaccaagtcgaaggtctccagtacttggccagcaggtatgactttattgatcttgacagagtgggaatccacggctggagttacggtgggtatttgagcctcatggctttaatgcagaggagcgatatatttcgggtggcaatcgccggcgcaccggtcacactttggattttttatgacaccggatacaccgaaaggtacatgggacaccccgatcagaatgagcaaggatattacttggggtcagtagccatgcaagcagagaagttcccaagtgagccaaatagactgctccttttacatggttttttggatgagaatgtgcatttcgcccacaccagcattttgttgagttttcttgtgcgcgcaggtaaaccctacgatctccagatatacccccaggagaggcactcaattcgcgtgcccgagtcaggagaacactacgagttgcatctcctgcattaccttcaggagaatctgggctccagaatcgccgcactcaaggtgatttag

SEQ ID NO: 114697 - DNA, 2544 bp, synthetic construct
  misc_feature 1..2544: note = Description of Artificial Sequence: Synthetic coding sequence
  source 1..2544: mol_type = other DNA
atgtggaagaggtccgagcagatgaaaattaaatctggaaaatgcaacatggcagctgccatggagaccgagcagcttggagtcgagatatttgaaacagcggattgcgaggaaaatatagaaagccaggacagaccaaaactcgagcctttctacgtggagaggtattcctggtcacagctaaagaagctgctggcagacaccaggaagtatcatgggtatatgatggccaaggcccctcatgacttcatgtttgttaaacgtaatgatcccgatgggccacattccgacaggatttattatctagccatgtcaggagagaacagggagaatactctcttttatagcgaaattcctaaaaccattaacagagcagccgtgctgatgctgtcctggaagccattactggatctcttccaggcgacgcttgactatgggatgtactccagagaagaagaactgctccgcgaaaggaagcgcatcggcacagtgggaatcgcgtcctatgactaccatcaaggcagcggtactttcctattccaagctgggagtgggatttaccatgtgaaggatggtgggcctcaggggttcacacagcagcccttaagacccaacctggtcgagactagctgtccaaatattagaatggaccctaagctgtgtcctgccgaccctgactggattgccttcatacactctaacgacatctggatctctaacatagtaacgcgggaggagaggaggctcacctatgtccataacgagctggccaacatggaggaagacgcgcgctccgcaggtgtggcgacattcgtccttcaggaggaatttgatcgctattccgggtactggtggtgtcccaaagccgaaacaactcccagcggagggaaaatcttgagaattctttatgaagaaaatgatgagtctgaagttgagatcatacatgtgaccagtcccatgctggaaactagaagggcggacagtttcaggtatcccaagaccggaactgccaatcctaaggtgacttttaaaatgagtgagataatgatcgacgccgaaggtcgcatcatcgacgtgattgacaaggagttaatccagccttttgagatcctgttcgagggggtcgagtatatcgctagggcaggctggaccccagagggtaaatacgcctggtccattcttcttgacaggagtcagaccaggctccagattgttctcatctcaccggagctgttcatcccagtggaggacgatgtaatggagaggcagcgactgattgagagcgttccagacagtgtaaccccactgatcatatacgaagaaactacagatatttggatcaacatccatgatatctttcacgttttcccgcagtcacacgaggaggagattgagttcatttttgctagtgagtgcaaaacaggattccgacatctgtataagatcacatctatattgaaagagagcaagtataaaaggtcctccggaggactgcccgcccccagtgacttcaagtgcccaattaaggaggagattgcaattacctcaggagagtgggaagtgttgggaaggcacgggtccaacattcaggtggatgaggtgagaagacttgtgtactttgaaggcactaaggacagccccctggaacaccacctgtatgtggtaagctacgttaacccgggcgaggtcacacggctaacggatcgaggctatagccactcatgttgcatctcacagcattgtgactttttcatatcaaagtacagcaaccagaagaacccccactgcgtgagcttgtataagttgtcctcccccgaggacgatcctacgtgcaagactaaggaattctgggccaccatcctcgatagcgccggaccactgccagactacacaccgcctgagatcttctcgttcgaatccacgaccgggtttacactgtacggcatgctatacaaaccacatgacctccagcccggcaagaagtatccgaccgtcttgtttatctatggcggtcctcaggtgcaactagttaacaacagatttaaaggagtgaaatactttcgcctaaatacactcgcctcgctgggatacgtagtcgtggtgatcgataaccgcggctcttgccaccgaggcctgaaattcgaaggcgcgttcaagtataaaatggtggctattgccggtgctcctgttactctgtggattttctatgataccgggtatacggagcggtacatggggcaccccgatcagaacgagcaggggtactatctcgggtccgtcgccatgcaggccgaaaaatttccctctgagcccaatcgcttgttactcctccatggctttctggatgaaaacgtgcatttcgcccatacatcaatcctgctgagtttccttgttcgagccggcaaaccgtacgacttgcagatttacccccaggagcgccatagcatcagggtacccgagagtggggagcattacgagctccacctgctacattacctgcaggaaaatctgggaagcaggatcgcagccctgaaggtaatctag

SEQ ID NO: 114698 - DNA, 2178 bp, synthetic construct
  misc_feature 1..2178: note = Description of Artificial Sequence: Synthetic coding sequence
  source 1..2178: mol_type = other DNA
atgtggaagcgatctgagcagatgaaaatcaaatctggcaagtgcaacatggccgccgcaatggaaaccgagcagctgggcgttgagatatttgagactgcagattgtgaggagaacattgaaagccaggacagaccaaagctcgaaccattctatgtcgagcgatatagctggtcccaattgaaaaaacttctggctgatacaaggaaataccacggatacatgatggcgaaagcaccccatgattttatgttcgtgaagcggaacgacccggatggccctcactccgaccgcatctactatctagccatgtccggggagaacagggaaaacactctcttttactcggagattccaaaaacaattaatcgtgctgccgtacttatgctctcctggaaaccacttcttgatctgtttcaggcaaccttggactacgggatgtattccagggaagaggagctgctgcgcgaaagaaagcgcattgggaccgtcggcatagcctcttatgattaccaccagggaagcggaaccttcctgttccaggcaggtagcggtatctaccacgtcaaggatggcggccctcagggtttcactcagcagcccctgagacctaacctggtcgaaaccagctgtccaaatatccggatggacccgaagctctgccccgctgacccagactggattgccttcatccactccaacgatatctggatcagcaatattgtaacgcgcgaggaacgaagattgacctatgtacataatgagctcgcaaacatggaggaagatgcgcgcagcgccggtgtcgctacattcgtcctacaggaagagttcgacagatacagcggctattggtggtgcccgaaggccgagactacaccttctggggggaagatccttagaatattgtacgaagagaacgacgagtccgaagtagagatcatacacgttacatcaccaatgctcgagactagaagggccgactcattcagatatcccaagactggtaccgcaaacccaaaagttacgtttaagatgtcagagattatgattgatgcagaaggaagaatccaggttgacgaggtcaggagattggtctactttgagggcactaaagattctccacttgagcaccatctgtatgtggttagttacgtcaacccaggagaggtgacaagattgaccgatcgagggtactcccattcctgctgtatctcccagcattgcgactttttcatcagcaaatacagtaatcaaaagaacccccattgtgtgtcgctgtataagctgtcctctcccgaggatgaccccacctgcaaaactaaagaattctgggctaccatcttggactccgctggcccccttcccgactacacgccccccgagattttctcattcgagtcaacaaccggcttcactttgtatgggatgctgtataagccacatgatcttcagcccggcaaaaagtatcctaccgtcctgttcatctacggagggcctcaggttcagttagtaaacaatcgcttcaagggagttaagtactttagacttaacacattggcaagcctcggatatgtggtggtggttatagataacaggggctcttgccatagggggctgaaattcgagggagccttcaagtacaagatgggccagattgagatagatgatcaggtagagggactgcaatatcttgcaagccggtatgatttcattgacctcgaccgggtcggaatccatggctggagctacggaggctacttatccctgatggccctcatgcagcggtccgacatctttcgtgtggcaatcgccggggcacccgttactttgtggatcttttatgacacgggctataccgaacgctacatggggcaccccgaccagaatgagcagggttactatctcggatccgtcgcaatgcaggccgagaaatttccatccgagccgaatcgtctgctcttgctacacggcttcttagacgagaatgtccactttgcacatactagcatcctgctttcctttctggtaagagccggcaaaccttatgacctgcagatttacccccaagaacgtcacagcattagggtcccggaatctggtgagcattatgagctacatctgctccactatttgcaagaaaacctcggctcacgcattgcagcactgaaggtgatttag

SEQ ID NO: 114699 - DNA, 2697 bp, synthetic construct
  misc_feature 1..2697: note = Description of Artificial Sequence: Synthetic coding sequence
  source 1..2697: mol_type = other DNA
atgtggaaaagatccgaacagatgaaaattaagtccgggaagtgcaatatggctgcggccatggaaaccgaacagttaggggtggaaatctttgaaacagcggattgcgaagagaacatcgagtctcaggatcggccaaaattggaacccttctatgtggagcggtactcctggagccaactgaagaaactcctggccgatactcgcaagtaccacgggtatatgatggcgaaagccccccacgactttatgttcgtgaaaaggaatgaccccgacggcccacattctgacaggatctattacttggccatgtcaggggaaaatagagagaatacattattctatagcgagatcccaaagactatcaatagagcggctgtgctcatgctttcgtggaagcccctgctggatcttttccaggccacactggattacggcatgtattcacgggaggaagaactgcttagggagagaaagagaattggtactgtgggcattgcttcttacgattatcaccagggctccggcacgttcctgtttcaggctgggtccggcatttaccacgttaaggacggtggaccacaaggattcacacagcagccactacgaccgaatctcgtggagacctcatgtcctaatatccgtatggatcctaaattgtgtccggctgacccagactggatagccttcatccactctaatgacatttggatttccaacattgtaacaagagaggagcgtcgtttgacttacgtgcacaacgagctcgccaatatggaggaagatgctaggtccgccggcgtcgctaccttcgtgcttcaggaagaattcgaccgctactctgggtactggtggtgtccgaaggctgaaacaacaccatcaggggggaagatcctgcggattttatacgaagagaatgatgagagtgaggtggaaataatccatgttacaagcccaatgctcgagacccggagagccgattccttcagatatccaaaaactgggactgctaaccctaaggtcacatttaagatgagcgagatcatgatcgatgccgagggacgaattatagatgtaattgataaggagcttattcagccttttgagatcctgttcgaaggggtggagtacattgcacgcgccggatggacccccgagggcaaatacgcatggtcaattttgctggacaggtcccaaactcgtctgcaaatcgttctaatctcccctgagttgttcataccggtggaagatgatgttatggaaagacagcgacttatcgagagtgtacccgactcagttaccccactgatcatatacgaggagaccactgacatatggattaatatacacgacatctttcatgtattccctcagtctcacgaagaggaaattgaattcatttttgcctccgaatgcaaaactggattccggcacctttacaaaatcactagcatactgaaagaatcaaaatacaaacgctcctccggtgggttaccggctccctcagatttcaaatgtcccattaaagaggaaatcgcaattaccagtggcgagtgggaggtcctgggtcggcatggcagcaatattcaggtcgacgaggtgagaaggctggtttattttgagggtaccaaggactctccactggaacaccacttgtacgtggtgtcctatgtgaatcccggggaggtcactcggctgactgacaggggttatagccacagctgctgcatttctcagcattgcgatttcttcatctcaaagtatagcaatcagaaaaacccccattgtgtgagcttatacaagctgtcctccccggaggacgaccccacatgtaagacaaaggaattctgggccaccattctcgattctgctgggccactaccagattatactccccctgaaatattcagctttgagagtaccactgggttcaccctgtacggcatgctgtacaagccgcacgacttacaaccggggaagaagtaccctaccgttcttttcatttacggaggccctcaagtccaattggtgaacaaccggttcaagggcgtaaagtacttccgactgaacacccttgcctctcttgggtatgtcgtcgtggtgatagacaacaggggctcttgccaccgtggcctgaagttcgagggtgcctttaaatataagatgggccagattgaaattgatgaccaggtggaaggtctacagtatttagcaagcagatacgatttcatcgacctcgatcgtgtgggtatccacggttggtcgtatggaggctacctgagtctgatggcgctgatgcagagatctgatatcttccgagtggccattgcaggggcccctgttacactgtggattttctatgatactgggtataccgagaggtacatgggacacccagaccaaaacgagcaaggttactacctgggcagtgtggctatgcaggcagagaagtttccatccgaacctaatcgcctgctcctgctccacggtttcttggacgagaacgtgcacttcgcccacacaagcattcttctttccttcctggtgagagcgggaaagccttacgatttgcaaatttacccccaggaaaggcattcaatacgcgttcctgaatccggagagcattatgaactgcacctgttgcactacctgcaggagaatctgggaagccgcatcgctgctcttaaagtcatttag

SEQ ID NO: 114700 - DNA, 2349 bp, synthetic construct
  misc_feature 1..2349: note = Description of Artificial Sequence: Synthetic coding sequence
  source 1..2349: mol_type = other DNA
atggccgccgccatggagaccgagcagctgggagtggagatattcgagactgcagattgtgaggagaatattgaatcgcaggacaggccaaagttggaacctttctatgtggaacggtacagttggtcccagctgaagaagctccttgccgatactcgaaagtatcacggttacatgatggctaaggctccacacgactttatgttcgtcaagagaaatgaccctgacggtcctcatagtgaccgcatctattatttggctatgtctggcgagaaccgcgagaacactttgttctactctgagatacctaagactataaacagagccgcagtgcttatgttgtcctggaaaccactgctggatctctttcaggccactcttgattacgggatgtatagccgggaggaagaattgttgcgggaaaggaaaaggatcggtactgtcggtatcgcctcctacgactaccaccagggatctggtacgtttttatttcaggccggctcaggcatctaccacgttaaagatggagggcctcaggggtttacgcagcaacccttgcggcccaacctggttgagaccagttgcccaaatataagaatggatcccaagctgtgtccggccgatccggactggatcgcgtttatccatagtaacgacatttggatttctaatattgtgacccgggaagagcgccggttgacatatgtgcataacgagctggcaaacatggaagaagatgccaggagtgccggcgtagccaccttcgtacttcaagaggagtttgaccggtattccggctattggtggtgccctaaagccgaaaccactccatcgggcgggaaaatcctcaggatcctgtacgaggagaacgacgagtctgaggttgagataatccatgtgacgtcacctatgctcgaaacacgtcgggcagattccttcagatatcctaagacgggcaccgccaatccgaaagtcactttcaaaatgagcgagattatgatcgacgcagaaggtagaattattgacgtcatcgataaagagctgatccagccctttgagatcctgtttgagggagtggagtacatagcccgagccggctggactccagagggcaagtacgcttggagtattctgctagatcgcagccagaccaggcttcagatcgtgcttatcagcccagaactatttataccggtggaagatgacgtcatggagagacaacgcctgattgagtcggttccagactccgtcacacccctgatcatctacgaagagacgacggatatatggataaacatacacgatatcttccatgtgttcccgcagtcccacgaagaagagatcgagttcatctttgcttctgagtgtaaaactggcttcaggcatctgtataagatcacatctatcctcaaagaaagcaaatataaaagatccagcggtggtttgcccgcaccatccgattttaagtgtccaatcaaagaggagatagcaatcactagcggggagtgggaagttctggggagacatggcagcaacattcaagttgacgaggtgcgccgacttgtttattttgaagggaccaaagactctccactggaacaccatctgtacgtggtgagctacgtaaaccccggcgaggtaacccgcctgaccgaccggggttactcccactcctgctgtatcagtcagcactgcgacttcttcatatctaaatactctaatcaaaaaaatcctcattgtgttagcctctacaaactatcttcacccgaagatgaccctacttgtaaaactaaagagttctgggctactatactcgacagcgccgggcctctgcccgactatacgcctcctgaaattttctcattcgaatcgactacaggtttcacactatatgggatgctgtacaagccgcacgacttacagccagggaaaaagtacccaactgttcttttcatttatggcgggccacaggtggctattgctggagctcccgtgaccctgtggatcttctacgacaccggatatacagaaaggtatatgggacatcctgaccagaacgaacaaggctattacctgggcagcgtggctatgcaggcagagaagttcccaagtgagccgaatagactgctgttactccacgggtttctcgacgaaaacgtccactttgcccatacaagcatactcttgtcttttctggtacgggccggcaaaccttacgatttgcaaatctatccacaggaaaggcattccatccgggtcccagagagtggcgagcactacgaactgcacttgctgcattacctgcaggaaaacctcgggtcacgtatagctgccctcaaagtcatttag

SEQ ID NO: 114701 - DNA, 2697 bp, synthetic construct
  misc_feature 1..2697: note = Description of Artificial Sequence: Synthetic coding sequence
  source 1..2697: mol_type = other DNA
atgtggaaacggtctgagcagatgaagattaagagtggcaagtgcaacatggccgccgccatggaaacggaacaactgggggtcgagatattcgagacagccgattgtgaagagaatatcgaatctcaggaccggcctaaattggagcccttttacgtggaaagatactcatggtcacagctgaagaaactgttagccgacactagaaagtaccacgggtatatgatggccaaggccccccatgattttatgtttgtaaaacgcaatgaccctgacggcccccactctgacagaatttattacttagccatgtctggtgagaaccgggagaacacactcttctattccgagattcctaaaacaattaatcgagccgctgttctgatgctgagttggaagcccctgctcgatctttttcaggctaccctcgattacggcatgtacagccgcgaggaagagctcttaagagaaagaaagcgaataggcaccgtcggaatcgctagctacgattatcatcagggaagcggcacctttttgtttcaggccggtagcgggatctatcacgtgaaggacggcggcccccagggattcacacaacagcctctgagacccaatctggtcgaaacaagttgtcccaatatcagaatggatcccaaattatgcccagcagatcctgactggattgcgtttatacatagtaacgatatctggatatcaaatatcgtgactagggaagagcgtcgcttgacctacgtacacaatgagttggccaacatggaagaggatgctagaagcgccggagtggctacattcgtgctccaagaagagtttgataggtacagcggctattggtggtgcccaaaggccgaaaccaccccatcgggcggcaaaatactgagaatcctctacgaagagaacgatgaaagcgaggtcgaaatcatccacgtgaccagcccaatgcttgagacgaggagagcagattctttccgctatcctaagacaggcaccgccaatccaaaggttacttttaaaatgtccgaaattatgatcgacgcagaagggaggattatagatgtaattgataaggagttaatacaaccattcgagatactgttcgaaggggttgaatatattgccagagcagggtggaccccagaaggaaaatatgcatggtctatcctccttgatagatcgcagactaggctgcagattgtgcttatctctcccgaattgtttatccctgttgaggacgacgtgatggaaagacaacggctcattgagagcgttccagacagtgtcactcctctcattatctacgaggaaacaacggacatctggatcaacattcacgacatatttcacgtgttcccgcagtcccacgaggaggagatcgaatttatcttcgcatctgaatgcaaaaccggcttcagacacctgtacaagattacgtcaatcctgaaagagtctaagtataaacgaagcagtggaggcctgccagccccttcagattttaaatgcccgatcaaggaggaaattgcaattacctccggggagtgggaggtgctgggtaggcacggctcaaacattcaagtggacgaagtgcgcagactggtctactttgagggaactaaagactcaccattagaacatcacctgtatgttgtgtcatatgtcaacccaggggaagtgacgcgtctgaccgatcggggctactcacattcgtgttgtatctcacagcattgtgacttttttatcagcaagtattcaaatcaaaagaatccacattgtgtgtcactgtacaagctatctagccccgaagacgaccctacctgtaagacaaaagaattctgggcaaccattttggattcagccggtcccctgccagattacacaccccccgagattttttcattcgagtccacaacagggttcacactgtatggaatgttatataagccacacgacctgcagcccgggaaaaagtatcctactgtactatttatctacggaggtccccaggtccaactggtcaataatcgatttaagggagtgaagtacttcagactgaataccctcgcctctttaggctatgtggtcgtcgtcattgacaaccgaggctcttgccaccgtggcctcaaatttgagggcgcttttaagtacaaaatggggcagatcgaaattgacgaccaggtggagggcctccagtatctggccagcagatacgacttcattgatcttgatcgggtggggatccatgggtggagttatggggggtacctgtctcttatggccctgatgcagagaagtgacatttttagagtggcaatagctggagcccctgtcacactgtggattttctacgacactggatatacagaaaggtacatggggcacccggaccagaatgagcagggctactaccttggaagtgtcgctatgcaggccgagaaatttcctagtgagcctaacaggctgttgctgctgcacggtttcctggatgagaacgttcactttgctcatacctcaatcctgcttagcttcctggtgcgcgcaggaaagccttatgacctacaaatctacccccaagaaaggcacagtattcgagtgcctgagtcgggagagcactatgagctccatctgctgcattacctacaggaaaatctggggagtagaattgctgcgctgaaggtgatatag

SEQ ID NO: 114702 - DNA, 3669 bp, synthetic construct
  misc_feature 1..3669: note = Description of Artificial Sequence: Synthetic coding sequence
  source 1..3669: mol_type = other DNA
atgtctgaggcaccgagatttttcgtgggaccagaggatactgagatcaaccctggaaattatagacatttttttcaccacgccgacgaggatgacgaggaagaggacgatagcccgcccgagagacagattgtggtcggaatatgtagcatggcaaagaagagtaagagtaagcccatgaaggagattttggagcgcataagcttgtttaaatatattactgtggtcgtgtttgaagaagaggtgattttgaatgagcccgtggagaattggcctctctgtgattgcctgatctcgttccatagcaaagggttccccctggataaggctgtggcgtacgctaagttaaggaacccttttgtaattaatgacctgaatatgcagtatctgatccaagaccgacgagaggtctattctatcctgcaagctgagggaattctgcttcccaggtacgctatcctgaatagagaccctaataatccgaaagagtgcaacctgattgagggcgaggaccatgtggaggtcaacggcgaggtgttccagaagccctttgtggaaaaacctgtcagcgccgaagaccataatgtgtacatctattaccctacatctgcgggggggggctcacagcgactgttccgaaagatcggcagcaggagctctgtatacagccctgagtctaatgttcggaaaaccgggtcgtacatatacgaggagttcatgccaaccgatggaacagacgtaaaggtttacaccgtaggcccggactacgcgcatgccgaagccagaaaatcccctgccctcgatgggaaagtcgagagggattcagagggtaaggaggtacggtaccctgttatacttaacgcaagggagaagctgatcgcatggaaggtgtgtctggccttcaaacagactgtctgcgggtttgacctgctgcgggccaacggacagagctatgtctgcgatgttaatggatttagcttcgttaagaactcaatgaagtattacgatgactgcgctaagattttggggaacatcgttatgagagaattggctccacagttccacataccctggagcatcccgctcgaggccgaagacattcctatcgtacccacaacttctggaacaatgatggagctcagatgcgtcatcgccgtgattagacatggtgatcgtacacccaagcagaagatgaaaatggaagtccgccatcaaaagtttttcgacctatttgagaagtgtgacggttacaaatcaggcaagttgaagctaaagaagcccaagcagctccaggaagtactagacatagccagacagttgttgatggaactggggcagaacaacgatagtgagattgaagagaacaagcccaagctggagcagcttaagaccgtcctggaaatgtatggccattttagcgggatcaacagaaaggtgcagctgacatatctaccccacggatgccctaagactagtagtgaagaagaggacagtagaagagaggaaccatccctgctgctggtactcaagtgggggggagagttaacacccgctggacgcgttcaggccgaagagctgggccgtgctttcagatgcatgtacccgggaggtcagggtgactacgctgggtttcccggttgcggcttacttcgactgcacagcacctaccgtcacgacctcaaaatctatgcttcggacgaggggagggtgcagatgaccgctgctgccttcgctaaaggactgctggctctggaaggggagttgacacccatcctggtacagatggtcaaaagcgcaaacatgaatggactgctggattcggactccgattcactctccagctgtcagcaacgagtaaaggctaggttgcatgaaatcttgcaaaaagatagggactttaccgctgaggattacgaaaagctgactccctccggaagcatctccctgataaaatccatgcatctgatcaagaatccggtcaagacttgcgacaaggtctattccctgatacaaagcttgacctcacagatccgccacagaatggaggacccaaagtcctctgacatacaactttaccactcggaaaccctcgagctcatgctgaggagatggagtaagctggagaaagacttcaagactaagaacggccggtacgatattagcaagatccctgacatctatgattgtataaagtatgacgttcagcataacgggtcattgaagttagagaacaccatggagctctaccggcttagcaaggctctagcggatatcgttatcccacaggaatatggtatcaccaaggccgaaaagctggaaatcgctaagggctactgtaccccgctggtgagaaagattcgtagcgacctacaaaggacacaagacgatgacacggtgaacaagctgcacccagtctacagtagaggtgtgctttcccctgaaagacacgtgcggacgagactttacttcacttcggagagtcatgttcattcacttttgagtatccttcggtatggggcactgtgtaacgagagtaaggatgagcagtggaagcgcgccatggattacttgaacgtagtgaacgaactgaattatatgacacagatcgtaataatgttatatgaagatcccaacaaggacctgtcatcggaggagcgctttcatgtggaactgcactttagccccggtgctaaaggctgtgaggaagataagaacttaccttctggatacgggtatagacctgcttcacgggagaatgaaggacggcgtcccttcaaaatagataacgacgatgaacctcataccagtaagcgggatgaagtggaccgggccgtgattctatttaagcccatggtctctgaacccatccacatccatcgtaaaagccccctgcctagaagtcgcaagaccgcgacaaacgatgaagagtcccccctgtcagtgtctagccctgaggggaccgggacctggctacactatacgtccggggtcggaactgggcgcagacgacggcgcagtggggagcagattacatccagccccgtgagtccaaagagccttgccttcacttcttctattttcggaagttggcagcaggttgtgagtgaaaatgcaaattacctccgtaccccccgaactctggtggagcaaaagcaaaaccctacggtgggctctcactgcgctggattgtttagcacctccgtgctaggcggctcatcatctgctcctaatctccaggattacgcaaggacccatcgcaagaaactgacatcttccggttgcattgatggcttcgaactgtattctatggtgccctctatctgtcctttggagacgctgcataacgctctgtccctgaagcaagtcgatgaatttctggctagcattgcaagcccctcatccgatgtaccccgaaaaactgctgagatttcctccaccgcccttagatcttcccctattatgaggaaaaaagtgagtctgaacacatacacacccgccaaaattttgccaaccccacctgcaactctaaaaagtaccaaagcaagcagcaagcccgctacgtccggcccaagctcagccgtggtgccaaacacaagtagcagaaaaaaaaacatcacttccaaaaccgaaacccatgaacataagaagaacaccggcaaaaagaaatag

SEQ ID NO: 114703 - DNA, 3732 bp, synthetic construct
  misc_feature 1..3732: note = Description of Artificial Sequence: Synthetic coding sequence
  source 1..3732: mol_type = other DNA
atgagcgaagccccgaggttcttcgtaggtcccgaagataccgagataaatcccggaaactaccgacacttttttcaccacgcagacgaggacgatgaagaagaggacgattccccaccagagcggcagatcgttgtgggaatctgcagcatggctaagaagagcaagagcaaacccatgaaagagattctggaacgcatctcactgttcaaatacattaccgtagtggtgtttgaggaggaggttattctgaacgagcccgtggagaattggcccctgtgcgactgtctgatttcattccatagcaagggcttccccctggacaaggccgtggcatacgcgaagcttcgtaacccttttgtaatcaatgatctcaatatgcagtacctgattcaggaccgccgcgaggtttattccatcctgcaggcagaaggtattcttctccctaggtacgccatcttgaatagggatcccaacaaccctaaagaatgcaatttgatagaaggcgaggatcatgttgaggtgaatggcgaagtattccagaagcccttcgtggagaaaccagtctctgccgaagatcacaacgtgtatatatactaccctacctctgctggaggcggatcacagcgactcttcagaaagatcgggtctcgcagctctgtgtactccccggagagcaacgtccgcaagactggctcttatatatacgaggaattcatgcccactgacgggacagacgtgaaggtctatacggtgggccccgattatgctcacgccgaggcaagaaagagccccgcgttggatggcaaagtggaacgagattctgagggcaaggaagtgcggtacccagtgatcttgaacgctcgagaaaagcttatcgcttggaaagtgtgtttggccttcaagcagactgtttgcggctttgacctgctccgagcgaatggtcaaagctatgtctgtgacgtaaatggattttcctttgtgaaaaactcaatgaaatattatgatgattgcgccaagatacttggcaatatagtgatgagggaactcgctccgcagttccacataccctggagcatccccctcgaggctgaggacattccgatcgttcccacaacttccggaaccatgatggagttaagatgcgtcatcgccgtaatccggcatggcgacagaactcctaaacagaagatgaagatggaggtaagacaccagaaatttttcgatctattcgagaagtgtgacggatacaagtctggtaagctgaagctgaaaaagcccaaacagttgcaggaagtactggatatcgcacgacagctgctgatggagctgggccagaataatgattccgaaatagaggagaacaaacctaagctggagcagcttaagaccgttctggagatgtacggacacttttccgggataaatcgcaaggttcagttaacctacctgcctcacggttgtccaaagacgagtagcgaggaggaggactcgcgacgagaagaaccttctctcctccttgtactcaaatgggggggggagctgacacccgccggccgagtgcaggccgaggagctcggccgcgcatttagatgcatgtatccgggcggccaaggcgactacgccggtttccctggctgcggtctgttgagactgcactcgacctacaggcacgatctgaaaatctacgcctcggacgagggccgcgttcagatgactgccgcagcttttgccaagggtttacttgccctggaaggagaattgacgccaatccttgtgcaaatggttaaaagcgccaacatgaatggattactagatagcgattctgattctctaagctcctgccagcagcgggtgaaggcaagattacatgagatcctgcagaaggatcgggacttcactgctgaagattacgagaagctaacccctagcgggtccatatccctgatcaaatctatgcatttgatcaagaatcctgttaagacttgcgataaggtctattctctgatccaaagtctcacatcccagattcgccatcggatggaagatccaaagagctccgacattcaactatatcactctgagactttggagttgatgctgaggaggtggtcaaaattggaaaaggattttaagaccaaaaacggcaggtatgacatttcaaagatacctgatatctacgattgtatcaaatacgatgtccagcacaacggatctctcaagcttgagaatacaatggaattatatcggctgtccaaagccctggccgacatcgtcattccccaggagtacgggatcactaaagcggaaaaactggaaatcgcaaagggttattgcacacctttggtcaggaagattcgcagcgatctgcagcgaactcaggatgacgacactgtgaataagctgcacccagtctactcaagaggcgtgcttagccctgagaggcatgtaagaacccgcctgtacttcacctcagaatctcacgtccactcgttgctgagcatactgagatacggcgccctgtgcaacgagagcaaggatgagcagtggaaacgcgccatggattacctcaatgtcgtgaacgaattgaactatatgacccaaattgtcattatgctttacgaggacccgaacaaagatttatctagtgaagagaggtttcatgtggagctgcatttttcgcctggggccaagggctgcgaggaggacaagaatctgccctctggatacgggtatcggccagcgtcacgcgaaaatgaaggaagacggcctttcaaaatcgataatgacgacgagcctcacacatccaaacgggacgaggtggaccgagccgttatcttatttaagcctatggtgagcgaacccatccatattcaccgtaagtcaccgttgccccgtagcaggaagactgctactaacgacgaggagagtccgctgagcgtttcgtccccagaaggcaccggaacttggttgcactatacctccggtgtgggaacaggcagacgccggaggcgatccggcgagcagatcacatcatcacccgtgagccccaagagtcttgcttttacttcatcgatttttggatcttggcagcaggttgtctcagagaatgccaactatttacgaactcctagaacactcgtggagcaaaaacagaatcctaccgttggttcacattgtgccgggctgttttcaacttcagtgctcggcggctcgagttctgctccaaatctccaggattacgctcgcacacatcgcaaaaagctcacatcatctggatgcatcgatgacgctacccgagggtccgctgtgaagcgattctccattagcttcgctagacaccctacaaacggctttgaactttacagcatggtgccatccatctgccctctggagacacttcataacgcgctgagcttaaagcaggtagacgaattcctcgcttctatcgcctcaccctcttcagacgtgcctaggaagaccgctgaaatcagttctaccgctttgcgaagctcccccatcatgcgaaaaaaggtctcgctgaacacgtacactccagctaagatcttacctactccgcccgctacactcaaaagtacaaaggcttccagtaaaccggcaacgagcgggccatcttcagccgtggtgcctaacacctcaagtcggaaaaaaaacattacgagcaagaccgagacccacgagcacaaaaagaacaccggcaaaaaaaagtag

SEQ ID NO: 114704 - DNA, 3669 bp, synthetic construct
  misc_feature 1..3669: note = Description of Artificial Sequence: Synthetic coding sequence
  source 1..3669: mol_type = other DNA
atgtccgaggccccaaggttttttgtggggccggaggataccgagattaatccggggaactataggcatttctttcaccacgccgacgaagatgatgaggaggaagatgactcacccccggaacgtcaaattgtggtcggtatctgcagtatggctaagaaaagtaagtctaaacctatgaaggaaattttggaacgaatatcactgttcaagtacatcacggttgtggtgtttgaagaggaggtcatcctgaatgaaccggtagagaattggccattgtgtgactgtctgatctccttccattccaaaggtttcccactggataaggcggtggcttatgcaaagctgcgcaatccattcgttatcaatgacctgaacatgcagtacctgatacaggaccggagagaggtgtattctattttgcaggcggagggaatccttttgcctagatacgcaatcctgaaccgagaccccaataaccccaaagagtgtaacttgattgaaggcgaggaccatgtcgaagtgaacggagaagtgttccagaagcccttcgttgaaaagcccgtcagtgcagaagaccacaacgtgtatatatattatcccacctccgctggtggcggctctcagcgtctcttccggaagatcgggagtcgcagttcagtgtacagcccagagtctaatgtgcgaaaaaccggttcttacatatatgaggaattcatgcccacagacggcaccgatgtaaaagtttacactgttggacctgattacgcgcacgcggaagctaggaagagccctgccctagacgggaaggtcgaaagggacagtgaggggaaggaggtgcgctaccctgtgatccttaacgcccgtgaaaagctgatcgcctggaaggtctgccttgctttcaagcagaccgtgtgcggatttgatttgcttcgcgccaatggccagtcctacgtgtgcgacgttaatggttttagttttgtaaagaattctatgaagtactatgatgactgcgcaaaaatactgggaaatattgtgatgcgggaactggcccctcagttccacatcccctggtcaatccctctcgaggcggaagacatccctattgtgcctaccacttctgggaccatgatggaactcaggtgtgtgattgcggtgatccggcacggcgaccgaacacccaaacaaaaaatgaagatggaagttcgtcatcagaaatttttcgatctttttgagaagtgtgacggttataaatctggcaagctgaaactgaagaagccgaaacagctccaggaggtccttgacatcgctcgccaacttctgatggagcttgggcagaacaacgactctgagattgaagaaaataagcctaagctggaacagctaaaaactgtgctggagatgtatgggcatttttcagggattaacagaaaggtacagctgacatatctgccgcacggctgccccaaaacgagcagtgaggaagaagattcccgccgggaggagccctctctgcttctcgttttaaaatggggcggcgaactgacacctgctgggagggtccaggccgaggaactgggccgagcttttcggtgtatgtaccctggcggtcagggagactacgcgggctttccaggatgtggcctgcttcgcctccactcgacttaccgccatgatctcaagatttacgccagcgatgaaggacgcgtgcagatgacagccgcagccttcgcaaaggggctcctggctttagaaggggagctgacccccatcttagtgcagatggtgaagagcgctaacatgaatgggctactggattctgatagcgatagcttatcctcttgtcagcagcgcgttaaggcgcgccttcacgagatcctccagaaggaccgtgacttcaccgctgaggattatgaaaaactgactccgagcggctccataagccttatcaaatctatgcacctgattaagaatcctgtcaagacctgcgataaagtgtattcactgatccagagcctgacctcccagattaggcaccgcatggaggaccccaaatcttcagacatccaattatatcattccgaaacccttgaactgatgctgcgccgttggtctaagctggagaaagattttaagacgaagaacggacggtatgacatcagcaaaatacccgatatatacgactgcataaaatatgatgtgcagcataacggctctctcaaattggaaaatacgatggaactgtatagactgtccaaagcactcgctgatatcgtgattccccaggaatacggcataaccaaggccgagaaactcgagatcgccaaggggtactgtacgcccctggtgagaaagatacggagcgatctgcagagaacacaggatgatgacactgtcaataaactgcacccggtctactcgcgcggggtgctctcaccggagcgacatgtgaggactcgtctctatttcacttcagagtcccatgtgcacagcctgctgtccatcttaagatacggagccctgtgtaatgaaagcaaggacgaacagtggaagagggccatggactatctcaatgtggtgaacgagctcaactacatgacccaaattgttatcatgttgtacgaggaccccaataaggatctgtctagcgaggagcgttttcacgtcgagctgcacttttccccaggcgcaaaagggtgcgaagaggataagaatctcccaagcggatatggttatagacctgcctcgcgcgaaaatgagggaagacgacccttcaaaatagataacgatgacgagccacatactagcaagagagacgaagtagatagagccgtgatactgttcaagcccatggtttccgagccaattcacatccatcggaagtctcccctgccaagatcccggaagaccgccacgaacgatgaggagagtccgctgagtgtgtcatcacctgaaggcacaggcacgtggctgcactacacctccggggtaggcacgggcaggcggaggcggcgctcaggtgagcaaataacttcctcccctgtctcccccaagagtctcgcctttactagttccatttttggctcctggcagcaagtagtgtcagagaatgccaattaccttcgcacccctcgcacactggtcgagcagaagcagaatcctaccgtaggcagccactgcgccgggctgttttctacgagtgttctgggaggttccagcagtgcaccaaatctccaagactacgcccgcacgcatcgaaaaaagttgacatcttccgggtgtatagatgggtttgaattatactccatggtgccctccatttgtcctttggagactctgcacaacgcactatcccttaagcaggtggatgagttccttgccagtatcgcttctccttcctctgacgtgccccgaaaaaccgcggaaatttcgagtaccgctttacgaagcagtccaatcatgcggaagaaagtctcactgaatacctatacacccgcgaagattctgccgaccccacccgccactctgaagagcaccaaggccagctcaaagccagccacatctggacccagctctgcggttgtacccaatacgtctagccgtaaaaaaaacatcactagtaagaccgagacacacgaacacaaaaagaacaccgggaaaaagaagtag

SEQ ID NO: 114705 - DNA, 3837 bp, synthetic construct
  misc_feature 1..3837: note = Description of Artificial Sequence: Synthetic coding sequence
  source 1..3837: mol_type = other DNA
atgagtgaggctccaagatttttcgtcggccctgaggacactgagattaatccgggcaattaccggcacttcttccatcatgccgacgaggatgacgaggaggaagacgattcgcctccggaaagacagattgtagtggggatttgctcaatggcgaaaaaatccaaatctaagcctatgaaagaaattctcgaacgcatatctttgttcaagtacattaccgtcgtggtatttgaggaggaggtgattctgaatgaacccgtggagaactggcccctttgtgattgtctaatcagcttccacagcaagggatttccactggacaaagctgtggcgtacgcgaagctacggaatcccttcgtcatcaacgatctgaacatgcagtatctgatccaagacagacgtgaagtgtattctatcttgcaggcagaaggtatattactgcctagatacgccatacttaacagggatcccaataaccccaaagagtgcaaccttatcgaaggagaagatcatgtcgaggtgaacggggaagtctttcagaaaccattcgtcgagaaacccgtatctgcggaggatcataatgtctacatttactaccccacatcagctgggggggggtctcagcggttgtttcggaaaatagggtcgcgttccagcgtgtactcccccgaatctaacgtccgtaagaccgggtcgtatatctatgaggaattcatgccaactgacggtactgacgttaaggtctacaccgtgggaccggactatgcccacgccgaggccaggaaaagtccagctctggatgggaaagtggagagggattctgaaggaaaggaggtgcgctatcccgtgattctgaatgctcgagaaaaactgattgcctggaaagtgtgtctggcatttaagcagaccgtctgtggttttgacctgctgcgtgctaacggccagagctatgtttgcgacgttaatggattttctttcgtcaagaacagcatgaagtactacgatgactgcgccaaaattctcggaaacattgtcatgcgtgaactggctccgcagttccacattccatggagtattcccctggaggccgaagacatcccaattgtgcctacaacgagcggtacgatgatggagctgagatgtgtaatcgccgttatcagacacggggaccgaacgcctaagcagaaaatgaagatggaggtaaggcaccagaagttctttgatctgtttgaaaagtgcgacgggtataagtcagggaagttaaagctgaaaaagcctaagcagctccaagaggtcctggatattgccaggcaactcttgatggagctggggcaaaataacgattccgagatcgaagagaacaagccaaagctggagcagctgaaaaccgtgctcgagatgtatggtcatttttcaggcataaacaggaaggtacagctgacctacctcccgcacgggtgccctaaaacctcatctgaggaggaagattctcggagggaggaaccatcccttctcttagtccttaagtggggtggcgagctgacacccgcaggtagagtgcaggctgaagaacttggccgggccttcaggtgtatgtatccaggtggccagggcgactatgccgggttcccaggctgtggactgttgagactccatagtacctacaggcatgatctgaagatctacgcctccgacgaaggccgcgtccagatgacggccgctgcgtttgcgaaaggtcttctggcactcgaaggcgaactgacccctatcctggttcagatggtgaaaagcgccaacatgaatgggctgttggacagcgatagcgatagcctgagcagctgccagcaacgagtgaaggcacggctgcatgagattctccaaaaggatcgcgattttaccgccgaagactacgaaaagctgactccttcaggatcaattagcctcatcaagagcatgcatctgatcaagaatcccgtcaaaacatgcgacaaagtctatagcctcatacagtccttaactagccaaatacgacacaggatggaagatccaaaatcaagcgacattcagttgtatcactcggagaccctcgaactcatgctaagacgctggtctaagctggagaaggacttcaaaacaaagaacggccggtacgacatcagcaaaatcccggatatctacgactgtattaagtacgatgtgcagcataatggttccctgaagcttgagaatacgatggagctgtatcggctgtctaaggctctcgccgacatagtgatcccccaggaatatggtattactaaggccgagaaactggagatcgccaaaggatattgtactcctctcgtgcgaaagatcaggtcagatctgcaaaggactcaggatgacgacacagttaacaaactgcacccagtatattcgagaggagttctgtcaccggagagacacgtgcggacccgtttatacttcacctccgagagccacgtgcattccctgttgtccattctccgctatggtgctctgtgcaacgatcacgactcccagaacgaggacggtggaatggtcaaagagatggaaagcaaggacgaacaatggaagagagctatggattacctgaacgttgtgaacgagctgaactacatgacgcagatcgtgatcatgctgtatgaggaccctaacaaggacctgagtagcgaggaaagattccatgtagagctgcactttagtccaggtgccaaaggttgcgaggaagataagaacttacccagcggatacgggtatagacccgcgtctcgggaaaatgaggggcgccgcccttttaaaatcgacaacgacgacgaaccccataccagcaagcgagacgaggtggacagggcagtcatcctgttcaagcctatggtgtcagagcccattcatatccatagaaaatctccgctcccacgatcccgtaagactgccaccaacgatgaagagagtcctctttcagtgtcttctcctgagggaacaggaacctggcttcactacacttccggagtggggacaggccgccggagacgccggtctggagagcagattacatctagccccgtctcccctaaatcactggcattcaccagttcaatatttggatcctggcaacaagtggtaagcgagaacgccaactacctgcggactcccaggaccttggtagagcagaaacagaacccgacagtaggcagtcactgcgccgggttgttttccacctctgtcctaggagggtcgtcatccgcacccaatttacaggactatgctcggactcatcgtaagaagctgacctcttcgggctgtatcgacgacgcaacccggggcagcgctgtcaaacggttttcaatctctttcgctcggcaccccactaacgagcatcttcatctgtacagatgttggtctgtgagctccgtcgagtttctcggatccagtggattcgagttatatagtatggttcccagcatttgtcccttagaaaccctgcacaacgctctttccctgaagcaggtagacgaattcctggctagcattgcttcaccctcaagcgacgtacctcgcaagacagccgagattagcagcactgctctcaggagttcacctattatgaggaagaaggtaagcctcaacacctatacgccggcaaagattcttccaaccccaccggcgacactcaagtctacgaaggcaagttcaaagcccgctacgagcgggccttcctcagccgtcgtgcctaatacatcatcacgaaagaagaacattaccagcaagactgagactcatgaacataagaagaacacagggaagaaaaagtag

SEQ ID NO: 114706 - DNA, 177 bp, synthetic construct
  misc_feature 1..177: note = Description of Artificial Sequence: Synthetic coding sequence
  source 1..177: mol_type = other DNA
atgtctgaagcccctcgatttttcgtcggtcccgaagacacagagatcaaccctggaaactacagacatttcttccatcatgctgatgaagacgacgaggaagaggacgattcaccaccggagagacagatcgtcgttggaatttgttcgatggccaaaaaatcaaagagcaagtag

SEQ ID NO: 114707 - DNA, 2877 bp, synthetic construct
  misc_feature 1..2877: note = Description of Artificial Sequence: Synthetic coding sequence
  source 1..2877: mol_type = other DNA
atgctcaagagcaaaacctttctcaagaagactcgggccgggggtgtcatgaagattgttagagagcactacctgcgtgatgacattgggtgtggggcacctgggtgcgctgcatgcggcggggcccacgaagggcctgccctggaacctcagccgcaggatcctgcttcaagtgtctgtccccagccgcattacctgctacccgacaccaatgttttgctgcaccaaattgatgttcttgaggatcctgccattaggaatgtgatcgtccttcagacagtactacaggaggtaagaaatagatccgcccctgtctacaagcgcattagagacgtcacaaacaatcaagagaaacacttttatacctttacaaatgagcaccatcgagaaacctacgttgaacaggagcagggagagaacgcgaacgaccgtaatgacagggctatccgcgtcgccgcaaagtggtacaacgagcacctgaaaaagatgtcagcagataatcagctccaggtcatctttatcacaaacgatcgccggaacaaagaaaaggcgatcgaagaaggtatcccagcctttacctgcgaagagtacgtaaagagcctgactgctaatcccgaactcattgataggctggcctgcctgtccgaggaaggcaatgagattgaatctggtaaaatcatctttagcgaacacttaccgctgtcgaaactgcagcagggcatcaagagcggcacctacctccagggcacttttagggccagccgagagaactatctagaagccactgtttggatacatggcgataacgaggagaataaagagataatcctgcaggggctgaaacacctgaatcgagccgttcatgaggacatagtggccgtcgaactcctgcccaaatcccaatgggtggcgcccagctctgtggtgctgcacgatgaaggccagaatgaggaggacgtcgagaaagaagaggaaacagaacggatgctgaaaacagcggtcagcgaaaaaatgttgaagcccacgggccgcgtcgtaggaatcattaagcggaattggcgcccatactgtgggatgctctcgaaatcagacatcaaggagtctcgcagacacctcttcactcccgccgataaacgcattcctagaattcgtattgaaactagacaagcctcaaccttggagggtcggagaataattgttgcaatagacggatggccccgcaacagtagataccccaacggccactttgtacgcaatcttggcgacgtgggtgagaaggagactgagaccgaagtattgttactagagcatgatgtgcctcatcaacccttctcccaagctgtgctaagtttccttcctaagatgccatggtctattacagagaaggacatgaagaaccgtgaagatctgcggcacctatgcatatgttctgtcgacccaccgggttgcactgacatcgacgatgcgctgcactgccgcgagctggagaatgggaatctggaggttggcgtgcacatcgcagacgtcagccactttattagacccggaaatgccttagatcaggagtcagctagaagaggcacaacagtttacctgtgtgagaaaagaattgatatggtgcctgaactattgagttctaatctgtgtagccttaaatgcgacgttgatcgtctggccttctcttgcatctgggaaatgaaccataacgctgaaatcttgaagaccaagttcacgaagagcgttatcaattcaaaggccagtctaacatacgccgaagcccaactgcgtattgacagcgctaacatgaatgatgacatcaccacgtcacttcgtggtttgaataagctggccaaaatcctgaagaagaggcggatcgagaagggggctctgactctttcgagccctgaagttcgattccacatggattcggagactcatgaccctatagacctccagaccaaagagttgcgagaaacaaactcgatggtcgaggagtttatgctgctggctaatatctccgtcgctaaaaaaatacacgaggagttctccgagcacgccctgctgcggaagcaccctgctccacctccctcgaattatgagatcttagtcaaggccgcccgcagcagaaacctggagatcaagacagacacagctaaaagcctcgctgagtctctggaccaggcggaaagtcccaccttcccctatctcaataccctcttgagaatactggccacaaggtgtatgatgcaggctgtctatttttgctctggcatggataacgattttcatcactacggcctagcaagcccgatctatacccattttactagtccaatccgtaggtacgctgacgtcatcgtacaccgtctgctggctgtggctatcggcgccgattgtacttaccccgagttgacagataagcacaagctggccgatatatgtaaaaacctgaattttcggcacaagatggctcaatacgcccaacgagcaagcgtagctttccacactcagcttttctttaagtccaagggaatagttagtgaggaggcctatattctcttcgtacggaaaaacgccatcgtcgttttaattcctaagtatggactggagggaaccgttttcttcgaggagaaagataagcccaatccacagcttatttatgacgacgagatccctagcttaaagatagaagatacagtattccatgtcttcgacaaggtcaaggttaaaattatgcttgactcgtccaatctccagcaccagaaaatcaggatgtcactcgtggaacctcagatcccaggtatcagtattccaactgatacttctaatatggacctgaacggacctaaaaagaagaaaatgaagctcggtaagtag

SEQ ID NO: 114708 - DNA, 2391 bp, synthetic construct
  misc_feature 1..2391: note = Description of Artificial Sequence: Synthetic coding sequence
  source 1..2391: mol_type = other DNA
atgtccgccgataatcagctgcaggtcattttcattaccaatgatcgccgtaataaggagaaggcaatcgaggaagggattcccgcctttacatgtgaggagtacgtcaagtctctgaccgccaaccccgagctaatcgatcgactggcttgcctcagtgaggaaggcaatgagatagagtcgggcaagattatattcagcgaacacttgccgttgagtaagctgcagcagggcatcaaatccggcacctatttgcaagggacatttcgtgccagccgagaaaattacttggaagctaccgtttggatccacggagacaatgaagagaataaagaaatcattttgcagggtctgaagcatctcaaccgggccgtccacgaagacattgttgctgtcgagctgctgcctaagtctcagtgggtcgcaccctcatctgtagtgcttcacgatgaaggccagaacgaggaggatgtggaaaaagaggaagaaactgagagaatgctgaagacggcggtctccgaaaagatgctaaaaccaacaggacgcgtggttgggataataaagcgcaactggagaccctactgcggcatgctgtctaagtccgacattaaggagagcaggagacatctttttaccccggcagataagcgcatacctaggatcaggattgagacgcgccaggcatcaactcttgagggacgacgtatcatagtcgctatagacggatggccgagaaattccaggtacccaaacggacactttgtgcgcaatctgggggacgtgggggaaaaggagacggagacagaagtgctgctgctcgagcatgatgtgccccatcaacctttctcccaggccgtgctttcttttctgcctaagatgccctggagtattaccgagaaggatatgaaaaacagagaagatctgcgtcatctgtgtatatgttcagtggatccacctggctgtactgatatcgacgacgccctacactgtagggaactggagaacggtaacctggaagtcggcgtgcacattgcagatgtgtcgcactttatccgccccggaaatgcactagatcaggaatcagccaggcgtggcaccacagtgtacctttgcgaaaagcgcatcgatatggtgcccgagcttctgtcgagcaatctgtgctcattgaaatgtgacgtagacagactggctttttcctgtatctgggagatgaatcacaacgcggagattcttaaaacgaaattcaccaaatccgtgatcaattcaaaagcctctttaacctacgcagaggcccaattacggatcgacagcgcaaacatgaatgacgatatcaccacttcactgagaggtttgaacaagttggctaaaatccttaaaaaacggcgtattgagaagggtgcactgactctgtcctcccctgaggtacgcttccacatggattctgagacacatgacccaattgatctacagacaaaggagttgagggaaacgaactctatggtggaagaatttatgctgctggcaaatatatccgtcgcgaagaagatccacgaagaattcagcgaacatgccttgctaagaaaacacccagcaccacccccttccaattacgagatactggtcaaggctgcgaggtcacgaaacctggaaataaagacagatacagctaaatctctggccgaatccttggatcaggcagaaagccccaccttcccctacctcaatacactcctccgcatcctggctactagatgtatgatgcaggctgtgtatttttgctccggcatggataacgatttccatcactacggacttgcttctcccatttatacccactttacgtcccccattagaagatacgctgatgtgattgtccaccggctgctggccgtggccatcggagccgactgtacctaccccgaactgactgataagcataagttagccgacatctgtaaaaacttaaatttcagacacaaaatggcccaatatgcacagcgcgcctctgtggcgttccatactcagctattttttaaatctaagggcattgtcagtgaggaggcttatattctgtttgtgagaaagaacgctattgttgtgctaatccccaaatatggcctggaagggactgttttttttgaagagaaggataagccaaatccccaactgatttatgacgatgagattccatccctcaagatcgaggatactgtctttcatgtttttgataaggtcaaagtgaagatcatgctggactctagcaaccttcagcaccagaagatcagaatgagtctggtggagcctcaaatccctggcatctctataccaacggacacgtccaacatggatctcaacggacctaaaaaaaagaagatgaagctggggaaatag

SEQ ID NO: 114709 - DNA, 2787 bp, synthetic construct
  misc_feature 1..2787: note = Description of Artificial Sequence: Synthetic coding sequence
  source 1..2787: mol_type = other DNA
atgctcaaaagcaagactttcctcaagaaaacgcgggcagggggggtgatgaagatcgtgcgggagcactatctcagagacgatattggctgtggggcccccggatgcgccgcttgtgggggcgcacacgagggtccggctctcgaaccacagccccaagatcctgcgagctcagtgtgtccacagccccactacctcctacctgacaccaacgtgctgctccatcagattgtgtcggcctggcggcccggaacgtgggcatccgtcgccagttcattgagactgccagggtctctcgaaacatatgttgagcaggagcagggggaaaatgccaacgaccgcaacgaccgcgcaattcgagtggccgccaaatggtacaatgagcacctgaagaagatgtcagcggacaaccagctgcaggttatcttcatcacgaatgataggcgtaataaggaaaaggctatagaggagggcatccctgccttcacctgcgaagagtatgtaaaatcactcaccgcaaatccagaactgattgacaggctggcctgtctctcagaggaggggaacgaaatcgagagtggtaagatcatcttttcagagcacctgcctctgtctaaactgcagcaggggatcaaatctggaacctatctgcagggaacattcagggcctcaagagaaaactatctcgaggccacggtgtggattcatggcgataacgaagagaacaaagagatcatcttgcagggtctcaaacatttaaacagagctgtccatgaggatatcgtcgcagtggagttgctgcccaaatcccagtgggttgccccctcatccgtagtgctgcatgacgaggggcaaaacgaagaggacgtggagaaagaagaggagacggaaagaatgctgaaaacagctgtatcggagaaaatgctgaagccaactggcagggtcgtggggatcatcaaacggaactggcgcccttactgtgggatgctctcaaagtctgacatcaaggagtctagaagacatctctttacgccagccgataagaggatcccccgcatcaggattgagaccaggcaggcctctaccctcgaaggccgccgcattattgtagccattgacggatggccccgcaatagcaggtatcccaacggacactttgttcgaaacctcggggatgtgggtgagaaagagacggaaactgaggttttactgctggagcacgacgttccgcatcagcctttttctcaggccgtgctctccttcctgcctaaaatgccctggtccataacagagaaggacatgaaaaatcgcgaagatctccgacacctctgtatctgttcagtggacccccctggctgcactgacatagatgacgctctgcattgccgagagctggaaaatggaaacttggaagtgggtgttcatatcgccgacgtgtcacactttatccggcccggaaacgcactggatcaggagagcgcccgacgtggaacaacagtctatttgtgtgaaaaaaggatagacatggtgcccgagctgctgtcctctaatctgtgcagtctaaaatgcgacgttgatagactggccttttcctgcatatgggagatgaatcacaatgccgagattctgaaaacaaagttcacgaagtccgtaatcaactccaaagcttctctcacctacgctgaagcacagctccgcatcgattccgcgaacatgaacgacgacattaccacttctcttagaggcttaaataagctcgcaaagattctcaagaagcgcagaattgagaagggggccttgaccttgtccagtccagaggtgcgatttcatatggattctgaaacccatgaccctatcgatcttcagacaaaagagctgcgtgagacaaactcgatggtggaagagttcatgctcctggccaatataagcgtagccaagaagattcatgaggaattctctgagcatgccctgctgcgaaagcatcccgccccacctccctctaattatgaaatcctggttaaggccgcccgatctaggaacctggagataaagacagatacagctaagtcccttgccgaatctctggatcaagccgaatcccctaccttcccgtatctgaatactctgctgcggatccttgccactcgttgtatgatgcaggcggtgtacttctgcagtggcatggacaacgattttcatcactatgggcttgccagccccatctatacacatttcacttcaccaataaggaggtacgccgatgtgattgtacatagactgctggctgtcgctataggagccgattgcacctatcccgagttgactgataaacacaagctcgctgacatctgcaagaatctcaattttaggcacaagatggcccagtatgctcagagagcctctgtggccttccatactcagcttttcttcaagtccaagggaattgttagtgaagaggcatacatcctctttgtccgcaagaacgccattgtcgttctgatacccaagtatggcctggaggggaccgtgttttttgaggagaaagataagcctaatccccagctgatttatgacgacgaaattccctccctgaaaattgaggatacagtgtttcatgtattcgataaagtaaaggtcaagatcatgctcgattccagcaacctgcagcaccagaagattcgcatgtcattggtcgaaccacagatcccgggaatttctatacctacagatactagcaatatggacctgaatggtccaaagaagaaaaagatgaaattggggaaatag

SEQ ID NO: 114710 - DNA, 2916 bp, synthetic construct
  misc_feature 1..2916: note = Description of Artificial Sequence: Synthetic coding sequence
  source 1..2916: mol_type = other DNA
atgcagacagcatgccaggctgttcagcatcagaggggtagaaggcagtataacaaactgagaaacctgctgaaggatgctcgacatgattgtatcttgttcgcaaacgaattccagcagtgttgctacttaccccgcgagcgtggggagtctatggagaaatggcaaacgcgttctatttacaatgcagccgtttggtattatcaccattgccaggaccgcatgcctattgtgatggtcacagaagacgaggaggcaattcagcagtacggatcagaaacagagggtgtttttgtgataacatttaaaaattacctggataacttctggcccgatctcaaagctgctcatgagctctgcgactctatcctgcaaagccggcgggaaagggaaaatgaaagccaggagagtcatggaaaagagtatcccgaacacttaccattggaagttctggaggccggaatcaaatcggggcggtatattcaggggatcctgaatgttaataagcatcgcgcgcaaatcgaggctttcgtcaggcttcagggggcctcatctaaggactctgatttggtgtcagacatcctgatccacggaatgaaggcaagaaatcgcagtatccatggcgatgtcgtggttgtggaattgttacccaagaatgagtggaaaggaagaacggtggctctgtgcgagaacgattgtgatgataaggcttctggcgaatccccatcagagcccatgcccactgggcgtgtagtgggcattctccaaaagaattggcgggactacgttgtgacctttccttcaaaggaagaggtgcagagccaaggaaaaaatgcccagaaaattcttgtgacgccctgggactaccgcatcccaaagatacgaatttctacccagcaggcagagaccctgcaggatttccgggttgtggtcagaatcgacagctgggagagcaccagtgtgtacccgaatggccattttgtgagagttctcggccgcatcggtgatctggagggcgagatagccacgatcctggttgaaaactccatcagtgtgatccctttcagcgaagcccagatgtgcgagatgcccgtgaacactcccgagtctccttggaaagtgagtcccgaagaggaacaaaagcgaaaagacctgagaaaaagccacctcgtgttttctattgaccctaagggctgcgaagatgtggacgacacactatcggtgcgaacgttgaacaatggaaatttggaattgggagtgcacattgccgatgtgacgcatttcgtggcacctaatagttacattgacattgaggcccggactagggccacaacctattaccttgccgacagaagatatgatatgctccccagcgtgctgtccgccgacctttgcagcttactgggcggtgtcgataggtatgcagtgtctatcatgtgggagttagataaagctagttacgaaatcaaaaaggtttggtacggacggacaattattcgttccgcatacaagctgttctacgaagcagcccaggagctcctagacggcaatctgagcgtcgtcgacgatatcccagagttcaaagacctagacgagaaatcacgtcaggccaaattagaggagctcgtctgggcgatcggtaaattaaccgatattgcgcgccatgttagggcaaaaagggatggttgtggcgccctcgagctggagggagtggaggtttgcgtccaactggatgacaaaaagaacattcacgatctcattcctaaacaacccttggaagtgcacgagactgtcgccgaatgcatgattctggccaaccactgggtggccaagaaaatctgggagtccttcccccaccaggccctgctccgacaacacccacctccgcatcaggaattcttctcagagttgcgtgaatgcgcaaaagccaaggggttcttcatcgacacacggagtaataagaccttggcagactccctggacaatgccaacgatccccacgacccgattgtgaatcggctgctgcggtcaatggccacacaagccatgtctaacgcattgtactttagcactggaagctgtgcagaagaagagttccaccactatggactagcccttgataaatatactcactttaccagccctatccggcgatacagcgacatagtggtgcacagacttttaatggcagcaatatcaaaagacaagaaaatggagatcaagggcaatcttttcagtaataaggacctggaagagctgtgtcggcatatcaacaataggaaccaggctgcacagcacagtcagaagcagtctacagaactgtttcaatgtatgtattttaaggacaaggaccccgctacagaagagcgctgcattagcgatggggttatctactccatacggacaaacggagtgcttctcttcattccgcgctttggaatcaaaggggctgcctacctgaagaacaaggatgggttagtgatctcttgcggcccagacagttgttccgagtggaaacccggctccttacaacggttccagaacaaaatcacctccaccacaacagacggtgaatcggttacatttcacctgttcgaccatgttacagtgaggatcagcattcaggcttcacggtgtcattccgacacaattcggctcgagattattagcaacaaaccttacaagatacctaatacggaactaattcatcaaagcagcccactgctgaaaagcgagctagtgaaagaagtgaccaaatctgtcgaggaggctcagctggctcaagaggttaaggtgaatataattcaagaggagtatcaggagtacagacagactaaaggaaggtccctatacacattgctagaagaaatccgggatttggctctactcgatgtctcgaataattatgggatttag

SEQ ID NO: 114711 - DNA, 3165 bp, synthetic construct
  misc_feature 1..3165: note = Description of Artificial Sequence: Synthetic coding sequence
  source 1..3165: mol_type = other DNA
atgctgcagaaaagggaaaaagttctgctgctgcggaccttccagggacggaccctgcgaatcgtgagggaacactatctgcggccctgtgtcccctgtcactctcctctatgtcctcagcctgccgcctgctctcacgatggcaagttgctctccagcgacgtcacacactatgtgatccctgactggaaggtggtgcaagactatctagagatcttggagttccccgagcttaaaggcattatctttatgcagaccgcctgtcaggcggtacagcaccaaagagggaggaggcaatataataaactacgtaacctgctgaaggacgctagacatgattgtatcttattcgcgaacgagtttcagcagtgttgttacctgcctcgcgagagaggcgagtctatggaaaagtggcagacgagatccatttataacgctgcggtgtggtactatcaccactgccaagatcggatgccaatcgtcatggtcacagaggacgaggaggcaattcagcagtatggaagtgagactgagggagttttcgtgattacgtttaagaactatttagataatttttggccggatttgaaagccgcacacgagctgtgcgacagcatcctgcagagccggagagaaagggagaatgagtcgcaggaatctcacggcaaggagtaccctgagcacctacccctggaagtgctggaagccgggataaagagtggcaggtatatccaaggaatcctcaatgtgaacaagcacagagcacagattgaggcatttgtgaggctccaaggtgcgtcatctaaggatagcgacctcgtatccgatatactgattcacggaatgaaagccagaaatcgcagtattcatggggacgtggtagtcgttgaactcctccccaaaaacgagtggaagggacggacagtggcgttgtgcgaaaacgactgtgatgataaggcatccggggagagcccgtctgaacctatgcctaccggcagagtcgtcggaatcttgcagaaaaactggagggattatgtcgtgactttcccttccaaggaggaggttcagtcccagggcaagaacgcccagaagatcctggttactccgtgggattaccgaatccccaagatcaggatctccacccaacaagcggaaacactacaagatttcagagtggtcgtgcggattgattcttgggagtcgaccagcgtttatcctaatggacacttcgtcagggtgctgggacgcatcggcgacctagaaggagagattgccacaatcctagtcgagaacagcatctctgttatccctttctccgaagctcagatgtgtgaaatgcctgttaacactccagagtcgccctggaaggtgagcccagaggaggagcagaaaagaaaggacctgcggaagtcccacctggtctttagcatcgatcccaaaggatgcgaggatgttgacgacactctctcagtcagaaccctgaacaatggaaacctggaattaggggtccatatcgctgatgtgacgcactttgtcgcaccaaactcgtatatcgacattgaggcacgcaccagggctaccacatactatcttgcggatcggaggtacgacatgctccctagtgtcttgtcggccgacttatgcagtcttctagggggcgtggatcggtatgcggtatcaataatgtgggagctggacaaggcttcctacgaaatcaaaaaggtatggtatggacgtacaataattcggagcgcctacaagcttttttatgaagccgcccaggaattgctcgatggcaatctctccgtggtggacgacatccctgaatttaaagatctagacgagaaatcacggcaggctaaactcgaagagttggtttgggccatagggaaactcacagacattgcacggcacgtgagggctaagagagacggctgtggagccctggagctggagggcgtggaggtctgcgtccagttagatgataaaaaaaacattcacgatttgattccgaagcagccgctggaagtgcacgaaaccgttgccgaatgtatgatactcgcgaatcattgggttgccaaaaagatttgggaatctttcccccaccaggcactcctccgccagcatccgccaccacaccaggagtttttttctgagctccgtgagtgcgccaaagctaagggattcttcatcgataccagaagtaataagacactggcagattctctagataacgcgaacgaccctcacgatcccatcgtaaacaggctcctacgtagtatggctacccaggcgatgtccaacgccctctactttagcaccgggagctgtgccgaagaggagttccaccactatggtttggcactcgacaaatacactcattttacttctcctatcaggcgctattctgacatcgtcgttcataggcttttaatggcggcaatctccaaagacaagaagatggaaataaagggaaatctgttctcaaataaggatctggaggaactgtgtcgacatattaataataggaaccaggctgcacagcactctcaaaagcagtccacagagctgttccagtgcatgtatttcaaagataaggatcccgcaacggaggaaagatgcatttctgatggggttatttactctattcggactaatggtgtgcttttgtttatcccgcgatttggaattaaaggcgccgcttaccttaaaaacaaggatggcttggtcatcagttgtggccctgattcatgctcagagtggaagccgggatccttacagaggttccagaataaaatcacctcaacgactactgatggggagtccgtcacgtttcacctgtttgatcacgtgacggtgcgtataagtattcaagccagtaggtgccacagtgacaccattaggcttgagattatcagcaataagccctacaagatccccaatactgagctcatccaccaaagtagtcccctgttgaagtccgaactcgtgaaggaagtgaccaagtccgttgaggaggcacagttagcccaagaagtcaaggtgaatattatccaggaagaataccaggagtatcggcagaccaaaggcaggtctctgtacaccctgctggaagaaatccgcgacctggccctcttggatgtatcaaacaactatggaatttag

SEQ ID NO: 114712 - DNA, 762 bp, synthetic construct
  misc_feature 1..762: note = Description of Artificial Sequence: Synthetic coding sequence
  source 1..762: mol_type = other DNA
atggagaagtggcagaccagatcaatctacaacgcagcagtgtggtattatcatcattgccaggatcgcatgcccatcgtgatggtgacggaagacgaagaggctattcaacagtacggctcggagaccgaaggcgttttcgtgattacttttaagaattatcttgacaatttttggccagacctgaaggctgctcacgagctgtgcgactctattttgcagtccaggcgggaaagggagaatgagtcccaggagagccacggcaaggaatatcctgaacatctgccactagaggtgttagaggcggggatcaaatcggggaggtacatacaaggcatcttaaatgtaaacaaacatagggcccagatcgaagccttcgtgcgcttgcaaggcgctagttcaaaggattctgatctggtcagcgacatcctgatacatggaatgaaagcaagaaaccggtcgattcacggggatgtcgtcgtagtagagctcctgcccaagaatgagtggaaggggaggaccgtagcactgtgtgagaatgactgcgacgataaagctagtggcgaaagtccctctgagccaatgcccactggactccaggggggtcgggctcatcgctttttaggagtgaatatctgcgtgagtaaatggaccttctgcgcctgttttcggaaaaatcgcaggtccggtaggggaaattgcaatcaccctgggggcaagcagtacttctcatacagttttctccgcagcagcgatgtgtag

SEQ ID NO: 114713 - DNA, 453 bp, synthetic construct
  misc_feature 1..453: note = Description of Artificial Sequence: Synthetic coding sequence
  source 1..453: mol_type = other DNA
atggagaaatggcaaacaaggtctatctataacgccgcggtgtggtattaccaccattgtcaggacagaatgcctattgtcatggtgaccgaggatgaggaggccatccagcaatatggatcagaaaccgagggggttttcgtgattacatttaagaactatctggacaacttttggcccgacctgaaagccgcccatgagctgtgcgattcaattctacagtcccgaagagaacgtgaaaatgagagccaggagtcccacgggaaggagtaccccgagcatttgcccctggaggtgctggaagctggcataaagagcgggagatacattcagggtattctgaatgtgaataaacatcgggctcagattgaagccttcgtgcgtctccagggtgccagctccaaggacagcgacctggtgtccgatatcttgatccacggtatgaaggcttag

SEQ ID NO: 114714 - DNA, 174 bp, synthetic construct
  misc_feature 1..174: note = Description of Artificial Sequence: Synthetic coding sequence
  source 1..174: mol_type = other DNA
atgcaaaccgcatgtcaggccgtgcaacaccaaagaggcaggcgacaatataataaactgaggaacctgctcaaagacgccagacatgactgtattctatttgctaacgagtttcagcaatgctgctacctgccgcgcgaacgcggagaatcgatggagaaatggcaaacttag

SEQ ID NO: 114715 - DNA, 294 bp, synthetic construct
  misc_feature 1..294: note = Description of Artificial Sequence: Synthetic coding sequence
  source 1..294: mol_type = other DNA
atgcagaccgcctgtcaggcagtccagcaccagaggggacgaaggcagtacaataaactccgcaatctcttgaaagacgcaaggcatgattgtattttgttcgcaaacgagttccagcaatgttgctacctccctcgagaaaggggggagagtatggaaaaatggcagactagatctatttataatgctgcagtgtggtactatcaccactgccaagatcgcatgccaatcgtgatggtgaccgaggacgaagaggcaattcagcagtatggtagcgagaccgagggcgtgtag

SEQ ID NO: 114716 - DNA, 312 bp, synthetic construct
  misc_feature 1..312: note = Description of Artificial Sequence: Synthetic coding sequence
  source 1..312: mol_type = other DNA
atgcagaccgcttgccaggccgtgcagcaccagcgaggacggaggcaatacaacaagttgaggaatcttcttaaggatgccagacatgattgcatcctgttcgcaaacgaatttcagcagtgctgctaccttcctagagagcggggggagtctatggagaagtggcagacccgatccatttacaacgcagccgtatggtactaccaccactgccaggatcgtatgccgattgtgatggtcaccgaggatgaagaagccattcaacaatatggctctgaaactgagggcgtgttcgtgataacattcaagtag

SEQ ID NO: 114717 - DNA, 1812 bp, synthetic construct
  misc_feature 1..1812: note = Description of Artificial Sequence: Synthetic coding sequence
  source 1..1812: mol_type = other DNA
atgagtcacccggactaccgcatgaacttaaggcctctgggtacccctagaggcgtgtccgccgttgccggaccacacgacatcggagcttccccaggggacaagaaaagcaagaatcgatcgacacgcggcaaaaaaaaaagcatctttgaaacctatatgtcaaaggaagatgtgagcgaagggctgaaaagaggaacactgatccagggagtgctccggataaacccgaagaaatttcacgaggcgtttatcccttcacccgacggggacagagatatatttatcgacggcgtggtcgcaagaaaccgcgccctgaatggagatttggtagttgtgaaactccttcctgaggaacattggaaagtggtgaaacctgagagtaacgataaagagacggaggccgcctatgagagtgatatacctgaggaattgtgtggacatcaccttccgcagcaatctttgaaatcttataatgactccccagatgtaatcgtcgaggcacagtttgatggctcagattcagaggacggccatggcataactcagaacgtgttagtggacggcgtcaagaagctgtctgtctgcgtctctgagaaaggccgggaggacggagacgccccagtgactaaggatgaaacaacctgcatctcccaagatactcgagccctttccgagaagagtctgcagaggtccgctaaggtcgtctacatcctagaaaaaaaacactcgagggccgccacagggtttctcaaactcctggcagacaagaactcagaactgtttaggaaatatgctttattctccccttccgaccatcgcgttccccggatttatgtgccgttaaaggactgccctcaggacttcgtggctcgacccaaggactatgctaacactctgttcatctgtaggatcgtcgattggaaggaggactgcaattttgctctcgggcaacttgctaaaagcctgggccaagctggcgaaatagaaccagagacagagggaattttgactgagtatggggtggacttctcagacttctctagcgaagttctggagtgcttgccccaaggcctgccatggaccattcctcccgaagagtttagcaagcgcagggaccttcgaaaagattgcattttcacgatcgatcccagtacagcgcgagatctagacgatgccctgagttgcaagcctttggcggacggaaatttcaaggtgggggtgcacattgctgacgtgagctatttcgttcccgagggaagtgacctagataaagtggctgccgagcgggccacttctgtatacttggtccaaaaggtggtccccatgctcccaagactgctgtgcgaggagctgtgcagtttgaatccaatgtctgataaactgactttcagcgtcatatggacacttacacccgaaggcaaaatccttgatgaatggtttgggcgtactatcattcggtcctgtaccaaactcagctacgagcacgcccagtctatgattgagagtcccactgaaaagattcccgctaaagaactgcctcccatttcacccgaacactctagcgaggaggttcaccaacaaaacgccgacaaggatggcgctgcccacctccaggcctcacactcaccatcagccgaagacgccgaagcccagccctcaacagaggaaagactgccagaaacgaggggaatctgtgaccgtgatccagatacccggttgttttttttacaacagcagtcccgagtcctagaggcaaaacctcagaacacaatccgcgtggaggagcaaacaactcagcttcaaatttag

SEQ ID NO: 114718 - DNA, 2658 bp, synthetic construct
  misc_feature 1..2658: note = Description of Artificial Sequence: Synthetic coding sequence
  source 1..2658: mol_type = other DNA
atgagccaccctgattacagaatgaatcttcgccctctcgggaccccacgtggcgtgtctgctgtcgctggaccccacgacataggcgcatctcccggcgataaaaaaagtaaaaaccgatctacccgtgggaagaaaaagtccatcttcgagacgtacatgtccaaggaggacgtctccgagggcctgaaacggggaacgcttattcagggggttttgaggatcaatccaaaaaagtttcacgaagcttttattccctctcccgatggcgatagagacatctttattgatggagtggttgccagaaacagagcactgaacggcgacctcgtggtggttaagcttctgccagaggagcattggaaggtggtgaagcctgagtctaacgataaagagaccgaagcagcatatgaaagcgacatcccagaggagctgtgcggtcatcacctcccacagcaatctctcaaatcgtataacgatagccccgatgttatcgtcgaagcccagttcgatgggtcagatagcgaagatgggcacgggattactcagaacgtgctggtggatggcgtaaagaaattgtctgtgtgtgtgagtgaaaagggacgggaagatggcgacgcaccggtcacgaaggacgagaccacctgtatcagtcaagacactagggctctctctgagaaatcccttcagcgttctgctaaagtcgtatacatcctggagaaaaagcactcacgcgccgctactgggttcctgaagctgctagcggacaagaatagtgaactgttccggaaatacgctttattctctccttcggaccaccgggtgccaagaatctatgtgccgctgaaagactgtccccaggactttgttgccagaccaaaagactacgcaaacactctgtttatatgtcgaatcgtggattggaaggaagactgtaatttcgcgctcgggcaattggcaaagagtttaggccaggcaggggagatcgaacccgagacagaaggtattctaactgagtatggcgtcgattttagtgactttagcagcgaggtcttggagtgtctcccacagggcctcccgtggactattccgcccgaggaattttccaaaaggagagatttacgcaaagattgtattttcaccatcgacccctccaccgcaagggatctggacgacgcactttcctgcaagcctctagccgacggcaactttaaagtaggagtccatatcgcagatgtgtcatacttcgttccggagggtagcgaccttgataaagtcgccgctgagagagccacttccgtctacctggttcagaaggtcgtaccaatgctgccacgtctcctttgcgaggaactttgttctctgaatcctatgtccgacaaactgactttcagcgttatttggaccctgacacccgaggggaagatattagatgagtggtttggcaggaccattatcagatcctgcactaaactaagctatgagcatgctcaatctatgattgagtcccctaccgagaagatcccagccaaagagctgcctccaattagccctgaacactcttctgaagaagtccaccaggctgttttaaatctgcacgggattgcgaaacagttaaggcaacagaggttcgtggacggagccctgaggcttgaccaactcaagttggcatttaccctggatcacgagacggggctgccccagggatgtcacatctacgagtatagggagtctaacaaattggtcgaggagtttatgctcttggctaacatggctgtggctcacaagattcatagggctttccctgaacaggcacttctgagaagacatccgcccccccagaccaggatgctgagtgatctcgttgaattttgcgatcagatgggcctgccggtggatttcagttctgctggtgccttgaataaatcactcacacagacgtttggggatgacaagtactctctcgctcggaaagaggtccttaccaacatgtgttctaggccaatgcagatggcgttgtacttttgttcgggcctactgcaagaccccgctcagttccgccactatgctctcaacgtaccgctttatacacacttcaccagcccaattaggagatttgccgatgtactggttcacaggctgttggcagcagccctgggctaccgtgaaagactggacatggctcccgacacgttacagaagcaagcagaccattgtaatgatcggcggatggcaagcaagagagtacaggaactgagcacatcactgttttttgctgttctagtgaaggagtcagggccgctagagtccgaagccatggtgatgggcatccttaaacaggcattcgacgtgctggttcttcgctatggtgtccagaagagaatctactgtaatgcactggcccttcgctcacatcactttcagaaggtgggcaaaaaacctgagctgaccttggtgtgggaaccggaggatatggagcaggagcccgcacagcaggttatcacaatcttcagtctggtggaagtggtgcttcaggcagagtcaaccgcccttaagtattccgctatactgaaaagacccggcacccagggacacctcggacccgaaaaggaggaggaagagagcgatggggaaccagaggactcctcaacctcttag

SEQ ID NO: 114719 - DNA, 1071 bp, synthetic construct
  misc_feature 1..1071: note = Description of Artificial Sequence: Synthetic coding sequence
  source 1..1071: mol_type = other DNA
atgtcccatcccgattatcggatgaacctgcggcctttggggactcctcgaggagtcagcgccgtcgcaggcccacacgacatcggtgcatctccaggagataagaagagcaaaaatagatcaacgagggggaagaaaaaatcaatctttgagacttacatgtcaaaggaagatgtctccgaagggctcaagagggggaccttgatacagggggtgctccgtattaatcctaagaaatttcacgaggcatttatcccatccccagacggagacagagatatcttcattgacggggtcgtagccaggaacagagcactgaatggcgacctggtggttgtcaagctgctccctgaagagcattggaaggtcgtaaagccagaaagtaacgataaggagactgaggccgcttacgaatcagacattcctgaggaactgtgcggccaccatctgcctcagcagtctttgaaaagctacaatgactctccagacgtgatcgttgaagcccagtttgacggatcggactcggaagacggacacggtatcacacaaaatgttctcgttgatggggtgaaaaagctctcagtgtgtgtgtcagagaaggacaatgaaatcgaggcgcagcggtcaagctgggcttaccccgtctcccataggaaatccgaggagagaatggtgatgcacagactccagaagatgcgccccccagccttccacaagactcaggagctgtacagaagaaatccatgtaaggaccagcaaagatggtttacgtcatggcgcaaaaacatcctagaacagcaaccagccagctcaaattcttggttgatccgaactgctaattgcctaggcaacactccttgcttcctaccacagacgacagaatgcctagaatttatgtgcctgagtagaaccgtacctcgcacactctggcatgggctgaagataatgccaactcactgtagcagtgctgcactttggaccggtcgccgcactgccatcctcccctggggcagctggcttcgcgttctggggcgcctggtcaagctgtctttgaagcagaaggagtactag

SEQ ID NO: 114720 - DNA, 2658 bp, synthetic construct
  misc_feature 1..2658: note = Description of Artificial Sequence: Synthetic coding sequence
  source 1..2658: mol_type = other DNA
atgagccacccggactatcggatgaacctgcggccacttggcacaccccggggggtatccgcggtagctggacctcacgatattggcgctagccctggcgacaagaaatccaagaataggtcgacacgcggtaagaagaagtcaattttcgaaacttacatgtccaaggaagacgtctccgaaggactaaagcgggggacactcatccagggtgtgctgcggataaatcccaaaaaattccacgaggcttttattccatcgcccgatggagatcgcgacatcttcatagatggggtggttgctagaaacagagccctcaatggggaccttgtcgtggtgaaattgctgccagaggaacactggaaagttgttaagccagagtccaacgacaaagaaactgaagcagcgtatgagtctgacatccccgaagagctatgcggacatcatctgccccagcagtcacttaaaagttacaatgatagtcccgatgtcattgtggaggctcagtttgatggctctgatagtgaggatggccatggaatcacccagaatgtgctggtggatggcgtcaagaagctgtcagtatgcgtttccgagaaaggcagagaagacggggacgccccggtgacaaaggacgaaaccacatgtattagccaggatacccgggcactgagtgaaaaatctctccaacgcagtgcaaaggtggtgtatatcctggagaagaagcattctcgagcagctactggctttctgaagctgctcgcggataaaaactccgagctgttcagaaaatatgccctgttcagcccctccgaccatcgtgttccgcgtatttatgttcctcttaaggactgcccacaagatttcgtcgcccggccaaaagattacgcgaacactctgttcatctgccgtatcgtggactggaaggaggactgcaactttgctctcggtcagcttgctaaaagcctgggccaggccggagagattgagccagagaccgaaggaattctgacagaatatggggtcgatttctctgacttctcatccgaagtgctggagtgcctgccccaaggactgccatggacaatccccccagaggaattctctaagaggcgcgacttaaggaaggactgcattttcaccatcgacccaagcaccgcccgtgatctcgacgatgccctgtcttgtaagcctctggccgatggaaactttaaggtgggtgtgcacattgccgacgtgtcctactttgtgcctgaaggttccgatctcgataaggtggctgctgagcgcgctacctcggtctacctagtgcaaaaggtcgtacctatgctcccccgcctcctctgtgaagagctatgctctctcaacccgatgtccgacaagttgacttttagcgtcatctggactctcacacccgaagggaagatcctcgatgaatggtttggaagaacaatcattagatcatgcaccaaactttcctacgaacatgcacagtccatgatcgagtctccaacagagaagatccctgcaaaggagcttccaccgatctcccctgagcacagctctgaggaggttcatcaagcggtgctgaacctacacggcattgccaaacaattgaggcaacagcgattcgttgacggtgctttaagactcgatcagctgaaactggcgttcaccctcgaccacgaaaccggtctgccgcagggctgtcatatttatgaatatcgagagagcaataagctcgtggaggaattcatgctgctggccaatatggccgtggcccataaaattcatcgagccttccccgagcaagccttgttacggcgtcaccccccaccccagacaaggatgctgagcgatttagtggagttttgtgaccagatggggctaccggtggacttctcctcagctggagctcttaataagagccttacccagactttcggtgatgataaatacagtcttgcgcgcaaggaagtgctcactaacatgtgctctagaccgatgcagatggccctgtacttttgttctggtctgctgcaggacccagcgcagttcagacactatgcactgaatgtaccactctatacccatttcaccagccctatccgacgctttgctgacgtactcgtccaccgccttttggccgctgcattggggtatagggagaggttggacatggcacccgacactctgcagaagcaagccgatcattgcaacgaccggcgaatggccagcaaaagggtgcaggagctgtccacctccctgttctttgctgtacttgtgaaggaaagcgggccccttgagtcagaggcaatggtgatggggattctgaaacaggccttcgacgtgctagtgcttcgctatggtgtacagaagcgcatctactgtaacgccctggccctacggtctcatcactttcagaaggtgggtaagaaaccagaattgactctggtctgggagccggaggacatggaacaggagccagcacagcaggtcattactatcttctcactggtggaagtggtgctgcaggccgagtcaaccgcgctgaagtacagtgcgatcctgaagaggcctggtacgcaaggtcacctgggtcctgagaaagaagaggaggaatcggacggggaacccgaagacagttcaacttcgtag

SEQ ID NO: 114721 - DNA, 750 bp, synthetic construct
  misc_feature 1..750: note = Description of Artificial Sequence: Synthetic coding sequence
  source 1..750: mol_type = other DNA
atgtcgcaccctgactaccggatgaatctgaggcctttaggcacccccagaggtgtttccgccgtggctggccctcatgatatcggagcttcccctggtgacaaaaagagcaaaaacagaagtacgcgcgggaagaaaaagagcatcttcgaaacctatatgagcaaggaggatgtgagcgagggcctcaaacgcggcactctgatccaaggagtcctgcgtatcaacccaaaaaagttccatgaggcctttattccaagccctgacggcgatcgcgacattttcatagacggggtggtggcacgcaacagagcgctaaacggagatctcgtggtggtgaagttactaccagaagagcattggaaggtggtcaagcccgagtcaaatgataaagaaactgaagccgcctatgaatcagacatcccagaagagctctgcggacaccatctccctcagcaaagcctcaaaagctacaacgactctcccgacgtcatcgtggaggctcagtttgatggcagtgattctgaggacggacatggtattacccaaaacgttcttgttgacggcgtgaaaaagttgagcgtgtgcgtttccgagaaggggagagaagacggggacgctcccgtcactaaagacgagaccacctgcatttcacaggacacaagagccttgagcgaaaagagtcttcaacgctccgccaaagtaatcgcataccgcttctcaccgcgcgtgcagatggccttcacttag

SEQ ID NO: 114722 - DNA, 2028 bp, synthetic construct
  misc_feature 1..2028: note = Description of Artificial Sequence: Synthetic coding sequence
  source 1..2028: mol_type = other DNA
atgtctcatccagattatcgcatgaacttgcgccccctgggcacccctcgcggtgtgtccgccgtggccggcccccacgacatcggcgccagcccaggggataaaaaaagcaaaaatcgctcgaccagagggaagaaaaagtctatttttgagacttacatgtctaaggaggacgtgtccgagggcctaaagcgaggcacgttaatccagggggtcttgcggatcaatcccaagaagttccacgaagcattcattcctagccccgacggtgatcgcgatatcttcattgatggcgtggtcgcccggaatagggcccttaatggcgacctagtggtggtcaagctgctgccggaggagcactggaaggtggttaaacccgaatccaacgacaaagagacagaggcagcttacgagtctgacattccggaagagctatgcggtcatcaccttcctcagcagtctttgaagtcatataacgatagtccggacgtgattgtcgaagcccaatttgatggcagtgacagcgaagacggccatgggattactcaaaacgtgctggtcgacggagttaagaagctctcagtatgcgtgtccgagaaagggcgagaggatggcgacgctcccgtgacaaaggatgagaccacttgcattagccaggacactcgagctctgtccgaaaaatctctacagagaagcgccaaggttgtatacatcctcgagaagaaacactcacgggccgccacaggttttctgaaactcctggcagacaagaattcagaactgtttcgcaagtacgctttgtttagccctagcgatcatcgcgtgccacggatatacgtgccattgaaggactgcccgcaggatttcgtggccagaccaaaagattatgccaacacattgtttatttgcaggattgtagattggaaagaggattgtaacttcgcattagggcaactagcaaaatcactcggccaagccggggaaatcgagccagaaaccgaaggaatcctgacggaatacggggtggatttctccgacttctcaagtgaagttctcgagtgcctgccacaagggctgccctggaccatacccccggaggagttttcaaaacggcgagacctgcgaaaagattgcatcttcactatagacccgtctacggcccgcgacttggacgatgcgctttcctgcaagcctctggccgatgggaactttaaggtgggggttcacattgccgatgtgagctactttgttccagaaggctccgaccttgataaggtggctgctgagcgtgccacatcggtctatctggtgcagaaggtcgtgcctatgctgccacggcttttatgtgaggaactgtgtagcctgaaccccatgtcagacaaactgaccttctccgtgatctggacactcacccctgaaggcaagattctggatgagtggtttgggagaactatcataaggagttgtaccaaattgagctatgagcacgcccagtccatgattgagtctcccactgagaaaatccctgcaaaagaactgcctcctattagtccagaacacagctccgaggaggtgcatcaggccgtgctcaacctgcacggaatcgccaaacaactgaggcagcagcgattcgtcgatggggccctccgcttggaccaactgaagcttgcctttaccttagaccatgagaccggcctgcctcagggttgccatatttacgagtacagagaaagcaataaattagtcgaggaatttatgttattagccaacatggcagtggctcacaaaatccaccgggccttcccagagcaggccttgctgcgtcggcacccccctcctcagacaagaatgctgagtgatctggtggagttctgtgaccagatgggcctgcccgtggactttagctcagctggcgccctgaataagagcctgacacagacctttggcgatgacaagtattccctggccaggaaggaagtgttaactaatatgtgttcccggctgcctgtccctccccattggctttag

SEQ ID NO: 114723 - DNA, 435 bp, synthetic construct
  misc_feature 1..435: note = Description of Artificial Sequence: Synthetic coding sequence
  source 1..435: mol_type = other DNA
atgtcgcaccctgactaccgaatgaatctacgacctctggggaccccacgtggggtctctgccgtggcaggtccacacgatattggcgcaagtcctggtgataagaaatcaaagaaccgttcgacaaggggcaaaaagaaatccatctttgaaacatatatgagcaaggaggatgtcagtgagggactaaagcgcggaacgctaatccagggagtactgaggatcaatcccaagaaatttcacgaagcctttattccctccccagacggagatcgggacatttttattgatggagttgtggcaagaaacagggctctgaatggggacctcgtagtggtgaagctgctgcccgaggaacattggaaagtcgtgaagccggaaagtaacgacaaggaaactgaggccgcgtacgagtccgacattccagaagaatag

SEQ ID NO: 114724 - DNA, 1860 bp, synthetic construct
  misc_feature 1..1860: note = Description of Artificial Sequence: Synthetic coding sequence
  source 1..1860: mol_type = other DNA
atgtcacacccagactaccgcatgaatttaaggcctctggggactccccgaggagtcagtgccgtggctggaccacacgatattggagcatcccccggcgacaagaagagtaagaaccggagcacacgtggcaaaaaaaaatccattttcgagacctacatgtccaaagaggacgtttcggaagggctcaagagagggacactaattcagggcgtcctaagaatcaaccccaagaagttccacgaggcttttattcctagcccagacggagatagagatatttttattgatggcgtagttgccaggaacagggccctgaacggcgacctcgtggtagtgaaactgttacctgaagagcattggaaagttgtgaaaccagaatctaatgacaaagagaccgaggccgcctacgagtccgacattccggaggagctctgtggccaccatttacctcaacagagtttgaagtcctataatgactcgccggatgtaatcgtggaagctcagtttgatgggtcggactctgaggatggacatgggataacccagaacgtgttagtagatggcgtcaaaaagctctcggtgtgcgtgtctgagaaagggcgcgaggacggggatgcaccagtgactaaagacgagacaacctgtatatcccaagacactagagcccttagtgaaaagagcctgcaacggtccgccaaggttgtttacatcctggaaaaaaaacacagcagggccgcaaccgggttcttgaaactgctggcggacaagaactccgaactctttaggaagtacgccctgttcagccctagtgatcatagagttccacggatctacgtccccctgaaggactgccctcaggactttgttgccagacccaaagactacgcgaataccctcttcatctgtcgaatcgtggattggaaggaagactgtaactttgccctgggacagttggctaagtccctggggcaggcgggagagattgagcctgaaaccgaggggatactcaccgaatatggtgtagacttttctgacttttcctccgaggtgctggagtgtcttccacagggtctgccctggaccattccacccgaagaatttagcaagagacgggatctacgcaaagactgtatcttcacaattgatccgtccactgcacgcgacctggacgacgcactgagctgcaaacctctcgctgatgggaatttcaaggtgggagtccacattgctgatgtgagctattttgtgcccgagggaagtgacctcgataaagtggcagccgagagggccacaagcgtctatctagtccaaaaggtcgtgccaatgctgcctcggttgctttgcgaggaactttgttccctcaatccaatgagcgataaactaacattcagcgtaatctggaccctcacccccgagggaaagattttagacgagtggttcggccgcaccattatccgctcttgtaccaaactgagctatgagcacgcacagagtatgattgagagcccaacggaaaaaatcccggctaaagaattgcctccaatctctcccgagcatagtagcgaggaagtacaccaggctgtgcttaatcttcatgggattgcaaagcagttgcggcaacagcggtttgtagacggagctttgcggctcgatcaactgaagctcgccttcaccctggatcacgagactggcctgcctcagggttgccatatctatgaatatagggagagcaataaaccctgttgcgcaggaactccgcgccctaagcagggttgttctgtcacatggtggaactctgccacccggtggggctgcccttggactagcgcccctcaggagccatccatgaaagcttag

SEQ ID NO: 114725 - DNA, 615 bp, synthetic construct
  misc_feature 1..615: note = Description of Artificial Sequence: Synthetic coding sequence
  source 1..615: mol_type = other DNA
atgtctacagagaccgaattgcaagtcgcagtgaagacatccgcgaagaaggactctcgcaagaaggggcaggaccggtcggaggctacattgattaaaaggtttaagggagagggtgtgcggtacaaggcgaagttaattggcattgacgaagtctctgccgctagaggagataagctctgccaggattctatgatgaaattaaagggggtcgtcgccggagcgcgcagcaagggcgagcacaagcagaagatcttcttgaccatcagctttggcggcattaagatattcgacgaaaaaacaggtgctctgcagcatcatcacgctgtgcatgaaatctcctacattgctaaagacatcacagaccatagagctttcgggtatgtctgcggcaaggagggcaaccaccggtttgttgctatcaagacagcacaagccgctgagcccgtaatcctcgacttacgcgacttgttccagctgatatatgagctcaagcagagagaagagctcgagaagaaggcacagaaggataagcaatgtgaacaggcagtgtatcaggtgcctacttcccagaagaaagaaggcgtatatgacgtgcctaagtctcagccatag

SEQ ID NO: 114726 - DNA, 642 bp, synthetic construct
  misc_feature 1..642: note = Description of Artificial Sequence: Synthetic coding sequence
  source 1..642: mol_type = other DNA
atgagcacagaaacagagttacaagtcgctgtgaaaacttccgccaaaaaagatagtcggaaaaagggccaggacagatccgaagctaccctcataaagagatttaaaggagaaggtgtgcgttataaagctaaactaatcggaatcgacgaagtcagtgcagcccggggcgacaagttgtgtcaggatagtatgatgaagctgaaaggcgtcgtggctggcgcacgctctaaaggcgaacataaacaaaaaatattcctgacaattagtttcggaggaatcaaaatatttgacgagaagactggcgctcttcagcatcaccacgcggtccatgagatatcctacatagctaaggacatcactgaccaccgcgctttcgggtacgtctgtggtaaggaaggcaatcatcgatttgtggcgattaagaccgctcaggctgctgaacccgtgattcttgaccttcgcgacttgtttcagctaatctatgaattgaagcaacgggaggagctggaaaaaaaggcacaaaaggacaaacaatgcgaacaggctgtctaccaaaccatcctcgaggaggatgtcgaggacccagtgtatcaagtaatctcggagacatctcgggggtttcgtttcaaatctgattag

SEQ ID NO: 114727 - DNA, 1767 bp, synthetic construct
  misc_feature 1..1767: note = Description of Artificial Sequence: Synthetic coding sequence
  source 1..1767: mol_type = other DNA
atgtccaccgaaaccgaactgcaggtggctgttaaaacaagcgccaagaaggattcccggaagaaagggcaggatagatctgaggccacacttattaagagattcaagggtgagggcgtccggtacaaggcaaaactgatcggaatcgacgaggttagtgctgccaggggcgacaagctgtgccaggactctatgatgaagttaaagggagtcgtggcaggagctaggtctaaaggagagcataagcaaaagatcttcctgacgatttcctttggcggaatcaaaatcttcgatgaaaagaccggtgcattgcagcaccaccatgctgtgcatgagatcagctatattgcgaaagatattactgaccaccgggctttcggttatgtttgtggtaaggagggcaaccacagattcgtcgccatcaagacggcccaggcggcggaacctgtaatcctggaccttagagaccttttccagctgatctatgagttaaagcagagagaggagctagaaaagaaggctcagaaggataagcaatgcgaacaggcagtctaccaaaccatattagaagaagacgtagaggaccccgtgtaccagtacattgtctttgaggccggtcacgagccgatcagggacccagagacagaagagaatatctaccaggtgcctacctcgcagaaaaaagaaggcgtgtatgatgttccaaaatcacagcctgtttccaatggttattcgttcgaagacttcgaagagcggttcgcagccgccactcctaaccggaacttaccaacagattttgacgaaatttttgaagccaccaaggcagtgactcagctggagcttttcggagatatgtcaaccccaccagatatcacatcacccccgactcctgccacgcctggggatgcttttattccttcatccagtcaaactctccctgcgagcgctgacgtattctcctctgttccgtttggaactgctgccgtgcccagcggctatgtcgctatgggtgcggtgcttccgtcattctgggggcagcaaccactggtgcagcagcagatggtgatgggcgcacaaccaccagttgcccaggtgatgcccggtgcccagccgattgcgtggggacagccagggctgttccctgcaacccagcagccttggccaacagtggcagggcaattcccacctgccgccttcatgcccactcagaccgtgatgccattgccagctgcaatgttccaggggccccttaccccactggcaaccgtgcctgggacgtcagacagcacccggagcagtccgcagaccgacaagcccagacagaaaatgggaaaggagacttttaaagacttccagatggcacagcccccacccgtgcccagcagaaaaccggaccagcccagcctcacatgtacgtctgaagccttctcttcctactttaataaagtgggcgtagctcaagacactgatgactgcgacgatttcgatattagccagttaaatctgaccccagtgacgagcacaactccttcaacaaactcaccacctacacctgcacccagacagtcctcaccctctaaatcaagcgcatcccacgcttctgatccaacgaccgacgacattttcgaggaaggattcgaatccccatctaagtccgaggagcaagaggccccagacggatctcaggcgagttccaattcggacccattcggggagcccagtggagaaccaagtggagacaacatcagccctcaggccggttcctag

SEQ ID NO: 114728 - DNA, 720 bp, synthetic construct
  misc_feature 1..720: note = Description of Artificial Sequence: Synthetic coding sequence
  source 1..720: mol_type = other DNA
atgtctaccgagaccgaacttcaagttgcagtgaaaacttctgcaaagaaagacagcaggaaaaagggccaagatagaagcgaggctacattaattaaacgctttaaaggcgagggggttcggtataaggccaagttaatagggatagatgaggttagcgccgccagaggggataaactctgccaggattccatgatgaaactgaagggtgtggtggccggggcccgctcaaaaggtgaacacaagcagaaaatcttcctcacgatctcattcgggggcatcaagatcttcgacgagaagactggtgtcccaacttcacagaaaaaggaaggtgtgtacgatgttcccaaatctcagccagtgagcaacgggtacagtttcgaggattttgaggagcgcttcgcagctgcaacaccaaatcgaaatctgcccacagactttgatgagatcttcgaagccacaaaagccgtgacccagctggaactctttggcgatatgtccacgccgccagatataacaagcccccccacacccgcaacccctggagacgcattcattccctctagtagccagaccctgcccgcaagcgcggatgtgttttccagtgtacctttcgggaccgctgccgttcctagcggctatgttgccatgggcgctgtcctcccctctttctgggggcagcagcctctggttcagcagcaaatggtcatgggagcctag

SEQ ID NO: 114729 - DNA, 1668 bp, synthetic construct
  misc_feature 1..1668: note = Description of Artificial Sequence: Synthetic coding sequence
  source 1..1668: mol_type = other DNA
atgtccactgagacagagctgcaagtcgcggtcaaaacttcagccaagaaagattccagaaagaagggccaagatagatctgaagctaccctaattaagaggtttaaaggagagggggtgcggtacaaggcaaaactcatcggaattgatgaggtctccgctgcaagaggcgataaattatgtcaggattccatgatgaagttgaaaggggtcgtggccggggcccgctcaaaaggggagcacaaacaaaaaatcttcctcactatctcattcggagggatcaaaatcttcgacgagaagacgggggcattgcagcatcaccacgctgtgcacgaaatctcctacatcgctaaggacatcactgatcacagggcctttggctacgtttgcgggaaagaggggaatcaccgtttcgtggctattaaaaccgcccaggctgctgagcccgtcatccttgaccttcgggatctgtttcagcttatctatgaactaaaacagcgagaagaactcgagaagaaagcacagaaagacaagcagtgtgaacaggctgtgtaccagactatcctggaggaggacgttgaagacccggtttaccaatacatagtcttcgaggccggacatgagcccatcagggaccccgaaacggaggaaaacatatatcaagtgccgacatctcagaaaaaggaaggagtttacgacgttcctaaatcccagcccgtgtcagcagtcacacagctggagctttttggcgacatgagcaccccccccgatatcacttccccacccactccggccacacctggcgacgcattcatcccttcctcatcgcagacacttcccgcatcggccgacgtgtttagctccgtcccttttggcactgccgctgtcccaagcggctatgtggcgatgggcgccgtcttgccaagtttctggggccagcaaccactggtccagcagcagatggtgatgggcgcccagcctccggttgcccaggtcatgcccggcgcccaacccatcgcatggggtcagccggggctgtttcccgctacacagcagccttggcccaccgtagctggccagtttccccctgcggcatttatgccgacccagacggtcatgccactccccgccgccatgtttcagggaccccttacaccactggcgaccgtgcctggcacttccgacagtactagatcctctccacagaccgacaagcctagacaaaagatgggcaaggagacgtttaaggacttccagatggcacagcccccacccgtgcctagcagaaagcctgatcagccaagcctcacatgtacgtcagaagcttttagcagttatttcaataaagtaggagtcgcccaggatacggatgattgcgacgatttcgatatttcacagctaaacctgacccctgtgacgagcaccacaccatctacaaattcaccccctacaccagcccctcgccaatctagtccctccaagtcatctgcatcgcacgcttcagacccgacgaccgacgacatctttgaagagggatttgagtcacccagcaagagcgaagagcaagaggcacctgacggcagtcaggccagcagtaatagcgaccccttcggcgaaccatctggtgagccctccggagacaatatatcccctcaggccgggagctag

SEQ ID NO: 114730 - DNA, 1668 bp, synthetic construct
  misc_feature 1..1668: note = Description of Artificial Sequence: Synthetic coding sequence
  source 1..1668: mol_type = other DNA
atgtccactgaaacagaattacaggtcgctgtaaagaccagtgccaagaaagattcccggaagaagggccaggacaggagtgaagccacactgatcaaaaggttcaaaggcgagggcgtgcgatataaggctaagcttattgggatcgatgaagtcagtgccgctcgtggagacaagctatgccaggactctatgatgaagctcaaaggggttgtcgcaggcgcccgaagtaaaggcgagcacaagcagaaaatttttctgacaatatctttcggtggaataaagatttttgacgaaaagaccggcgccttacagcaccatcatgcagtgcatgagatcagttatatcgccaaggatatcaccgaccaccgcgctttcggatacgtgtgcggaaaagagggaaatcataggtttgtagctattaaaaccgcccaagcagctgagcccgttatcttagatttacgagacctgtttcagctgatctacgagctgaagcagcgggaggaattagagaagaaggcccagaaggataagcagtgcgagcaagcagtgtaccagacaatactggaagaagatgtcgaagatccagtgtaccagtacatcgtcttcgaagctggtcatgagccgatccgtgaccccgagacagaagagaacatctaccaggtccccacgagtcaaaagaaggagggtgtgtatgatgtgccaaagtcccagccggtgagcgcagtgacacagctggaactttttggcgacatgagcacccctcctgacataacgagcccccctacacccgcaacacccggtgacgcttttattcccagcagctctcaaaccctcccagcttctgccgatgtcttttcctccgttccttttggaaccgccgctgttccaagtggctatgtcgccatgggagctgtactcccctcattctggggacagcaacccttagtgcaacagcagatggttatgggagctcaacccccagttgctcaggtcatgccgggcgcccagcctatcgcctggggccagcctgggctgttccccgccactcagcagccttggcccactgtcgccggccagtttccccctgcagcctttatgccaacccagacagtgatgcccctgcccgccgccatgtttcagggaccactgaccccgctagcaaccgtccctggcactagtgatagtaccagatcaagcccccagaccgataagcctaggcaaaagatgggcaaggagacctttaaggattttcaaatggcacagcctccccccgtgccaagtcggaagcctgaccaaccctccctgacatgcacaagcgaagccttctccagttactttaacaaggtcggggtggcgcaagacaccgacgactgcgacgattttgacattagtcagctcaatctgacacccgtgacttcaacaaccccttcaacgaattcgcctcccacacctgcgccccggcagtcctccccgtccaaatccagtgcatctcacgcctctgaccccacaaccgatgacatttttgaggaaggctttgagagcccatccaagtccgaggaacaggaggcaccagatggctcccaggcgagctccaacagcgatcctttcggtgagccaagtggcgagccctctggcgataacatttcaccccaggctggctcctag

SEQ ID NO: 114731 - DNA, 1668 bp, synthetic construct
  misc_feature 1..1668: note = Description of Artificial Sequence: Synthetic coding sequence
  source 1..1668: mol_type = other DNA
atgagtactgaaacagaactccaggtggcggtgaaaacctccgctaagaaagacagtcgtaagaaaggccaggacagaagcgaggctaccctgatcaagcgctttaagggtgaaggggtgcgatacaaggcaaagttgatcggaattgatgaggtcagtgccgcccggggtgacaaactatgccaggattccatgatgaagctaaagggtgtggttgctggcgctagatccaagggtgagcacaaacagaaaatatttctgaccataagctttggcgggataaagatcttcgatgaaaaaaccggagcacttcaacatcaccatgctgttcatgaaatctcatatattgccaaagacattacagaccaccgcgcctttggttatgtgtgcggcaaggagggcaatcaccgattcgtcgccattaagactgctcaagcagctgaacctgtcatcttagacctgagggaccttttccaactgatatacgaactaaaacagcgcgaggagctcgaaaaaaaggctcagaaggataagcagtgtgagcaggctgtataccagactatcctggaagaggatgtggaagaccctgtgtaccagtacattgtgttcgaggccggacatgaaccaattcgggacccagagacagaagaaaacatttatcaggtgcctacttcccagaagaaggagggggtctacgacgtgcccaagtcccagcctgtgtccgccgtaacccaactggagctttttggcgatatgagtaccccacctgacatcaccagccctccaactccggccacacctggagacgccttcataccaagctcttctcagacacttccagcttctgccgatgttttttcaagcgtcccatttggcactgcagccgtgccctcaggctacgtggctatgggggccgtgttgccttccttttggggacagcagccccttgtgcagcaacaaatggtgatgggggcgcaacctcccgtggcacaagtgatgccgggggctcagcctatcgcctggggtcagcccggccttttccctgccacacagcaaccttggcccacagtggctggccaatttcccccggccgcattcatgcccacccagaccgtgatgcccctccccgcagcaatgtttcagggccccctcactccgctggcaactgtgccaggtacaagtgactccactagaagctccccccagaccgataagcctcgtcaaaagatgggaaaggagacctttaaagacttccaaatggcacagccaccaccagtgccctctaggaagcctgaccagccctccctgacgtgtacaagtgaggcgttctcttcctacttcaataaagtaggcgtggcccaggatacagacgactgcgatgatttcgatatttcacagctgaatttgacaccagtgacctctaccacgcccagcactaatagtcccccgactcctgctcctcgccagagttccccaagtaaatcctctgcatcccatgcaagtgacccaactactgacgacatattcgaagaaggcttcgagagtccgtcaaaatccgaggaacaggaggcaccggatgggagccaagccagttctaatagcgacccttttggcgaaccgtcgggggaacccagcggtgataacatctctccacaagccggctcctag

SEQ ID NO: 114732 - DNA, 1614 bp, synthetic construct
  misc_feature 1..1614: note = Description of Artificial Sequence: Synthetic coding sequence
  source 1..1614: mol_type = other DNA
atgtcgaccgaaaccgagctgcaggtcgctgttaaaacatcagctaagaaagattctcgcaagaagggtcaagatcgtagtgaggcaactctgattaagcgctttaaaggagaaggcgtaagatataaggctaaactgatcgggatcgacgaggtgtcggctgctaggggcgataaactgtgtcaagacagcatgatgaagctgaagggtgttgtcgcgggcgcccgaagcaaaggagagcataaacagaagatcttcctcacaatctccttcggcgggatcaaaatattcgatgaaaagactggggcgctgcagcaccatcatgccgttcacgaaattagctacatcgccaaggatattactgatcaccgtgcatttggttatgtgtgcggcaaggaggggaaccatcgctttgtcgccatcaagacggctcaggctgcggagcccgtgatactcgacttgagggacctgttccaactgatctatgaactgaagcagagggaggagttagagaaaaaggcccagaaggacaaacaatgcgaacaggccgtctatcaggttccaacttcacaaaagaaagagggagtttacgacgtccccaaatctcagcctgtctccaatggttatagcttcgaggactttgaggaaagatttgccgctgccacccccgcagtgacacagttggagctttttggggacatgagtacccctccggacattacttcccctccaacccctgccacccccggagatgcatttatcccaagctcttctcagaccctgcccgcttcagccgacgtattttctagcgtcccctttggtactgccgccgtgccttcaggctacgttgcaatgggagcagtcttgccaagcttctggggccagcagcctttggtgcagcagcaaatggtgatgggcgcgcagcccccagtggcgcaggtcatgccaggtgcacaaccaattgcgtggggacagccaggcctgtttcccgctacccagcaaccttggcctaccgtagccggacaattccctccagcagccttcatgccaacccagaccgtcatgccgttgcccgccgccatgttccaaggtcctctcactcctctggccactgtccctggcactagcgattccacacgatccagccctcagacagacaagcccagacaaaagatggggaaagaaacgttcaaagatttccagatggcccaacccccgcctgtccctagccgaaagcccgatcaaccttcactgacatgcacatcagaggctttctcaagctacttcaacaaagtcggagttgctcaggacactgatgactgcgacgactttgatatcagtcagttgaatctgaccccggttacgtctacaactccaagcacaaattctccccctacacctgcccctaggcaaagctcaccttcaaaatcctccgcctctcacgcctccgatccgactactgatgatatcttcgaggaagggttcgaatccccttccaaatcggaagagcaggaagcccctgacggaagccaggcctcctctaacagtgaccctttcggggagccttccggtgaaccctcaggcgataatatttccccccaagccggatcgtag

SEQ ID NO: 114733 - DNA, 1662 bp, synthetic construct
  misc_feature 1..1662: note = Description of Artificial Sequence: Synthetic coding sequence
  source 1..1662: mol_type = other DNA
atgagcaccgaaacagaacttcaagtcgccgtgaagacatccgccaagaaggattcccggaaaaaaggtcaggatcgctctgaagctaccttgattaaaaggtttaagggagaaggcgtgcgttataaggccaagctgatcggcatcgacgaggtgagcgctgcccggggagataagctgtgtcaggattcgatgatgaaactcaaaggcgtcgttgcaggtgctcgctccaagggcgaacacaaacagaaaatctttcttacgatcagtttcggtggcattaagatctttgacgaaaagactggggctctccaacaccaccacgctgtgcacgagatatcttatatcgccaaagatatcaccgaccacagagcttttggatatgtctgtggcaaagagggaaaccatcgttttgtggccattaaaacggcccaggcagccgaacctgtgattctggaccttcgagacctattccagctgatctatgagcttaagcagcgagaagaactggagaaaaaggcccagaaagataagcagtgtgaacaagctgtttaccaggttccaacctcccagaagaaagaaggtgtctatgatgtacctaagtctcagcccgtgagtaacggctatagcttcgaagactttgaagagcgtttcgccgccgccacccccaaccgcaatctcccaaccgatttcgacgagatattcgaggccactaaggcagtgactcagctggaacttttcggagatatgagcactccacccgacattaccagccctcccactccggccaccccgggagatgcgttcattccttcgagctcgcagactttgccagcttctgccgacgtgtttagttccgtccccttcggcacggccgctgtgcccagtggatacgtcgcaatgggagcagtactgcccagcttttggggtcaacagccattggtacaacagcagatggtgatgggagcgcaacctcctgtggctcaggtcatgcccggcgcgcaacccatcgcatggggtcagccaggtctgttccccgctacccaacagccctggcccaccgttgcaggccagtttccacctgctgctttcatgccgacacagaccgtgatgccattgcctgctgccatgtttcaggggcccttgacccccctggccaccgttcccgggacgtctgattccactcgcagctcaccacaaaccgacaaaccaagacagaagatgggtaaggaaacttttaaggacttccaaatggctcaaccgcctccggtaccctctcgaaagccagatcagccatccttgacatgcacgtcagaggcattttcatcatatttcaataaggtcggcgtggctcaggacactgacgattgtgacgacttcgatatcagccagctgaacctgacccctgtgacaagtactacccctagtaccaatagtcctcctacgccagccccccggcagagttcacccagcaagagtagcgccagccatgcttccgatccgaccaccgacgatatcttcgaggaaggtttcgagtctccatctaagtccgaagagcaagaggcccccgatgggagccaggcctcatcgaactctgacccctttggcgaacccagcggcgagccaagtggggacaatatctccccccaagccggcagttag

SEQ ID NO: 114734 - DNA, 1410 bp, synthetic construct
  misc_feature 1..1410: note = Description of Artificial Sequence: Synthetic coding sequence
  source 1..1410: mol_type = other DNA
atgtcgaccgaaactgagctacaagttgcggtgaagacatcagccaagaaagactctagaaaaaagggtcaggaccggtccgaagcgacgctgatcaaaagattcaagggagagggggttagatataaggcgaagctgatcgggatagatgaagtctcagcagcgaggggtgacaaactctgtcaggacagtatgatgaaattaaaaggcgtggtggctggagctaggagtaagggtgaacataaacaaaaaattttcttaacgatctctttcgggggcattaagatctttgacgagaagactggagtgccgacatcacagaagaaggaaggcgtgtatgatgtccctaagagtcaaccagtgagtaacggctattcatttgaggacttcgaggaaaggtttgcggccgccactcccaatcggaatctgccaactgatttcgatgaaatttttgaagctactaaagccgttacacagttggagctctttggggatatgtcaaccccaccagatatcacctctccacccactccggcaaccccaggggatgctttcatccctagttcttctcagacactgcccgctagtgcagacgtctttagctctgtgccttttggcactgctgccgtgccttcaggctatgtcgccatgggcgcagttctccctagcttctgggggcagcaaccgctcgttcagcagcagatggtcatgggggctcagcctcccgtcgcccaagtcatgcccggtgcacaaccgatcgcttggggccagcctggcctttttcctgccacgcaacagccttggcccaccgtggccggtcagtttccgcctgccgcatttatgcccacccagaccgtgatgccactgcccgccgctatgttccaggggcctcttacaccactcgcgactgtgccaggcacttccgactcaacaaggtcttctcctcaaacggacaagccccgccagaagatgggcaaagaaacctttaaggactttcaaatggcacagccacctcctgtacccagccgtaaaccggaccagccttctctcacctgcacatctgaagctttcagctcttacttcaataaggttggggttgcccaagatacagacgattgtgatgattttgacattagtcagcttaacctgacgcccgtgacttcaaccactccctccacaaattcgccccccacaccagctccacgacagagttctccttccaaatcgagtgccagccacgcctccgaccctacaacagacgacattttcgaagaaggattcgagagcccttcaaaaagcgaggagcaggaagccccagacggctcacaggcctcatctaattccgacccttttggggaaccatctggcgagcctagtggggacaatatctccccacaggccggttcttag

SEQ ID NO: 114735 - DNA, 2313 bp, synthetic construct
  misc_feature 1..2313: note = Description of Artificial Sequence: Synthetic coding sequence
  source 1..2313: mol_type = other DNA
atgtccaatgaggtggaaacctccgccactaatgggcagcccgaccagcaggccgccccgaaagcaccctctaagaaagagaaaaagaagggaccggaaaagaccgacgaatatctcctggctcgattcaagggagacggtgtcaagtacaaagcgaaattgataggcatcgatgacgtgccggatgctcggggagataaaatgagtcaggacagtatgatgaagctcaagggtatggctgccgcagggagatcgcagggacaacacaagcagcggatatgggtgaacatatctctctctggtatcaagattattgacgagaaaacgggagtgatcgagcacgagcacccagtcaataagatcagctttattgcgagagatgtgactgataacagggctttcgggtacgtttgcggcggggaaggccagcatcagttttttgcaatcaaaactggtcagcaagctgaacctctggtagtggacctgaaggacctgttccaggttatctacaacgtgaaaaaaaaagaggaggaaaagaaaaagattgaggaagcaagcaaggccgtggagaatggcagcgaagctctgatgattctggatgaccagacaaacaagctcaagagcggagtggatcagatggacttgtttggtgacatgtcgacaccccctgacctgaactcccctacagagagtaaggacatcctgctcgtagacctgaacagtgagattgataccaaccagaattccctccgtgaaaatccatttctcaccaacggcattacatcatgcagcctcccacgcccgactccccaggcttcatttttaccagagaatgcattctccgccaaccttaatttcttccctactcccaaccccgatccgttcagagacgatccctttacccagcccgaccaatctaccccctctagttttgactctctgaaatcccccgaccagaagaaagagaattcttccagtagctctactcctctgtctaacgggccattgaatggagacgtcgactacttcggccagcagtttgaccagatttccaataggacaggcaagcaggaagctcaggcgggcccttggccattctcaagttctcagacccagcctgccgttaggacccaaaacggcgtgtcagagcgtgaacagaacgggttttcagtgaagagcagcccgaacccatttgtcggatctccaccgaagggccttagcatccagaacggagtgaaacaggacctcgagtcatcagtccagagctctcctcacgactcaatcgccataatcccacccccacagtctaccaaaccgggacgcggccggaggacagccaagagcagtgccaacgatctgctggcgagcgatattttcgcccctcccgtaagtgagccgtccggtcaggcctcccccaccgggcagcctactgcattgcagcctaatcctctcgatctctttaagactagcgcgccagcccccgtgggacctcttgtgggccttggtggcgtgacggtaactctccctcaagccgggccctggaataccgcgagcctcgtgtttaaccaaagcccatccatggcacctggggccatgatggggggacagccctctggattttcgcagcccgtgatattcggaacctccccggctgtttcagggtggaaccagccatctccctttgctgcatcgacgccaccaccggtcccagttgtgtggggcccatccgcgagcgttgctcctaacgcctggagcacaacctctcctttaggaaacccctttcagagtaacattttcccggcacccgccgtgtctactcagccaccaagcatgcatagtagtctgctcgtgacccccccacaacccccgcctcgtgctggcccccctaaggacatcagttcggacgcttttactgcgctagatcctctgggcgacaaggagatcaaagacgtcaaggaaatgtttaaagacttccagcttcgtcagccccccgctgtgcctgcaaggaagggcgagcaaacatccagtggcactctgtccgcgttcgcctcttacttcaacagcaaggttggcatcccccaagagaacgcagaccacgacgactttgatgccaatcaactgctgaataagattaatgagccacctaagcctgccccacgccaggtttccttgcctgtgacgaaaagtaccgataatgctttcgaaaatccctttttcaaagacagcttcggcagctcccaagcgagtgttgcgtcctcgcagcccgtatcctcagaaatgtatcgagatcccttcgggaatccttttgcctag

SEQ ID NO: 114736 - DNA, 1659 bp, synthetic construct
  misc_feature 1..1659: note = Description of Artificial Sequence: Synthetic coding sequence
  source 1..1659: mol_type = other DNA
atgtctaatgaagtcgagacaagtgccacaaacgggcagccggaccagcaagctgcacctaaggccccatctaagaaagagaagaagaagggccctgaaaaaaccgacgaatacctgcttgctcgcttcaagggcgacggagtgaaatacaaagccaaactgattggcattgacgatgtgcccgatgcgcgaggagataagatgtcacaggacagtatgatgaaactgaagggaatggccgccgccggacggtcacaaggtcaacataagcagaggatctgggttaatattagtctgagcggcatcaaaattatcgatgagaagaccggtgtgattgagcatgagcaccccgttaataaaatcagcttcatcgctcgcgacgtgaccgacaacagagctttcgggtatgtgtgtggaggggagggacagcaccagttcttcgctattaagaccggtcagcaggccgagccgttggtcgtagacctgaaggacctatttcaggtgatttacaatgtgaagaagaaagaagaggagaaaaagaagattgaggaagcatccaaagccgtagagaacggatccgaagccttgatgatcttggacgatcagaccaataaactgaagtcaggcgtcgaccaaatggatttgttcggggacatgtcaacaccccctgatttgaactctcccacctccagcgcaaacgacttactggcaagcgatatttttgcccctccggtgtctgaacctagtggacaggctagccctacaggacagccgaccgcactgcagccaaatcctttagacttgttcaagacttctgcaccggcccccgtgggccctttggtgggactgggcggggtaaccgtgaccctgccgcaggcaggcccctggaacacagcctctctcgtgtttaatcaatcacctagtatggcaccgggggccatgatgggtgggcagccttcaggattctctcagccagtaatttttggaacatcccccgcagtttccggctggaatcaacctagccccttcgccgctagtactcctccacccgtgcctgtcgtgtgggggcccagcgctagcgtggcacctaatgcctggagtacaacttcacccctcggaaacccatttcagtccaatatattccctgcccccgccgtgtccacccaaccaccctctatgcactctagcctgctggtaactcctccccagcccccaccccgagccggacctccaaaggatatctcctcagatgccttcaccgccttagaccccttgggagataaggagattaaggatgtgaaagagatgtttaaggactttcagttgcgccagccacctgctgttccagccagaaagggtgagcaaacttctagtggaacactttccgcatttgcaagttattttaacagcaaagtgggcattcctcaggaaaacgccgaccatgatgactttgacgccaaccagttgctcaataaaattaatgaacccccgaaacctgctccgagacaggtgagcctgccagtcaccaagtctaccgacaatgctttcgagaaccctttttttaaggactcttttggctccagccaagcttcagtcgcttcaagtcaacccgtcagctcagagatgtatagggatcccttcggtaatccgtttgcctag

SEQ ID NO: 114737 - DNA, 204 bp, synthetic construct
  misc_feature 1..204: note = Description of Artificial Sequence: Synthetic coding sequence
  source 1..204: mol_type = other DNA
atgtctaacgaggtcgagacgagcgcaacaaatgggcagcccgatcagcaagccgcgccgaaagccccgagcaaaaaggagaagaagaagggacccgaaaagactgatgagtatctgctggcccggttcaaaggcgacggcgtgaaatataaagctaagctgataggcattgacgatgtgcctgatgcccggggagacaaatag

SEQ ID NO: 114738 - DNA, 231 bp, synthetic construct
  misc_feature 1..231: note = Description of Artificial Sequence: Synthetic coding sequence
  source 1..231: mol_type = other DNA
atgtccaatgaggtggagacatctgccacaaacggacagcccgaccaacaggccgcccctaaagcaccgtccaagaaagagaaaaagaagggaccagaaaagaccgatgagtatttattggcacggttcaaaggagatggagttaagtataaggccaaattgatcggtatagacgacgtacctgatgctagaggcgataagatgagccaggatagtatgatgaagctctag

SEQ ID NO: 114739 - DNA, 120 bp, synthetic construct
  misc_feature 1..120: note = Description of Artificial Sequence: Synthetic coding sequence
  source 1..120: mol_type = other DNA
atgtcaaacgaagtggaaacaagtgcaacaaacggacagcctgatcagcaggccgcacccaaagcgccttccaagaaggaaaagaagaaaggccccgaaaaaactgatgagtatttgtag

SEQ ID NO: 114740 - DNA, 2250 bp, synthetic construct
  misc_feature 1..2250: note = Description of Artificial Sequence: Synthetic coding sequence
  source 1..2250: mol_type = other DNA
atgagcaacgaggtggagacgtcagctaccaacggacagcccgaccagcaggccgcccctaaagcccctagcaaaaaggaaaagaagaagggcccggagaaaactgatgagtacctgttggctcgcttcaagggggacggcgtgaagtacaaggcaaagctgattggcatcgacgatgtgcccgatgccaggggggacaagatgagccaagatagcatgatgaagctgaaagggatggcagcagcgggacgcagccagggccagcacaaacagaggatatgggtcaacatcagcctttctggtattaagatcatcgatgaaaaaacaggggtcattgagcatgaacaccccgttaacaaaatctcatttatagcaagggacgtcaccgataatcgcgctttcggatatgtgtgtggcggggagggtcagcaccagtttttcgcgataaaaacgggccagcaggccgaaccgttggtggttgatcttaaagacctgttccaggtgatttacaacgtgaagaagaaggaagaggagaaaaaaaaaattgaggaagccagcaaggccgttgaaaacggtagcgaggctctgatgatcctcgatgaccagaccaataaactcaagtccgagtccaaagatatacttctcgtggatcttaactcggaaatagataccaaccagaatagcttaagagaaaatcctttcctgaccaacggcatcacttcttgcagcctgccgagaccgaccccccaggcctccttcctgcccgaaaacgccttctctgctaaccttaacttctttcctactccaaaccccgacccatttcgggatgatccttttacccagcctgaccagagcacaccatcttccttcgatagtctgaaatcaccggatcaaaagaaagagaacagtagctcatcttcaacacctttgtccaatggtcccttaaatggggatgtggattactttggccagcagttcgaccaaatatccaatagaactggtaaacaagaagctcaggccggaccgtggcctttttctagcagccagactcagccggccgtgcgaacccagaacggggtctctgagcgggagcagaatggctttagcgttaagtcctcccccaacccattcgttggaagtcctcctaagggcctgtcaatccaaaacggcgtcaaacaggacttggaaagctccgtacagtccagcccgcatgactcaatagctattatccctccgccccagtcgacaaagccgggacgcggtcgacgtacggctaagtcctcagcaaatgaccttctggccagcgacattttcgccccaccagtgagtgaacctagtgggcaggcatcccccactgggcaacctaccgccctacagcctaacccactcgacctgttcaagacaagtgctcccgcacccgtcggcccactggtgggcctcggaggcgtgaccgtcaccctgccccaggcaggtccttggaataccgcctctctcgtgttcaaccagtcccccagcatggcaccaggcgctatgatggggggacagccctccgggttcagtcaacccgttatcttcgggacttctcccgctgtgtcaggctggaatcagcctagcccattcgctgcatctacacccccccctgtgccagtggtgtggggtccaagtgcctccgtggcgcctaatgcctggtctactacttctcccctgggcaacccctttcagagcaatatctttccggcacccgcagttagcacccagcccccttctatgcactcttccctgttggtcacccctcctcaaccaccaccccgggccggaccacccaaggacatctctagtgacgcttttaccgccctggacccgttgggggacaaggagatcaaagatgttaaagaaatgtttaaggactttcagctacgccaacctccagcagtcccggcccggaagggcgaacaaacaagctctggcacgctctccgcctttgccagttacttcaatagcaaggttgggatccctcaggaaaatgcggatcacgatgatttcgatgccaatcagctcctcaacaaaatcaatgaaccacctaagccagcccctagacaggtcagtcttcccgtgacaaagagtactgataacgcttttgaaaatccgtttttcaaggatagcttcggatcttcacaggctagtgtcgcctcatcccagccagtctccagcgagatgtaccgagacccattcgggaatccttttgcatag

SEQ ID NO: 114741 - DNA, 2568 bp, synthetic construct
  misc_feature 1..2568: note = Description of Artificial Sequence: Synthetic coding sequence
  source 1..2568: mol_type = other DNA
atgattctcatacctcgaatgttactagtgctttttcttctgctgcccatcctttcttctgccaaggcccaggtcaatccagccatttgccgttaccctctgggtatgagcggaggccaaattccagatgaagatataacagctagttcccagtggagcgaatcgacagccgcaaagtatggccggctcgactccgaggagggagatggcgcttggtgccctgagatccctgtagaacctgacgacctaaaagaattcctccagatcgatttacacactctccatttcatcaccctcgtggggacccaaggaagacacgcaggaggtcatggcatcgaattcgctcccatgtataagattaactactctcgggacggaacgcggtggataagctggcgtaatcgccacggtaagcaggtactggacggaaattccaacccatacgatatctttttgaaagatttagaacctccaatagtggccagattcgtgcgttttattccagtcactgaccactccatgaacgtgtgtatgagagttgagctgtatggctgtgtctggctagacgggcttgtgtcatataatgccccagcgggccagcagtttgtccttcctggcggctccatcatctacctgaatgacagcgtttacgatggcgcggtgggatacagtatgaccgagggcttgggccagctgacagacggtgtcagcggacttgacgatttcacccagacccacgaataccacgtatggcccggatacgactacgtgggatggaggaacgagagtgccaccaatggttacattgagatcatgttcgagttcgacagaattcggaattttaccaccatgaaggtacattgtaacaatatgtttgcaaagggagttaagatctttaaggaagtgcagtgctacttccgcagtgaggcgtccgagtgggaacccaacgccatctcgtttcccttggttctggatgatgtcaatcctagcgccaggtttgttaccgtaccactgcatcatagaatggcctcggccatcaagtgtcagtatcatttcgcagacacctggatgatgtttagcgaaatcacctttcagagcgatgctgcaatgtataataactctgaggctttgcctacaagcccaatggcgcctacaacatatgatcctatgctgaaggtggacgactctaatacccgtatcttgattggatgtctggtggctataattttcattctgcttgcaattattgtgataattctgtggcgccagttctggcagaagatgctagaaaaggcatcccggaggatgctagacgatgagatgaccgtctcacttagcctgccttccgactccagtatgttcaacaacaaccgttccagctccccttcagagcagggttccaacagcacctacgacagaattttccctctgcgccctgactaccaggaacccagccggctcatccgcaagttacccgagttcgctccgggcgaagaagaaagcgggtgctctggcgttgtcaagcctgtacaaccttctgggcccgaaggcgtccctcattatgccgaagctgacatcgtgaaccttcagggtgtcactggtgggaatacatatagtgtgcctgccgtgaccatggatcttctctctggcaaggacgtggccgtggaagagtttccaaggaagctgttaacctttaaagagaaactgggcgaaggccagtttggcgaagtgcatctctgtgaggtggagggcatggaaaaattcaaagacaaagactttgcgctggatgtgagcgccaatcagcccgtccttgtcgctgtgaagatgctcagagctgatgcgaacaagaacgctcgcaacgatttcttaaaagagataaaaataatgagtcggttgaaggaccccaatattattcacctgctagccgtgtgcataaccgatgatccgttatgtatgattactgagtatatggaaaatggagacctgaatcagttcttgagccgtcacgaaccaccaaatagttcttcctctgatgttagaacagtatcttacaccaacctgaaattcatggcgacccagatcgcatctggaatgaagtacttgtcttctctgaactttgtgcatcgcgatctggccacccgcaactgtctcgtgggcaaaaattataccattaaaatcgctgattttggtatgtccagaaacctttatagcggggactactaccgcattcaggggcgagcagtgctgcccattcgttggatgagctgggaaagcatcttgctgggaaaattcacgaccgcatctgatgtctgggcgttcggagtgacgctgtgggagacatttaccttttgtcaagaacagccttactctcaactgtccgatgaacaggttattgaaaacacaggcgaattctttcgggatcaagggaggcagacatatctgccccagccagcaatttgcccggactcagtgtacaagctcatgctttcatgctggcgaagggacacaaaaaatcggccctcttttcaggaaattcacctccttctgctccagcagggggacgaatag

SEQ ID NO: 114742 - DNA, 2568 bp, synthetic construct
  misc_feature 1..2568: note = Description of Artificial Sequence: Synthetic coding sequence
  source 1..2568: mol_type = other DNA
atgattttgataccccgcatgcttttagtcctgttccttcttttgccaatcctatctagcgcgaaagctcaggtgaatcccgctatttgtaggtaccctctgggaatgagtggaggtcagattcctgatgaggacattacagcttcctctcagtggagtgagtctaccgctgccaagtacggacgactggattccgaagagggtgacggagcctggtgtcctgagatcccagtcgaacctgatgacctgaaggagtttctccagattgacctccacactctccattttattacgttggtcggcacccagggaaggcatgcgggcggacatgggatcgagtttgccccaatgtacaagatcaattactcacgggatggaacccggtggatcagctggagaaataggcatggcaagcaggttctggacgggaacagtaacccttatgatatcttcttaaaagatttagagcctcctatcgtggcaagatttgtcaggtttatcccagttaccgaccatagtatgaatgtgtgcatgcgcgtggagctttacggctgtgtgtggctggatggcctggtctcctacaatgccccagcgggccaacagttcgttctgcccggtggatccataatctatctaaacgattcagtgtacgatggcgcagtgggctatagtatgactgaaggcctcggtcagcttacggacggagtgagtggcctggacgattttacccaaacccatgaataccacgtctggcccggctacgactacgttggctggaggaacgagtccgcaaccaacggctatatagagatcatgttcgagtttgacagaatccgaaatttcactacaatgaaggttcactgcaacaacatgttcgcaaagggagtgaaaattttcaaagaggtccagtgctacttccgctcggaggctagcgagtgggaacctaatgccatcagtttccccctcgtattggatgatgtgaatccttccgctagattcgtgacggtaccactccaccacaggatggcatctgcaataaaatgtcagtatcactttgcggacacatggatgatgttttccgaaattacgttccagagtgacgcagctatgtataacaactctgaggctctaccaacgtcacctatggcccccactacatatgacccaatgctaaaggtagatgacagtaacactagaatcctgatcggatgtctggtcgcaatcatctttatcctgctggcaataattgtgatcattttatggagacagttctggcagaaaatgttagaaaaagcctcccgccggatgctcgatgatgagatgacggtgtctctatctctgccctccgactcttccatgttcaataataatcgatctagcagtccttctgaacaaggatctaactccacatatgaccggatttttcccttacggccggactaccaggagcccagtcggttgatccgcaaactgcccgagttcgccccaggggaagaggagtctggctgttcgggagtggtgaagccagttcagcctagtggccctgaaggcgtgccacactacgcggaagcagacatcgtgaatttacagggcgtcacaggaggaaatacatactctgtacccgccgtgacgatggacctcctgtctggaaaagatgtggccgtggaggaatttccacgcaagctgctaacgttcaaagaaaagctgggtgagggacagtttggggaagtccatctttgcgaagttgaagggatggaaaagtttaaagacaaagatttcgccctagatgtgagcgcaaatcagcccgttcttgtagcagttaagatgctccgagccgatgcaaacaaaaacgctcgaaatgattttctcaaagagatcaagatcatgtctcggttgaaggacccgaatatcatccacctgctggccgtatgcatcaccgacgatccgctgtgtatgatcaccgagtatatggaaaatggcgatttaaatcaatttctgtcccgccacgagcccccgaattcgtcatcctcagacgtgagaacagtctcatataccaacctgaagttcatggcaacacaaatagcatccgggatgaagtatctatcatcactaaattttgtgcaccgggacctagccacgcggaattgccttgtcggaaagaattataccattaaaatcgcagatttcggcatgagccgcaacctgtatagtggtgattactatcggatccagggtagggccgtgttgccgatacggtggatgtcctgggagtcgatcctcttagggaagttcaccactgcctccgacgtgtgggccttcggcgtcacgctgtgggagactttcaccttttgtcaggaacagccctactctcagctctctgatgagcaggtgatcgagaacacgggcgaattcttccgggaccaggggcgccagacgtacttgcctcagcccgccatttgtccagattctgtgtataagctaatgctcagctgctggcgcagagacaccaaaaataggccgtcattccaggaaatccacttattgctcctacagcagggcgacgagtag

SEQ ID NO: 114743 - DNA, 447 bp, synthetic construct
  misc_feature 1..447: note = Description of Artificial Sequence: Synthetic coding sequence
  source 1..447: mol_type = other DNA
atgatacttattccaaggatgttgttggtgttgtttctccttctcccaatactgtcatctgcgaaggcgcaggtcaatcccgcgatctgtagataccctctgggaatgtctggaggccaaatccctgacgaggatatcacagcctcaagtcagtggagtgagtccactgctgcgaagtatgggcggctcgattccgaggaaggcgacggtgcctggtgtcccgagataccagtggaacctgacgacctgaaagaatttctgcagatcgatctgcatacactgcactttataaccctcgtgggaacacagggacgccatgctggcggccatggaattgaattcgcgcctatgtataagattaactattccagggatggaacccgatggatttcttggaggaatagacacggaaagcaggtccttgacggaaatagtaatccctattag

SEQ ID NO: 114744 - DNA, 516 bp, synthetic construct
  misc_feature 1..516: note = Description of Artificial Sequence: Synthetic coding sequence
  source 1..516: mol_type = other DNA
tgaatttttatcctgttggctattatcgttattatcctatggcgtcagttttggcagaagatgctcgagaaggcctcaagaagaatgctggatgatgagatgacagtatccctgtctctccctagcgacagcagcatgtttaacaataatcggtcctcttctccctccgagcagggcagcaactctacctacgatcgaatattccccttgcgaccggattaccaggagcctagcagattgatccgcaagctcccggagtttgccccaggtgaagaggagtcaggctgcagcggggtagtgaaaccagtgcagcctagcggaccagagggtgtgccccattacgccgaggctgatatcgtgaacctgcagggcgtcacggggggaaatacatactcggtgccggcagtcactatggacctcctgtctggcaaggacgttgcggtggaagaatttccaagaaagctactaaccttcaaggagaagttgggcgaaggacagttcggtgaagtctcatag

SEQ ID NO: 114745 - DNA, 393 bp, synthetic construct
  misc_feature 1..393: note = Description of Artificial Sequence: Synthetic coding sequence
  source 1..393: mol_type = other DNA
atgatcctgattccccgaatgctgcttgttctgtttcttttgctgcccattctgtccagcgctaaggcccaggtgaatcccgctatatgtcggtatcctttaggcatgtcgggagggcagattcctgacgaggatatcaccgcttctagccaatggagtgagagtactgctgccaagtacggccgcctggattcggaggaaggagacggagcatggtgtccagagattcccgtggagcccgatgatctcaaagagttcctgcagatcgacttacacacactgcattttattaccctcgttgggacccaggggaggcatgccggcggccacggtatagagtttgccccgatgtacaagattaattacagccgagacgggactagatggatttag

SEQ ID NO: 114746 - DNA, 501 bp, synthetic construct
  misc_feature 1..501: note = Description of Artificial Sequence: Synthetic coding sequence
  source 1..501: mol_type = other DNA
cttaaggttgatgactccaatactcgaatcctgattgggtgtctggtggcaatcattttcattctactcgccataatagtgataatcctctggcgacagttttggcaaaagatgcttgagaaagcatcccgaaggatgctcgacgacgagatgacagtctccctctctctgccctcggattcgagtatgtttaacaacaatcgttcaagcagcccaagcgagcagggcagcaatagtacatatgaccgtatatttcctctgaggccggattatcaggagccctcaagactgattcgaaagttgccagaatttgcgcctggcgaggaggaaagcggcgaagacgacgtcgtgggcagagtatctagagaaaagccacaacaggctagtgggcgttatgataccccagctccctcgtctctgcacctgtttctggtgtccgccaacttactgcgaagccctcatagcctctctcggtttggactgccgctgcttttggcatag

SEQ ID NO: 114747 - DNA, 447 bp, synthetic construct
  misc_feature 1..447: note = Description of Artificial Sequence: Synthetic coding sequence
  source 1..447: mol_type = other DNA
atgattttgatccctcgcatgctgctggtgctgttcctccttctccccatcctctcatcggctaaggctcaggttaaccccgctatttgcagatacccactgggcatgagtggaggccagattcctgatgaggacatcactgcaagttcacagtggagcgagtcaacagccgccaaatatgggcgcctggattcagaagaaggtgacggtgcttggtgtccggagattccagtcgaaccggatgatcttaaggagttcctccagatcgatctacatacactgcacttcatcactcttgtcggcacacaggggcggcacgcaggtggacacggtatcgaatttgcccccatgtacaaaatcaattattctcgagatggcacacgttggatttcatggcggaatcgtcacggcaagcaggtgcttgacggcaactctaacccctactag

SEQ ID NO: 114748 - DNA, 2403 bp, synthetic construct
  misc_feature 1..2403: note = Description of Artificial Sequence: Synthetic coding sequence
  source 1..2403: mol_type = other DNA
atgaattacattttcggtaataatactcttctgtattctcgcggctcacgggggggaaatacatcctccagccacggctccgctgggcccaaacagaagcattgggctaaaaagggtagctcagatgagctccaggcagagccagaaccttcacgttggcagcagattgtggctttctttactaggagacactcgttcatcgattgcattagtgttgcaaccagctctactcaggccaatccaccccctgtattagtgaatacagactccctggagacacccacctatgtcaacggcactgacgcggattatgagtatgaagaaattacgctggagcggggtaactccggcctggggttcagcattgccggcggcaccgacaacccgcacatcggagacgatagttctatcttcataaccaaaatcatcacagggggcgccgccgcacaggacgggagattgagagtcaatgactgcatccttagggtgaatgaagttgatgttcgagacgtaacccactccaaggccgttgaggctttgaaagaggccggaagtattgtgcggctgtacgtcaagagaagaaagcccgtgagtgaaaagattatggagattaagttaataaagggaccaaagggactgggattcagtatcgccggtggcgttggcaatcaacatattcccggcgataatagcatctacgtgacaaaaattatcgaaggcggagcggcccacaaggatggcaaactccaaatcggggataagcttctggccgtcaacaatgtgtgcctggaagaggttacacacgaggaagccgtcaccgccctcaaaaatacatcagacttcgtgtatcttaaagtcgccaagccaaccagcatgtacatgaacgacggctatgcaccacccgatattaccaacagcagcagtcaacctgttgataaccacgtgtccccctccagtttcctggggcagaccccagcctctccggcaaggtatagccctgtttctaaagcggtgctgggggacgatgagatcactcgagagccgcgaaaggtggtgctgcacagaggatcaaccggtctgggctttaacatcgtcggtggcgaagatggggaagggatttttatttcattcatcctggctggtgggcccgctgacctctccggcgaactccggaagggggatagaattatctccgtgaattccgtggatctacgcgccgcttcacatgagcaggctgctgctgcacttaagaatgccggccaagccgtaacaatagttgctcagtatcgccccgaagaatacagcagattcgaggccaaaattcacgacttacgggaacagatgatgaactctagcatctcaagcggatcagggtcactgcgcactagccaaaagcggtcgttatatgtgcgggctctttttgactacgacaagaccaaagactccgggctcccttctcagggcctgaactttaagttcggcgacatcttacacgtcattaatgccagcgacgatgaatggtggcaggctagacaagtgactccggacggtgagtcagatgaagtgggggtcatcccttctaagcggagggtagagaagaaagaacgggctaggctgaagaccgtaaagttcaattcaaaaacacgggacaaaggggaaattcctgatgacatgggatctaaggggctgaagcatgtcacctcaaatgcaagcgattccgagtccagctatcttatacttattaccgatgaatacggctgctccaagggcgggcaagaggaatatgtattgagctatgaacctgtgaaccagcaggaagtcaactacacaaggcccgtgatcattctggggccaatgaaggaccgaatcaatgatgatctcatttctgaattcccggacaagtttgggtcatgtgtgccgcataccacacgcccaaaaagggactacgaggtggatggaagagactatcattttgtgacttctagggagcagatggagaaggacattcaggagcataagttcatcgaggcgggacagtataataatcacttatatgggactagcgtccagagcgtccgggaagtcgcagaaaaggggaaacattgcatactggatgtttcaggaaatgctattaaaaggttacagattgcgcagttgtatcctatatcgatcttcatcaagcccaagtcaatggagaacatcatggagatgaataagcgcttaactgaagagcaggctcgcaagacctttgagcgtgcgatgaagctcgagcaggagtttacagagcacttcacagcaattgtgcagggagacactctggaagacatatataaccaggtgaaacagataatagaggagcagtctggttcatacatttgggtgcctgccaaggagaagctgtag

SEQ ID NO: 114749 - DNA, 2367 bp, synthetic construct
  misc_feature 1..2367: note = Description of Artificial Sequence: Synthetic coding sequence
  source 1..2367: mol_type = other DNA
atgaactatatattcggtaacaacacccttctgtatagtcggggttcgcgtggagggaacaccagttcttcacacggctcagctggacctaagcaaaaacactgggctaaaaagggatcctccgatgagctccaggcggagccagagccgtcccggtggcagcagatcgttgctttctttacccgccgccactcgtttattgactgcatatcagtcgcaacatcctctacacaggccaatcctccaccagttctcgtaaatactgattcgctcgaaacccccacctacgtcaacggcaccgacgccgactatgaatacgaggaaattactctcgagcgcggaaacagtggattgggctttagcattgccggtggtactgataacccacatattggtgacgatagcagcatatttataactaaaataatcacgggcggggccgccgctcaggatggtcggcttagggtgaatgactgtatccttcgggtcaacgaggtggatgtacgggatgtaacccacagtaaggctgtggaggcactaaaagaagcgggaagcattgttcggctctacgttaaacgcaggaagcccgttagcgagaagattatggagattaaactgatcaaaggaccaaagggcctgggattctccattgcaggcggagtgggtaatcagcacataccaggagacaacagcatctatgtgactaaaataatcgaggggggagcagcacataaagatggaaagctgcaaatcggggacaaactgctggccgtaaacaatgtgtgcctcgaagaggtgacacatgaagaagctgtcacggcactaaagaacacatcagatttcgtctatctcaaggtggcaaaacctaccagcatgtacatgaatgacggttatgccccccccgacatcacaaatagttcctcacagcctgttgataaccatgtcagccctagttcattcttaggacaaaccccagctagccctgcccggtattccccagtgagtaaggctgtgctcggggatgatgaaattacacgggagcctcgcaaggtagttcttcacaggggttccacaggactagggttcaacatcgtgggcggcgaggatggggagggcatctttattagcttcattcttgccggtggccccgccgatctctccggtgaactcaggaagggggatcggattatatctgtcaattcagttgacttgcgtgccgctagccacgaacaggccgccgctgccctaaaaaacgctggccaggccgttaccattgtggcacagtacagacccgaggaatactcaaggttcgaggccaaaattcatgacttgcgggaacagatgatgaactccagtatcagttctggttctggaagccttcggacttcacagaaaaggtcattgtatgtgcgcgcgctctttgattatgacaaaaccaaagattccggcctcccatcgcaaggcctgaacttcaaattcggggatatactgcacgtgatcaacgcatccgacgatgagtggtggcaagccagacaagtgacaccagatggtgaatcggatgaagtgggtgtaatccccagcaaacgcagggtggaaaagaaagaacgggcaaggctgaagacagtaaagtttaacagcaagacccgggataagggggaaatacccgacgatatggggtctaagggactaaagcatgtaaccagcaatgcatccgattctgagagctcctacaggggccaggaagagtatgtgctgtcctatgagcccgtgaaccagcaggaggtgaattatactcgccccgtaatcatccttggacctatgaaggatagaatcaacgatgatctgattagtgaatttcccgacaagttcggctcatgtgtgccacatacgactcgcccgaaaagggactatgaggtggacggccgtgactatcacttcgtaactagccgcgagcagatggagaaagatatccaggagcacaagttcatagaagcaggccagtataacaatcatctttatggtacgtccgtacagagcgtccgagaagttgccgagaaagggaaacactgtatcctggacgttagtggcaatgccatcaagaggctgcaaattgcacaactatatcccatttctatctttatcaaaccaaagagtatggagaatatcatggagatgaacaagcgactgacagaagagcaagcaaggaagaccttcgaaagagctatgaagttagagcaggagttcaccgaacacttcactgccatagtgcagggggatacactcgaagacatctataatcaggtcaaacagatcattgaggaacagtcagggtcctacatctgggtcccagcaaaagagaagctttag

SEQ ID NO: 114750 - DNA, 1539 bp, synthetic construct
  misc_feature 1..1539: note = Description of Artificial Sequence: Synthetic coding sequence
  source 1..1539: mol_type = other DNA
atggagcgggctcgcaagttttccggtagtggcctagccatgggactcggttcagcctccgcctccgcctggagacgggcgagtcagcggtgggcttggccccttcgtagcctccgccctggaggggacgctcgcgagccacgcaaaatcatcctccataagggcagcaccggcctcgggttcaacatcgtgggcggagaggacggtgaaggtatctttgtgtccttcattcttgctggcgggccagctgatttatctggtgagcttaggcgcggagacaggatactttccgtgaatggtgtgaatctccggaacgctacccatgagcaggctgcagcggccctcaaacgggctggtcagtctgtgaccatagtcgctcagtaccgtccagaagaatactcccggtttgagtcaaaaattcatgacctgcgtgagcaaatgatgaacagtagtatgtcgtctgggtccggaagcttgcggacatctgagaaaaggagcctgtacgtaagggctctcttcgattacgacagaacccgcgacagctgtctgcctagccaggggctgagtttttcctacggcgatatcctgcatgttatcaacgccagcgatgacgagtggtggcaagcccgtctcgtgactcctcacggggagagtgaacagatcggagttatcccatccaagaaacgtgttgagaaaaaagagcgtgccagactaaaaaccgtgaaattccacgcccgaacaggaatgattgaaagcaatcggtccatcaagactaaacgaaaaaaatccttccggttgtcccgaaaattccccttttataaaagcaaagagaatatggcacaagagagcagcatacaggagcagggcgttacttcaaatacgtcagactcggaatctagtagcaaaggtcaggaggatgccatcctctcttacgaacctgtgactaggcaagagatccactatgcccgaccagtgatcatcttagggccgatgaaagacagggtgaatgacgatcttatttcagagttcccccacaagtttggctcatgtgttccccacacaactcgtcccagacgggacaacgaagtcgatggtcaagattaccatttcgttgtttccagggaacagatggagaaggacatacaggataataaatttatcgaggcaggtcagttcaatgataatctgtacggaacctcaatacagagcgtgcgggccgttgccgagagagggaaacactgtatactcgatgtcagcggcaacgccatcaagagattacagcaggctcagctgtaccctatcgctattttcattaagcctaaatccatcgaggcccttatggaaatgaacaggagacagacatacgagcaggccaacaaaatatacgataaggccatgaagctggagcaggagtttggtgagtacttcaccgcaatcgttcagggtgactccctggaggagatctacaacaaaatcaaacagatcatcgaggatcaaagtgggcactatatttgggtgccctcacctgaaaagctctag

SEQ ID NO: 114751 - DNA, 3021 bp, synthetic construct
  misc_feature 1..3021: note = Description of Artificial Sequence: Synthetic coding sequence
  source 1..3021: mol_type = other DNA
gaagaagaagccggagatttggtacagccaggcatcagcttccccggtccagcagaggaggatctggacccacagtattcttggagccccacacagcactttaacgaagagaggtactcaccagccccacgatccatgaagggcctttcagggtctcgaactcagccaccattatgcagcgggcacacgtgcggtttggctcccccagaagattgcgagcacctgcatcacggacctgatgcccggcctccataccttctgtctccagccgacagctgccccggtggtaggcataggtgctcgccaaggagttccgtacacagcgaatgtgtcatgatgcccgtggtactgggtgaccacgttagttcttccaccttcccgaggatgcactactccagccactatgatactcgggatgattgcgccgtggcccacgcaggcgcaaaaatcaaccgaatccccgccaatctgttggatcagttcgaaaaacaactgccactccaccgagatggtttccacaccctgcaataccagagaacaagtgccgccgcagagcaacgctctgagtcccctggacgcattaggcacctggtgcactccgtccagaagttgtttacgaagtctcacagtttagagggcagctctaagagcaacgctaatggtactaaagctgacggcagagcagacgatcatcaccacgcgcaccacgcaaagcacagtaagagatctaagtccaaggaacgcaaaccagaaggcaagccgcgaccaggtatgtcctcctggtggtctagtgatgataacctcgactcagatagcacataccgaaccccctctgttctgaatcggcatcacttagggccagtggcccattgttaccccgacgcattacagagtccctttggtgacctgtcgttgaagacttctaagagtaataacgatgttaaatgcagcgcttgtgaaggcctggccttgacaccagatgcaaagtatcttaagcggtcctcttggtcaaccctgaccgtgtcacaggccaaggaagcatacaggaagtcctctctgaatttggacaagcccttgctgcatcaggacgctaaacctgccctgagaccttgccactatctgcaagttcctcaagacgagtgggggggctaccccaccggcggtaaagatgaggagataccttgcagaaggatgcggtcagggtcctacattaaggccatgggggacgaagagtcaggagaaagcgattcttccccaaagacctccccaaagtctgccattctgcccgaacctttgctcaagtccataggacaacggcctctgggtgaacaccaaactcagacctacctacaggcggctagcgatgtccccgtggggcactctcttgaccctgccgccaactacaacagccctaagttccgttccaggaatcagagttacatgagggctgtgagcacactatcccaggctagttgcgtgtcgcaagtttccgaggccgaaatcaatggacagttcgagtctgtatgtgagagtgtttttagcgaggtggagagtcaggcgatggatgcactggacttgcccggatgcttccgtaccaggtcacactcctatctgcgagccattcaggccggatattcccaggatgacgagtgcattccaatgatgactccaagcgacatcactagcactatccggagtactgccgccgtctcatacacaaattataagaaaaccccaccccctgtgcccccccggaccacttctaagcccctcatctctgtcacagcacagtcaagcactgagtcaacccaagatgcataccaggactctagggcccagagaatgtcgccctggccacaggacagtcggggcctttacaacagtacagattctctggactctaacaaagcaatgaatctcgcactggaaacagccgctgcccaaaggcatctacccgagtcccagtcaagtagtgtcagaacctccgacaaggccatcttggtgtccaaggccgaagagctgctgaagagcaggtgttcctccatagggatccaggtggaaaccgcaaccgattctgacaccgagtctagagggctacgagaataccatagcgtgggcgtgcaagtggaagacgaaaagagacacgggaggttcaagcgatccaactccgtcactgctgccgtgcaggcagatctcgaactggaaggtttccccggtcacattacaactgaagataagggactgcaattcggcagttcatttcagcggcattccgagcccagtacacctactcagtactcggcagtgcgtactgttcgtacccagggtttgttctcgtaccgggaagactaccgaacccaggtagacacaagcacgctgccccctccagatccatggttagaacccgcaattgatacggttgagactgggcgcatgtctccttgccgaagagatgggtcctggttcttaaaactgttacatgcggagacaaaacggatggaaggctggtgcaaggagatggaacgagaggctgaggagaacgatctctcagaggagattcttggcaagattcgctccgctgtgggcagcgcgcaattacttatgagtcaaaaatttcaacaattttactggctatgccaacagaacatggatccctccgccatgcctaggccaacatcacaagatcttgcaggatactgggacatgctgcagctgtctatcgaagacgtttctatgaaattcgatgagctgcaacggctgagattaaacgattggaaaatgatggagagccccgagcggaaagaggaaaggaaggtcccgcctcccatcccgaagaagccaccaaaagggaaatttcctatcactcgggagaagagcctggacctgcccgatcgtcagagacaggaagctaggcgccgcctcatggcagcaaagcgcgccgctagtttcagacagaactctgcctctgagcgggcagactctattgagatttacattcccgaagctcagacccgattatag

SEQ ID NO: 114752 - DNA, 2928 bp, synthetic construct
  misc_feature 1..2928: note = Description of Artificial Sequence: Synthetic coding sequence
  source 1..2928: mol_type = other DNA
atgaaaggacttagcgggagccggacacagccacctctctgttccggtcatacctgtggtcttgcaccccctgaagactgcgaacatctccatcatgggccggacgcgagacctccatacttgttgagccctgctgacagctgcccaggcggccgccaccgttgctccccccgttcctccgtgcattcagagtgtgtcatgatgcccgtggtcttaggagatcatgtgtctagtagcacatttccaagaatgcattactcgtcccactacgatacacgggatgattgcgctgtggcccacgcgggagcaaagataaatcgtattccagcaaatcttctggaccaattcgaaaagcaattgccgctacatcgagacggttttcatacactccagtatcagcggaccagcgccgctgccgaacaaagaagtgagtctccgggcaggatccgacacctagtccattctgtccagaagctgttcactaaaagccattccctggaaggctcgtccaagagcaacgcaaacggaaccaaggccgacgggagggccgacgatcatcaccatgcccaccacgcgaaacactctaaaaggtcaaaatcaaaggaacgaaagcctgaaggcaaacctcgccccggaatgagtagttggtggtctagtgacgacaatttggattcagatagcacttacagaaccccctccgtgctgaatcggcaccatctcgggccagttgcccattgctaccccgatgccctgcagagtccttttggggacttaagtctgaagacaagtaaatccaataacgacgtcaaatgcagcgcctgcgaagggctcgctctcaccccagacgccaaatatctgaaaaggagttcctggtctacactcacagtcagccaggctaaagaagcctatcgcaaatctagtctgaatctggataagcccctgctacatcaggatgccaagcccgcacttcgtccctgtcactatctacaggtgccccaggacgagtggggcggctatccaacgggggggaaagatgaagaaattccgtgtcggaggatgaggagtggatcctacatcaaggctatgggcgacgaggagagcggcgagagtgattcgtcaccaaaaacaagtccgaaaagtgccatcctgcccgaacccctgctcaagtcaatcggtcaaaggccgctcggagagcatcagacacagacgtacctacaagcagccagcgacgtacctgtggggcatagcttggatccggcagcaaattacaatagccccaagtttcgatctcggaatcaaagctacatgcgagcagtctcaactctgagtcaggctagctgcgtgtcgcaggtcagcgaagccgaaatcaacggccaatttgagagtgtatgcgagagtgtcttctctgaagtggagtcccaggctatggacgccttggatctgcccggctgctttagaaccaggagtcatagctacctgcgcgccattcaggcaggctattctcaggatgatgaatgtattcccatgatgactccctctgacattacgagtaccatccggagtactgccgcggtaagctatactaattacaaaaaaaccccgccccctgtcccgccccgcacgacttctaaacccctgatcagtgtgacagcacaatcgtctaccgaaagcactcaagatgcgtaccaggactcacgtgcacaacgcatgtcaccctggcctcaagactcccgaggactctacaatagcactgatagcctcgactccaacaaggctatgaatctggctctggaaactgccgccgcacagaggcatctacccgagtctcagagctccagcgtccgcaccagtgacaaagccattttagtgtcaaaggccgaggagctactaaagtctcggtgctctagcattggaattcaagattctgaatttcccgagcatcaaccgtacccacggagtgatgtggaaacggctacagattctgacactgaatccaggggtttgagagagtatcactccgtaggtgtacaagtggaggatgagaagaggcacggccgattcaagaggagtaactctgttacggctgcagtgcaagccgacctggagctagaaggattccccggacatattaccacggaagataaaggcttacagtttggctccagctttcagaggcattctgagccaagcacgcctactcagtactctgctgttaggaccgtgagaacccagggactgttttcatacagagaggattaccgaacccaggtagacacatctacactgccgccccctgacccttggctcgaacctgctatcgatactgtggagactggccggatgagcccatgcaggcgcgacggaagctggttcctgaaacttctacacgctgagaccaaacggatggagggctggtgtaaagaaatggagagggaggccgaagaaaatgatttgtccgaagagatcctgggaaagatccgatctgctgtgggctcagcccagctgctgatgtcacagaagttccaacagttttactggctgtgtcaacagaatatggatccctctgcaatgcctagaccaacttcacaggatcttgctggatactgggatatgctgcagctcagcattgaggatgtgtcaatgaaattcgatgagctccaacgtctgcggttgaacgactggaagatgatggagtccccagaaaggaaagaggaacgcaaggtgccaccccctatccccaaaaaaccccccaagggaaaattcccaatcactagggagaagagcctggacttgcctgaccggcagcgtcaggaggcccggcgtcggctaatggctgctaaacgggctgcctcatttcgtcagaattccgcgtcggagcgggctgacagtatcgagatttatattcccgaggcacagacccggctgtag

SEQ ID NO: 114753 - DNA, 2937 bp, synthetic construct
  misc_feature 1..2937: note = Description of Artificial Sequence: Synthetic coding sequence
  source 1..2937: mol_type = other DNA
tagccgacacaacacttcaacgaggagaggtatagccccgctccccgctcgatgaaggggttgtctggctcccgcacgcagcccccactttgtagcggccacacatgtggcctcgccccccccgaggattgcgaacatttacatcatggtccagatgctcgcccgccctatctcctgtctcctgcggacagctgccccggaggcaggcatagatgttccccaagatcttccgtgcactctgagtgcgttatgatgccagtggttctcggagatcacgtgagcagttcaaccttccctaggatgcactatagtagtcactatgacactagagacgattgtgcagttgcacatgctggggcgaagattaacaggattccagccaacctgttggaccagttcgagaagcagcttcccttacatcgcgacggtttccacactcttcagtatcaacgcactagcgctgcagccgaacagaggtccgagtcgcccggaaggattcgccatctggtccattctgtccagaaactattcacaaaaagccacagtcttgaagggagctcaaaatccaatgcgaacgggaccaaggcagacgggcgagcggacgatcaccaccacgcccaccatgccaagcattccaagagatctaagagcaaggagagaaagcccgaggggaagcccagaccaggcatgagctcttggtggtcttccgacgataacctggattccgattctacctaccggaccccctctgtgcttaatcggcaccacttggggcctgtggctcattgctacccggacgccctgcagtctccctttggggatctttccttaaaaacctctaagtcaaataacgacgtgaaatgtagcgcctgcgagggtctggctttgacaccagatgcaaaatatctgaaacgatctagctggtccaccctaactgttagccaggctaaggaggcctacagaaagtcctctctgaacctggacaaacctctgctgcaccaggacgcgaaaccagccctcagaccctgccattaccttcaggtcccacaggatgaatggggggggtaccccacgggcggcaaggacgaggagattccatgccggcgcatgcggtccggttcctatataaaggcgatgggggatgaggagtcgggagaaagcgatagctcacctaaaacatcccccaagtccgccatactgccagagcctttgctcaaaagcattggtcagcgaccactgggagaacaccagacccagacataccttcaagccgccagcgacgtcccagtaggccatagccttgatcccgcagcaaattacaattcacccaaattccgcagccgtaaccaaagctacatgagagcagttagcacactgtcccaggcatcatgtgtgagccaggtgtcagaggccgaaatcaatgggcagttcgagtccgtctgcgagtcagttttttccgaggtcgagtcccaggccatggatgcgctggacctgccggggtgttttcggacccgctcccacagctacttacgcgctattcaggcaggctattctcaggacgacgaatgtattcctatgatgactccctcagatattacctctacaatacggagtactgctgcagtttcctacactaattataaaaagaccccaccccccgtgccgccccggaccacatctaaacccttaatctctgtcacggctcagtcttccaccgagagtacgcaggacgcataccaagattcacgggcccagcgaatgagcccatggccccaggatagtcgggggctgtacaattccactgattcgttggactccaacaaggccatgaacctcgctctcgaaaccgccgccgcccaacggcacttgccagagtctcaatcttcatctgtgcgcaccagtgacaaagcaatcctcgtctccaaagccgaggaactgctgaaaagtagatgctctagcatcggtatacaggttgaaacagctactgacagtgacacggagtccaggggcctgcgcgaataccactctgttggcgttcaggtggaagacgaaaagaggcatgggcggttcaaacgctctaattcagtcacagccgctgtgcaggccgatcttgagctggaaggatttcccggccatatcacaaccgaggacaagggcctgcaattcggcagcagcttccaacgtcattctgagccctctactcccacgcagtattcagctgtgcgcactgttagaacccagggactgttctcctaccgtgaagactacagaacgcaggttgataccagtacactgcccccaccagatccttggttggagccagctatcgacactgtggaaaccggacggatgtccccttgccggagggatgggagctggtttctgaaattactacatgctgaaactaaaaggatggaaggctggtgcaaggagatggagagagaagcagaggagaacgacctgagcgaagaaattctcggcaagatccgctccgccgtgggcagtgcccaactcttgatgagtcaaaagttccaacagttctactggctctgtcagcagaatatggatccatctgctatgcctagaccgaccagccaagatttggcaggttattgggatatgctgcagttaagtattgaggatgtgtccatgaaattcgacgaattgcaacgcctgagactaaacgactggaagatgatggagagccctgagagaaaagaggaacggaaagtgcctcctccaatcccaaaaaagccccccaaaggaaaatttccaattacccgtgagaagtcactggaccttcccgacaggcagcgtcaggaggcaaggcgtagattgatggccgcaaagagagcagcttcatttcggcaaaattcagcttctgagcgtgctgatagcatcgagatttacattcctgaagctcagaccagactgtag

SEQ ID NO: 114754 - DNA, 2562 bp, synthetic construct
  misc_feature 1..2562: note = Description of Artificial Sequence: Synthetic coding sequence
  source 1..2562: mol_type = other DNA
atgccagttcgtaagcaggacactcagagagcactgcatcttctagaagaataccgatcaaagctctcacagactgaggacagacagctgaggagttccattgaacgggtaattaatatcttccaatccaaccttttccaagctttaatagatattcaagagttttatgaagtgacactcctcgataaccccaagtgcatagatcgctccaaaccgtctgaacccatccagccagtgaatacgtgggaaataagctcgctaccatcctccaccgtaacttcggaaacgctgccaagctcattgagcccatccgtggagaagtatcggtatcaggacgaggacaccccccctcaagagcacatctccccccaaatcaccaacgaggtgatcggccccgagctggtccatgtgtccgaaaaaaatctgtcggaaattgaaaatgtgcacggcttcgtctcccattcacacatcagccctatcaaggtgaacggcaccgatgcagactatgaatatgaagagataacgctcgagagagggaattctggactgggatttagtattgcagggggaactgataaccctcacatcggagatgactcctctatcttcataaccaaaatcattacgggaggagccgccgcgcaggatgggaggctccgcgtgaacgattgcatccttcgggttaacgaagttgacgtccgggacgttacacatagcaaggccgtggaggctttgaaggaagcagggtctatcgtgagactgtacgtgaagagacggaagcctgtatctgaaaagatcatggaaatcaagctcattaaggggcccaaagggttagggttctccattgccggtggggtgggtaatcagcacatacccggagataattctatctatgtcactaagataatcgaaggtggagccgcgcacaaggatggtaaattgcaaataggcgacaagttgcttgccgtgaataatgtgtgtcttgaggaggtcactcacgaggaagccgtaaccgcactcaaaaatacttcagatttcgtgtatcttaaggtggccaagccaacgtctatgtacatgaacgacggatatgccccacctgacatcacaaattcttcatcccagcccgtggacaatcacgtgtctccctcgtccttcctagggcaaacccctgcatcgccagcgcgatactcacccgtgtcgaaggccgtgcttggggatgatgagattacgagggagccccgaaaggtggttctccatagagggtccaccggcctcggtttcaacattgtcgggggagaggatggagaaggcatttttattagtttcatcttagccggcggtcctgccgatctgtcaggcgaactgagaaaaggcgatagaatcatcagcgtgaactctgtggatctgcgtgcagcaagtcacgaacaggccgcagccgcgctcaaaaatgccggccaggccgtgacaattgtcgcccaatataggcctgaagaatattcccggtttgaggcaaagatacacgatctgagagagcagatgatgaactcttctatttcatctggtagcggatcactgcgtaccagccagaagcggtctctctatgtccgtgctttgttcgactatgacaagactaaagatagtggcctgccctcccagggcctgaattttaagttcggcgatattcttcacgttataaatgctagcgacgacgaatggtggcaggcaaggcaagtgacacctgacggtgagagtgacgaggtcggagtcatcccctcaaagcgaagggttgagaagaaggagcgtgcacggctcaagaccgtgaagtttaacagtaagacacgggacaagggagagatccctgacgacatgggaagcaaaggccttaagcatgtgaccagcaacgccagtgattctgagtcttcctacaggggccaggaagaatacgtcctgtcttacgagcctgttaatcagcaagaagtgaactacacccgtcctgtcattatacttggcccaatgaaggaccgcataaacgatgatctgatctcggagtttcctgataagttcggcagctgtgtgccccacacaactagaccgaagcgcgattacgaagtggacggtagggactaccattttgttaccagtagggaacagatggagaaagacattcaggagcacaagttcatcgaggccgggcaatataataatcacctttatggaactagcgttcagtcggtccgggaggtggcggagaagggcaaacactgtatcttggacgtgagtgggaatgcgataaaaagactccaaatcgcccaactgtacccaatttcgatcttcattaaacctaagtcaatggagaatattatggaaatgaataaacggctgaccgaggaacaggcacggaagaccttcgaacgagctatgaaactggaacaggagtttacagagcattttaccgcgatcgtccagggagatacactcgaggacatttacaaccaggtgaaacagatcatcgaggaacaatctggaagctacatttgggttcccgctaaagaaaaactctag

SEQ ID NO: 114755 - DNA, 2781 bp, synthetic construct
  misc_feature 1..2781: note = Description of Artificial Sequence: Synthetic coding sequence
  source 1..2781: mol_type = other DNA
atgcctgtgaggaaacaggatacgcagagagccctccacctgcttgaggagtaccgaagtaagctctcccaaacagaagacagacagcttcggagtagcatcgaaagggtcatcaatatttttcagtccaacttattccaggcccttattgacatccaggagttttacgaggttacattattggataatcccaagtgtattgaccgcagtaaacccagcgagccaatccagcctgttaacacctgggaaatttcctctctgccatctagcaccgtaacttccgagactctcccctcaagtctatctccttcagtggagaagtatcgataccaggatgaagacacacctccccaggagcatataagccctcagatcactaacgaggtgatcgggcctgagctcgtccatgtgtctgaaaagaacctgtccgagattgagaacgtgcatgggtttgtgtcccattcacacatctctcccattaagccaactgaggctgtgctgccaagccccccaaccgtgccagttattcctgtcctcccggtgcctgctgagaacacagtgattctgccgaccataccccaagctaatccccccccagtcctggttaatacagactcgctggaaacccccacttacgtgaatgggacagacgcagactatgagtacgaggagatcaccctggaacgggggaattcaggcttgggattttccatcgccggggggactgacaatccacatatcggagatgactcctcgatattcatcactaaaattatcaccgggggcgccgcagcccaggacggcagactgcgggtgaatgactgtattcttcgcgtcaatgaggtggacgtccgcgacgtgacccacagtaaggcagtggaggcgcttaaggaagctggaagcatcgtgcgtctttatgtcaagagacgaaaacccgtgagtgagaagatcatggagattaaactgattaaggggccaaaaggattaggtttctcaatcgccgggggcgtcggaaaccagcatatccccggcgacaatagtatctacgttacaaaaattatcgagggaggggctgcccataaggatgggaagctacagatcggagacaagctattagctgtcaataatgtgtgcctcgaggaggtcacacacgaagaggctgttaccgccttgaaaaacactagcgacttcgtctatcttaaggtggcaaagcccacctctatgtacatgaatgatggctacgctccgccagacatcaccaactcatctagtcagcccgtggataaccacgttagtccgtccagtttcttagggcaaactccagcctctccagccagatattcccctgtgagtaaggcagtgcttggggatgacgagattacgcgggagcctcgcaaagttgtgctgcaccgcgggagcaccggtctgggttttaacatcgtggggggagaggatggagaagggatcttcatctcctttattctggcaggagggccagccgacctcagcggggagctgcgcaaaggcgaccggatcattagcgtgaacagcgtggacttgcgtgccgcctcccacgagcaggcagcggccgctctaaagaacgcaggacaagcagtgacaattgtggctcaataccggccagaggagtacagtcggttcgaagccaagattcatgacctaagggagcaaatgatgaattcatctatatcaagcggatctggttccctccgcacttctcagaaaagatctctgtatgttcgcgcattgtttgactatgataagactaaagactctggacttcccagtcagggcctcaactttaagtttggcgatattttacacgtcattaatgctagcgacgacgaatggtggcaagccaggcaggtgacacctgatggcgaatcagacgaggtcggcgtcatccccagcaaaaggcgggtagaaaagaaggaaagagccaggctgaaaacagtgaaattcaacagtaagacacgggataaaggacagagttttaacgacaaacgaaaaaagaatttgttctcccgaaaatttccgttctacaaaaacaaagatcagtcagagcaggaaacaagcgacgccgaccagcacgtaacttccaatgcttcagacagcgaatcttcttacagagggcaggaggaatacgtgctgagctatgagcccgttaaccagcaggaggtcaattacacccggccggtcattatacttggacccatgaaagacagaataaatgatgacctcatttcagagttcccagacaaatttggatcctgtgtccctcataccactcggcctaagcgggactacgaggtggacggtagagactatcactttgtgacctccagagagcagatggagaaagacattcaagagcataagttcattgaggccggacaatacaacaatcatttatatggaacttccgtgcaaagtgtacgtgaagtggccgagaaagggaaacactgcattttagacgtctccgggaacgccattaaaaggctgcagatcgcacagctgtatcccatctcaatctttatcaaaccaaaaagtatggagaatataatggagatgaacaaaaggctaaccgaagaacaagctagaaagacctttgagcgagccatgaagctcgagcaggaatttacagaacatttcacagcaatcgtgcagggagacaccctggaagatatttacaaccaggtcaaacagatcatcgaggaacagtctgggagttacatctgggtgccggccaaggagaagttgtag

SEQ ID NO: 114756 - DNA, 2682 bp, synthetic construct
  misc_feature 1..2682: note = Description of Artificial Sequence: Synthetic coding sequence
  source 1..2682: mol_type = other DNA
atgcctgtgcggaagcaggatactcaaagagccctacacctcttagaggagtatcgaagcaagttgtcacagaccgaagaccgccagctgagatccagcatcgaacgggttattaacatcttccagtccaatctgtttcaggctctaattgacattcaagagttttatgaggttacacttctggataacccgaaatgcatagaccggagtaagccctcggagcccatccagcctgtgaacacgtgggagattagcagcctcccttcttccacggtgacgagtgagaccttgccgtccagtttgtccccctctgttgaaaagtaccgataccaggacgaggatacacccccgcaggaacacattagtccccagataaccaacgaagtaatcggccctgagctggtgcacgtctcagagaagaacttgagcgagatcgagaacgtccatgggttcgtgtcccattctcacatcagcccaattaaagccaatcctccccccgtgttggtcaataccgacagcctggagaccccaacctacgtgaacggaaccgatgccgattacgagtacgaggagatcacactcgagcggggcaacagcggccttggcttctccatagctgggggcacagacaatcctcacattggggacgatagctcaatatttatcactaaaatcatcacaggcggcgccgctgcccaggacggacgactccgagtgaatgattgcatactacgggtgaacgaggtagacgtacgtgacgttacccactcaaaggccgtagaggctctgaaagaggctggtagcatcgtccgtctctatgttaagcgccggaagcccgtgtctgaaaagatcatggaaattaaactgatcaagggccccaagggcctgggctttagtattgctggtggagtagggaatcagcacatcccaggcgacaactccatttacgttacgaaaattatagaaggtggggcagcacacaaggacggcaaacttcagattggggataaattgctcgctgttaataatgtctgcctggaagaggtcactcatgaggaagctgttaccgccctaaaaaacacctcagactttgtttacttgaaagtggcaaagccaaccagtatgtacatgaacgacggatatgccccccccgacatcacgaattcaagcagccaaccagtggacaatcatgtttctccctcatcatttcttggtcagactcctgcgtcacctgcccgttatagccctgtgagcaaggcagtcttaggggatgacgagatcacacgcgaacctagaaaagtcgtgctccaccgcggctcaactgggctggggtttaacattgtgggaggggaggatggcgagggcatcttcatcagcttcattctggccgggggacccgctgaccttagcggcgagctgcggaagggcgatcgtataatatctgtgaactccgtcgatctccgggcggcaagtcatgagcaggccgctgccgccttgaagaacgcgggccaagccgtgactatcgttgcacaatacaggcctgaagagtattctaggtttgaggccaagattcacgatctgcgcgaacagatgatgaattcatctatttcctccgggtccggcagtcttcgcacctcccagaagaggtcgctttacgtccgggccctcttcgattacgacaagacaaaagattctggattgccctctcagggcctgaactttaagttcggggatattttacacgtcattaacgcaagtgacgatgagtggtggcaggccaggcaggtgactcccgacggtgagagcgacgaggtgggcgtcattccctccaaacggcgggtagagaaaaaagagcgtgccagactcaagacggtcaagtttaattcgaaaacccgcgataagggacaaagtttcaatgataagcggaagaaaaatctgtttagcaggaagttccctttctacaaaaacaaggatcaatcagagcaggagaccagcgatgcagaccagcacgttacgtctaatgctagcgatagtgaatcatcctatcggggccaggaagagtacgttcttagctacgaacccgtgaaccaacaagaggtcaactacactaggccagtcataattctcggcccgatgaaagatagaattaatgacgacctgatcagcgaattccccgacaagtttggttcttgcgtgccccacactactaggcccaaacgcgactatgaagtcgacggccgagattatcacttcgtgacctctcgggaacagatggagaaggacattcaggaacacaagtttattgaagccggtcagtataacaatcatttgtatggaacctctgtacagtcagtgagagaagtggccgagaagggaaagcactgtatcctggatgtgtccgggaacgcgattaagcgcctccagatcgcccagctataccctatttccatattcatcaagcccaagtctatggagaatatcatggagatgaataaaagattgactgaggaacaggcccgcaagacattcgagagggccatgaaattagagcaagagttcaccgagcatttcactgcaattgtacagggcgatacgctcgaggacatttacaatcaggtgaaacagatcattgaagaacagtctgggagctatatctgggtccctgccaaagagaagctgtag

SEQ ID NO: 114757 - DNA, 2754 bp, synthetic construct
  misc_feature 1..2754: note = Description of Artificial Sequence: Synthetic coding sequence
  source 1..2754: mol_type = other DNA
atgcccgtgaggaagcaggacactcaacgagcacttcacctcctggaagagtaccgatcaaaactgtcacagacggaagacagacagctcagaagttctatcgaacgtgtcattaacatattccagtccaacctctttcaggctcttatcgacatccaggaattctatgaagtcaccttgcttgataatcccaagtgtatcgacagatctaagccaagtgagccaatccagcctgttaacacatgggagatatccagcttgccctctagtactgtgacatcagagacgctgccgtcttccctctcaccctccgtcgaaaagtataggtaccaggatgaagacacccccccacaggagcacatctctccacagattacaaacgaagtaatagggcccgaattggtccacgtctccgagaagaatctctctgagatagaaaacgtgcacggatttgtgtcgcatagtcatatcagcccaatcaagccaaccgaggccgtgctgccatccccgccaacagtgcccgtgatccctgtactgcccgttccggctgaaaacactgtgatactgccaactatacctcaggcgaaccctcctcctgtcctggtaaatactgactcgctggaaactccaacctacgtgaatggaacagatgccgattatgagtacgaggaaattactctggaacggggaaattcgggtctgggattctccatcgccgggggaaccgacaacccacacataggcgacgactcttccatttttattactaaaatcatcaccggcggggcggcagcccaagatggtcggctacgtgtgaatgactgcatccttcgggtaaatgaggttgatgtgagggacgtcacgcactccaaggctgttgaagcactaaaagaagccggctcaatcgtcagactgtacgttaagcgccgcaagccagtgtctgagaagatcatggagatcaagctgattaagggtccgaagggattgggatttagcatagcaggaggagttggcaaccagcacatccccggcgacaatagtatttatgtcactaaaataatcgagggtggcgctgcacacaaggatggaaagcttcagattggcgataaacttcttgccgttaacaatgtttgcctcgaggaggttacacatgaagaggcagtcaccgctctgaagaataccagcgatttcgtttacctcaaggtggccaaacctacttctatgtatatgaatgatgggtacgccccacctgatataaccaacagttctagccaaccggtggataaccatgtgagccctagcagtttcctggggcagactcctgctagcccagcccggtactcccccgttagcaaggccgtgttaggcgacgacgagatcaccagagaacctaggaaggtggtgttacatcggggcagcacaggactgggctttaacatcgtgggcggtgaggatggcgaggggattttcatctcttttattttggccggaggtcccgctgatctctctggagaactcaggaaaggcgacagaatcatttcagtcaacagcgtggacttaagagccgctagccacgagcaggcagccgcggcactgaagaacgcaggccaggcagttactatcgtggctcagtatcgtcctgaggagtacagcagatttgaggccaagatccacgatcttagagaacaaatgatgaatagcagcattagttccggctctggctcgctaaggacctcacagaaaagaagcttgtatgtccgagcattgttcgactatgacaaaactaaggatagcgggctgccgagccaaggtctgaacttcaagttcggggatatcctccacgttataaacgcctcagacgatgagtggtggcaagccaggcaggtgacccccgatggggagagcgacgaagtgggggtgataccatctaaaaggcgcgtggagaagaaggagagagcacgactcaaaactgtgaaatttaatagcaaaactcgcgacaagggcgagatccccgatgacatggggagcaagggcctcaagcatgtgacgtccaacgctagtgactcggagagctcctacctcatacttattacggatgagtatggttgctccaaagggagggggcaggaggagtacgtgctgagctacgaacctgtgaaccagcaggaagtgaattatacaaggcccgtcataatcctggggccgatgaaggacagaatcaacgatgatctcatctctgagtttcctgacaagtttggatcctgtgtgccccataccacccgcccgaagcgagactacgaggttgatgggcgcgactatcactttgtcacctcacgcgagcagatggagaaagatatccaggaacataagttcattgaggccgggcaatacaacaaccatctttatggcacttcagtacagagcgtaagggaggtggctgaaaaaggaaaacactgtatcctcgatgttagcggcaacgctattaaacggcttcagattgcacagctttacccaattagtatttttattaaacccaaaagcatggaaaatatcatggaaatgaataagcgactcacagaggagcaagcccggaaaacattcgagagagcgatgaaacttgaacaggagttcaccgagcattttacagctatcgtgcagggtgataccctggaagatatctataatcaggtaaagcagatcatcgaagaacagtccggaagctatatttgggtgcccgccaaggagaagctatag

SEQ ID NO: 114758 - DNA, 2676 bp, synthetic construct
  misc_feature 1..2676: note = Description of Artificial Sequence: Synthetic coding sequence
  source 1..2676: mol_type = other DNA
atgcccgtgagaaagcaggatacacaacgagctctccacctcttggaagagtacaggtccaagctgagccaaacagaggaccggcagctgcggagctccattgaacgcgttataaacatcttccagagcaatttgttccaagccctgatcgacatccaagaattttatgaggtcactctgctcgacaatcccaaatgcatcgataggtctaaaccgtctgagcccatccagcccgttaacacttgggagatatcttcactgccctcttccaccgtgactagtgaaacactaccctcatcactttctccgagcgtagaaaaatacaggtatcaagacgaagacaccccaccccaagaacatatttctcctcagattacgaatgaggtaattgggcccgagttggtacatgtgtctgagaaaaatctgagcgagattgagaatgtccatggcttcgtgtctcattcgcacatctccccaataaaacccaccgaggccgtcctgcctagtcctcccacagttccggttatcccagtcctcccagtcccagctgagaataccgttatcctgcccactatacctcaggccaacccaccccccgtgctggtgaacaccgatagcttggagaccccgacctacgtaaacggaaccgacgctgactatgaatatgaagaaatcaccctcgaacgcgggaacagcggactagggttctccatcgccggcggtacagataacccccatatcggcgacgatagcagtatctttattaccaagatcataacgggcggcgcagccgcgcaagacggtcggctgcgggtcaacgactgtatcctccgtgtaaacgaggtggacgtgagggatgttactcatagcaaagccgtggaggccttaaaggaagccgggagcatagtacgtctgtatgtgaaaaggcggaaacctgtgtccgaaaagataatggagattaaactgatcaaaggcccgaagggactcggctttagcatcgccggcggtgttggtaaccagcacataccaggggataatagtatctacgtcacaaagattatcgagggaggcgccgctcataaagatggaaaattgcaaatcggtgacaagttacttgcagttaataacgtctgcctggaggaggtcacacacgaggaagcggtgactgcgctgaaaaacactagcgactttgtgtacctgaaggtcgcaaagccaacatcaatgtatatgaatgacggctatgccccacccgacatcactaactcctctagccagcccgttgacaaccacgtgtccccaagcagcttcctcggtcagactcccgcttcaccagcgcggtactctccagtctctaaggccgttctgggagacgacgaaatcacaagagagcccaggaaagtggtgctgcaccgtggtagcacagggctgggcttcaacattgtgggaggagaggacggtgagggaatctttatttctttcattctcgccggtgggccagctgatcttagtggcgagttaagaaaaggcgatcgaatcatctcagtaaattccgttgatctgcgggctgccagccatgagcaagctgccgcagcactcaaaaatgcaggacaagccgtcacgattgttgcccagtatcgccctgaagaatactctcgcttcgaagcaaagattcacgacctcagggaacaaatgatgaactcttctatttccagtgggtccggcagcctgaggactagccagaaacggagtctgtacgtgcgcgccctttttgattatgataaaaccaaagactcaggattacccagtcagggcctgaacttcaagtttggcgatatcctgcatgtgatcaacgccagcgacgacgagtggtggcaagcccgccaggtaaccccagatggcgaatcagatgaagtcggagttataccctccaaaaggcgcgtggagaagaaggaacgcgctcggctgaagaccgttaagtttaactcaaagacgcgggacaagggggaaataccggatgacatgggaagcaagggcctcattggggggcaagaggaatacgtcctctcatacgagcccgtgaatcagcaagaggtgaattacacgagaccggtcattatcctgggccctatgaaagataggatcaacgacgatctgatatccgagtttcctgataagttcgggtcatgcgtgccacacaccacacggcctaaacgagattacgaggttgatggtagggattaccatttcgtcacctccagggaacagatggagaaggacatccaagagcataaatttatcgaagctggtcagtacaataatcatctttatggaaccagtgtccagtcagtaagagaggtcgcagaaaagggcaaacactgtattcttgatgtgagcggcaacgcgattaaaagactacagattgcccagctgtaccccatttccatatttatcaagcctaaatccatggagaatattatggaaatgaacaaaagattaacagaagaacaggcccggaagacttttgaaagggctatgaaactggaacaggagttcacagaacattttacggcaatcgttcagggcgacactctcgaggacatttataaccaagtgaaacagataatcgaagaacaatcagggagttacatctgggtccctgccaaagaaaagctgtag

SEQ ID NO: 114759 - DNA, 627 bp, synthetic construct
  misc_feature 1..627: note = Description of Artificial Sequence: Synthetic coding sequence
  source 1..627: mol_type = other DNA
atgcccgtgcgcaaacaagacacgcagagagccttgcacctcctggaggagtaccgctctaagctcagccagacagaggaccggcagcttcggagctctattgagcgggtgatcaacatcttccagtccaacctgtttcaggccctgattgatatccaagagttttacgaagtcacactgctcgataaccccaagtgcattgaccggtccaaaccgagtgaacctatacagcccgtgaacacctgggaaattagctccctaccctctagcacggtgacgtcagaaaccctgccgagttctttatcaccctctgtcgagaagtaccggtaccaagacgaagacactcccccacaggaacacattagtccacaaatcaccaatgaggtgattggcccagagctcgtccacgtgtccgaaaagaatctctcagagattgagaacgtgcatgggtttgtaagtcacagtcatatctctccgatcaaacccaccgaggctgttttgcctagtcccccgaccgtgcccgtgattcctgtgctgcccgtccctgctgagaatactgtgattttgccaactattccccaagctaaccctcctcctgtcttggtgaatactgatagtttagaatag

SEQ ID NO: 114760 - DNA, 2616 bp, synthetic construct
  misc_feature 1..2616: note = Description of Artificial Sequence: Synthetic coding sequence
  source 1..2616: mol_type = other DNA
atgcccgtgcgaaagcaggacacacaaagagccctccatctcttagaagagtatcgatccaaattgagtcagaccgaggaccgacagctaaggtcttccatagagcgagttatcaatatctttcagtctaacctattccaggctcttatagacatccaggaattctatgaagttaccctgctcgataaccccaagtgcattgatcggtcaaagccttcggagccaattcaacccgttaatacctgggagatttcctctctcccaagttccaccgtaacgagcgagacactcccatcctctctctctccaagcgtcgagaagtatagatatcaggatgaagacactcccccacaggagcacatttccccccagattactaacgaggtcattgggcctgagctcgtgcacgtgagcgagaagaatctcagtgagatagaaaatgtccacgggttcgtcagccactcacatatcagcccaatcaaagcaaatcctccaccagtgctggttaacacagactccttagagaccccaacgtacgtcaacggtactgacgcagactacgaatatgaggaaatcacccttgaacggggaaacagtgggttaggcttctcgatcgcagggggtacagacaacccacatattggggatgatagttcaatatttatcaccaaaattatcacagggggcgccgcagcccaagacggccgccttcgggtcaacgactgcattctgcgagttaacgaggtggacgtaagggacgtgacccactctaaggccgttgaggccctcaaggaggccgggtcaattgtgagactttatgtcaaaagacggaagccagtgtccgagaagattatggaaataaaacttataaagggaccaaaaggcctgggtttttccattgccggcggcgttggaaaccaacacataccaggcgataacagtatttatgtgaccaaaatcattgaagggggcgcagcacacaaagatggcaaattacagataggcgacaaactactggctgtgaataatgtatgtctggaggaggtgacccatgaggaggccgtgactgctttgaagaacacatccgacttcgtctatctgaaagttgccaagcctaccagtatgtacatgaacgacgggtatgcccctcctgacattacgaacagttcaagtcagcccgtggataatcatgtgagtccaagctcattcttgggacagaccccagctagcccagccagatattccccggtgagtaaagccgtgctaggagatgatgagatcacccgggagcctaggaaagttgtgttacaccgcggttctactgggcttggcttcaacattgtcgggggtgaggacggggagggcatctttatctcctttattctggccgggggaccggctgatctgagcggtgagctcagaaagggcgaccgcatcatctctgttaactcagtggatctccgcgctgcttcacatgaacaagctgcagcagcgctcaagaacgcaggccaggccgtgaccatcgtggcacagtataggccagaggagtattcccgattcgaggctaagatacatgatctgcgcgaacaaatgatgaactcctcgatatcgagcgggagcggtagtttgcgaacaagccagaaaaggtcgttgtacgtacgggccttattcgactacgataaaaccaaggattccggcctgccaagccagggccttaattttaaatttggggacatcctacacgtcatcaatgcttcagacgatgagtggtggcaggcgcgccaagtgaccccagacggagagagcgatgaggtgggagtgatccctagtaaacggcgcgtggagaagaaggaaagagcccggttgaagacagtgaagttcaacagcaaaacccgcgataagggtgagattccagacgacatgggctccaaagggctgaagcatgttactagcaacgctagcgatagcgaatcatcctataggggccaggaagaatacgtgctcagttacgagccggtcaaccagcaggaagtgaattatacaagacctgttatcattctgggacctatgaaagacagaattaacgatgatctgatcagcgagtttcccgacaaatttggcagctgtgttccccatacaactcgccctaaacgcgattatgaggtggacggtagagattaccattttgtaacatcccgtgaacaaatggaaaaagacattcaagaacataaattcattgaggccgggcaatacaataatcacctgtatgggacttccgtgcaatctgtgcgtgaggtggcagagaagggtaaacactgtattctggacgtgtcgggcaatgccattaagcggctgcagatcgctcagctgtatcctatcagcatatttatcaaacccaagtccatggaaaatataatggaaatgaataaacgcctgaccgaggaacaggcgcgcaaaacattcgagcgggccatgaagctggagcaggaatttacagaacactttactgctatagtgcagggggatacattggaagacatttataatcaggtcaaacagattatcgaagagcagagtggcagctacatctgggtccctgctaaagagaagctttag

SEQ ID NO: 114761 - DNA, 321 bp, synthetic construct
  misc_feature 1..321: note = Description of Artificial Sequence: Synthetic coding sequence
  source 1..321: mol_type = other DNA
atgcccgtgaggaaacaggacacacagcgtgcactgcacctcctggaggaatatcggtccaaactttctcagacggaggaccggcaactacgcagtagcattgaaagggttatcaatatttttcagtcaaatctgttccaggccctcattgacatccaggaattttacgaggttacgcttctggacaatcctaagtgcatagaccgatctaagccctcagagccaattcagccagtgaatacctgggaaatcagctcactgccctcaagtacagtaacctctgaaactttaccatccagcctgagccctagtgtggagtag

SEQ ID NO: 114762 - DNA, 1113 bp, synthetic construct
  misc_feature 1..1113: note = Description of Artificial Sequence: Synthetic coding sequence
  source 1..1113: mol_type = other DNA
atgcctgttcgcaaacaagatacccagcgtgcactgcacttgctcgaagaatacaggtctaaactgagccagacagaagataggcagttgaggtcaagtatcgaacgagtgatcaacatctttcagtcaaatttgttccaggctctgattgacattcaggaattttacgaagtgactttgcttgacaaccccaaatgcatcgaccggagtaaaccctctgaacccatccaaccggtgaacacttgggaaattagctctctacctagcagcacggttacaagcgagaccctgccttcctccttgtctccaagcgtggagaagtatcgataccaggacgaagatactcctccacaggaacatatttctccacagatcacgaacgaggtgattgggcctgagctcgttcatgtttcagagaagaatttaagtgagattgaaaacgttcacggctttgtctcacactctcatatttctccaataaaggtgaacggcacagatgcagattacgagtatgaagagatcaccttggagcgtggcaattctggactggggtttagcatcgccggcgggaccgataatccacatatcggtgatgacagctcgatatttatcactaaaattattactggcggcgcagcagctcaagatggcagactgcgcgtcaacgattgtatcttgcgcgtgaacgaggtggatgtgcgcgacgttactcactctaaagctgtagaagctctcaaggaggccggaagcatcgtgagactctacgtcaagcggagaaaacccgtgtcagaaaaaattatggagatcaagttaataaaaggccctaaaggactgggcttctccatcgccggtggcgttgggaaccagcacataccaggtgataatagcatatacgtcacaaagatcatcgaaggtggcgctgcccataaagacggcaagctacagataggggacaaacttttagcagtcaacaacgtttgcctcgaggaggtgacacatgaagaagctgtgaccgccctcaagaataccagtgatttcgtgtacttaaaagtggctaagccgacttcgatgtatatgaacgatggttacgcaccaccggacatcacgaactag

SEQ ID NO: 114763 - DNA, 2715 bp, synthetic construct
  misc_feature 1..2715: note = Description of Artificial Sequence: Synthetic coding sequence
  source 1..2715: mol_type = other DNA
atgcctgtcagaaagcaagatacacaacgcgccttacacctccttgaagagtaccggtccaagctctctcaaaccgaggatcggcagcttcggtcctcaattgagcgcgttataaatatcttccagagtaatctgttccaagccctgattgacatccaagaattctacgaggtgaccctattggacaacccaaaatgcatcgatcgctccaaaccttccgaaccgatccaaccagtgaatacctgggaaattagctcactgcccagcagtacagtcacctctgaaactctccctagctccctctccccttcagtggaaaagtaccggtatcaggatgaggatactcctccgcaggaacatatcagcccccagattaccaacgaggtgataggaccagagctcgtgcatgtgtctgaaaagaatctatccgaaatagagaatgtacatggattcgtttcacactctcacatctcacctatcaagcccaccgaagccgttttgccttctccgcccactgtccctgtgatacccgtcctcccagtccccgcggagaacacagtgatcctgccaactatccctcaagcaaatcccccccccgtcttggttaacactgatagtcttgaaacaccaacttatgtgaacggcactgacgccgactatgaatacgaagagatcactttggagcgaggtaacagcggactgggcttctcaatagccggagggactgataatccacatatcggtgacgatagttctatctttattaccaaaataatcactggaggagcagccgctcaggacggtcgtttacgtgtgaacgattgcattcttagggttaatgaggtggatgttcgcgatgttacccactccaaagctgtggaagccctaaaagaagccggctccatcgtgagactgtacgttaagcggagaaagcctgtgtccgaaaaaattatggagattaaactgatcaagggcccaaagggactgggattctctattgcaggaggagtcggtaaccagcacatcccgggagacaacagtatttacgtgactaagatcatcgagggaggagcagcccataaagacggtaagctccaaataggcgataagctgctcgccgtgaacaacgtatgtctggaggaagttacccacgaggaggccgttaccgcactaaaaaacacatcagactttgtatatctaaaggtggccaagccaactagcatgtatatgaatgatgggtacgctcccccagatatcacgaactcaagctcacagcccgttgataaccacgtctcccctagtagcttcctgggtcagacccccgcttcgccggcaagatattcaccggtctctaaggctgtcctcggggacgacgagatcaccagagagccacgcaaggtagtgctccacaggggctcaacaggactgggatttaatattgtcggaggcgaagacggagaaggaattttcatctcctttatactagctggagggcctgctgacctttcaggggaactccggaagggggaccggatcataagtgtgaactctgtcgatctccgcgctgcctcacatgaacaagccgccgctgctctgaagaatgctggtcaggccgtgactatcgtcgcacaataccggccagaggagtattcccggttcgaagctaagatccacgacttacgtgaacagatgatgaatagcagtatctcctctgggtccggatctcttcggacgagccagaaaagatccctgtacgtgcgcgcactttttgattatgacaaaaccaaggattctggactgccatcacagggccttaatttcaaattcggagatatcctccacgtgatcaatgcttcagacgatgaatggtggcaggccagacaagtgaccccagacggagagagcgacgaggtgggagtgattccatcgaaaagacgggtggagaagaaggagagggcacgactgaaaactgtaaagtttaactccaaaaccagagataaaggggagattcccgacgacatggggtctaagggccttaaacacgtgacgagtaacgcaagtgacagcgagtcctcttataggggccaggaggagtacgtcctctcttatgagcctgtaaaccagcaggaggttaattacacacgacccgtaatcatcttggggcctatgaaggatcgcatcaatgacgacctcatctcagaatttccggataaattcggctcttgtgtgccccacacgactagacctaaaagagattacgaagtggatggaagggactaccacttcgtaacatcgagggaacagatggaaaaggatattcaagaacataaattcatcgaggcaggacagtacaacaatcatctgtatggaacttcagttcagagtgtgagggaggtggccgaaaaaggcaaacactgcattctggacgtgtctggcaacgccatcaagaggctgcaaatcgcacaactctaccctattagcatcttcataaaacctaagagcatggagaatataatggagatgaataaacggctgaccgaggagcaggcaagaaagacattcgagcgggcaatgaaactggaacaggagtttacagagcatttcactgccatcgtgcagggggatacactggaggatatttataaccaggtgaaacaaattattgaagaacagtctggctcttacatctgggtgccggccaaggaaaaactctag

SEQ ID NO: 114764 - DNA, 465 bp, synthetic construct
  misc_feature 1..465: note = Description of Artificial Sequence: Synthetic coding sequence
  source 1..465: mol_type = other DNA
atgcctgtgaggaaacaggatactcaaagggctttgcacctgctggaagaatatcgcagcaaactgtctcagacagaagaccgacagcttaggagctcaatcgagagagttataaatattttccagtctaatttattccaggcactcatcgatatccaggagttttacgaggtgacactccttgacaaccccaagtgtatagacagatctaaaccaagcgaaccaattcagcccgtcaacacctgggaaatcagttcgctaccctcttccacagtcacgtctgaaacgctcccttcatcactatcccccagcgtggaaaagtaccgttatcaggacgaggacacacccccacaggagcacatctcgccccagattaccaacgaggttatcggccccgagctcgtgcatgtgagcgagaagaatttgagcgagattgaaaatgtgcatggattcgtgtcacattag

SEQ ID NO: 114765 - DNA, 2562 bp, synthetic construct
  misc_feature 1..2562: note = Description of Artificial Sequence: Synthetic coding sequence
  source 1..2562: mol_type = other DNA
atgcccgtgcgtaaacaggacacccagagagccctacacctgctggaggaataccggagcaagttgagccagactgaagacaggcaactgagatcctccatagagcgagtcatcaacatcttccagtcgaacttattccaagccctcatcgatatccaggaattttacgaggtgacattactcgacaatcccaagtgcatcgatcggtcaaagccctcagagccgatccaacctgtcaatacatgggaaataagctcgctgccctcttccaccgtgactagtgaaacactgcccagctctctctccccgtccgtggagaagtaccgataccaggacgaagacacacctccacaagaacacatcagtcctcaaattaccaacgaagtcattggcccagagcttgtgcacgtcagcgagaaaaacctgtcagagatcgaaaatgttcatggttttgtctctcatagtcacatttccccaataaaagtgaacggtaccgatgccgattacgagtacgaagaaatcacgttggaacggggaaacagtgggctcggcttctccatcgccgggggcactgacaatcctcacattggagatgattcttcaatcttcattactaagattataaccggcggcgcagcggcacaagacggtagacttcgtgttaacgattgcattctgagagtcaatgaggtagacgtgagggacgtgacacactccaaagcagtggaggccctaaaggaggccggctcgattgtcaggctgtacgtaaagcgccggaaacccgtaagcgaaaagatcatggaaataaagttaatcaaaggtccaaagggcctgggtttctccatcgcaggcggagttgggaaccaacatatcccaggtgacaacagtatctacgtgaccaagattatcgagggcggagctgcgcacaaagatggcaaattgcagattggggacaaactgctggccgtgaacaacgtgtgtcttgaagaagtgacccatgaagaagctgttacggctctgaagaatacctcagactttgtgtacttgaaagtcgctaagccaactagcatgtatatgaacgatggctatgctccgcctgatatcacaaatagttctagtcagcccgtggacaaccacgttagcccttcttcatttctcggacagacaccagcttctcccgctcgatactcccctgtgtccaaggctgtcttgggggacgacgagatcactagggagccccgaaaggtggtccttcaccgtggtagcaccggcctggggttcaacattgtggggggcgaagatggtgaggggatatttatcagctttatccttgctggtgggcccgccgacctgtctggagaacttaggaagggggaccggattattagcgtgaactctgtggacctgagggccgcctcccacgagcaggctgccgcggccctgaagaacgccggccaggctgtgaccatcgtagcccagtaccgccccgaggagtatagcaggttcgaagcaaagatccatgatttacgtgagcagatgatgaactcttcgatatcctccggaagcggctcactgcgaaccagccaaaagcgtagcctgtacgtgagagcccttttcgactacgataaaacaaaggattcaggactaccaagtcagggtctgaacttcaaattcggagacatcctccacgtaatcaacgccagcgatgatgagtggtggcaggctcggcaagtcaccccggatggcgaatctgacgaagtgggagtcattccaagcaaacggagagtggagaaaaaggaacgcgcccggctgaagactgtgaagttcaattctaagacaagagataagggtgagatcccagacgatatgggctctaaaggtcttaaacacgttacttccaatgcgagcgattccgaaagttcttatcggggtcaagaagaatatgtgctgagctatgaacctgtcaaccagcaagaggtcaattatacccgccccgtgatcatcctgggccccatgaaagataggataaacgatgacctcatcagtgaattcccagataagtttggcagctgtgtgcctcataccacacggccaaagcgtgattacgaggttgatggcagggactaccactttgtgacaagcagggagcagatggagaaagatattcaggaacataagttcatagaggcaggccagtataataatcacctgtacgggacatccgttcaaagcgtccgcgaggtagcagagaaggggaagcactgcatactggatgtgtcaggcaatgctattaaaaggctgcaaattgcccagctgtatcctattagtatttttatcaaacctaagagtatggagaacattatggagatgaataagcgtctgacggaggaacaggcccgcaagaccttcgagagagctatgaagctggagcaagagtttaccgagcacttcacggcaatcgtgcaaggggacacactggaggatatttataaccaggttaaacagattatcgaggagcagagtggaagctacatctgggtccccgcaaaggagaagctttag

SEQ ID NO: 114766 - DNA, 111 bp, synthetic construct
  misc_feature 1..111: note = Description of Artificial Sequence: Synthetic coding sequence
  source 1..111: mol_type = other DNA
atgcccgtgcgcaagcaggatacacagagggctctgcatcttctcgaagagtaccgtagcaagctcagccagaccgaagacagacagctgcgcagttcgattgagcgttag

SEQ ID NO: 114767 - DNA, 372 bp, synthetic construct
  misc_feature 1..372: note = Description of Artificial Sequence: Synthetic coding sequence
  source 1..372: mol_type = other DNA
atgccagtacggaagcaggacacacagagagcgctgcatctcctagaggaataccggagtaagttgtctcagactgaggatagacagctgaggtccagtattgagagagtaattaatatcttccagtctaatctattccaggcccttattgacatacaagagttctatgaggtgaccctgctggacaaccctaaatgcattgatcggagcaaaccctcagaacctatccagcccgttaatacgtgggagattagttcactcccatcatcaactgtgacttcagagacactcccgagttcgctgtcccccagtgtggagaaatatagatatcaagatgaagacacaccccctcaagaacacatatcaccttag

SEQ ID NO: 114768 - DNA, 2715 bp, synthetic construct
  misc_feature 1..2715: note = Description of Artificial Sequence: Synthetic coding sequence
  source 1..2715: mol_type = other DNA
atgcccgtgcgcaagcaggatacgcagcgggccctgcatctgctggaggaatataggtctaaactctcgcaaacagaggaccgccaattaaggtcttcaattgagagggtgatcaacatcttccagagtaacctgttccaggcactcattgacatacaggagttttacgaggtgaccctccttgataaccctaagtgcatcgacaggtcaaaaccctcggaaccgatccagcccgttaacacttgggagatttctagtctgccttcttctacagttacgtccgagaccctgccttctagcctttcaccctctgtcgaaaaataccgttatcaggatgaggacacaccccctcaggagcatatctccccccagatcaccaacgaggttatcggacctgagctcgttcacgtttctgagaaaaacctgagcgagatcgaaaatgtgcacgggtttgtatcccattcccacattagtcccataaagccaaccgaagccgtgctgccaagcccgccaaccgtccctgtgattcctgtcctgcctgtgcccgcggagaatacggtgatccttcccactattccacaagccaatccaccccccgttctcgtcaacacggatagtctcgagacacccacatatgtaaatgggaccgatgcagactatgagtacgaagaaatcactctggaaaggggcaactctggactggggttctccatcgccggtggcaccgataacccccacattggtgacgactcttctatcttcataacaaaaatcattaccggcggtgcagcagcccaagatggccgcctgcgggtcaatgactgtattttgcgggtgaacgaggttgacgtgagagacgtgacccattcaaaggctgtggaagctcttaaggaagccggcagcatagtgcggctgtatgttaaacggcgaaagccagttagcgaaaaaatcatggagattaagctcattaaagggcctaaggggttgggattcagcatcgccgggggcgtggggaaccagcacattccaggcgacaacagtatatacgtcaccaagatcattgagggcggagctgcccataaggacggcaaactgcagatcggagacaagcttcttgctgtgaacaacgtgtgtctagaagaagtaacccacgaagaagccgttactgccctgaaaaatacaagcgattttgtgtatttgaaggtggcaaagccaacgtctatgtacatgaatgatggttacgcaccacctgatattacaaacagctcttctcagcccgtggacaaccatgttagccccagctctttcctcggccagacacccgcatcaccggctaggtattctcccgtgtcaaaagctgtgctcggcgatgatgaaatcacccgcgagccccgtaaagttgtactgcaccgagggtcaaccgggttgggattcaatatcgttggtggggaggacggtgaaggaattttcatctcctttattctagcaggaggacctgcggatttgagcggcgagcttcgcaaaggggataggatcatcagtgtaaattctgtggatctgcgcgcagcctcccacgaacaggccgccgccgccttgaaaaacgccggccaggctgtaacaattgtggcacagtacaggcctgaagaatattcacggtttgaggccaagattcacgacctcagagagcagatgatgaatagtagcatttcctctggcagcggaagcctcaggacaagccagaagcggtctctctacgtgcgagcactctttgactatgataaaacaaaggacagcgggctgccaagccaggggctgaactttaagtttggggacatcctccatgtaattaacgctagcgatgatgaatggtggcaggcaaggcaggtgacacctgatggggaaagcgacgaggtgggcgtgatcccatcaaagcgacgtgtagaaaagaaggagcgggcccgtcttaaaactgttaagttcaactccaagaccagagacaagggggagatcccagatgacatgggaagtaaagggttaaaacatgtcactagcaacgctagcgattctgaatcatcctaccgaggacaggaggagtatgtattatcctacgaacctgttaaccagcaggaggtaaattacaccagacccgtgattattctcggccccatgaaagacagaatcaacgatgatctaatatctgaatttccagacaaattcggctcctgtgtaccacacacaactcggccaaagcgagattacgaagtggatggacgggattaccacttcgttacctcaagagagcagatggaaaaggacattcaggaacataaatttattgaagccggccaatacaataatcacttgtatggaacttctgtacagtctgttagggaggtggccgaaaaggggaagcattgtatcctggacgtctccggcaacgccatcaagcgtttacaaatcgcccagctctacccaatttcgatcttcatcaaacccaagtcaatggaaaacattatggaaatgaacaaacggttgaccgaggagcaggctagaaagaccttcgaaagggctatgaagctggagcaggaatttaccgaacatttcaccgctatagtacagggtgacacccttgaggatatctataaccaggtcaagcagattatcgaagagcagtccggcagctatatttgggtgcccgctaaagaaaagctttag

SEQ ID NO: 114769 - DNA, 2682 bp, synthetic construct
  misc_feature 1..2682: note = Description of Artificial Sequence: Synthetic coding sequence
  source 1..2682: mol_type = other DNA
atgcctgtcagaaaacaggatacccagcgcgctctccatctgctagaggaataccgatctaagctctcgcaaaccgaagaccgtcagctgcgctcttccatcgaaagagtgataaatatttttcaaagcaacctgttccaggctcttattgatattcaggaattttacgaagttacacttcttgacaaccctaagtgcattgaccgctctaaaccttctgagcctattcagcctgtgaatacctgggagataagttcgcttccctcctccaccgtgacctcagaaactttgcccagctctctcagtccctccgtagaaaagtacagataccaggacgaagataccccaccccaggagcacatttctccccagatcaccaacgaagtcatcggccctgaacttgtgcatgtaagtgaaaaaaatcttagtgagatcgagaacgttcacggattcgtaagtcattcccacatctccccgatcaaagcaaatcccccgccagttttggtaaataccgactccctggagaccccaacttatgtcaatggtaccgacgccgattacgaatacgaggaaataacactggagcgaggtaattctggcctgggatttagcatcgcaggggggactgacaatccccatattggtgatgatagctctatctttattactaaaataatcaccgggggcgcagccgcccaggacggaagattgagggtgaatgactgtattctccgcgtaaatgaggtggacgtcagagacgtgacacattccaaggccgtggaagctctcaaagaggctggctcaattgtaaggctgtacgttaaaaggagaaaacccgtaagtgagaagattatggagattaagctaatcaagggccccaagggcttagggttcagtattgcaggcggagtgggaaatcagcatatacctggtgataattccatctacgttacgaaaatcatcgagggaggcgccgcacacaaagacggaaaactgcagatcggagacaagctgctggccgtgaacaacgtgtgcctcgaagaagtgacacacgaggaggctgtcacggccttaaaaaataccagcgacttcgtttacctcaaggtcgctaagcctacctcgatgtacatgaatgacggttatgcaccacccgatatcacaaacagtagttcacagcccgtggacaatcacgtaagcccaagcagtttccttggtcaaaccccagcaagtcctgcaagatactcacctgtctcaaaggctgtcctcggcgatgatgaaatcactcgcgagcctaggaaggtcgtgctgcaccggggctcaaccggacttggattcaacatcgtgggtggggaggatggggaaggcatctttatttcttttattcttgcaggagggcctgccgacttgtctggcgaactgcggaagggggatagaatcatttctgtgaattcagtggatctgcgcgccgcatcacacgaacaagccgctgcagcattgaaaaatgcggggcaggcagtaaccatcgtggcgcagtacaggcctgaagagtactcccgttttgaagctaaaattcatgatctgcgtgagcagatgatgaatagttcaatttctagcgggtctggctcgctaaggacaagtcaaaaacggtcgttatacgtccgcgctctattcgattatgataaaaccaaggacagcggactgcctagccaggggttaaattttaagtttggcgacattttacacgtgatcaacgccagtgatgatgaatggtggcaagctagacaggtcactccagacggtgagtctgatgaagtgggggtgatccccagcaaacggcgcgtagaaaagaaggaacgagccaggctgaagaccgtgaaattcaatagcaagacacgggataaggggcagtccttcaatgacaaacggaaaaaaaacctattctcaagaaagtttcccttttataagaataaagatcagtccgagcaggagactagtgacgccgaccagcatgtaacttccaacgcgagtgattcagaaagcagctacaggggccaggaggagtacgtcctgtcttacgagcctgttaatcaacaagaagtgaattatactaggcccgtgataatactcgggccgatgaaggaccgcattaatgacgacctcatctcggagtttcccgacaagtttggcagttgtgttcctcataccacccgacccaagcgcgactacgaggttgatggaagggactatcacttcgtcactagcagggagcagatggagaaggacattcaggagcacaagtttatcgaggcaggccaatacaacaaccatttatatggtacgtcagtccaatccgttagggaggtcgcagagaaaggaaaacattgcatcctcgatgtctcaggaaatgctatcaaaaggttacagatcgctcagctgtaccctattagtatctttatcaaacctaagtctatggaaaatatcatggagatgaacaaacggctcacggaggaacaggctaggaagacctttgaacgtgctatgaaattggaacaggagttcacagagcacttcaccgcgatcgtccaaggagatacgctcgaagatatctataaccaggtcaagcagattattgaggaacagagcgggagctatatatgggttccggccaaggagaagctctag

SEQ ID NO: 114770 - DNA, 2730 bp, synthetic construct
  misc_feature 1..2730: note = Description of Artificial Sequence: Synthetic coding sequence
  source 1..2730: mol_type = other DNA
atgaacgcttatctcacgaagcagcattcatgcagcagggggtcagacgggatggatgcagtcaggtctgcccctactctgatcagagatgcacattgtgcgtgtggttggcaaagaaactgtcagggcctgggatacagttcacagacaatgcccagttccggccccgggggcccagcctccaacagaacaggaggctcctccttcaaccgcaccctctgggactccgtacgcaagtcgccccacaaaaccagtactaaggggaaaggtacatgtggagagcactgcacttgcccacacggatggtttagtccagcccaagcctccccagctcccatcatcgtcaacacggatactctggacaccatcccgtatgtgaacggaactgagatcgaatacgagtttgaggagatcaccctggaacgggggaacagcggactggggttcagcatagctggaggaacagacaatccacatataggcgatgaccccggcatctttatcactaagatcatacctggcggcgctgcagctgaggatggccgccttcgggtgaatgactgtatcctgagggtcaatgaggtcgatgtgtccgaagtcagccacagcaaggccgtggaagccctcaaagaagcgggaagtatagtaaggctatatgtccgacggcgcaggcctatcctggagaccgtggtggagattaagctctttaaaggtccaaagggtctgggcttttcaatcgcgggcggggtaggaaatcagcacattccaggggataattccatttacgtgacaaaaattatagacggcggagctgctcagaaggacggcaggttgcaggtgggggacagactgctcatggtaaataactactctctggaagaggttacccacgaagaggcagtggctatcctaaagaatacctcagaagttgtgtatctcaaagtaggtaagcccaccaccatctatatgactgatccttatggtccccccgacataactcactcctacagcccccccatggaaaaccatttactctcgggcaacaacgggactctcgaatacaaaactagtctgcctcccatttcaccgggcaggtacagcccgattcccaagcatatgctcgttgatgacgattatactcgccccccagaacctgtgtactcaacagtcaacaaactttgtgacaaacctgccagccctcggcactacagtccagttgagtgtgataagagtttcctgctttccgctccatacagccattaccatctggggctcctgcctgattccgagatgacttcacattcccagcattccaccgctacacggcagccctcaatgacccttcagcgtgctgtgagccttgaaggtgaaccaaggaaggtagtcctgcataaaggtagtacaggcctgggatttaatattgtcggaggggaggacggagagggaatcttcgtgagctttatcttagccggcggtcccgcggacctgagcggggagctgcaacgaggggatcagatcttatcagtcaatggcatagatctcagaggagcatcccatgaacaagctgccgccgcgctgaaaggggccggacaaaccgtgaccattatcgcacagtatcaaccggaggactatgccaggtttgaagccaaaattcacgaccttagggaacagatgatgaatcattccatgtctagcggttccggctcattgagaaccaaccagaagaggtctctgtatgtgcgagctatgttcgactacgacaaatcgaaagacagcggtctgccctctcaggggctgtccttcaagtacggagacatcctgcacgtgatcaatgcctcagatgacgagtggtggcaggctcgaagagtgatgctggagggggacagcgaggagatgggtgtaatccctagtaagaggcgggttgagcgcaaggagcgagccagacttaagaccgtgaagttcaacgcaaaaccgggcgttatagacagcaaaggtagctttaatgataagcgcaagaaaagttttatttttagtcgtaagttccccttctacaagaacaaagagcagagcgagcaggaaacctcagacccagagagagggcaagaggacctgatactgtcgtacgaacctgtgaccaggcaggaaataaattacactaggcccgtgataatcctggggccgatgaaagatcgcattaatgatgatcttatttccgagttcccggataagtttggatcgtgtgttcctcataccacaaggccaaagcgggactacgaagtggacgggcgagactatcactttgttatttctcgggaacagatggaaaaagacattcaggagcacaaatttatagaggccggacagtataacgacaacctgtacggcacaagtgttcagagcgtacggtttgtggcggaacgcggtaaacactgcatactggacgtgtccggcaacgcaattaagagattacaggtagctcagttatatcctattgccatttttatcaaaccccggtcactcgaaccactgatggaaatgaacaagcgtctgacagaggaacaggccaaaaagacatatgacagggccataaagctcgaacaagaatttggcgaatatttcaccgctatcgtgcagggggacactctggaggacatttacaatcagtgtaaactggtgattgaggaacaaagtggtccctttatatggatcccgtcaaaggagaaactatag

SEQ ID NO: 114771 - DNA, 2376 bp, synthetic construct
  misc_feature 1..2376: note = Description of Artificial Sequence: Synthetic coding sequence
  source 1..2376: mol_type = other DNA
atgcaacacgcttttatccctgcgtcgcctgcgcctattatcgtgaatactgacacactggacacaatcccttatgtgaatggaacggaaatcgagtatgagtttgaggagataaccctcgagcgcgggaattccggacttggattctccatcgcaggcggcacagacaacccgcacattggcgacgacccaggaattttcatcaccaaaattatcccaggaggggctgccgccgaagatgggagactccgggttaatgactgcatcttacgcgtaaatgaggtggatgtctccgaggtgtcacactccaaagcagtggaggccttgaaagaagccggctctatcgttagactatacgtccgacgccggcgtccgattctcgagaccgttgttgagataaaactgtttaagggaccaaagggactcggtttcagcatcgcaggaggcgtgggcaatcaacacatcccgggggacaactcaatctacgtgacaaagatcatcgatggtggcgctgcccagaaggatggccgcttgcaggtgggggatagactgttaatggtcaacaattactctctcgaggaggtgacccacgaggaagcggtcgcgatcctgaaaaatacaagcgaggttgtgtatctgaaggtgggcaagcctactactatatacatgacggacccatacggccctccagacattactcacagctattccccgcccatggaaaatcatctgttgagcggtaacaacggtacgttagagtacaagaccagcctgccaccaatctctccagggcggtactcccctattccaaaacacatgcttgttgatgatgattacaccagacctcctgagcccgtatactctaccgtcaacaaactatgcgacaaacccgcatcaccgcgtcattacagcccagtagagtgcgacaagagctttctcctctcggcaccctattcccactaccacctggggctcctgccagacagtgagatgacttcacatagccagcacagtactgctacacgccagccttcaatgacactgcagcgcgcagtgtctttggaaggcgagcctagaaaggtggtcctgcataagggaagcacaggtttggggtttaacattgtcggcggagaggatggtgaaggcatcttcgtgtccttcattctggcaggaggccctgcagacctctcaggagaactgcagagaggtgaccagatcctgtccgttaacggcatcgacctgcgcggagcctcccatgagcaggcagcagccgctctcaagggagcaggacagaccgttaccataatagcccagtaccaaccggaagactacgcccggttcgaggccaagattcatgatttaagggagcagatgatgaaccacagcatgtctagcggcagcggcagcctgagaacaaatcagaaacgctccctgtacgtgcgggctatgtttgattatgacaagtcaaaagatagtgggttaccctcacagggcctctcgttcaagtatggggacatcctgcatgtgataaatgccagcgacgatgagtggtggcaggccagaagagtgatgctcgaaggcgattctgaagaaatgggcgttatccctagcaaacgcagagtcgagaggaaagaaagagcaaggctgaagaccgtgaagttcaacgcgaagccaggcgtaattgattctaagggagacatccccggtcttggggatgatggatatggcactaaaacgttgagggggcaagaagaccttatccttagttacgagcccgtgacccggcaggagattaactacactagaccggtgattattttgggccctatgaaagacagaatcaatgatgatctgatcagcgagttccccgataaatttgggagctgtgtgccacacactactagaccaaaacgggactatgaggtcgacgggagggattatcattttgtgatctcccgggaacagatggaaaaagacatacaggagcacaaatttattgaggcgggccagtacaatgataacctctatgggaccagcgtgcagagcgtgagattcgtggctgaaaggggcaaacactgcatcctagacgttagcggcaatgcaatcaagaggctccaggtagcgcagctgtatcctattgccattttcatcaagcccagaagtttggagccccttatggagatgaataagagactcaccgaagagcaggctaaaaaaacgtatgacagggccatcaagcttgagcaggagtttggtgagtatttcactgccatcgttcagggtgatacactagaagatatctataatcagtgcaagctggtgatcgaggagcaatccggcccattcatctggatcccatctaaagaaaagctatag

SEQ ID NO: 114772 - DNA, 2928 bp, synthetic construct
  misc_feature 1..2928: note = Description of Artificial Sequence: Synthetic coding sequence
  source 1..2928: mol_type = other DNA
atgggtatctttaagagcagtctctttcaggcccttctcgatatccaagaattttacgaggtgacattgcttaacagccagaaatcctgcgaacaaaagatagaggaggctaaccaggtcctgcagaaatgggagaaaacgtccctgctggcgccgtgtcatgaccgcttgcaaaagtctagtgaactgactgattgttctggctcaaaggaaaacgcatcttgcatcgaacaaaataaggagaaccaatcgttcgagaatgagactgacgaaaccacaacacagaaccagggccgctgccccgcccagaattgctcagttgaggctccagcctggatgccagtgcatcactgcacaaagtaccgataccaggatgaggatgctccacatgatcacagcttgccaagactgactcatgaggtcagagggccagagctcgtccacgtgtcagagaagaaccttagccagattgagaacgtgcatggatacgtgctccagagccacatttctccccttaaggcaagcccagctccaatcatcgtcaacacagacacactcgacacaattccttatgtcaatgggactgagattgagtacgaatttgaggaaatcacacttgagcggggaaatagcggactggggttttctattgccgggggcacagataatccacatatcggagacgaccctggcatcttcatcaccaaaattataccgggcggcgctgctgcagaagacggaaggctccgcgtgaatgactgcattctgcgcgtgaacgaggttgacgtgtccgaggtgtcacactcaaaggctgttgaagcattgaaggaggcaggaagtatagtgaggctgtatgtgcgtcgacgcagacctatcttggaaacggtggtagagatcaagctgttcaagggacctaagggccttggcttctccattgccgggggcgtcgggaatcaacatataccaggtgataattctatttacgtaaccaagatcatcgacggaggggccgcgcagaaggacggacggctgcaggtaggtgatagactcctcatggtaaacaattattcactagaggaggttacccacgaagaggccgtcgctattctgaagaatactagtgaggtagtttacctgaaggttgggaagcctacaaccatttacatgacagatccctacggcccaccggatattacccatagctattcacctccgatggagaatcatctcctctcagggaataacggaacactggagtataaaacaagtctgccccctattagtcccggccggtactccccaattccaaagcatatgctggttgacgacgactacacacgacctcccgagcccgtctacagtacagtcaataagctgtgtgataaacctgccagccccaggcattacagcccggtggaatgtgacaaaagctttcttctaagcgctccttattctcattatcaccttgggttgctgcccgattcagagatgacaagccactcacaacactccacagctacaagacaaccatctatgacattacaacgagctgtgagtctggaaggagagcctagaaaagtcgttttgcacaaaggtagcactgggctcgggtttaacattgtcgggggagaggacggcgaaggcattttcgtgtcgttcattctggccggcggccctgctgatctcagtggcgaattgcagcggggcgatcaaatcttatcagttaatggcattgatctgcgaggggcatcacatgagcaagctgctgccgcactgaaaggagcaggacaaaccgtaacaataattgcccagtatcagcccgaggactatgccaggttcgaggccaaaattcatgatttacgggagcagatgatgaatcactccatgtcgtcagggtcaggctccctcagaactaaccagaaaaggtccctgtacgtgagggcgatgtttgactatgacaagtccaaggatagtggtttgccgagccagggcctaagcttcaagtacggcgacattcttcatgttattaacgctagcgatgatgagtggtggcaggctagacgggtaatgctcgaaggcgactcggaggagatgggcgtgatacccagcaagcgtcgggtggagcgcaaggagcgggcccggctcaaaaccgtgaagtttaatgcaaagcccggcgtgattgattctaaaggaagctttaatgataaaagaaagaagagctttatcttttcaaggaagttcccgttttacaaaaacaaggaacagagcgagcaagagacaagcgaccctgaacgtggtcaggaggatcttatcctttcctatgagccagtgactcgtcaggagattaactacacacggccagtgattattctggggccgatgaaagaccggattaatgatgacctgatttccgaatttcccgataaatttggcagttgcgtcccacataccacccggcccaagcgtgattatgaagtggacggtcgggattaccactttgtcataagccgcgaacaaatggaaaaagacatacaggagcataagttcattgaggccggccaatacaatgataacctgtacggcacttcggttcagtctgtaagatttgtggccgaaagaggtaagcattgtatcctcgatgtgtcaggaaatgccataaaacgcttgcaggtcgcccaactgtatcccatcgcaattttcatcaaaccgcggtccctagagcctcttatggaaatgaacaagaggctaaccgaagaacaggcgaaaaaaacctacgatagggcaattaaattggagcaggaatttggagagtacttcaccgccatcgtgcaaggggatacgctagaggatatatacaaccagtgcaaactggtaatcgaggagcaatccggccccttcatatggattccctcaaaggagaaactctag

SEQ ID NO: 114773 - DNA, 1005 bp, synthetic construct
  misc_feature 1..1005: note = Description of Artificial Sequence: Synthetic coding sequence
  source 1..1005: mol_type = other DNA
atgatgaatcatagtatgagttctggctccggtagcttgcgaacaaaccaaaaaaggagcctctatgtcagagcaatgttcgattatgataagtcaaaagactccggacttccatcccaaggtctgagcttcaaatatggggacattctgcatgtgatcaatgcctcggacgacgagtggtggcaagctcgtagggttatgctggagggtgactccgaagagatgggtgttattcctagcaaaagaagagtagagcggaaggagcgcgcccggctaaagactgtgaaattcaatgcaaaacctggggtgattgattcaaagggtgatatcccaggcctcggcgatgacggatatgggaccaagacactgcgtgggcaggaggacttgatactaagttatgaaccagttacacggcaggagattaattacaccaggcccgtgatcatcttgggccccatgaaagaccggatcaacgacgatctcataagcgagtttccggacaagttcggaagctgcgtcccccacaccacacgccccaaacgagattacgaagttgatggtcgcgactaccacttcgtgatttcaagagagcaaatggagaaggatatccaggagcacaaattcatcgaagccgggcaatacaatgacaatctgtatgggacgagcgtccagagcgtgcggttcgtggccgaaaggggcaaacattgtatcctcgatgtcagcggcaatgccatcaaacggctccaggtagctcagctctacccgatcgccatcttcatcaagccaagaagcctcgaaccactcatggagatgaataagcggctgacggaggaacaggctaagaagacctacgaccgcgccataaagctggagcaagaattcggagaatattttacagccattgtccaaggcgacacactcgaggatatatacaatcagtgcaagttagtcattgaggagcagtctggcccatttatctggataccctccaaggaaaaactgtag

SEQ ID NO: 114774 - DNA, 2613 bp, synthetic construct
  misc_feature 1..2613: note = Description of Artificial Sequence: Synthetic coding sequence
  source 1..2613: mol_type = other DNA
atgttcttcgcttgttattgtgcgcttcgcactaacgtgaaaaaataccgataccaagacgaggacgcaccacatgatcattccttgcctcgtctgacccatgaggtcagagggcctgaactcgtacacgtaagcgagaaaaacctgtcccagattgagaatgtgcacggatacgttttgcagtctcacatatctcccctgaaagccagtcccgcacccatcatcgtgaatactgacaccctggacacgattccatacgtcaacggaaccgagatagagtacgagtttgaagaaataactctagagagagggaattctggactgggattctcaatagcaggcggaacagacaacccccatatcggagatgacccgggcatattcataaccaagattatccccggaggtgctgccgccgaagacggacgcctgagggtaaatgactgcattctgcgggtgaatgaagtcgacgtctcagaagtttctcactccaaagcagtggaggccttaaaagaagccggctcaattgtgagactgtatgtaagacgacggagaccgatcctggagacagtcgtagaaatcaaactttttaagggccccaaagggctgggcttctccatagccggcggggtgggtaatcagcatatcccaggcgacaattccatttatgtaaccaaaattattgatggcggagcagcacagaaggatggaagacttcaggtgggtgaccggctgctcatggtgaataactattcactagaggaggtgacccacgaagaggctgtagcgatcctcaagaatacatctgaggtcgtgtatctaaaagttggaaagcctaccacaatctatatgacagatccctacggccccccagacatcacacactcctattccccccccatggagaatcatcttctctcaggaaataatggaacactcgagtacaaaacaagcctgcctccaatatcccctggtcggtactcaccaattcctaaacacatgctggttgatgatgattacacacggccacccgagccagtctatagcactgtaaataagctctgtgataagccagcatctccccggcactactctcctgtggagtgtgataaatcttttcttctgagcgccccatacagccactaccacctcggcctgcttcccgactctgagatgacctctcactcacaacacagcaccgccactagacaaccttcgatgactttgcagagagcggtttccttagaaggcgagccccgaaaggtggttcttcataagggttctaccgggctcggattcaacatcgtaggtggagaggacggcgagggcattttcgtgtccttcatcctggcaggaggacccgctgacctttccggagagttgcaacgtggcgaccaaatcttgtctgtaaacggaatcgatctcaggggcgcatctcatgagcaagctgcagcagcactgaagggagcggggcagactgtgaccattatcgctcaataccagcctgaagactacgcccgtttcgaagcgaaaatccatgatttaagagaacagatgatgaaccacagcatgtcatctggaagtggctcgctgcgaactaaccagaaaagatcactgtatgtgagggccatgttcgattacgacaagtccaaagacagtggacttccatcccaaggcctgtcgtttaagtatggcgatatcctgcacgtgatcaacgcatccgacgatgaatggtggcaagcacgtcgcgtcatgcttgagggtgatagcgaggaaatgggggtgatcccaagcaaaagacgggtggagcgtaaggaacgcgctagattgaaaacggtgaagtttaacgccaagcctggggtcattgatagtaagggtagttttaatgataaacgcaaaaaatcattcatcttcagtcggaagtttcctttttacaagaacaaggaacagagcgagcaggagacatctgaccctgagcggggccaggaagacctgattctatcctacgagcccgtgaccaggcaggagatcaattatacaaggcccgtgattatcctcgggcccatgaaagaccgcataaacgacgatttaatttccgagttccctgataagttcggctcgtgtgtcccccatacgacacggccaaaacgggattacgaggtggacgggagggactaccacttcgttataagcagagagcagatggagaaggatatccaagagcacaaattcatcgaagctggacagtacaatgataacctgtacgggacctccgtccaatccgtgcggtttgtggcagagagagggaagcattgcatcctcgatgtgagcggcaacgccattaaacggctacaggtggcgcaattgtacccaatcgcaattttcataaaacctagatcgctggaaccgttgatggaaatgaataaacggctaaccgaggaacaggctaaaaagacgtacgatcgggctatcaaacttgagcaggagtttggcgaatattttactgccattgtacaaggagacactctggaggacatttacaaccaatgcaagctggtcatcgaagaacagagtgggccttttatctggatcccgtcgaaggaaaagttatag

SEQ ID NO: 114775 - DNA, 1047 bp, synthetic construct
  misc_feature 1..1047: note = Description of Artificial Sequence: Synthetic coding sequence
  source 1..1047: mol_type = other DNA
atgatgaaccactcaatgtcatccggcagcggctctctgcggacaaaccagaagcgcagtttgtacgtcagagcgatgtttgactacgacaaatcaaaggacagcggattgccgagtcagggactttcttttaagtatggagacattctgcatgtgattaacgcctctgatgatgaatggtggcaggcccggagggtgatgctggagggagactcagaagagatgggagtgatcccatctaaacgtcgagtggagaggaaggagcgtgcacggctcaaaacagtaaagttcaatgccaaacccggggtgattgacagtaagggcgatatccccgggctgggagacgacggctacggaacaaaaacgctaaaacatgtgtcctccaacgctagcgattcagagagtagttataggggccaggaagaccttatcctgtcctatgagcctgtcactcggcaggaaatcaattatacgagacccgtcatcatactcggccccatgaaggacagaattaatgacgatttgataagtgagtttcccgataaattcggatcatgcgtgccacacacaactcggcccaaacgggactacgaggtggacggccgcgactaccactttgtcatttcaagagaacagatggaaaaagacattcaggaacacaaattcatagaggccggtcaatataacgacaacctgtatggcacctcggtgcaatccgtgagattcgtggccgagagggggaaacattgcattctcgatgtctctggcaatgccattaagcgtctgcaagttgcccagttataccccatcgctattttcataaagccccgcagcctcgaacccctgatggaaatgaacaaaagactgactgaagaacaggctaagaaaacctatgatagggcgattaaattggaacaagagttcggagaatatttcactgccattgtccaaggggatacactagaagacatctacaaccagtgcaagttggtaattgaagagcaatccggccccttcatctggatcccctccaaggagaagctgtag

SEQ ID NO: 114776 - DNA, 2250 bp, synthetic construct
  misc_feature 1..2250: note = Description of Artificial Sequence: Synthetic coding sequence
  source 1..2250: mol_type = other DNA
atgcaaagacccagcgtgtcaagagcggaaaattatcagctgctatgggacacgatcgcctcactgaaacaatgtgagcaagctatgcagcacgcatttattcctgtcaacggtactgaaattgagtatgagttcgaagagatcactctggagagaggcaactccggattgggtttctccatagccggcgggacggacaatcctcatatcggcgacgaccccggaatatttatcaccaaaattatacctggcggcgcagctgctgaagatgggcggctcagagtgaatgactgtattctgcgcgtcaatgaggtggatgtgtcagaggtcagtcactccaaggccgttgaagccctgaaagaggccgggtccattgtccgtctgtatgttaggcgcaggaggcccatcttagagactgtggttgagataaaattattcaagggccccaagggcctcggcttctcaatcgcagggggcgttggtaaccagcacatcccaggcgacaattctatttacgttacgaagataatagatggaggtgcagcccaaaaggacggtagacttcaggttggcgataggctgctgatggtgaacaactactccttggaggaagttacgcatgaggaggcggtggctatcctaaagaacacttcagaagttgtgtacttaaaggtcggcaaaccaacaaccatttacatgactgacccttacggccctcccgatatcacccattcttattctccacctatggagaaccacctcttgagcgggaataacggaaccctggagtacaaaactagtttacctcccatctcgccagggcgatattccccgattcccaaacatatgttagtagacgatgattatactagccattctcagcacagcacagccacgaggcagccttctatgaccttacagagagcagtgtccttggagggcgaacccaggaaagtcgtgctgcacaaggggagcaccggactgggcttcaacatcgtcggcggggaggatggcgagggtatttttgtgtctttcattctcgctggggggcctgccgatctctccggagaattgcaacggggggatcagatcctgagcgtcaacggcattgatctacgcggcgcctcccatgaacaggcagccgcggcacttaaaggtgcggggcaaacagtgacaattatcgcccaataccaaccggaagactacgcccgattcgaagcaaagatccacgaccttcgcgagcaaatgatgaatcactccatgtcatctggaagtggatcactcaggacaaatcagaagaggtctctgtatgtacgcgcaatgttcgattacgacaagtcaaaggacagcggtcttccttctcaaggcttaagttttaagtacggcgacattctgcacgtcataaacgcttccgatgacgaatggtggcaggctaggcgggttatgctagaaggtgacagcgaagagatgggcgtgatcccctccaagagacgtgtggagcgaaaggaacgagctaggctcaagactgttaagtttaatgctaagcccggagtcatcgactctaaaggcgacatacccgggctcggtgatgatggctacggaaccaagacactgagagggcaggaggacctgattttgtcttacgagccagtgaccagacaggaaatcaattacaccagaccggtgattattttgggacccatgaaagatagaatcaacgacgatctcatttctgaatttcccgacaaatttggttcctgtgtcccgcacacaactaggcccaaaagagactatgaggtggacggacgggattatcacttcgtcatttctcgtgagcagatggaaaaagacattcaggagcacaagttcatcgaggctggccagtacaacgataacctttacggtacttctgttcagagtgtacggttcgtggccgaaaggggaaagcattgtatcctggatgtgtctggaaacgctataaaaagactccaagtggcacagctttacccaatcgccatctttatcaagccaagaagcctagagcccctcatggaaatgaataagaggctgactgaggagcaggctaagaaaacatatgaccgggctattaaactggaacaagaattcggcgagtactttaccgcgattgtgcagggcgatacactggaggacatctacaatcagtgcaagctggttatcgaggagcagtccggccccttcatttggattccttctaaagagaagctctag

SEQ ID NO: 114777 - DNA, 1005 bp, synthetic construct
  misc_feature 1..1005: note = Description of Artificial Sequence: Synthetic coding sequence
  source 1..1005: mol_type = other DNA
atgatgaaccactctatgtcctcagggtccggcagcctcaggaccaaccagaagcggtctctctatgtgcgggcaatgttcgactacgacaaaagcaaggacagcggtctcccgagtcagggcctttcgtttaagtacggagacatcctccatgttatcaatgcctccgatgacgaatggtggcaggcccgcagggtaatgcttgagggagattctgaagagatgggcgttatccctagcaaaagaagagtggagcgcaaggaacgcgcccgactaaaaactgtgaagtttaatgccaagcctggagtgatcgattcaaagggcgacatacccggtcttggggacgacggatacggcaccaaaactctccggggtcaggaagacttgatattgagttatgaacctgttacgaggcaggagataaactacacacgacccgtgataatattaggtccaatgaaagaccggatcaacgacgacctgatcagcgaattcccggacaaattcggatcatgcgtcccccacactacccgccctaaacgcgactatgaagttgacggtagagactaccacttcgtcatctccagagagcagatggagaaggacatacaggagcacaaattcattgaagcagggcagtacaatgacaacctgtatggtacctcagtgcagtctgttcggttcgtggctgaacgcggcaagcattgcattttggatgtgtctggaaacgccattaagcgtctccaggtagcccagctgtaccccattgccatttttattaagcctcggtcgttagaaccattgatggaaatgaataagcggctcactgaggagcaggccaagaagacctacgacagagccataaagcttgagcaggagtttggtgaatacttcacagccatcgttcagggagatactctggaggacatttacaaccagtgcaaactggtaattgaagaacagtcaggcccattcatatggataccttctaaggaaaagttgtag

SEQ ID NO: 114778 - DNA, 2601 bp, synthetic construct
  misc_feature 1..2601: note = Description of Artificial Sequence: Synthetic coding sequence
  source 1..2601: mol_type = other DNA
atgttcttcgcctgttactgcgccctgagaactaacgtgaaaaagtaccggtatcaggatgaggacgcccctcatgaccactccttgccccggttaacccatgaagtgcggggcccagagctggtgcacgtgagtgaaaagaacctttctcagattgagaacgtccatggctatgtgctccagagtcatataagccccctgaaagcaagccctgcccccatcatcgtaaacacagatactctcgatacgattccatatgttaatggcactgagatcgagtatgagttcgaagaaattaccctggaacggggcaactccgggttgggcttctcaatcgcaggtggaactgataatcctcatattggagatgacccaggaatcttcattacaaaaatcattcctggaggcgccgctgcggaagatgggagactgcgagtgaacgattgcatattgcgcgtcaatgaggtagatgtgtccgaagtgagccacagtaaggccgtggaagctttgaaggaagctggtagcatcgtgcgcctatatgtgagacggcgacggcctattctcgagaccgtggtagaaatcaagttgtttaaaggacccaaagggctgggctttagtatcgcaggcggggtcggtaatcaacacattcctggcgataactcaatatatgtgacaaaaataatagatggaggggccgcacagaaagatgggcgtcttcaggtgggggatcggctgctcatggtcaacaactactccctcgaggaggtcactcacgaagaagctgttgcaattctaaagaacacttccgaggtcgtgtacttgaaagtgggaaagccaacgaccatctatatgaccgacccatatggaccgccggatattacacacagttacagtcctcccatggagaatcacttgctcagtggcaataatggaacactggagtataaaactagcctcccacctatttctcctggcagatactcgcccatccccaagcatatgctggtggacgatgattatactcggccacccgaacctgtgtattcgaccgtgaataaactgtgcgataaaccagcatcgcctagacactactcccctgtcgaatgtgataaatccttcttgctgtctgctccctactcccattaccacctcggtctgctgcctgacagcgagatgacctcccacagccagcactccactgccaccaggcagccatctatgacccttcagcgtgctgtgagtctagagggtgagccccgtaaggtggtgttgcacaagggatccactggcttggggtttaatatagtagggggggaggatggtgagggtatttttgtgagcttcattttggccggtggccccgccgacctgagcggtgagctacagcggggcgaccagattctatcggttaatggaatcgaccttcgaggagctagtcacgaacaggcagcagccgccctgaagggagccggtcagaccgtgactattattgcacagtatcaaccagaggactatgctagatttgaggctaagatccacgatctccgcgagcaaatgatgaaccactccatgagcagtggctccggtagcctaaggacgaaccagaaacgcagcctgtacgtacgcgccatgttcgattatgataaatccaaagactcaggcctgccttcacagggtctgtcctttaaatacggcgatattctgcatgtgataaatgcgagcgacgatgaatggtggcaagcaagaagggtgatgcttgagggcgacagtgaagaaatgggcgtgatacctagcaaacgtcgtgtcgagcggaaggaacgcgcccggctgaagacagtgaagtttaacgccaaaccaggtgtaattgacagcaagggcgacattcctggcctgggcgacgacgggtacggcacaaagactctcaagcacgtgagcagtaatgcctccgacagcgagagcagctatcgcggccaggaagatcttatattatcttatgaacctgttacccgccaggaaattaattatacgcggcctgtgatcattcttgggcccatgaaagatagaatcaatgacgaccttatctcagaatttccagataagtttgggtcctgcgtaccccacacgacacgtcctaagcgcgactatgaagtggacgggagggattatcacttcgtaattagccgtgaacaaatggagaaggatattcaggaacataaattcatcgaagctggccagtacaatgacaatctgtacggtaccagtgtgcaatcagtgcgctttgtggcagaacgcggcaaacactgcatacttgacgtaagcggcaatgccatcaagcgacttcaggtggctcagctgtaccctattgccatttttatcaaaccccgctccctagaacctctgatggagatgaataaaaggctgactgaagagcaggcaaagaagacgtatgacagagccataaaattagagcaagagttcggggaatattttacagctatagttcagggcgacacgctggaggacatttataatcagtgtaaacttgtcatcgaagaacagtctggaccctttatatggattccgtctaaagaaaagctttag

SEQ ID NO: 114779 - DNA, 285 bp, synthetic construct
  misc_feature 1..285: note = Description of Artificial Sequence: Synthetic coding sequence
  source 1..285: mol_type = other DNA
atgatgaatcactctatgtcgagcgggagcggatccctgagaacaaatcagaagcgttccctgtatgttcgagcgatgtttgactacgataagtcaaaagacagcggcttgcctagtcaggggctaagttttaagtacggggatattctgcacgtcataaatgcttcagatgacgagtggtggcaggcccgtcgagtcatgctcgaaggtgatagcgaggagatgggggtgataccgagcaaacgccgagtagaaaggaaggagcgagcccgactaaaaacttag

SEQ ID NO: 114780 - DNA, 2559 bp, synthetic construct
  misc_feature 1..2559: note = Description of Artificial Sequence: Synthetic coding sequence
  source 1..2559: mol_type = other DNA
atgttcttcgcgtgctactgcgcactccggaccaacgtgaagaagtacaggtaccaggatgaggatgcgccacatgaccactcccttccccgcttgacccacgaagtgcgggggccagaactggtccacgtctcggagaaaaatctctctcagattgagaacgtgcatggatatgttctacagtcacacatcagccctttaaaggcgtcccctgccccgataattgtcaatacagacacattggacacgataccctatgtcaatggaaccgagattgagtacgagtttgaggaaatcaccctcgaacgagggaattcaggactgggatttagcatagcgggaggcactgataatccacatattggggatgatccaggcatatttatcactaaaatcataccgggcggagcggctgcggaggatggacggttgagagtaaatgactgcatcttgagggtcaatgaggtggacgtctctgaggtgtcgcactcgaaagccgtcgaagctctgaaagaagctgggtccatagtccgcctgtacgtgcgtcgccggagacccattcttgaaactgtggttgagataaagctcttcaaaggtcccaagggcctcgggttttcaatagctggaggggtgggcaaccagcacatccccggcgataactccatttatgtgaccaagatcattgacgggggcgcagctcagaaagatgggcgccttcaggtaggagataggttactgatggttaacaattactcactcgaagaggttactcatgaggaggcagtagctatccttaagaacactagcgaagtcgtgtacctaaaggtcggtaagcctaccactatctacatgactgacccttatgggccccccgacatcacacatagttattccccgccaatggagaatcacctcctcagcggcaataacgggacactggagtataagacttccctgccccccattagcccaggacgttactcccctatccctaagcatatgcttgtggacgacgactacacaaggccaccagagcccgtttacagcacggtaaacaagctgtgtgacaagccagcttccccccgacactactcccccgttgaatgcgataagagctttctgctaagcgccccgtactctcactatcacctggggttgctccctgactccgagatgacctcccattcccagcactcaacggccaccagacaacccagcatgacactccagcgagcagtgtccctagaaggcgagcccagaaaagttgtcctccacaaaggctccaccggcctaggcttcaacattgtggggggcgaggatggagaagggatattcgtcagctttattcttgcgggaggcccagctgacctcagcggagagctccaacgtggggaccagattctgagtgttaacggaatagatctgcgcggcgcatcccacgagcaggccgcagctgcgttgaagggcgcgggacaaaccgtgaccattattgcccagtaccagcctgaggattacgccagattcgaggcgaagattcacgatttgagggagcaaatgatgaaccattccatgtcatctggctccggaagtctgcggacaaatcagaagaggagtttgtatgtgcgcgccatgttcgactacgataagagcaaagattccggtttgccatctcaaggcttatctttcaagtacggcgatatcctccacgtgatcaatgccagtgacgacgaatggtggcaggccaggagagttatgctggaaggagacagtgaagaaatgggggtaattccaagtaagagaagagtcgaacgaaaagaacgtgcaaggctgaaaaccgtgaaatttaatgctaagcctggcgttatcgacagcaagggggatattccgggtttaggcgacgacgggtatggaacaaagacactgaggggccaagaagatcttatccttagttacgagcctgtgacaagacaggagattaactacacaaggccagtcattattctgggccctatgaaagacaggatcaacgatgatctaatcagcgagttccccgataagttcgggtcctgcgtgcctcatactacgagaccaaagagagactacgaagtcgatggacgcgactaccactttgtcatcagcagagagcagatggaaaaggacattcaggaacataagttcattgaagcagggcaatataacgacaacctttacggcacatccgtccagagcgtgcgttttgtggcggagcgcgggaagcattgtattttggatgtcagtggcaacgctatcaaacgtctgcaggtggcgcagctgtaccctatcgccatcttcattaaacctcgctcccttgaacccctcatggaaatgaacaaacgccttactgaagaacaggccaaaaaaacttatgacagggctattaaactggaacaggaattcggggagtatttcacagcaatagtgcagggcgacaccctggaagacatttataatcagtgtaaactcgttattgaagagcaaagcggtccttttatctggatccctagcaaggaaaagctttag

SEQ ID NO: 114781 - DNA, 1863 bp, synthetic construct
  misc_feature 1..1863: note = Description of Artificial Sequence: Synthetic coding sequence
  source 1..1863: mol_type = other DNA
atggtgaacaactatagcctggaagaggtgacccatgaggaggcagtggccatcctgaaaaacactagtgaagttgtttatctgaaagtgggaaaacccaccacaatatacatgaccgacccttacggtccccccgacatcactcactcctacagtccaccgatggaaaatcacctgctgtcaggtaataacgggacgctcgagtacaaaacatccctgcctcccatcagcccgggaaggtattcacccatccctaagcacatgctggtcgatgacgattatacccggcctccagaacccgtgtacagtaccgtgaacaaactctgtgacaagccagcatcaccaaggcactactcccctgttgagtgtgacaagtcctttcttctgtctgccccatattcccactaccacctgggacttctgcctgactctgaaatgacatcccatagtcagcatagcacagcaactaggcagccctccatgacgctccagagggctgtctccctggagggggaaccccgtaaagtcgtattacacaagggatcgactgggttgggattcaacatagtgggaggggaggatggggagggaatttttgtttcctttatacttgccggcggtcccgctgacctgagtggcgagctgcagagaggggatcagatacttagcgttaatggcatagatctacggggggcctcccatgagcaggccgccgccgccctcaagggtgccggacagacggtcacaataattgcccagtaccaacctgaagactatgccagattcgaagctaaaattcacgaccttcgggagcaaatgatgaatcactcgatgagcagcgggagtggatcgctgagaaccaatcaaaaaaggtcattgtatgtgcgggctatgtttgattacgataagtcaaaggactctggtttgcctagccagggcctctcatttaagtacggcgacattctgcatgtcatcaatgcctctgatgatgaatggtggcaagccaggagggtcatgttagagggtgactcagaggagatgggagtcatccccagcaagagaagggttgagagaaaagagagggccagattgaaaaccgtcaaatttaatgcgaagccaggggtgattgactctaaaggagacattccaggactcggcgatgatggctatggcacaaaaaccctgaagcacgtaagtagcaacgcctcagactctgagagcagctaccgcggacaggaagacttgatactgtcgtatgaacctgtgacacggcaggaaattaattacacgaggcctgtcatcattctgggaccgatgaaggatagaattaacgatgacttgatctccgaattccccgataagttcgggagctgtgtcccacacactacacgtccaaaacgtgactatgaagtggacggtcgcgactaccacttcgtgatctctcgggaacagatggaaaaggatatccaagaacacaagtttatcgaagctgggcagtataacgacaatctgtatggcactagtgtgcagtctgtccgcttcgtggcagagcggggaaaacactgcatcttggatgtgtctggcaacgccattaagcggctacaagtggcacagctgtatcctattgccattttcatcaaaccccggtccctcgaacctttgatggaaatgaataagcgccttactgaggagcaggcgaaaaagacctatgaccgcgccatcaaattggagcaggagttcggcgaatacttcactgcaatcgtgcagggggatacacttgaagacatctacaatcaatgcaagctggtgatcgaagagcagtcgggaccattcatctggattccaagtaaagaaaagctgtag

SEQ ID NO: 114782 - DNA, 2928 bp, synthetic construct
  misc_feature 1..2928: note = Description of Artificial Sequence: Synthetic coding sequence
  source 1..2928: mol_type = other DNA
atgggaatttttaagtcttctttattccaggctctgctggatattcaagagttctacgaagttactctcctgaacagccagaaatcctgtgagcagaagatcgaggaggcgaatcaagtgctgcagaagtgggaaaaaacatccctgttggcaccttgtcacgatcgcttacagaagtcttcagagctgacagactgttccgggtcaaaagagaacgcctcttgtatcgagcaaaataaggaaaaccagagctttgagaatgagaccgatgaaaccaccacacagaaccaggggcggtgcccagcccagaactgttctgtggaggcgcccgcttggatgcccgtgcatcattgcacaaaatacagatatcaggacgaggacgcaccacacgatcactcgttgccacgattaactcacgaagtgcgcgggcccgaactggtgcatgtgtcggaaaagaacctgtctcaaatcgagaatgtgcatggatacgtgctccagagccatatctcccctctaaaggcatctccggctcccattattgtgaatacagatactttagataccataccatacgttaacggtacagagatcgaatacgaattcgaggagattactctggagcggggcaacagcggactgggctttagcatcgctggtggaaccgacaacccccacataggtgacgaccctggaatattcatcaccaagatcatccccggcggcgctgctgctgaggacgggcgcctgagggtgaatgactgcatcctgagggtaaatgaagtggatgtgagcgaagtctcccacagtaaggccgtggaggcgctcaaggaggcaggatctatagtcagattgtacgtccggcggcgaaggccaatcctggagaccgtggttgagattaaactgttcaagggcccaaagggactgggcttctccattgccggcggagtgggaaatcagcacataccgggcgataacagtatctacgtgaccaagattattgatggcggagccgcgcagaaagacggtaggctgcaggtgggtgacaggctgttgatggtgaacaattactcattggaagaagtgacacacgaggaagccgtcgcgatactgaagaatacttccgaggtcgtatacctcaaagtcgggaagcccactaccatctacatgactgacccatatgggcctcccgacataacccactcctattcaccacctatggagaaccatctgttgagcggcaacaacggcactctcgagtacaaaacgagcctgcctccgattagtcctggcaggtactcccccataccaaagcatatgctggttgatgatgattatacgagaccccctgaaccggtgtactcgactgttaataagctttgcgacaagcccgccagcccacgccactattctccagtggagtgcgataaaagcttcctgctgtcagccccctattcccattatcacctcggactgctgcctgactctgagatgacgagtcacagccagcatagcacggccacaagacagcctagcatgacgctccaacgggccgttagtcttgaaggtgagcctcgcaaggtggtgttgcacaagggttcgaccggtctgggcttcaatattgtgggcggggaggacggggagggaatcttcgtttcctttatcttggccggaggtcccgcagatctgagtggtgagcttcagcggggcgatcagattttaagtgttaacgggatcgaccttcgcggggccagtcacgaacaggcagccgctgctttgaaaggagcaggacagacagtgaccatcattgcgcagtatcagcccgaggattatgccaggtttgaagctaagattcacgacctgcgcgagcagatgatgaaccattctatgtcaagcgggtccggctctctcagaacgaaccaaaaacgctcattgtacgtgcgcgctatgtttgactatgacaagagcaaagacagcggtctcccatcacaggggttatccttcaagtacggcgatatccttcatgtgattaacgccagcgatgacgaatggtggcaagctcgccgcgtaatgttggagggggactccgaagagatgggcgtcattccgtccaagcggagagtcgaacgcaaggaaagggcccgcttgaaaactgtcaaattcaacgcgaagccaggagttatagattcaaaaggatctttcaacgacaaacggaagaagagtttcatcttctcaaggaagtttcctttttataagaacaaagaacagagcgagcaagaaacatctgatcctgagcggggccaggaagatctaatcctgtcttacgagcctgtcactcgacaagaaattaactatactcgccctgtgatcattctgggacccatgaaagacagaatcaacgatgatttaatcagtgaattccctgataagtttgggagctgcgtgccccataccacacgacccaagcgcgattacgaagttgacggccgagattaccactttgttatttcaagggagcagatggagaaagatatccaggagcacaaatttatagaggcaggtcagtacaatgacaatttgtacggtacttccgtccagtctgtgcgctttgtcgcggagagaggcaagcattgcatcctggatgtcagcggaaacgctattaagagactgcaggtcgcccagctctatcctattgcaattttcattaaacctagaagcctggagcccctgatggagatgaacaaacgcctcaccgaggaacaggcaaaaaaaacttacgatagggcaataaagctcgagcaagagtttggcgaatactttacagctatcgtacagggagatacgctggaagacatatacaatcagtgtaagctagtgatcgaggaacagagtggaccgttcatctggatcccaagtaaggagaaattgtag

SEQ ID NO: 114783 - DNA, 2928 bp, synthetic construct
  misc_feature 1..2928: note = Description of Artificial Sequence: Synthetic coding sequence
  source 1..2928: mol_type = other DNA
tttgggtttatagtctctgttcactttcagagctacctcaatatacaggagttttacgaagttacacttctcaactctcaaaaatcctgtgagcagaaaatagaagaagcaaatcaagtgctgcagaagtgggagaagactagcctgttggccccgtgccacgaccgcctccagaaatccagcgaactgaccgattgctccggctctaaagagaacgctagttgtattgaacagaacaaagaaaaccagtcattcgagaatgaaaccgatgaaactactacccagaatcagggaaggtgccctgcacagaactgcagcgtcgaggccccagcgtggatgcccgtgcatcactgtaccaagtaccggtatcaagatgaggacgccccacatgatcacagtctgcccaggttgacacacgaggtccggggccccgaactcgtacacgtgagcgaaaagaatctatcacagattgagaatgtgcacggatatgtcctgcagtcacatatttctcctctgaaagctagccctgctcccatcattgtgaacaccgacacccttgacaccatcccgtacgtcaatgggacagagatcgagtacgaattcgaggagattaccttggagcgaggcaacagtggtctggggttttccatagcagggggcaccgataatccacacattggcgacgaccctggaatttttattacaaaaattatccccggtggggcggccgcagaagacggccgtctgagagtaaacgactgtatccttagagtgaacgaggtcgacgtgagtgaggtctcacactctaaagctgtggaggccctcaaagaggccggttcaatagtgaggctttatgtccgcagacgccggcccattctcgagactgtggttgaaatcaagttatttaaggggcccaaaggcctcgggttcagtattgctggtggcgttggcaaccaacatatacctggggacaattctatctatgtaaccaagatcatcgatgggggtgccgctcagaaagacggccgactgcaggtaggggacagacttcttatggtgaataactattcactggaagaggtaactcacgaggaggctgtggccattttaaagaacacaagcgaggtggtgtatctcaaagtggggaagccaaccactatctacatgaccgacccttacgggccacccgacattactcacagctacagtcccccaatggagaatcatctgctcagcggaaacaatggtaccctggagtataagacaagtttaccacctatatcaccaggaaggtacagtcctattcccaaacatatgctcgtggatgatgactataccagaccacctgagcccgtgtactctaccgtgaataagctctgcgataagccagcctcacctcgccattatagccctgttgaatgtgacaagtccttcctcctcagtgctccatacagccactaccatttgggactactgcccgactctgagatgactagtcatagccagcacagtacagcaacacggcagccctcaatgacactacagcgggcagtctcccttgagggagaaccaaggaaagtggtgctgcataaaggctccaccggcctcggttttaacattgtcggaggcgaggatggtgagggcatctttgtctcctttatactggccggaggaccagccgacttgtctggtgagttgcaacgaggcgatcagatattatccgtaaacggcatagatctgagaggggccagtcatgaacaggcagcggctgctctgaagggagccgggcagaccgtaaccatcatcgcgcagtaccaacccgaagactacgcacgctttgaggccaagattcacgacttgagggagcagatgatgaaccacagcatgtctagcggctcaggatccctgcgcaccaatcagaaaaggagtctttatgtacgcgcaatgtttgactatgataaaagcaaagacagtgggctgccctcgcagggtctttctttcaagtacggcgacattttgcatgtaattaacgcctcagatgatgaatggtggcaagctaggcgggtgatgctcgagggagactccgaagagatgggggtgatccctagcaagagacgagttgagagaaaggaacgtgcgcgactgaaaacggtaaaatttaacgccaagccaggggtgatcgattcaaaagggtcttttaatgataaaagaaagaaatcttttatcttctcgaggaagttccccttctataaaaacaaagaacagtcagagcaagaaacctctgatcctgaacgcgggcaggaggatctcatcctgtcgtatgagccggtcacacgacaggaaatcaattatactcgaccagtgatcatccttggaccaatgaaggacaggattaacgacgatctgatctccgaattcccagacaagtttggcagttgtgtgccacatactactcggcctaagagagactacgaagttgatggccgggactatcattttgtgatcagtagagagcagatggagaaagatatccaagagcataagtttattgaggctggacagtacaacgacaacctgtacggtacctcagtgcagtccgtcagatttgtggccgagagggggaagcattgcatactggatgtgtccgggaatgccataaaacggcttcaggtcgcccagctctaccctatcgctatctttatcaaaccccgctcactcgagcctctgatggagatgaataagcggcttacagaagagcaggcaaagaaaacctacgaccgtgcaatcaaactcgaacaagaattcggagaatactttactgctattgtgcagggcgatacactcgaagatatatacaaccagtgcaagctggttattgaggagcagtcggggccatttatctggataccatccaaagagaagctgtag

SEQ ID NO: 114784 - DNA, 2550 bp, synthetic construct
  misc_feature 1..2550: note = Description of Artificial Sequence: Synthetic coding sequence
  source 1..2550: mol_type = other DNA
atgcacaaacatcagcactgttgcaagtgtcctgagtgttacgaggtgacccgtctcgcagccctacgccggctggagcctcctggctacggggattggcaggtgcctgacccatacggaccaggagggggaaacggtgccagcgctggatacggtgggtattcgagtcaaaccttaccgagccaggcaggagccactcccaccccccgcacaaaggccaagctcatcccaacagggcgggatgtggggcctgtgcctcccaaacctgttcctggaaaatctacacccaagctaaatggcagcgggccgtcatggtggcccgagtgtacctgcactaacagagattggtacgagcaagccaggcctgccccgcttctggtcaaccctgaaactctcaagcactcattatccgtgaatgggtccgatgggatgtttaagtatgaagagattgtgctggagagaggtaatagtggccttggttttagcatcgcaggagggatagacaatccccacgtgccagatgaccccggaatctttataactaagattatccctggcggcgccgcagcgatggacgggagactaggtgttaatgattgcgtgcttcgagtcaatgaggtcgacgtgtcagaagtcgttcattctagggccgtagaggccctgaaagaggctgggcccgtagtgcgtctggtggtgaggaggcgtcagcctccccccgaaaccatcatggaagtaaatcttctaaaaggacccaaaggccttggtttcagcatcgctggcggcatcgggaatcaacatatccctggcgacaatagcatatacatcaccaaaattattgaagggggggcagcccaaaaagatggaagactgcagatcggagacagactattggctgtgaataacacgaatcttcaggatgttcgtcatgaggaagccgtggctagcctgaagaacacctctgacatggtctatctcaaagttgcaaaacctggctcacttcaccttaacgacatgtatgcgccacctgattatgcttcaacatttactgccctggcagacaatcatattagtcacaattcttcactgggctacctgggagcagtcgagagtaaagtgagttatcccgctccccctcaggttccaccaaccagatatagcccaatacctcgacacatgcttgccgaggaggattttactcgagagccccggaagatcatcttacacaaggggtcgactggattgggtttcaacattgtggggggtgaggatggcgaaggtatttttgtttcattcatcctggctgggggcccagctgatctctctggagagttgaggcgaggcgatcgcatactgtcagtgaatggagtcaatttgaggaacgccactcatgagcaagccgccgctgcgttgaagcgggcagggcagagcgtgactattgttgcccagtatcgccccgaagaatactcccggtttgaaagtaaaattcacgacctacgagagcagatgatgaattcaagcatgtctagtggcagcgggagcttgcggacaagcgagaagagatcactctatgtgcgagctctcttcgattacgatcgcaccagagactcttgcctcccatcccagggccttagcttttcatatggcgatatccttcatgtgattaatgcaagtgatgatgaatggtggcaggcaagactcgtgactccccacggtgaatccgaacagataggcgtgataccatccaagaaacgggtggagaagaaagaacgggcaaggttgaagaccgtgaagtttcatgccagaacaggtatgattgagtctaatagggattttcccggcctttccgacgactattacggagccaagaatctcaaaggcgtgacctccaacaccagcgactccgagtctagcagtaaagggcaggaggatgcaattttatcttacgagccagtgacaaggcaggaaatccattatgcaagaccagtgattatactgggccccatgaaggaccgagtgaacgatgatctcattagtgaatttccacacaaatttgggagctgtgtgcctcacacaacacgcccgcgaagggataacgaagtggacggacaagactaccactttgtggtgtcaagagaacagatggaaaaggacattcaggataacaaatttattgaggcgggtcaatttaatgacaacctttatggtacctccattcagtccgtacgtgccgtggctgaaaggggaaagcactgtattctggatgtgtccggaaatgccattaagcgactgcaacaggcccagctctaccccattgctatatttattaagcctaaaagtattgaggcactgatggagatgaaccgcagacagacatatgagcaggccaataaaatctacgataaggcaatgaagttggaacaggagttcggcgagtactttacagccattgtgcagggagactccctcgaagaaatatacaacaagataaagcaaatcatcgaagatcaatctgggcattatatctgggtgcccagtcctgaaaagctctag

SEQ ID NO: 114785 - DNA, 2454 bp, synthetic construct
  misc_feature 1..2454: note = Description of Artificial Sequence: Synthetic coding sequence
  source 1..2454: mol_type = other DNA
atgcataaacaccagcactgttgcaaatgccctgaatgttacgaggtcacccgactcgccgccctgcgtagattggagccccccggctacggcgactggcaggttccggacccatatggccccggcgggggaaatggtgccagtgcaggatacggcggctactcaagccagaccctccctagtcaggccggtgctactccgacccccaggaccaaagctaaactgatcccaactgggagagacgtgggtcccgtgccacccaaacccgtgccaggtaaatccacgccgaagctgaacggcagtggaccctcttggtggcctgagtgcacctgtacgaaccgggactggtacgagcaggtcaacggctcagacggtatgtttaagtacgaagaaatagtcctggaaaggggaaacagtggtttggggttcagcattgcaggtgggatcgacaacccacacgtaccagatgacccaggaattttcattactaaaattattccgggtggggccgccgccatggatggtaggcttggggtcaatgactgcgttctccgtgtgaacgaggttgacgtgtctgaggtggttcactcgcgagccgttgaagcacttaaagaagccggtccagtggtacgcctggtcgttaggcgacgacagccaccgcccgaaaccattatggaggtaaacctcctcaagggtcctaagggcctgggattctctatcgccggagggatcggaaatcagcatattccaggtgataacagcatttacatcactaagattatcgaaggcggcgccgcccaaaaagatggaagactccagatcggtgatcgtctgttggccgtgaacaacaccaatttacaagacgttcgccacgaggaagcagtggcatctctcaagaataccagcgacatggtttacttaaaggtggcaaaacccggctcccttcacctgaatgacatgtatgcacctcctgattatgcctctactttcacagctctcgctgacaatcacataagccacaatagcagtcttggataccttggggctgtcgagtccaaagtttcgtatcctgccccaccccaagtgccaccaacacgatacagtcctattcctcggcacatgctggccgaggaggactttacacgggagcccagaaagattatcttgcataaaggctcaacgggacttggtttcaatatcgtgggtggggaagatggcgagggaatcttcgtctccttcattctggcaggcggcccggctgacctttctggagaattacgccggggcgataggatcctaagtgtcaacggagtcaacctcagaaacgccacccacgagcaggcagcggcagctctaaagcgagccggacagagcgtaactattgtcgcacagtataggcctgaagagtactccagatttgagtccaaaatccacgacctaagagaacagatgatgaactccagtatgtcttcggggagtggtagtctgaggacatccgagaaaaggagtctctacgtacgtgctcttttcgattatgaccggacacgggattcctgtcttccctcacagggtctgagctttagttatggcgacatcttgcacgtaataaatgcatccgatgatgaatggtggcaggccaggctggttaccccgcatggcgagtctgagcagattggggttataccaagtaaaaaaagagtagagaagaaggaaagggcgcgccttaaaactgtgaaattccatgctagaacaggaatgatcgagtccaacagggatttcccaggactgagcgacgactactacggggcaaagaatctcaaggggcaggaagacgcaatcctgtcatacgagcccgttaccaggcaagaaatccattatgcgcgtcccgtcattatactaggcccaatgaaggacagggtgaatgatgacctgatctccgagttccctcataagttcggatcatgcgtccctcacacaacccggcctcgacgcgataatgaagtggacggccaggattaccacttcgtcgtctctcgagagcaaatggagaaagatatacaagataacaagttcatcgaagccggtcagttcaatgacaacctgtatggcacaagtattcaaagtgtcagagccgtggccgagagaggcaagcactgcattctcgatgtctccggcaatgccatcaagcgcctgcagcaggcccaactttatccaattgcgattttcatcaaacctaaatcaatcgaggcgttaatggagatgaatagacggcagacctacgagcaagctaacaagatatatgacaaggctatgaaactggaacaggagttcggtgagtactttacggctattgtgcagggcgacagcttggaggaaatctacaacaaaatcaaacaaattatcgaagatcaatccggacactatatctgggtgccctcccccgagaagctgtag

SEQ ID NO: 114786 - DNA, 1101 bp, synthetic construct
  misc_feature 1..1101: note = Description of Artificial Sequence: Synthetic coding sequence
  source 1..1101: mol_type = other DNA
atgatgaactcatccatgtcgtctggaagtggaagtctgcgcacaagtgagaagcggtctctgtacgtgagggctctgttcgattacgacaggaccagagattcctgcctaccatcacagggcctgtctttttcttatggcgacatacttcacgtcatcaatgcatccgacgatgagtggtggcaagcccgactcgtgactcctcatggagagtcagaacaaatcggagtgatcccatccaagaaaagggttgaaaagaaagaacgcgccaggttaaaaactgtgaagttccatgcccggacgggcatgatagaatccaaccggtcgatcaagactaagaggaagaagtcttttcgattaagccgcaagtttcccttctacaaatctaaagagaacatggcccaggaaagctctatacaggaacagggagtgacatccaatacttccgacagtgagtcctcgtccaaagggcaggaagatgcgatcctcagctatgagcccgttacacggcaggagattcactatgcccgcccagtgatcatactgggccccatgaaagaccgcgtgaacgacgatcttataagtgaatttccacacaagtttggaagttgcgtgccacacactacacgacctagaagagacaacgaagtggacggacaggactatcatttcgtggtctctcgagagcagatggagaaagatatccaggacaataaatttatcgaggcgggacaatttaatgacaatctgtatggaacctccatccagtctgtgagggccgtggcggaacggggtaagcactgcatcctagatgtatccggcaacgcaattaagaggctgcagcaggcccagctttatcctattgccattttcatcaaaccgaagagcattgaggctcttatggagatgaatcgccgccaaacctacgagcaggccaacaagatctacgacaaggcgatgaaactggaacaggagttcggggaatatttcacagcaatcgtccagggagattccctggaagagatctacaataagattaaacaaattatcgaagatcagtcgggccactacatctgggtgccctcccccgagaagttgtag

SEQ ID NO: 114787 - DNA, 2304 bp, synthetic construct
  misc_feature 1..2304: note = Description of Artificial Sequence: Synthetic coding sequence
  source 1..2304: mol_type = other DNA
atgagccagcgcccgcgggcaccacgtagcgccctctggctcttggctccgcctctcctgcggtgggcccctccgctgctgacggtgctgcatagtgacttgttccaagccctgctggacattttagattactatgaagcgagcctgagcgaatcacagaaataccgttaccaggacgaagatacgccacctctggagcattctcccgcccatctcccaaaccaagcaaattctcctcctgtaatagtgaacaccgacacactggaagcacctggctacgagctccaggtcaatgggaccgaaggcgaaatggagtacgaggaaattactctcgagaggggcaattccggtctgggattctccattgctggcggcactgataatccccatattggcgacgatccctcgattttcatcaccaagatcatcccaggaggcgccgccgcacaggatggacgcctgcgggtaaatgactcaattctgtttgtgaacgaagttgatgttagagaagtcactcactccgccgcagttgaggctctgaaagaggcagggagcatagtacgcttgtacgtgatgaggcgcaaaccaccagccgaaaaggtaatggagataaaacttattaaaggccccaagggactcggcttttcgattgccgggggggttgggaaccagcacattcctggcgacaattccatctacgtgaccaaaatcatagagggaggtgctgcccacaaagatggacgtttgcagattggcgataagatcctggccgtaaactcagtcggactggaagatgtgatgcacgaggatgccgtggctgcactgaaaaacacatatgatgtggtgtacctgaaggtggccaaaccatcaaatgcttatttgtccgacagctacgctccacctgatatcaccacttcatactcacagcacctggacaacgagataagccattcgtcttacctggggacggattaccctactgctatgactccaacaagtccccgacgttacagccctgttgctaaggacttgctgggcgaggaggatatcccacgggagccccgccgtatcgttatccatagaggcagcaccggcctgggcttcaacattgtgggcggtgaggatggggaggggattttcatatcatttatcttggccgggggacctgctgacctttccggagaactccgcaagggagatcaaatcctgtccgtgaatggcgtcgacctgaggaacgcaagtcacgagcaggcagcgattgctctaaaaaatgcgggccagactgtcacaattatcgctcaatataaacctgaagaatactctcggtttgaagctaagatacacgacttgagggaacaactgatgaactcgagtctggggagtgggacagccagcctgagatctaatcccaaaagaggattctatatacgagctctcttcgattatgataaaacgaaagattgcggctttctctcccaggctctttcatttaggtttggggacgttcttcatgtgattgacgccagcgacgaggaatggtggcaagccaggagagttcatagtgacagcgagacagatgatatcggctttataccaagcaagcgccgggtcgaaaggcgcgagtggtcccgtctgaaggccaaggactggggcagctcttccggcagtcaggggagagaggactcagtgttgtcttatgagaccgtgactcagatggaagtccactatgcacggcctataattattctcgggccaacaaaagacagagcaaacgacgacctcctgtctgaattccctgacaaatttggatcttgtgtcccacacaccacgaggcctaagagagagtacgaaatcgacggcagggactaccactttgtttcttctcgtgagaaaatggagaaggatattcaggctcacaaatttattgaggctggtcaatataactctcacctctatgggacctcagtgcaatcagtgagagaggtagctgaacaggggaagcattgcatcctcgacgtgtctgctaacgcagtccgacgcctgcaggccgctcatctccacccaatcgccatttttatccgtcctagatcccttgaaaacgtgctggagattaataagagaataactgaagagcaggcccgcaaggcctttgacagagcgacaaaacttgagcaggaatttaccgagtgtttcagtgctatcgtggaaggcgactcatttgaggaaatctatcataaggtgaagcgggtgattgaggacctctccggtccttacatttgggtgccggcccgcgagaggctctag

SEQ ID NO: 114788 - DNA, 2166 bp, synthetic construct
  misc_feature 1..2166: note = Description of Artificial Sequence: Synthetic coding sequence
  source 1..2166: mol_type = other DNA
atggactgtttatgcattgtcaccaccaagaaatatagataccaggacgaagataccccccccctggagcattccccggcccatctccctaaccaggccaactcacctccagttattgtaaacacggacaccctcgaagcccccggctacgtgaatggaacagagggcgaaatggagtatgaagagatcacactcgaaagaggaaacagcggactgggatttagtatcgctggcggcacagacaatcctcacattggcgatgatcccagcatcttcattacgaaaatcattcctggtggcgccgccgcccaggatggcagactgagagttaatgactccatcttgttcgtcaatgaggtggacgtaagggaagtgactcactcggctgctgtggaggcattgaaagaggcgggaagcatcgtccgcttgtacgtgatgcggagaaagcctcctgccgagaaggtaatggagatcaaactgatcaaagggcctaagggcttaggctttagtatcgccggtggagtaggcaatcagcacattcccggtgataactctatatacgtcacaaaaattatcgagggaggcgcagctcacaaggacgggagacttcagatcggcgacaagattctggcagtgaatagcgtgggcctggaagacgttatgcacgaggacgccgtggctgctcttaaaaatacctatgacgtggtgtacctcaaggtcgccaagcctagcaatgcatacttatccgattcttacgctccgcccgacatcactacttcttattctcaacatctcgataacgagatcagtcactcttcatacctggggacagattatcccacagccatgactcccaccagcccgcgaagatatagcccggtcgcaaaagacttactcggggaggaagatattcctagggaacctcgccgcattgtgattcatcgggggtcaactggtttgggatttaacatcgttggaggcgaggacggggaggggatatttatttcatttatcctcgccggggggcctgcagacctctcaggggagttgcgtaaaggtgaccaaatcctgtcagtgaatggcgttgatctcagaaacgctagtcacgaacaagctgccatcgcactcaagaatgctggccagacagtgaccatcatagcacagtataagcccgaagaatattccaggtttgaggcgaagatccacgatctgagagaacagctgatgaattcgtctctcggaagcgggaccgccagcctgagaagcaatcccaagaggggtttctatattcgcgctctttttgattatgataagactaaggattgcggctttttgtcacaggctctgtcttttcgcttcggcgacgttctccatgtgatcgatgctagtgatgaggagtggtggcaggcgcgtcgcgtgcactcagattcggaaactgatgatatcggttttatccccagtaagcggcgcgtcgaaagacgggagtggtcacgtttgaaagctaaggattggggctcctcaagtggcagccaaggcagggaggactccgtcttaagctacgaaaccgtgacacagatggaggttcactacgcgcgacctataatcatcctgggcccaacaaaagatagagccaatgacgaccttctaagtgagttcccggacaagtttggctcttgtgtaccacacactaccaggcccaaacgggagtacgaaattgacggcagagattatcatttcgttagctcccgggagaaaatggagaaggatatccaagctcacaaattcatcgaagctggtcaatacaatagccacctgtatggaacctcagtgcagtccgttcgggaggttgcagagcaagggaagcactgtattctggacgtgtctgcaaatgctgttcgcagattacaggccgctcatctgcatccaattgccatctttattcggcctcggtcactggaaaatgtgctggagattaacaagagaataacagaggagcaggcaaggaaagcatttgacagggcaacaaagttagagcaagagtttacagagtgcttttccgctatcgtggagggcgactcctttgaagagatttatcacaaagttaagcgggtcattgaggacttaagtgggccgtacatatgggtgccagctagggagcggttgtag

SEQ ID NO: 114789 - DNA, 1995 bp, synthetic construct
  misc_feature 1..1995: note = Description of Artificial Sequence: Synthetic coding sequence
  source 1..1995: mol_type = other DNA
atggaatacgaggaaatcaccctggaaagaggaaactcaggcctgggcttcagtatcgccgggggcactgataatccacacatcggagatgatcctagcatttttattactaagattatccccggaggtgcggcagcacaggacggcagactccgggtcaatgactcaattctttttgtgaatgaggtcgatgtccgtgaagtgacccatagtgcagccgtggaagctttgaaggaggccggctctattgtgcgcctttatgtcatgcgccgaaagccacccgcagagaaggtgatggagatcaagctgattaaaggacccaagggcctcggtttcagtattgccgggggagtcggcaatcagcacattcctggggataatagtatttatgttactaaaattattgagggaggcgcagcccacaaagacgggcgccttcaaatcggggacaagattttagcagtgaactccgtcggcctcgaagacgtgatgcatgaggatgccgtggctgcgttgaaaaatacctacgatgtcgtgtatctcaaggtggccaaacctagcaatgcatacctcagcgactcttatgcccctcccgacatcaccacctcatatagtcagcatctggacaatgaaatcagtcatagtagttacttaggtacagactaccctactgctatgacaccaacttcccctaggagatatagcccagtggcaaaggatctgctgggggaggaggacatcccccgggagccacggcgcattgtgatccaccgcggctcaacagggctaggattcaacatagtgggaggggaggatggtgaaggcatctttatatcctttattcttgcaggagggcccgccgatctgagtggagagctgagaaagggggatcagatactgagcgtaaacggcgtggatctcagaaatgctagtcacgagcaagccgctattgcgctcaaaaatgccggtcagacagtcactattatcgctcaatacaagcctgaggagtactctagatttgaagccaagatacacgacttgcgggagcagctgatgaattcttcactcggtagtggtacagcctcacttcgctccaaccccaaaagggggttctatattcgcgccctgttcgactacgacaagactaaagactgcggtttcctgtctcaggccctctcgtttcggtttggagatgtactccacgtaatcgatgcttcagacgaggaatggtggcaggcaagacgcgtgcattcggattcagaaacagacgacatcgggttcattccttctaagaggcgcgttgaacgccgtgagtggtccaggttgaaggctaaggactgggggtcttcttcagggtcccaggggcgtgaagacagcgtcttgagctatgagactgtaacccagatggaggtacactatgctcggcccatcatcatcctgggccctactaaggaccgggccaacgacgacctgctatctgagtttcctgacaagtttggaagctgcgtccctcacacaactaggcccaaaagggaatatgaaatcgacggccgcgattatcatttcgtgagcagcagggaaaagatggagaaggatatccaggcccataaattcatcgaggccgggcagtacaactcccatctgtacggtacaagtgtacaaagtgttagggaggtcgctgagcaggggaaacattgcatcctcgatgtgtccgctaatgccgtgaggcgcctgcaggcagcccatctacaccctattgccatctttatccgcccacggtccctggagaatgtgttggagattaacaaacgcattaccgaagaacaggcgcggaaggcatttgatcgtgcaactaagctggaacaagaattcaccgaatgcttctcggcaatcgtcgagggagattcattcgaggagatttaccataaggttaaacgcgttatcgaggatctctcgggcccatacatttgggtgcccgcccgggaacgattgtag

SEQ ID NO: 114790 - DNA, 2175 bp, synthetic construct
  misc_feature 1..2175: note = Description of Artificial Sequence: Synthetic coding sequence
  source 1..2175: mol_type = other DNA
atggactgtctttgtatcgtcacgacaaaaaagtaccgataccaggacgaagatacaccgccgctggagcattctccagcccacctaccaaaccaggctaacagcccgcccgtcatagtgaacacggacacactcgaggctccaggttacgtcttacaggtgaatggaacagaaggcgagatggagtacgaggaaatcacgctggagagggggaacagcggactggggtttagcattgccgggggcaccgacaacccccatattggggatgatccatcgatctttattactaagataatccccgggggtgctgccgcgcaagacgggagacttagggtgaatgatagtattctttttgtaaacgaagttgacgtgagggaggtgacgcacagtgctgccgtcgaggccctgaaagaagccggtagtatcgtgcgcctgtacgtgatgcgccggaagcccccggcggagaaggtgatggaaataaagctaattaaaggacctaaagggctcgggttttcaattgccggcggggtaggtaaccagcacatccctggggataattcaatttatgtgaccaagattattgaaggcggagcagcccacaaagatggtcggctccagattggtgacaaaatactggcggtgaactccgtggggctagaggacgtgatgcacgaagatgccgtcgccgccctaaaaaatacttatgatgtagtctatcttaaggttgctaaaccgagcaacgcttacctctctgactcttacgccccacccgacataacgacctcgtactcccagcacctggacaatgagatcagccacagctcgtatttggggaccgattatcccaccgctatgacccctacgagccctcgccggtactcccccgttgcaaaggacctcctgggggaggaggatattcccagagagccccgccggatcgtgatccatcggggtagtaccgggctggggttcaatatagtgggcggcgaggacggagagggtatcttcatttccttcatattggccggtggtcccgccgatctgagcggcgagctccggaagggagaccagatactcagcgttaacggggtggatctccgaaatgctagtcatgaacaagccgccatcgctttgaagaacgccggccagaccgttacaataattgctcagtacaagccagaggaatactctcggttcgaagccaagattcacgatctcagggagcaacttatgaactccagcctgggtagtggaactgctagtttgagaagcaacccgaagcgcggcttttacattcgtgcgctctttgactacgataagactaaggattgcggcttcctgtcacaggcactctcattccggttcggcgatgtgttgcacgtgattgatgcatcggacgaggaatggtggcaggcaaggcgggtccattccgactctgaaacggatgacattggtttcattcctagcaagcgccgagtcgaacgacgcgagtggagccgccttaaagcaaaagattggggtagtagttccggttcacagggcagagaggattccgtgttaagctatgagactgtgacccaaatggaggtgcactatgcacgccccattataatcctgggtccaactaaggacagggccaacgacgacctcttatccgagtttcccgataaatttggctcatgcgtccctcatactacccggcccaagagagagtacgaaattgacgggcgcgattaccactttgtgtctagcagggaaaagatggaaaaggatattcaagctcacaagttcatcgaggctggtcagtacaactcacacctgtatgggacatcagtccagagtgtgcgcgaagtggctgagcaaggcaaacactgcattctggatgtgtcagccaatgcggtacgccgtttgcaagctgctcacttacaccccattgctatcttcatccgaccgaggtctctggaaaatgtgctggaaatcaataaacggatcactgaggagcaggcgagaaaggctttcgacagggccaccaagttagagcaggagttcaccgagtgtttctctgcaattgtggaaggggatagttttgaagaaatatatcacaaggtgaagagagttatagaagacttatccggtccatacatttgggtgcccgctcgggagagactgtag

SEQ ID NO: 114791 - DNA, 2304 bp, synthetic construct
  misc_feature 1..2304: note = Description of Artificial Sequence: Synthetic coding sequence
  source 1..2304: mol_type = other DNA
atgtctcaaagaccccgtgcacctcggagcgctctgtggctgctggctcctcctctgcttagatgggctcccccattgctgacagtgctgcatagcgacctgttccaggcactgctagatattcttgattactacgaagcgtcattgtccgaatctcagaagtatcgataccaagatgaggacacacctcccctcgagcactcccctgcacacctaccaaatcaggcgaattctccgcccgtgattgtgaatactgacaccctggaagccccgggctatgtgctgcaggtcaatggcacagaaggggagatggagtacgaggaaatcactttagaacgggggaactctggtcttgggttctctatagctgggggtaccgacaatcctcatatcggcgacgacccttctatttttatcactaaaatcattccaggcggcgctgccgcgcaggatgggagactaagggttaacgattcgatactgtttgttaatgaggtagacgtgcgggaagtcacgcatagcgctgccgtagaggcactcaaggaggctggcagcatcgtgagattgtacgtaatgcgcaggaagccccctgcggagaaggtgatggaaattaaactgattaagggccctaaggggctcgggttcagcatcgctggcggcgtcgggaaccaacatatccctggggacaattcaatctacgttactaagattattgaaggaggagcagcacacaaggatggtcgactgcagattggtgacaaaatcctggccgtcaacagcgttggcctggaagacgtcatgcatgaggatgccgtggccgccttgaaaaatacttacgacgtagtctatctgaaagtagccaagccatctaacgcttacctctcagactcctatgcacctcccgatatcaccactagttactctcagcatctggataatgaaatttctcacagttcctacctcggcacagactacccgacagcgatgacaccaacaagtcctagaaggtatagtcctgtcgctaaggacctcctgggcgaagaagacattcccagagagccacggcgcattgtcattcatcgagggtccaccggactaggcttcaatattgtgggcggggaggatggtgagggaattttcatctcttttatcctcgccgggggaccagccgacctgtcgggagagctccgtaaaggcgatcaaattttatcagtgaacggggtggatttgaggaacgcatcacacgagcaggccgctatagccctgaaaaatgctgggcagacagtgaccataatagctcagtataaacccgaggagtatagtagattcgaagcgaaaattcacgacctgagagagcagctgatgaactcttcgctggggagcggcacagctagcctcaggtcaaatccaaagcggggcttctatattcgtgccctcttcgattacgataagacaaaggattgcggcttcctgtctcaagccctcagtttccggttcggggacgtcttacacgttatagatgctagcgacgaggagtggtggcaggcccgccgcgttcactccgattctgagaccgatgacattggattcatcccaagtaaacggcgtgtcgaacggcgcgagtggtcgcgcctcaaggcgaaagactggggaagctctagcggctcccagggccgcgaggactctgtgctgtcctatgaaacagtgacccaaatggaggtgcattacgcaaggccaatcatcatcttggggcccaccaaggaccgcgctaatgacgatctgttgagtgagttccccgacaaatttggctcgtgtgtgccccacacaacgcgtccgaaacgcgaatatgagatcgatggacgggactaccatttcgtgtcgtcccgagagaagatggaaaaggacattcaggcccacaaattcatcgaggccgggcagtacaacagccacctctatggaacctctgtccagtccgtgagggaagtggctgagcagggaaaacactgtatcttagacgtgagcgccaatgccgttcgcaggctgcaggccgcccatcttcacccaattgccatctttatcagacctcggtccctggagaatgtgcttgagatcaacaaacgcatcacagaggagcaagcaaggaaagctttcgacagggcaactaaactggagcaggaatttacagaatgtttctcagctattgtcgaaggtgacagcttcgaagaaatctaccacaaggtgaaaagagtgatcgaggacctttctggtccgtacatctgggttccggcgagggagcggctgtag

SEQ ID NO: 114792 - DNA, 2004 bp, synthetic construct
  misc_feature 1..2004: note = Description of Artificial Sequence: Synthetic coding sequence
  source 1..2004: mol_type = other DNA
atgtcccagaggcctcgggctcctagatccgcactgtggcttctagcaccacccctgctgcgctgggcaccccccctgttaacagttctgcatagcgacctgtttcaggctttgctggatatactagactactatgaggctagcttgagtgaatcacagaagtaccggtaccaggatgaggacacaccgcccttggagcattctcccgcccacctgcccaaccaggcaaactctccgcccgtcattgtgaacactgataccctggaggcaccaggttacgagttacaggtgaacggcacagaaggcgaaatggagtacgaggaaataactctggagagggggaactctgggctgggattcagcatcgccggcgggacggacaacccacacattggcgatgacccaagcattttcatcaccaaaatcattcctggcggcgctgcagcccaggatggacgactacgggttaatgatagcatcctgtttgtgaacgaggtggatgtgagggaagtgacccatagtgctgctgtcgaggcccttaaagaggctgggagtatcgtccggctgtatgtgatgagacgaaagcctcccgcagagaaagtgatggaaatcaagttgatcaaaggccccaaaggtctgggcttctcaattgcaggcggtgtgggaaaccagcatatccccggtgacaactctatatatgtcacaaaaatcatcgaaggaggggccgcccacaaggatgggcgactgcagataggcgacaaaatcttggcagtaaactctgtcggcctagaggatgtgatgcatgaagacgccgtggctgctttaaagaatacatatgatgtcgtctatttgaaagtggctaagccctctaacgcatacctgtctgacagttatgcccccccagatattactacatcgtactctcagcatctggacaacgagatcagtcacagcagctacctcggcacggactatcccactgcaatgacccctactagccctcggagatacagcccagtagccaaagacctgttaggagaggaggatatccctcgagagccgcgacgcattgttatccatagagggtccacgggcttaggctttaatatcgtcggtggtgaagatggcgagggtatcttcatttcatttattctcgctggcggtccagctgatctgagcggagagcttagaaagggagaccagatcctctccgtcaatggtgtcgatctgagaaatgcatcccacgaacaggctgccattgccctcaagaatgcaggtcagactgtgaccatcatcgcgcaatataaaccagaagaatattccaggttcgaggccaagatacacgatctcagagagcagctaatgaatagttcgcttggcagcgggaccgcttcgcttcgaagcaaccctaaacgcggattttacattagggccctgtttgattacgacaagaccaaggattgtgggtttctctcacaggcactgtctttccgtttcggagacgttcttcacgttattgacgcttctgatgaggagtggtggcaggctcggcgcgtgcatagcgactccgaaaccgacgacattggttttataccatccaaacggcgagtcgagaggcgggagtggtcacgcctcaaagctaaggactggggctcttctagtggctcccagggccgagaggattcggtgctttcatacgagacagtgacacaaatggaagtgcactacgcccgtccaattatcattctcggacctactaaggatagagcaaacgacgatttgctgtcagaattccccgataaatttggtagctgtgtgcctcacaccactcgtccgaaaagagagtacgagatagatggccgcgactatcactttgtgtctagtcgggagaagatggaaaaagatatccaagcacataagtttattgaggctggccaatacaactctcatctttacggaactagtgtccagtctgtgcgcgaggtggctgagcaacgggactag

SEQ ID NO: 114793 - DNA, 4740 bp, synthetic construct
  misc_feature 1..4740: note = Description of Artificial Sequence: Synthetic coding sequence
  source 1..4740: mol_type = other DNA
atggaaccgcaaaggagagagctactggcacagtgccaacagagcctcgcacaggccatgacggaagtggaagcagttctggggctgttggaagctgcgggagcactcagtccaggagagcggagacagcttgacgaggaggccggcggggctaaggctgaactcctcctgaagcttctgctcgcaaaggaacgggatcactttcaggacctgcgggcagcactggagaaaacgcaaccccatctacttccgatcctctacttgaacggtgtcgtgggccccccccagcccgcagaaggcgctggcagcacctacagtgtgctcagtaccatgccttctgacagcgagagcagctccagtctctccagcgtgggtacgacaggcaaggctccctcccctccacctctccttactgaccagcaagtgaatgagaaagtggaaaatctgtctatccagcttagactcatgacgagggagagaaacgaactgcgaaaacgcctagcctttgctacccatgggaccgcgttcgataaacggccgtatcaccggcttaatccggactacgagcggctgaagatccagtgtgtgagagctatgtcagatctgcaatctttacagaatcagcacaccaacgccctgaagaggtgtgaggaagttgccaaagagacagacttctaccatacacttcactcccggctattatctgatcaaactcggctgaaagatgacgtcgacatgctaaggcgagaaaacgggcagcttctgcgtgagagaaatttgcttcagcagagctgggaagatatgaagcgcctgcacgaggaggatcaaaaggaaatcggcgacctgagagctcagcagcaacaggtgctcaaacataatggatcgtccgagatcttgaacaagctctatgatacagccatggataaattggaggttgtcaagaaggactacgatgcattgcgcaagcggtattctgaaaaagttgcaattcataacgcagatctgagccggctggagcagctaggggaggaaaatcaaaggttgctgaagcagaccgaaatgctgacccagcagcgagacaccgccattcagctacagcatcagtgcgctctctcattgagacggttcgaggcaatccaccatgagttaaacaaagccaccgctcagaacaaggatctgcaatgggagatggaactactgcagagcgagcttacagaactgagaaccacccaagtgaagaccgctaaagaatccgagaagtacagagaagaaagagacgccgtctactcagagtacaagctgatcatgtcagagagagaccaggtaatatctgaattggataagctgcagacggaagtggagctggcagaatcgaagctcaagagctccactagcgaaaagaaggccgccaacgaagagatggaagctctaagacaaatcaaggacactgttaccatggacgctggccgagctaacaaggaggtcgagatcctccgcaaacaatgcaaggcactctgtcaggaattaaaagaagcactgcaggaagccgatgtggctaaatgtagaagggattgggcttttcaggagagagataaaattgtggctgaacgggattccataagaaccctgtgcgacaacctgagacgcgagcgcgatcgagcagtgtctgagcttgctgaggctctcaggtctttggacgacactcgtaaacagaagaatgacgtgtctcgtgagttaaaggagctgaaggagcaaatggaatcccagctagaaaaagaagctaggttccgccagctgatggctcacagcagccacgatagcgcaatcgacacggatagcatggagtgggagaccgaggtggtggagtttgaacgcgagaccgaggatatcgacctcaaggctctcgggtttgacatggccgaaggcgttaacgaaccatgtttccctggtgattgcggtatcttcgtaacaaaagttgataaaggttccatcgcagatggaagactgagagtaaatgattggctgctgcgtatcaacgatgtggacctgattaataaggataaaaaacaggctattaaggctctgctgaatggagagggggctattaatatggtggttcgtcggagaaaatctctgggcggcaaagtcgtgactccactgcacataaacttgtccggtcagaaagattcaggaatttccttggagaatggtgtttatgctgcagctgtacttccagggtcacctgcagccaaggagggctcccttgctgttggcgatagaattgtggctattaatggcatcgccctggacaacaaaagcttgaatgaatgcgagtcattgctgcggagctgtcaagactccttaactctttccctcctcaaagagcagaagtgtgtgcccgcgtccggtgaacttagccccgagctgcaggaatgggctccttactcacccggtcactcttcaagacacagcaatcctcctctgtatccttcccgaccctccgttggcacagttcctaggtcccttactccctcaactaccgtctcaagcatcctccgcaatccaatctacacagtgaggtcgcatagggtaggcccctgtagttcgcctccggcagcccgcgatgccggcccacaaggtctgcaccccagcgtccagcaccaaggaagactgtctctggatctgagtcacagaacttgctccgattattctgagatgagggccacgcatggcagtaatagtctgcccagttccgccaggctgggttcaagttcaaaccttcagtttaaagccgaacggatcaaaatccccagtaccccccgttatcctcgatcagttgtggggtctgaaagaggatccgttagccacagcgagtgctccacacctccgcagagtccactgaatatagataccttgtcatcgtgtagtcaatcacaaaccagcgcgagcacactgccacgaatcgccgtgaatcccgcctctttgggtgagagaaggaaggacagaccctacgtcgaggagcccagacacgttaaagtacaaaagggttccgagcccctgggaataagcattgtgtcaggcgagaaaggcggaatctacgtgtctaaggtgaccgtgggaagcattgcgcatcaggcggggctcgaatatggcgaccagctgttggagttcaacggaattaacctgagaagtgcaaccgagcagcaagccagattgatcataggtcagcagtgcgacaccatcaccattttggcacagtacaatccccatgtacatcagttaagcagtcacagcagatcaagttcccacctcgacccagccggtacacacagtacactccagggtagcggtacaaccacccctgagcatcctagcgtcatcgatccactgatggagcaggacgagggcccttctacacccccagcgaaacagagctcgagtcgcatagccggtgacgctaacaaaaagactctagaacctcgggtggtttttattaaaaaatcccagctggagctgggggtgcacctgtgtggcggcaatcttcacggtgtcttcgttgcagaagtcgaagacgactccccggcaaagggacccgacggccttgtacccggagacctgatcttggaatacggcagcctcgacgtgcgcaataaaacagtcgaggaggtttatgtggagatgctgaagcccagagatggtgttcgcctgaaggtccagtaccggcccgaagagtttacaaaggcgaagggcttaccaggagatagtttctacattagagctctgtatgaccgactcgctgacgtcgagcaagagctgagctttaagaaggatgacatcttgtacgtggatgacacactgccacaggggactttcggttcttggatggcatggcagctggacgagaacgcacagaaaattcagcgaggtcagatcccctctaagtatgtgatggaccaagagtttagcagaaggttgtccatgtctgaggtgaaggatgataacagcgcaaccaaaacattgtctgccgccgcccgacgaagtttcttccgtaggaagcataagcacaagagatcaggaagtaaggacggcaaggacctgctcgctttggacgcatttagttctgactcaattccactttttgaggattccgtgagccttgcttaccagagagtgcagaaggtcgattgtactgcgctgcgccctgttctaatactgggtccattattggatgtcgttaaggaaatgctggtgaacgaggctccaggcaaattctgccggtgtccattggaagtgatgaaagcaagccaacaggccattgagaggggtgtcaaggactgcctatttgtggattataaacgacgaagtggacactttgatgtcacaacggtcgcctcaattaaggagattacggagaaaaatcgccattgtctgttagacatcgcacctcacgccattgaacggcttcatcacatgcatatttatcctattgttattttcatacactacaagtctgcaaagcacatcaaagaacagcgcgatcccatttacctgagggataaggtcacccaaaggcacagtaaagagcaattcgaggctgctcaaaaactcgagcaggaatatagccggtatttcacgggagtgattcaaggcggcgctttgtcatccatctgtactcagattctagccatggtgaaccaggagcaaaacaaggttctgtggattcctgcctgtcctctatag

SEQ ID NO: 114794 - DNA, 5760 bp, synthetic construct
  misc_feature 1..5760: note = Description of Artificial Sequence: Synthetic coding sequence
  source 1..5760: mol_type = other DNA
atggaaccacagcgccgcgaattactggcacagtgtcaacaaagtttagctcaggctatgaccgaggtggaggcagtgctcggcctactcgaggcagccggggcgttgtcccccggggaacgaaggcaactcgatgaggaggcaggcggtgccaaggctgaactgctcctgaagttgcttcttgcaaaggagcgggaccatttccaggacctgagggccgcgctggagaagacgcagccccacctgttacccattttgtatctgaacggcgttgtgggccccccacaaccagcggagggggcgggaagcacatacagtgtgctatctacaatgccgagtgactctgagtcttcttctagtcttagcagtgtcggtacgactggcaaagctcccagtcctccaccacttctaaccgatcagcaggtcaacgaaaaggtggagaacctgagtatccaactccggcttatgactagagagcgaaacgaacttcgaaagagactcgcctttgcgacacatgggactgcattcgacaagagaccctatcaccgtctcaacccggactacgagcggttaaagatccagtgtgtgcgcgccatgagtgacttgcagtctctgcagaatcagcatacgaatgccctgaagcgatgcgaagaggttgccaaggaaaccgacttctatcacaccttacacagcagactgctctccgatcaaaccagactgaaggatgatgtcgacatgctgcggagggagaatggtcagttgctgagggaaagaaacctgcttcaacagagttgggaagacatgaagcgcttacatgaggaggaccagaaagagatcggggatctgcgcgctcagcaacaacaggtgctgaagcacaacggctcttcggagattctcaacaagttatacgacaccgcaatggacaagctggaggtggttaaaaaggactatgacgccttgcgtaagcgttactccgagaaagtcgcgattcacaatgcagacctgtctaggcttgagcagctgggagaggaaaaccagaggttgctgaagcagaccgagatgttgactcagcagagggacactgcgatccagctgcagcaccagtgtgccctcagtctacgcagatttgaggcaatccatcacgagctgaacaaggcaaccgctcagaacaaggacttacaatgggaaatggagctgctgcagtccgaactaactgaactgcgaacgactcaggtgaaaaccgctaaagagtccgaaaagtatcgcgaggagcgtgatgcagtttatagcgaatataaacttatcatgtcagagcgcgaccaggtcatctcagaacttgataagttgcagaccgaggtagaactggcggagtctaaactcaagtcgtctacaagtgaaaaaaaagctgccaatgaagaaatggaagctcttcgccagatcaaggacacagttactatggacgccgggcgcgcaaataaggaagtggagatcctacgtaaacagtgcaaagcattgtgccaggaactgaaggaagccctgcaagaggcagacgtggccaagtgcagacgggactgggccttccaagaaagggacaaaatcgtcgcagaaagagactccatcaggacactgtgcgataatctgcggcgggagagagaccgggcggtgtcagagttggcagaggcgctgaggagtctggacgatacgcgcaagcagaaaaatgatgtgagccgggaactgaaagaactgaaagaacagatggagagccaattggagaaagaagcccggtttaggcagctgatggcacattcttctcatgatagcgcaattgacaccgattctatggaatgggaaaccgaggtagtggagttcgagcgcgagaccgaggacattgatctcaaggcactcggtttcgatatggcagagggtgtaaacgagccatgctttcccggagactgcggcatcttcgtgactaaggtggataaggggtcgatagccgatggccggctgagggtaaatgattggcttctgcgtattaacgacgtggacttgattaacaaggacaaaaaacaagctattaaagcccttctgaatggagaaggcgcaatcaatatggtcgtcaggaggcgaaaatctctaggaggaaaggtcgtgactcccctccatattaacttgagcgggcagaaggacagtggtatctcgctcgagaacggagtgtacgctgcggccgtcttgccaggctcaccggccgccaaagaagggagcctggcagtcggagataggatcgtagctattaacggaatagccttggataataagtcattgaatgagtgtgagtccctgctgcggagttgccaggattcacttaccctgtcattgctaaaagtttttcctcagtcctcatcttggtcaggccaaaatatctttgagaacatcaaggactcagacaaaatgctgtctttcagggctcacggccccgaagtgcaggctcacaataaaagaaatctgattcaacataataacagcacgcaaactgacattttctacaccgacaggctcgaagaccggaaggaacctggcccccctggcggatcttctagttttttgcataagccctttcccggaggacccctgcaagtctgtccacaggcctgcccatcggcctctgaaagaagcctctcatcctttcggtctgacgccagtggcgaccgcggctttggtctggtggatgttcgtgggcgccggcctctcttgccattcgagaccgaagttgggccctgtggagttggggaggccagcctcgacaaagctgattccgaaggcagtaattctgggggcacttggcctaaagcaatgctgtcgtccacggctgttcctgaaaaactgagtgtgtataaaaaaccaaaacagcgtaagtccattttcgaccctaatacattcaagagaccccaaaccccccccaagatcgactacctgctcccgggcccagggcctgctcacagtccacaacctagcaaacgggcgggcccattaactccgccgaagcccccaaggcggagcgatagcattaaattccagcatagactcgaaacttcttctgaaagtgaggccaccctggtgggttcatcacctagcacttctccaccttccgcgctgcctccagatgtggatcccggagaacctatgcacgcatctccaccccgaaaggcacgggttcggatcgcctcctcatactaccctgagggcgacggcgactcatcacacctgcctgctaaaaaatcctgtgatgaggacctcaccagccagaaggtggacgaactgggacaaaagcggaggcgtcccaaatcagcaccctcctttaggccgaaattggcgcccgtcgtgattcccgctcagtttctcgaggagcagaagtgtgtgcccgcgagtggagaactgtccccagagttacaggaatgggcaccatactctcccggccactcaagccgacatagtaatcctcccctctacccatcaaggccaagcgtcggaacagtaccccgttcgttgaccccaagtaccaccgtctccagcatcctgagaaaccctatttatacggtccgctcccaccgagtagggccttgttcgtcccctcctgctgcaagagacgccgggcctcaggggctgcacccatcggtgcagcaccagggacgcctttccttggacctgtctcatcgcacttgcagtgattacagcgagatgcgcgccacgcacgggagcaatagtctccctagctcagctcgccttggatctagttccaacctgcagttcaaagctgagcggatcaagataccaagcactccccgatatccgcgttccgttgtcgggtcggagcgaggctcagttagccacagcgagtgttcaacccccccccagtcgcctctcaacatcgacaccttgtcatcctgctcacagtctcagacgtcagcaagcaccctgccccgcattgctgttaaccccgcctcattgggagagcggagaaaagatagaccctacgttgaagagccacgccatgtgaaagtacagaaggggtctgaaccgctggggatctccatcgtcagtggcgagaagggaggcatctacgtgtcaaaagtaacagtcgggagtatcgcccaccaggctggactagagtatggtgatcagctattagaattcaatggtattaacctgcgaagcgctaccgagcagcaagctcgtctaatcatcgggcagcagtgcgacacaataacaatcctggcccagtataacccgcacgtacatcagctcagtagccactctcggagctcaagtcacttggatcccgcagggacacacagtacattacagggatccggaacaacaacccctgaacacccttcagttattgacccattgatggaacaggatgagggacccagtacccctccagccaaacaatctagctcaaggatcgccggggatgcgaataagaagacacttgagcccagagttgtgttcatcaaaaagtctcagctcgagcttggagtgcatctgtgcggcggaaacctccacggagttttcgtggccgaggtagaggacgattctcctgcgaaagggcctgatgggttagtacctggcgatctgattctcgagtatggtagcctggacgtgcgcaataagaccgttgaggaagtgtatgttgagatgctcaagcctcgtgacggcgtgcggcttaaggtgcagtaccggcccgaagaattcacaaaggccaagggactcccgggcgactctttttacatcagggctctgtatgacaggttggcagacgtcgagcaggaactgtccttcaagaaggacgatatactttacgtagatgatactctccctcagggaactttcggcagttggatggcttggcaactcgatgaaaatgcacagaaaatccaaaggggccagataccctcaaagtatgtaatggaccaagagttcagccggaggttgtcgatgtcagaagttaaagatgacaactcagcgactaaaacattatcggccgctgctagaaggtccttctttagaagaaagcataagcacaagcgaagtgggagtaaagacgggaaggatttgcttgctctggacgccttctcatctgactcaatcccacttttcgaggactcggtgtcactggcctaccagcgggttcaaaaagtcgactgcactgcgttacgcccggtcctcattctggggccccttcttgacgtggtgaaggaaatgctagtgaatgaggcccctgggaaattctgtaggtgcccactggaggtcatgaaagccagccaacaggctatcgagcgcggcgttaaggactgtctcttcgtggactacaagcggcgttccggacatttcgacgtgacaaccgtcgctagcatcaaagaaattacagaaaagaaccgccattgtctgctcgacatagcaccacatgctatcgagagactccaccatatgcatatttacccgattgtgatatttattcattacaagtccgccaagcatatcaaagagcagcgggatcctatatacctccgggataaagtgacccaaagacatagcaaggagcaattcgaggccgctcagaagctggagcaggaatactctcggtatttcactggtgtcatacagggcggggccctgtccagcatctgtacacagatcctggccatggtgaatcaagaacagaataaggtcctctggatcccagcctgtccactttag

SEQ ID NO: 114795 - DNA, 2052 bp, synthetic construct
  misc_feature 1..2052: note = Description of Artificial Sequence: Synthetic coding sequence
  source 1..2052: mol_type = other DNA
atggagccacagagacgggagttgctggcccagtgccagcagtctttagctcaagccatgacagaggtcgaggccgtgctggggttactagaggctgccggagccctgagtccaggcgagaggagacagttagacgaggaagcggggggtgcgaaggctgaactcttacttaagttactcctcgcaaaggagcgcgaccattttcaagacctgcgggccgcgctggaaaagacacagcctcatttgctgcctatcttgtacttaaacggggttgtcggcccccctcagccggctgaaggcgctggctccacgtattccgtcctgtctacaatgcccagtgatagcgaatcttccagctctctgtcaagcgtggggactacggttaagcatctgcgcgaacagatggagtcccagctggaaaaagaggcaagatttagacaacttatggctcactcctctcatgatagcgccattgatacagattcaatggaatgggagaccgaagtggtagaattcgaacgcgaaacggaagacattgatctcaaggctttggggtttgacatggccgaaggtgtcaacgaaccatgtttccccggcgactgcggaattttcgtgacaaaagttgacaaaggttcaatcgcagacggccgcctgcgagttaacgactggcttctgcgcattaatgatgtggatctcataaataaagacaaaaaacaagccatcaaagccttactcaacggcgagggtgctattaatatggttgttcgaagacgaaaatctctcggggggaaagttgtgacaccattgcacataaatctatccggacagaaggactccggaatatcactcgagaacggcgtctacgcggccgccgtcctgcccgggagcccagctgcaaaagaaggcagcctggccgtgggcgatagaatcgtggccattaatgggatcgcacttgacaacaagagtctgaacgagtgtgagagcctgctccgtagctgtcaagactctctaacgctgtctcttctcaaggttttccctcagagtagttcctggtcagggcaaaacatcttcgaaaacatcaaggattcagataagatgctgtccttcagagcccatggacctgaagtccaggcccacaacaagaggaacctgatccaacataacaacagtacccaaaccgatatcttctatactgatcgccttgaggaccggaaagagccgggacctccaggaggaagctcttccttcctgcataagccctttccgggtggccccctacaggtgtgtccgcaggcctgtccatctgcttccgaacgatcgttgtcttctttccgaagcgatgcctccggcgacaggggatttggcctggtagatgtgagaggacgcagacccctcctgccttttgaaactgaggtgggcccatgcggtgtgggcgaggcatcactcgataaagctgactctgagggcagtaacagtggcggaacgtggccgaaggctatgctctctagcaccgccgtccccgaaaagctgtctgtgtataaaaaacctaaacagcgtaaaagcatctttgatcccaacacatttaaaaggccccagaccccccccaagatagactatctgttgcctgggcccggccccgcccactccccccaacccagtaaacgtgccggaccactgacaccacccaaacctcctcgaaggagcgactctattaaatttcagcacagactcgaaacatcatcggaatctgaggctaccctggtcggttcaagtccttcaacgtccccacccagcgccctgccaccagatgtggatccgggtgaacctatgcacgcatcaccccctcgcaaggccagagtgcggattgcttcctcctattaccctgagggagacggcgacagctctcatctgcccgccaagaaatcctgcgatgaggacctgacttcgcagaaggttgacgagctggggcagaaacgaagacgccctaaaagcgcgccttcttttaggccaaagctggcccccgtggtgatccccgcacagtttcttgagtag

SEQ ID NO: 114796 - DNA, 2643 bp, synthetic construct
  misc_feature 1..2643: note = Description of Artificial Sequence: Synthetic coding sequence
  source 1..2643: mol_type = other DNA
ggcgccataaatatggtcgttcgccgacggaagtctctgggcggaaaagtcgtaacaccattgcatatcaacttatccggccaaaaggacagcggcatttcccttgaaaatggtgtctatgcagcggccgtgctgccaggttctcccgccgccaaggaggggagcctggctgtgggtgaccgaatcgtcgcaatcaatggtattgcgctggacaacaagtccttgaatgaatgcgaatcgctgcttcggtcctgtcaggatagtctgacactgtccctcctgaaggagcagaagtgcgtgccggcttccggagaattaagcccagagcttcaagagtgggcaccatacagtcccggtcactccagccggcactctaacccccctctctatccctctcgacctagcgttggcaccgttccccgatcgttgactccttccaccacggtcagctcaattctacgaaatccaatatacaccgtgcgctctcatcgggtgggcccatgctcctcccccccagcggctagggacgctggacctcaaggactgcatccttctgtacagcaccagggtcgcctgtcactcgacctcagccatcgcacatgcagtgactactccgaaatgagggccacccacggcagtaactctctgccatcctcagcacggttgggatccagttcaaacctgcagtttaaggcagaacgtatcaaaattccatcaaccccaaggtacccccgctcagtcgtaggttcagagaggggatccgtctcacatagcgagtgttccaccccgcctcagtcacccctgaacatcgacactctgagtagctgcagccaatcacagacgagtgcgtcgactctgccgcggatcgccgttaatcctgcctcactgggggaacgccgtaaggacaggccgtatgtagaggagcctagacacgtgaaggttcaaaagggaagtgaaccactgggcatctctattgtgagtggcgagaaaggaggcatctatgtgtccaaggtgactgtgggtagcatcgctcatcaggcgggcctggagtacggggaccagttgctggagttcaacggtatcaatcttagaagtgccactgaacagcaagcaagacttatcatcgggcagcagtgcgacactatcacaatcctagcgcagtataatcctcacgtccaccaactttccagtcactcccgatcttcttcccatctggatcctgcaggaacccattcaacgctgcagggcagcggcactacaacaccggagcacccaagcgtgattgatcctctgatggaacaagatgagggtccatccacaccacctgcaaaacagagcagctccaggatcgctggagatgccaacaagaaaactctagaacccagggttgtgttcatcaagaagtcccagctggagctgggagtgcatctatgtggaggaaacctgcatggcgtgttcgtggcggaagtcgaggacgacagtcccgccaaaggccctgatgggctggtgcccggcgatctgatcttggagtacggctcattggatgtgaggaacaagacggtggaggaggtctatgtggagatgctgaagcctcgcgatggcgttcgtcttaaagtacagtataggcccgaagaatttaccaaggccaaaggtctaccgggtgacagcttttacatcagagccctatacgataggctagccgacgtggagcaggaattaagctttaagaaagacgacattctgtacgtagatgataccctgccccagggtacattcgggtcatggatggcttggcagctggacgagaatgcacaaaagatacagaggggacagatcccttcaaaatacgtgatggatcaagaatttagtagaaggctgagcatgtctgaagtcaaggacgacaattctgccacaaaaaccctgtctgccgctgctagaaggtcatttttcaggcgaaagcataaacacaagcgcagcggttcaaaggacgggaaggatctgttagctctggatgctttttcatcagatagcatacctctttttgaggacagcgtatcattagcctaccagagagtccagaaggtggattgcacagcacttaggcccgtgcttattttaggccccctgcttgatgtggtcaaagagatgttggtcaacgaagccccaggaaagttttgccgctgccctttggaggtgatgaaggccagtcaacaggctatcgagagaggtgtcaaagattgcctgttcgtggattacaaacggcgcagtgggcactttgacgttactacggttgccagtatcaaagaaattacagaaaaaaacagacactgccttctcgatattgctccgcacgcaattgaaaggcttcatcatatgcacatttatcctatcgttattttcattcactacaaaagcgctaagcatattaaagagcagagggaccccatttatttgcgggacaaagtgacgcaacgccattcaaaggagcagtttgaggccgctcaaaaactggaacaggaatactcccggtattttacaggggtgatccagggcggcgctctttcttccatatgtactcaaattctcgccatggtcaaccaagaacagaataaggtgctttggattccggcttgtcctttgtag

SEQ ID NO: 114797 - DNA, 3237 bp, synthetic construct
  misc_feature 1..3237: note = Description of Artificial Sequence: Synthetic coding sequence
  source 1..3237: mol_type = other DNA
atggcacccaggaagcgcggtgggcgcggtatttctttcatcttctgttgctttcggaacaatgatcacccagaaatcacttatcgcctgcgcaatgactcgaatttcgcattacaaaccatggaacccgccctccctatgccccctgtagaagagctagacgtgatgttctcagaactggttgatgagttagacctgactgataagcaccgggaggcaatgttcgccttgcctgccgagaagaagtggcagatctattgctccaagaagaaggaccaagaagagaataagggtgctaccagctggcctgaattctacattgaccagttgaactccatggccgccagaaaatcgcttttagccctggagaaggaggaggaggaggaacggtcaaaaactattgagtcgttgaaaaccgcactgcgcactaagcccatgaggtttgttaccagattcatcgatctcgatggtctgagctgtattctgaactttctgaagactatggattacgagacgagcgagtcacgcatccatacctctttaatcgggtgtattaaagctctgatgaataattcccagggtagagcccacgttctggctcattccgagagtatcaatgttatcgcgcaatcactatctacagaaaatataaagactaaagtcgccgtactggaaatcctgggggcagtatgtctcgtcccaggtggacataagaaggttctccaggccatgcttcattatcagaaatacgcaagcgagagaactcggttccagacactgataaacgaccttgacaagtctaccggtcggtaccgcgatgaggtttctcttaaaactgctataatgtctttcatcaatgcagtcctctcccagggggctggcgtcgagagcttagacttcaggctgcacctgagatatgagtttctgatgttaggaattcagccagtgattgataagttgcgagagcacgaaaactctactcttgaccgacacttagatttcttcgagatgctgcggaatgaagacgaactcgagtttgccaagcgcttcgaactggtgcatattgatactaagagtgccactcagatgtttgaactgacccgcaaacggttaacgcactcggaggcatatccccacttcatgagcatactgcatcactgtttgcagatgccctacaaaaggtccggcaacacagtgcagtattggctccttctggataggattattcagcagatcgtaattcagaacgacaaaggacaggacccggacagcacccctctggaaaacttcaacataaaaaatgtggtgcggatgcttgtgaacgagaatgaagtcaagcagtggaaagagcaggctgagaagatgagaaaggagcacaacgagctacagcagaaactggaaaagaaggagagggagtgtgatgccaaaacccaggagaaggaggagatgatgcagacactaaataagatgaaagaaaagcttgagaaagagactacagaacacaagcaggtaaagcaacaagtggctgatctcacggcacagctccacgagctgagccggcgggctgtgtgtgcctcaatccccgggggaccatcccctggcgcacccggaggcccgtttcccagctccgtgccaggcagcctactgccacccccgcctcccccccctcttcctggcggtatgcttccacctccaccacctcccttgcctcctgggggtccacctcccccaccaggacctccaccgctcggcgccataatgccacctcctggcgctccgatggggcttgccttgaaaaagaaaagcatcccccagcccaccaacgcactgaagagctttaactggtctaaacttcctgagaataagctcgagggcaccgtgtggactgagatcgatgatacaaaagtatttaagatcttggatctcgaagaccttgagagaacctttagcgcttatcagagacaacaagatttctttgttaactccaattccaagcaaaaagaggcggatgccatcgacgacactctctcgtctaaactgaaagtcaaagaactgagcgtcatagatgggaggagggcacagaattgtaatatattgctgagccgattaaaattgtctaacgacgaaatcaagcgagccatactcacaatggacgaacaggaggatctcccaaaagatatgctcgaacagttactaaaattcgttccggagaagagtgacatcgatctgttggaagaacacaaacacgagctggatcgtatggccaaagccgaccggttcctgtttgagatgtcaaggattaaccattatcaacaacgactgcagagtctttactttaagaaaaagttcgccgaaagagttgccgaggtgaagccaaaggtagaagcaatccggagcggcagcgaagaagtcttccggtccggagctctcaaacagctcctggaggtggtgctagccttcgggaattacatgaataaagggcagcgcggcaacgcatacggcttcaaaatctcttctttgaacaaaatagccgataccaaatcatcaatcgacaagaatataaccctgctccactatttgattaccatcgtcgaaaataaatacccttccgtcctgaacttgaatgaagaattacgcgatattcctcaggcagccaaggtgaatatgacggagctggataaggagattagcactctgcggtctgggttgaaagcggtcgagaccgaactggaatatcaaaagtcccaacccccacagccaggggataagttcgtgagcgttgtctcccagttcatcacagttgcgagctttagcttctcagacgtggaggatcttctcgccgaagctaaagatttgtttacgaaagctgtgaaacactttggcgaggaagcggggaagatccaaccagatgagtttttcggaatcttcgaccaatttttacaggctgttagcgaagcaaaacaggagaatgaaaacatgagaaagaagaaggaggaagaagagcgccgtgcaaggatggaggcccagcttaaggaacagcgagagagggagcgtaaaatgcgaaaagccaaagagaattccgaggaatcgggtgagtttgacgatctagtctccgcactgcgatccggcgaagtgtttgacaaagacctcagtaagctgaagcgcaatcgaaagcggatcaccaatcaaatgacagattcctcccgtgagaggccaattactaagctgaatttttag

SEQ ID NO: 114798 - DNA, 2649 bp, synthetic construct
  misc_feature 1..2649: note = Description of Artificial Sequence: Synthetic coding sequence
  source 1..2649: mol_type = other DNA
atggcacctcgtaaaaggggcggtcgggggattagcttcattttttgttgcttccgcaataacgatcatcctgagatcacctaccgtctgcggaacgatagcaatttcgccctgcagaccatggagcccgctctgccgatgcctcctgtagaagaacttgacgtgatgttttccgagctggtcgacgaattggaccttacagacaaacacagagaagccatgttcgccctaccagctgagaagaagtggcaaatatattgctctaaaaaaaaggaccaagaggaaaataaaggagctacaagctggcccgaattctacattgaccagttaaactcaatggccgctcggaagtctttgctcgccctggagaaggaggaagaggaggagcgttccaaaaccattgaatccctcaaaaccgcactgaggacaaagccgatgcgtttcgttacaagatttatcgatctggatggtctgtcatgtatattgaactttctgaagactatggattacgagacatcagaatctcgaatacataccagtcttatcggttgtattaaggctctaatgaacaatagccaggggagggcacatgtgttggctcattctgagtccatcaatgttatagcccagtcactgagcaccgagaacataaagaccaaagtggctgtgctcgagattctgggagctgtctgtttggtccccggaggccataaaaaagtgctgcaagctatgttacactatcagaagtatgccagcgagagaaccaggtttcagacactcataaacgacctggataagtccacggggcgttaccgcgatgaagtgtccttgaaaaccgctattatgtcgttcattaatgcagtactgagtcagggcgcgggtgtggaatctctggattttcgcttgcaccttcggtacgagtttcttatgctcggcattcagcctgtaattgacaagttacgggaacacgagaatagtactttagacagacacttggattttttcgagatgttacgcaacgaggacgagctagagttcgctaaaagatttgaattagtccacattgataccaaaagcgctacgcagatgtttgaactgacacgcaagaggctgacacactccgaagcctacccacacttcatgtcaatattacaccactgtttgcagatgccttacaaacgctcaggcaatacagtgcagtattggctgctgctcgaccggataatccagcaaatcgttatccagaatgacaagggacaagatcctgattctacccctttagaaaatttcaacataaaaaacgtggtacgaatgctggtgaatgagaacgaagtgaagcaatggaaagagcaagccgaaaaaatgcggaaagagcataacgaattacagcagaagctcgaaaagaaggaaagggagtgcgatgccaaaacccaggagaaggaagaaatgatgcagactctgaacaagatgaaggaaaagctggagaaggagacaacggagcataagcaggtgaagcagcaggtcgctgatctaacagcacagctgcacgagctgtcaaggagagcagtgtgtgcaagcatacccggcggaccaagcccaggtgcccccggagggcctttccctagcagcgtgcccggatccctgctaccccccccccccccccctccccttccaggcggcatgcttccccccccaccccccccattaccacccggcggcccgcctccgccaccaggcccccccccactcggcgcaataatgccccccccgggggcccccatgggattagctttgaagaagaaatcgatccctcagcccaccaatgcccttaagagctttaattggtctaagctgcctgagaacaagctggaaggcaccgtctggactgagatcgatgacaccaaggtcttcaagatcctggacctcgaggatttggagcgaacgttttctgcctaccagcggcagcaagattttttcgtaaactccaactcaaaacaaaaggaggctgacgctatcgatgatacactttcctcaaaactgaaggtgaaggagctctctgtcattgatggtcgacgggcccaaaactgcaacatcctgctgtcccggctcaagctgtcaaacgatgagatcaagagagccatcctcacgatggatgagcaggaagacctccccaaggatatgctggaacagctactcaagtttgtgcccgagaaatctgatattgatctcctcgaagagcataaacatgaattggatcgcatggccaaagctgatcggttcctgtttgagatgtcaagaattaaccactaccagcaaaggcttcaaagcctctacttcaagaaaaaatttgctgagcgagtggcctttggcaattacatgaacaagggtcaacgcggcaacgcctatggcttcaagatctcttctttaaataagatcgctgacacgaagtcttcgattgacaaaaatatcaccctgctgcactacctcattacgatcgtcgagaataagtatccatctgtcctgaatctcaacgaggaactgagggacatcccgcaggctgccaaggtaaagagttggaatatcagatcactcagccctcatagtcctgaaatcagcctctgcctcctgtcagcttcttccagtcaatag

SEQ ID NO: 114799 - DNA, 3207 bp, synthetic construct
  misc_feature 1..3207: note = Description of Artificial Sequence: Synthetic coding sequence
  source 1..3207: mol_type = other DNA
atggctccccgcaaaagaggcggtagggggattagcttcatcttttgctgctttagaaacaacgaccacccagaaataacttaccgactgaggaacgactccaattttgccctgcagacaatggagcccgccttgcctatgcctcccgttgaagaactggacgtgatgttctctgaattagtcgatgagctggacctcacggataaacatcgagaagccatgttcgccctcccagccgaaaaaaagtggcagatctactgttctaagaagaaggaccaggaagaaaataaaggcgccacctcttggcctgagttctacatcgatcaactgaactctatggctgctcgaaagtccctactcgccctggaaaaagaagaagaagaggagaggtccaagacaattgagtccctgaaaactgccctccgcacaaagcccatgagatttgttacgcgcttcatcgatttagacgggctttcatgtatcctcaacttcctcaaaactatggactatgagacgtccgaaagtcgcattcacacatctctgatcggctgcataaaggcgctgatgaacaacagccaaggccgcgcacacgtactagcgcacagtgaatccatcaatgtaatcgctcaaagcctgagcacagagaacatcaagacaaaggtggctgtacttgaaattttgggcgccgtatgtctggtacccgggggccataaaaaggtcctgcaggcaatgttgcattatcagaaatacgcatccgagcgcacacgcttccagactcttataaatgatctcgataagtcaacaggtcgctacagggacgaggtatctctcaagaccgcaattatgagtttcatcaatgccgtcctgagccagggcgctggtgtcgagagcctcgacttccgtctccacttgaggtacgagtttctgatgctcggaattcaaccagtcatcgacaaactgcgtgaacacgaaaactccaccctcgatagacatctggacttcttcgaaatgctgagaaacgaagatgagttagagtttgctaaaaggtttgaattagttcacatcgataccaagtccgccactcagatgttcgagctgactaggaaaagactcacgcattccgaggcttacccacacttcatgtctatcttgcatcattgtctccagatgccatataagaggtccggcaataccgtgcagtactggctgctgctagatcgtattatacagcaaatagttattcagaacgataaaggacaggatccagactctactccattggagaactttaacattaaaaatgtggttcgtatgctcgtgaacgaaaatgaagtaaaacagtggaaggagcaggcggagaagatgcggaaggaacacaatgaactacagcagaaactcgagaagaaagaacgcgaatgcgacgcaaaaactcaggagaaagaagagatgatgcagactttaaacaaaatgaaggaaaagctggagaaggagactactgagcataagcaggttaagcagcaagtcgctgacctgactgcccagctccacgaattgtcccggcgagctgtgtgcgcaagcatccccggcgggccttcccctggtgctcctggcggcccgttccccagctccgtcccaggaagtctgctgcctccccctcccccccctcctctgcccggaggcatgcttcccccacccccccccccccttccccccggcgggcccccgccaccacctgggccccccccactgggagccatcatgccacctcctggggcaccgatgggactggccctgaagaaaaaatccattccacagcccaccaacgctttgaaaagcttcaattggtctaaactgcctgaaaataaattagagggcacagtgtggactgagattgacgacactaaggtctttaagatccttgatcttgaagacctggagagaacattctcagcctatcagcgccaacagaaagaggcggacgcaatagacgacaccctgtcatccaaacttaaggtgaaggagttgagcgttatagatgggaggagggcacagaattgtaatattttgctctccaggctgaagttgtccaacgatgagatcaagcgggccatcctgaccatggatgaacaggaggacctgcccaaggatatgttggagcagctcctaaagtttgtgcctgagaagagcgacatcgacttgctggaggagcataaacacgagttagataggatggctaaggccgacagattcctgttcgagatgagtagaattaaccactaccagcagcggctgcagtcgctgtattttaaaaagaagtttgccgaacgtgtagccgaagtgaaacccaaggttgaggctatccgaagcgggtcagaagaagtatttcgttccggcgccctcaaacagcttctcgaggtcgtactggctttcggcaactacatgaataaagggcagcggggaaatgcctatggcttcaaaattagcagcctcaacaagatcgcagatacaaagagtagtatagataagaatattactttgctgcattacctcattacaatagtggagaacaagtacccctccgtgttgaatctcaatgaagagctgcgcgacatccctcaggcagctaaagtaaacatgactgagctggacaaggaaatcagcacgctcaggagcggactgaaggcagtcgagaccgagctggagtatcaaaaatcccagcccccacagcctggcgataagttcgtatctgtggtgtcacaattcataacagttgcttctttcagcttcagcgacgtcgaagacctcctggcggaggccaaggatcttttcactaaggccgtcaagcattttggcgaagaagcaggaaaaatccaaccagacgagttcttcgggattttcgaccaattcctgcaagcggtcagcgaagctaagcaagagaacgagaacatgagaaagaagaaagaggaggaagaacgcagagcccgtatggaggcccaactcaaagagcagcgggagcgagaaaggaaaatgaggaaagccaaggagaactccgaggagtctggcgagtttgatgatcttgtctctgctctccggtccggcgaagtgtttgacaaggacctgagtaaactgaagagaaacaggaagaggatcactaatcaaatgacagatagctcaagagagcgacctatcacgaagcttaatttctag

SEQ ID NO: 114800 - DNA, 3237 bp, synthetic construct
  misc_feature 1..3237: note = Description of Artificial Sequence: Synthetic coding sequence
  source 1..3237: mol_type = other DNA
atggctccccgcaaaaggggaggtcgtggaatcagtttcattttttgttgcttccgcaacaacgatcaccctgagatcacttacaggctccgtaatgattccaatttcgcattgcagacaatggaaccagccctgccaatgccacctgtagaggagctcgatgtcatgttctcagaactcgttgacgaactggacctgaccgataaacatcgggaagccatgttcgctctgcctgctgaaaagaagtggcagatctactgcagcaagaagaaggatcaggaagaaaataagggggcaacctcctggcctgaattctacattgatcagctcaattccatggccgcacgcaaaagtcttcttgcgttagagaaagaggaagaagaggaaagatccaaaacaattgaaagcctcaagaccgctctgagaacgaagccaatgagattcgtgaccaggtttatcgatcttgacgggctgtcgtgcattttaaacttcctcaagacaatggactacgaaacatcagaaagtagaatccataccagtcttattgggtgtattaaggccctgatgaacaacagccaaggaagagcacacgtgcttgcgcatagcgagtctatcaatgtgatcgcacagtcactcagtaccgagaacattaaaactaaagtggcagtgctggaaatcctcggcgccgtgtgtttggtgccggggggccacaaaaaggttctacaggccatgcttcattatcagaagtacgcctctgagaggacacgtttccagaccctgattaatgacctggacaagtctactgggcgttatcgggatgaggtgagcctgaagacagcaattatgagcttcatcaatgccgtgctgtcccaaggagcgggggtggaatcactcgatttcaggctacacctgcgctatgaattcctcatgttgggtatacagcccgtcattgataagttgagagaacacgagaactcgactctggatagacatctggatttctttgaaatgctcaggaacgaggacgagctcgagtttgccaaacggttcgagctggtccatatagacacgaaatcggcaacacagatgtttgaactcactcgtaagcggcttacacattctgaagcctatccacacttcatgagcattctacaccattgcctgcaaatgccttacaaaaggagtggaaacactgtgcaatactggttactgctcgatcgcatcattcagcagattgtcatacagaacgataaaggccaggaccctgactctacgcctctcgaaaactttaacattaaaaatgtagtgagaatgcttgttaatgagaatgaggttaaacagtggaaggaacaggccgagaaaatgcggaaggagcacaatgaattacaacaaaagctggaaaaaaaggaacgggagtgcgatgctaagacacaggaaaaagaggagatgatgcaaaccctgaataaaatgaaggaaaagttagagaaagagaccaccgagcataaacaggttaagcagcaagtggcggatctgactgcccagctccacgagctgtcgcgaagagcagtgtgcgcctctataccaggcggcccatcccctggagccccagggggcccctttccctcttccgtgcccgggagtctgctgccgcctccccctcccccacctctgcccgggggcatgctccctcccccaccaccccccctccccccggggggccctcctcccccccctgggcccccccccttgggagccatcatgcctcctccaggcgcccccatgggtctggcactgaagaagaagagtattccccaaccgacaaatgccctcaagtcattcaactggtcaaaactccccgaaaacaagttagaaggcacagtatggacagagatagacgacacaaaagtatttaagatcttggaccttgaggacctagaaagaacattctctgcttatcagaggcagcaggacttcttcgtcaattctaattctaagcagaaggaggcggacgcaatcgatgacaccttatccagtaagttgaaagtaaaggagttgagcgtgattgatggccggcgcgcgcagaattgtaatatattgttatcccggctgaagctttctaatgatgaaataaaacgggccatactcaccatggacgagcaggaggacctccccaaagacatgctagaacagttgctcaaattcgtgccggaaaagtcggacatcgaccttttggaggaacacaaacacgaattagataggatggctaaagctgatagatttttgttcgaaatgtcacgaattaaccattaccagcagaggctgcaatccctttacttcaagaaaaaattcgcggagagagtggcagaagtgaagcctaaagtggaagctattcgctctggcagcgaagaagtcttccgctccggcgccttgaagcagctgctggaggttgttttggccttcggtaattatatgaacaaaggacagagggggaatgcctacggttttaagatcagcagtcttaataaaatagccgataccaagtcatcaatcgacaagaacatcacactcctccattaccttataaccatcgtggagaataagtaccccagtgtccttaatttgaacgaggaactgcgcgatatcccccaggctgccaaggttaacatgacggagctagacaaggagatttcaaccttgcgctcgggactgaaggcagttgagaccgaactagaataccagaagtcacaaccaccacaaccaggcgataaatttgtttccgtggtctcgcagtttatcactgtggctagctttagcttcagtgacgtcgaagatctgttggccgaggcaaaggatttgttcaccaaggccgtaaaacacttcggcgaggaagccggcaagatccagccggatgagtttttcgggatcttcgaccagttccttcaagcagtgagcgaggccaagcaggagaatgagaacatgcggaagaagaaagaagaggaggaaagacgggcgaggatggaggcccagttgaaagagcagagagagcgcgagcgcaaaatgcgtaaggccaaggagaactcagaagagagcggcgagttcgacgaccttgtgagcgctcttcggtctggagaggtatttgataaggacttgtcgaaactgaagcggaataggaagcggatcacaaatcaaatgaccgatagtagccgtgagcgcccaatcactaagcttaatttctag

SEQ ID NO: 114801 - DNA, 3207 bp, synthetic construct
  misc_feature 1..3207: note = Description of Artificial Sequence: Synthetic coding sequence
  source 1..3207: mol_type = other DNA
atggctcctcggaaacgttcccatcatggcctaggattcctgtgctgctttggagggagtgacatacctgagattaacctgcgggacaaccacccgctgcagtttatggagttcagctctccaatccccaatgccgaggagctgaacattagattcgctgagctcgtggacgagctggacctgacggataaaaaccgagaggccatgtttgcgttgccccctgagaaaaaatggcaaatatattgctccaagaagaaggaacaggaggaccccaacaagttggctaccagctggcccgattattacatcgaccggattaattcaatggcagccatgcagagcctatatgcttttgatgaagaagagaccgaaatgcgaaaccaagtggtcgaagacctaaaaaccgcgctgagaactcaaccgatgcggttcgtgacacggtttatcgagttggagggtttaacctgcctcctgaactttctgcgaagcatggaccatgcaacctgtgagtcacggatccacacctctctgatcggctgcataaaagcgttgatgaacaattctcagggacgtgcccacgtgttggcacagcccgaagccattagcaccatagctcaaagtctccgaaccgagaacagcaagactaaggtggctgtcctcgaaattctgggagcagtttgccttgtgcctggcggacataaaaaggttctccaggccatgctccactatcaagtgtacgctgctgagcggactagattccaaactttactgaacgagcttgaccgaagccttggtcgatatagagacgaagtgaacctcaagacagccattatgtcattcattaacgcagttttgaatgctggcgcaggtgaggacaatctcgaatttagactgcatctgaggtacgaattcctaatgttgggcatccagcctgtgatagataagctcaggcagcacgagaatgctatactggataaacaccttgactttttcgaaatggtgaggaatgaagatgacctcgagttagccaggcggtttgacatggtccatattgatactaagagtgcctctcagatgtttgaactgattcataagaaactgaaatacaccgaggcttatccttgcctgctaagcgttttgcatcattgcttgcagatgccttataaacgaaatggaggctactttcagcagtggcagctgctggaccgaatccttcagcagatcgtactacaggacgaacggggcgtggaccccgatttggctcccctggagaattttaatgtgaagaatatcgtgaacatgctcatcaacgaaaatgaggtgaagcagtggcgggaccaggcggaaaagttcagaaaggagcacatggagctggtttcaagacttgagagaaaagagagagagtgtgaaaccaaaacattagagaaagaggagatgatgaggactctgaacaagatgaaagacaaattggcgcgggagagtcaagagctccgacaggcccgcggccaggtggcggaactcgtggcacagctaagtgaactgagcacaggccctgtgagttctcccccccctcccgggggaccacttaccctctcaagctccatgactaccaacgacctaccccccccacctccacctctgccttttgcttgttgtccccctccccccccgccacccctaccacctggaggtccaccaacaccgccaggtgcacctccttgcctggggatggggctccctctgccgcaggatccttacccctccagtgacgtgcctttgcggaaaaaacgcgtgccccagccctcacacccattgaaaagtttcaactgggtgaagctgaacgaggaacgcgtcccaggcactgtgtggaatgaaattgacgacatgcaggtcttcagaattctggatctagaagatttcgaaaagatgttctccgcgtatcagaggcatcagaaggagctcgggtcaacggaggacatttacttagccagtcgcaaagtcaaggagctgagtgttatcgatgggagacgtgcccaaaattgtatcatcctattaagcaaactgaaactgagcaacgaagagattcggcaggccatcttaaagatggatgaacaggaggacctggctaaagacatgctcgaacagctcctgaagtttatccctgagaaatcagatattgatctgcttgaggaacataagcacgaaatcgagagaatggcccgtgctgaccgctttctgtatgagatgtctaggatcgatcactatcaacaaaggctccaggcactcttcttcaaaaagaagttccaggagcgactggccgaggctaaaccgaaggtggaggccattttgctggcaagccgagagctcgtacggtccaaaagattgaggcagatgctggaggtaattctcgctatcgggaactttatgaacaaaggtcaacgggggggtgcctacggctttagagtcgccagcctgaacaagatagccgacaccaaatcctccatagacaggaacatatccctattgcattacctgatcatgattttagagaaacatttccccgatatactaaatatgccaagcgagcttcagcatctgccagaagccgccaaagtgaacttggccgagctagagaaagaagtggggaatctgcgacgggggctgcgtgcagtcgaggtcgagcttgaataccagcgccggcaggttagagaaccttcagataaattcgtccccgttatgagcgattttataaccgtgtcctcctttagctttagcgaacttgaagatcagcttaacgaggcccgcgataaatttgcgaaggcactgatgcacttcggggaacacgattctaagatgcaacccgacgaattctttggaatcttcgatacctttttacaggcattctccgaagctaggcaggatctggaagccatgaggcgtaggaaggaggaggaggaaaggcgtgcccggatggaagcaatgctcaaagaacagcgcgagagagaacgctggcagaggcagcgtaaagtgctggctgctggatcctcccttgaggagggtggagaatttgatgatctagtcagtgctttacggtcaggcgaagtcttcgacaaggacctgtgcaagttgaaaaggagtcgcaaacgctcaggctcccaggcccttgaagttactcgagaacgcgccatcaatcgcttaaactattag

SEQ ID NO: 114802 - DNA, 3207 bp, synthetic construct
  misc_feature 1..3207: note = Description of Artificial Sequence: Synthetic coding sequence
  source 1..3207: mol_type = other DNA
atggcccccagaaaaaggtctcaccacggcctggggttcctgtgttgcttcggggggtcggacattcccgaaatcaatctccgcgataaccatcccctgcagtttatggagtttagcagtcccattccaaacgccgaggagctgaacatccgcttcgccgagctggtggatgagctcgacctcacggataagaatagggaagctatgttcgccttaccccccgagaagaagtggcagatttactgcagtaaaaaaaaagagcaggaggacccaaataaactggctacctcatggcctgactactacatcgaccgtatcaatagcatggccgcgatgcaaagcctctatgctttcgacgaggaggaaaccgaaatgcgaaaccaggtggtggaagaccttaagacagcactacgtacccagccgatgcggttcgtcaccaggttcatagagctggaaggcctgacctgtttgctcaacttcttgcggtccatggaccatgcgacctgtgagtcccgaatccacacttctctgataggatgtatcaaagctcttatgaataatagccagggcagggcacacgtgctcgcccagccggaagctatttctaccatcgcccagtcgctgagaacagagaacagcaaaacaaaagttgctgtcttagaaatcttgggagctgtctgtctggttccagggggccacaagaaagttctgcaggcgatgctccattatcaggtgtatgcagccgagaggaccagattccagaccctcttaaacgagctggatagatctttggggagatatagggacgaggtcaacctgaagaccgccatcatgtcgtttataaatgctgtattgaacgccggcgccggagaagacaatttagagttcaggctccacctcagatacgaatttctgatgttgggaatacaaccagtgatcgataagctccggcagcacgaaaatgctatccttgataaacatctggatttcttcgagatggttcgtaatgaggacgacctcgagctggcaaggagattcgatatggtccacattgatactaagtccgcctctcagatgtttgagctgattcacaagaaactgaagtacaccgaggcgtacccctgtctgctgtctgtgctgcaccactgcctgcagatgccctacaagagaaacggcggttattttcagcagtggcagcttctcgatcggattctgcagcagatagtgctgcaagacgagcgaggagtagaccctgacctcgcccctctcgaaaacttcaatgtcaaaaatatcgttaacatgcttatcaacgaaaacgaggtgaagcagtggcgcgaccaggctgaaaagtttcgtaaagagcacatggaactggtgtcccgcctggagcgaaaagagcgggagtgcgagacaaaaacccttgaaaaagaagagatgatgagaacactgaacaagatgaaagataaactggcccgggagtcgcaggagctgcgacaagcacgcggtcaggtcgccgaattggtggcccagctgtcagaattaagtaccgggccagtgagctcaccgccaccacccgggggacccttgactctctctagttccatgactaccaacgatctccctccacccccaccccctctcccttttgcttgttgtcctcctccgcctcctccccccctaccaccagggggcccacctactcctccaggtgccccgccctgccttgggatgggcctccctcttcctcaggacccctatcccagtagcgacgtaccccttcgaaaaaagcgggtccctcaaccctcccaccctttaaagagtttcaactgggttaagttgaacgaggaacgagtgccaggtactgtgtggaacgaaatcgacgatatgcaggtgttcaggatactggacctggaggatttcgagaagatgttttcagcataccagaggcatcagaaggagctggggagcactgaagatatttacctcgcttcacggaaggtcaaggaactgagcgtgattgacgggagaagagcccaaaactgcattatcctgcttagcaagctcaagctgtccaatgaggaaattagacaagcgatcttgaagatggacgagcaggaggacttggctaaagacatgcttgagcaattgttgaaattcatcccggagaaaagtgacattgatttgctcgaagaacacaagcacgaaatcgaaagaatggctagggccgacaggttcctctacgaaatgtctcggattgaccattatcaacagaggctgcaggccctgttttttaagaaaaaattccaagagcgtctggccgaggctaagccaaaagtggaggcgattttgttagcatctcgcgaattagtcaggtctaaaaggctgagacagatgctggaggtgattctggcaatagggaatttcatgaacaagggacaaaggggaggtgcctacggattccgagttgcttccctgaacaaaattgctgataccaagagcagtatagataggaatatttccttgctccactacctgattatgatcctggaaaagcactttcccgacatattaaatatgcccagcgagctccagcatttgcccgaagcagccaaggttaacctagccgaactcgaaaaagaagtcgggaatctaagaagaggcctgcgcgccgtcgaagttgaactggaataccagagacgtcaggtcagagaaccttcggataaattcgttcccgttatgagtgactttatcacagtgagttccttcagtttttctgagctggaagaccagcttaatgaggcccgtgacaagtttgcgaaggctcttatgcactttggggagcatgattctaagatgcagccggacgaattctttggtatcttcgatacttttctccaggctttctcagaggcccgccaggacctggaagcaatgcgcaggaggaaagaggaggaggagcgacgcgctagaatggaagctatgctgaaagaacagcgcgagcgggagaggtggcagaggcagcggaaagtgctggctgccggtagctctctggaagaaggaggcgagtttgatgatctggtgtccgccttaagatctggggaagtctttgataaggatctgtgcaagcttaagcggagtaggaagcggtctgggtcccaggccctggaagttacaagggagagagctataaataggctcaactattag

SEQ ID NO: 114803 - DNA, 399 bp, synthetic construct
  misc_feature 1..399: note = Description of Artificial Sequence: Synthetic coding sequence
  source 1..399: mol_type = other DNA
atggctcctagaaagcgttctcaccacgggctcggcttcctgtgctgcttcggtggtagcgatatccccgagatcaatctccgggataatcatccccttcagtttatggagtttagcagccccatccccaacgcagaggagctgaacatacgatttgcagagctggtggacgagttagacctgacggacaaaaatcgagaggcaatgtttgctctccctcccgagaagaagtggcaaatctactgttcaaagaagaaggtgcctagcctgactccactggcgacaagccagggctcatggcacggcgtggcccttgcggcgcttgcctgttcatgtattcatctaatgtttatcacctgccaaccgtgctccaggtgctggaggaataattcagaatag

SEQ ID NO: 114804 - DNA, 3204 bp, synthetic construct
  misc_feature 1..3204: note = Description of Artificial Sequence: Synthetic coding sequence
  source 1..3204: mol_type = other DNA
atggcccctcgcaagcggagccatcacggactgggctttctctgctgctttggcggaagcgatatccctgagatcaatctacgtgataaccatcctcttcagttcatggaattctcttcacctattccgaacgcagaagaactgaatatcagatttgcagagctggtcgacgaattggatcttactgataagaatagagaagccatgttcgctcttcctcctgagaagaagtggcagatatactgtagtaaaaagaaggagcaggaagaccccaataagcttgccacctcttggcctgattattatattgatcgtataaatagcatggccgccatgcagtccttgtacgccttcgatgaggaggagacagagatgcgcaaccaagttgtggaagatctgaagacagcattgaggacccagcccatgagatttgttaccagatttatcgagctcgaaggtctgacatgtctgctcaattttttgcggtcaatggaccacgccacctgtgaatcacgcatccacacctcccttatcggatgcataaaggcgctaatgaacaactcccaggggcgtgctcatgttttggcccaaccagaggccatatcaaccattgctcagtcgttgagaactgagaatagtaagactaaagtagctgtgcttgaaatcctgggcgccgtctgcctcgtccccgggggtcacaagaaggtgttacaggcaatgttgcattatcaggtctatgcggctgaacggactaggttccagacccttcttaacgaactagaccgctccctcgggcgatatcgggacgaggtgaacttgaagacagccatcatgagtttcatcaacgccgtgctaaatgcaggcgctggggaagataacttggagttcagactgcacctgcgttacgagttcttgatgctgggcatccagccagtaatcgataagctgcgacagcatgaaaatgccatcttggacaagcaccttgatttttttgagatggtgaggaacgaggatgaccttgagctggcccgtaggttcgatatggtgcatatcgatactaaaagtgcttcacaaatgttcgagctgattcataagaagctgaagtacactgaagcctacccttgtctgctttcagtgctccaccactgcctgcagatgccgtataagcgtaacgggggctacttccagcagtggcagttgcttgacaggatcttgcaacaaatagttcttcaggacgagaggggagttgacccggatttagcacccctggagaacttcaacgtgaagaacatagtgaatatgctgattaacgagaacgaagtcaaacagtggagggatcaagcagagaagttccggaaagagcatatggagttagtgtcaaggcttgagcggaaagaaagagaatgcgagacaaaaaccttagagaaggaagagatgatgcgcaccttgaataagatgaaagataagctggcccgtgagtcccaggagcttcgccaggcacggggccaagtggccgagttagtggcccagctatccgagttgtctaccggccctgtgtcatctccgcctcctccgggaggcccactgacactgagctcctcgatgaccactaacgatctgccaccgccacctccgccccttccttttgcctgctgccctccaccaccccctcctcctctgccccctggcgggcctcctacgccccccggagcacccccttgtctcggcatgggcctccccctgccccaagacccttacccttcttccgacgtgcctctgcgcaagaaacgcgtgcctcagcctagccacccactcaagtctttcaactgggtgaaactgaatgaagaaagggttccaggaaccgtttggaatgagatcgatgatatgcaggtttttcggatactggacttggaagattttgaaaagatgttttctgcttaccagaggcatcaaaaagagcttggatccaccgaggacatctacctagcgagtcggaaagttaaggaattgagcgtgatagacggaagaagagcccagaattgtattatcctcttgagtaagctgaagctcagtaacgaagagatcagacaggctattctgaagatggacgagcaggaagacctggcaaaggacatgttggagcagctgctcaaatttattccagagaagtccgatatagacctcttggaggagcataagcacgagattgaacgaatggcacgggccgaccgcttcctgtatgaaatgagtcggattgaccactaccaacaacggctacaggctctgttctttaaaaagaagtttcaggagaggctagcggaggccaaaccaaaggttgaagccattctgctggcttctcgggagctggtgaggtccaaacggctgagacagatgctggaggtaattttggccattggcaactttatgaacaagggccagcgcggaggagcgtatggcttccgcgtggcatccctcaacaagatagcagatacgaagtcatcaatcgataggaatatcagcctgctgcactacctgatcatgatccttgaaaaacatttcccagatattctgaacatgccttccgagctacagcacctgcctgaagctgcgaaagtaaacttggccgaactcgagaaggaagttggcaatctgcgtaggggactcagagctgtcgaggtgctggaataccaacgcaggcaggtcagggagccttccgataaatttgtaccagtcatgtccgattttattactgtgtcttctttctcgttctcagagttagaagaccaactgaacgaagcacgcgataaattcgccaaggctcttatgcatttcggcgagcatgacagtaagatgcagcccgacgaatttttcggtattttcgacacatttctgcaagccttttctgaggcaaggcaggatctagaagcgatgagacgacgaaaagaggaagaagagcgtcgtgctcgtatggaagctatgctgaaagagcagcgggaaagggaaaggtggcaacgacagcgaaaagtcctggctgccggcagttccctggaggaaggaggcgagttcgatgacctggtgagcgcgctaaggagcggcgaagtgtttgacaaagacctgtgcaagctcaagcgtagccgaaagcgctcgggaagccaggccctggaagtcacacgcgaacgcgccattaacaggcttaactactag

SEQ ID NO: 114805 - DNA, 1062 bp, synthetic construct
  misc_feature 1..1062: note = Description of Artificial Sequence: Synthetic coding sequence
  source 1..1062: mol_type = other DNA
atgggggccctgctctgcgatcaccggtcctgtcggccgatatccctgaccgtcgccaaatgttgggatccaacaccccggtcatactttacagtgccacgggccgacccagtcagaccaattgaccccgccgcttggctatcacacactgctgctcttacaggcgccttgccacggtacgagctggaagaagctcccctcacggtgaaatccgatatgtcagccgtggtgagagtaatgcagttgcccgacagcggtctcgagatccgtgatagaatgtggctaaaaattaccattgctaacgccgtgatcggcgctgatgtagtggattggctgtacacccacgtggaggggttcaaggagaggagggaggcacgcaaatacgctagcagtctcctgaagcacggattcctgaggcacacagttaacaaaatcacgttctcggagcagtgttactatgtgttcggtgacctgtgtagcaacctggcgacacttaacctcaattcaggatcttcaggcacttcagaccaggatacccttgcgccattgcctcaccctgccgccccctggcctttggggcagggatacccttaccagtatcctggcccaccaccctgctttcctcctgcttatcaggatcctggtttctcctatgggagtggatctacgggttctcagcagagcgagggctcaaagtctagcgggtcaacccgttcctctcgccgagctcccgggcgagagaaggagcgcagggcagccggtgcagggggatctgggtccgaatccgaccacactgccccttcaggggttggctccagctggcgcgagcgccccgctggacaactgtcacgtggtagctcccctaggtcccaggctagtgcaaccgctccagggctcccccctccgcatccaaccacaaaagcttacacagttgttgggggacctccaggcgggccacctgtgcgggagttggcagcagtgccacctgagttgactggcagtagacaatctttccagaaagccatgggcaatccctgcgaattctttgtggatatcatgtag

SEQ ID NO: 114806 - DNA, 1335 bp, synthetic construct
  misc_feature 1..1335: note = Description of Artificial Sequence: Synthetic coding sequence
  source 1..1335: mol_type = other DNA
atggccgagaccaaaattatttaccacatggacgaagaggaaacgccttacctggtgaagcttccggtggctcccgaacgtgtcacgctggcagacttcaagaacgtgctgagcaatcgccctgttcatgcttacaaatttttctttaagagcatggatcaggactttggcgtagtgaaggaggagatattcgatgacaacgctaaactgccttgcttcaatggacgcgtggtttcatggcttgtactagctgagggcgctcactctgacgccggctctcaggggacggacagccacacggacttaccaccacccctggagcgcaccggtggcattggcgattctagacctccatcctttcatcccaacgtggcgtccagccgcgatggcatggacaatgagactggtactgagtctatggtctctcataggcgggaaagggccagacggaggaatcgggaagaggctgcacggacgaacggtcacccgcggggggaccgcaggcgggatgtcgggctaccaccagactccgcttccacagctctatccagcgaacttgagtcttctagcttcgtggactcggatgaagatggatccacaagtcgattgtctagttccaccgaacagtcaaccagctccaggctgattcgaaaatacgctagtagtttattaaaacatggcttccttcgtcacaccgtgaataagatcactttcagcgaacaatgttattacgttttcggtgacctctgcagcaatcttgcaaccctgaatctgaacagcggcagcagtgggaccagcgaccaggataccctggccccactcccccatcctgccgcaccatggcctcttggccaaggatatccctatcagtaccctggaccacccccttgctttcctcccgcgtaccaggaccctgggttctcttatggctctgggtcaaccggttcacagcagtctgaagggagtaagagcagtggcagcacaaggagttctaggagagcacccgggagggagaaggagaggcgagccgcaggagctggagggagtgggtcagaatctgaccacaccgcaccttctggggtgggtagttcgtggagagagagacccgccgggcaactctctcgcgggagtagcccccgctcacaagcatctgcaaccgctcctggcttacctcccccccacccaacaaccaaggcctacaccgtggtgggcggtccccccgggggccctcccgtgcgggaactggctgcggtcccccctgagttgacgggatccagacaaagttttcagaaggctatgggcaacccatgcgagttctttgtggacataatgtag

SEQ ID NO: 114807 - DNA, 2088 bp, synthetic construct
  misc_feature 1..2088: note = Description of Artificial Sequence: Synthetic coding sequence
  source 1..2088: mol_type = other DNA
atggcagagactaaaattatctaccacatggacgaagaagaaaccccttaccttgtcaagcttcccgtggctcctgaacgagtgacactcgcggatttcaaaaatgtgctgtccaataggccggttcatgcttataagttcttcttcaagtctatggaccaggatttcggagtggtcaaagaggagatttttgatgacaacgccaagctgccctgctttaacggaagagttgtctcatggcttgtactggctgagggagcccacagcgacgcgggctcacagggaacagatagtcatacggacctgccaccccctctggagagaacaggaggcataggcgactcacgtcccccttccttccaccccaatgtggcttccagtcgcgatggaatggacaacgagaccggcactgaaagtatggtatcccaccggcgcgagagagcccggagacggaatcgtgaagaggctgcacgcactaacgggcatccccgcggagatcggaggcgggacgttgggcttccccctgattccgccagcacagctttgtctagcgagctggaaagtagcagtttcgtggactctgatgaggatggatccacctccagactatcgagttctacagagcagagtacgtcatcccgactcatcaggaagcataagcgcaggcgacggaagcagaggctgagacaggctgacagggcctcgagcttctccagtattacagactctaccatgtccctcaatattgtaactgtaactcttaacatggagcgtcatcatttcctagggatttcaatcgttggacaaagtaacgataggggggatggtggtatctatattggctcgatcatgaagggaggcgccgtagccgccgacgggagaatagagcccggagatatgctgttgcaagtaaatgatgtgaattttgagaacatgtcaaacgacgacgcagtgcgggtgttgcgagagatcgtgagccagactggaccaataagcctaacagtggctaaatgttgggacccaaccccgcggtcatatttcacggtgccgcgcgccgaccccgtacgacctatcgatccagctgcatggttaagccataccgcagccctgacgggcgcactgccgcggtatggcaccagcccttgcagttcggcggtcactcgcacaagctctagctcgctcactagcagtgtccctggggccccccagctagaagaggcccccctgactgtgaaatctgatatgtcagccgtggttcgggtgatgcaacttcccgacagcggactcgaaattagagaccggatgtggttaaagatcaccatcgctaacgccgtcataggcgcggatgtggttgattggttgtatacccacgtcgaggggttcaaggaacggagggaagcgcgaaagtatgcttcctcattgttaaagcacggttttctgcgacacactgtgaataagattacattcagtgagcagtgctattacgtgtttggggatctgtgctccaatttggccaccctgaatttaaactccggaagctccggcacgtccgaccaggacacactggcccccttacctcatccggccgccccctggccactgggacaggggtacccctatcagtatcctggaccaccaccttgctttccgcccgcttaccaggacccgggattcagctacggcagcggaagcactgggtcacagcagagtgagggaagcaagagctctggctcaacacggtcttccagacgcgctcccggaagggagaaagagaggcgcgcggctggggcaggcggaagcggttccgaaagcgaccacaccgccccaagtggggtcggttcatcctggcgcgaacgccccgccgggcaattgtcccgcggttccagtccacggagccaggcaagcgccacagccccaggcctccctcccccccacccgacaacaaaagcttacaccgtggttggcgggccacccggaggcccacctgttcgggaactggcggccgtaccgccagaactgaccggaagtaggcagagctttcagaaagctatggggaacccttgtgagtttttcgtggacatcatgtag

SEQ ID NO: 114808 - DNA, 2013 bp, synthetic construct
  misc_feature 1..2013: note = Description of Artificial Sequence: Synthetic coding sequence
  source 1..2013: mol_type = other DNA
atggcagagacgaaaataatctaccatatggacgaagaggaaaccccatacctggttaaactccccgtggcccctgaacgcgtgacactcgcagacttcaagaatgtgctgagcaaccgcccagtgcatgcctacaagttttttttcaaatccatggaccaggacttcggcgtagttaaggaagaaatttttgatgacaatgcaaagcttccgtgtttcaatggcagagtggtgtcttggctggttctggccgagggggctcactccgacgcgggttctcaaggaaccgactcccacaccgaccttcctccacccttagaaagaaccggggggattggggacagccgtcccccctcttttcatccaaatgtggcctcctcaagagacggtatggacaatgaaacggggaccgaaagcatggtgagtcaccgcagagagcgggcccggcggcgcaacagagaagaagccgcgcgaacgaatggccatccaaggggtgatcggcggcgcgatgtcggcctccctccggactctgctagcaccgcacttagcagcgagcttgaatcaagtagttttgtcgactccgacgaagatggctccacctcgaggctctcctctagcacagagcaatcaacaagctctcgccttattcggaagcacaaaagaagaagacggaagcagcggctgaggcaagcggatcgggccagctcattttcctccattactgactccactatgagtcttaacattgtcactgtgacacttaatatggaacgccatcactttctgggtatcagtatagtcgggcagagcaacgacaggggagatggcggtatttacattggttctatcatgaagggtggcgcagtcgctgccgacgggcggattgaaccaggagacatgctcctccaggttaatgacgttaattttgaaaacatgtctaacgatgacgccgtccgggtactgcgagagatcgtaagccagacgggacctatcagcctgacagtggccaaatgttgggatccaacaccccggagttatttcacagttcctcgcgctgaccccgttcgacccatcgatcctgctgcatggctcagccacactgcggcccttaccggtgcattacctaggtacgagctggaggaagcgccgctgactgtcaaaagtgatatgagcgcagtggttcgggtgatgcagctgcccgactccggcctcgaaatcagggacaggatgtggttaaaaatcacaattgcaaatgccgtaattggggccgacgtggtcgattggctctacacccatgtagaagggtttaaagaaagaagagaggctcgaaagtacgcttcctcgcttctaaaacatggctttctacgtcatactgtgaacaagattacattctctgaacagtgctattacgtttttggcgatttatgctcaaatttagccacgctgaaccttaattctggctcctcaggtacctctgatcaggacactctcgctcctcttccacatccagcagcaccttggcccctcggccaggggtatccctaccagtatcctgggccccccccttgtttcccacctgcttaccaagacccaggcttttcttatgggtcgggctctacgggatctcagcagtccgagggctccaagagttctgggtccaccaggtcttcccggagggcccctggcagggagaaggaacggcgggccgctggagctgggggcagtggttctgaatcagaccacactgcccccagtggtgtggggtcttcttggagggagcggcccgctggacagctgagtcgtggatcgtcacctcgcagtcaggcatctgcaacagccccaggactgcccccaccacatcccaccactaaagcctataccgttgtgggaggacctccgggcggtccacccgtccgggagctggctgccgtcccccctgagcttaccggatctcgccaatcatttcagaaagcgatggggaacccttgtgaattttttgtcgatataatgtag

SEQ ID NO: 114809 - DNA, 2151 bp, synthetic construct
  misc_feature 1..2151: note = Description of Artificial Sequence: Synthetic coding sequence
  source 1..2151: mol_type = other DNA
atgggtgagaccaaaattatatatcacctggatgggcaggagacaccctaccttgttaaactgcccctgcctgcagagagagttaccttggccgacttcaaaggcgtgttgcagcggcccagctataaatttttctttaagagtatggatgatgatttcggcgtcgttaaggaggagataagcgatgacaatgccaaactgccctgcttcaacgggcgggtggtgtcatggctggtgtctgcggaggggtctcatcccgatccagccccattctgcgctgacaatccaagcgagttgccccctccaatggagagaacgggtgggatcggcgactcacgccctcctagcttccatccccacgctggagggggatctcaagagaatctggacaacgacactgagactgattctcttgtatcagcacagcgggagagaccacggagacgggatggtcctgaacacgccaccagacttaatggcaccgcaaaaggagaacgtaggagggaacccggtggttacgacagttcttcaacgctgatgagcagtgagctggagaccacttcattttttgatagcgatgaagacgactcaacatctcggtttagttcttccaccgaacagagtagcgctagccgcctgatgcgcagacacaaacggagacggaggaaacagaaagtgagtcggattgagagatcgtccagcttttccagtatcactgactctaccatgtcccttaacatcattacagtcacgctcaatatggaaaagtacaactttctcgggattagcattgtcgggcagtctaatgagaggggagatggcggcatttacatcggatctatcatgaaggggggagctgtggccgctgacggtcgtattgagcctggagacatgctgttgcaggtgaatgagatcaatttcgagaacatgtcaaacgacgatgctgtaagagtgcttcgcgaaatcgttcacaagccaggccctattactctaaccgtggccaagtgctgggacccctctcctcgaggatgcttcacattgccccgctccgaacccatcagacctattgatccagctgcctgggtgtcccacactgcagccatgactggtacgttccccgcatatgggatgagtccttcactttccacaataacaagcactagcagcagcataaccagcagcatccccgatactgagcgcctggacgactttcacttaagcattcacagtgatatggctgcgatcgtgaaggcaatggcatcgcccgaatccgggttggaggtgagggatcgtatgtggttgaaaataaccattcctaatgcgttcatcggctcggatgtggtggactggctctaccacaacgtcgaaggcttcaccgatcggagggaagctaggaaatacgcgagcaatttgctgaaagctggttttataaggcatacagtgaacaagattaccttctccgagcagtgttattatattttcggcgacctttgtgggaacatggccaacttaagtcttcacgaccacgatggtagttcaggtgccagcgatcaggataccctggcaccactgccacaccccggggcagccccatggcctatggcattcccgtaccagtacccaccccccccgcatccctataatccccacccagggtttccagaactgggatactcttacggtggaggctcagctagttcacaacattcagagggcagtagatctagcggctccaacaggagcggcagtgatagaagaaaagaaaaagaccctaaagccggcgacagcaagagcggaggctctgggtctgagtcagaccatacaacccgtagtagtctgcggggacctcgcgagagagcgcctagcgagaggagtgggcctgcggcgtccgagcattcccaccgttcgcaccactctctggcctcttcattaaggagtcaccatacccatccatcctacggccctccaggcgtacccccactttatgggccccctatgcttatgatgcctcccccccccgcggctatggggccacccggagcccccccagggcgggatctggcttctgtgccacccgagctgactgcatcacgtcagtcattcagaatggcgatgggcaaccccagcgaattcttcgtagatgttatgtag

SEQ ID NO: 114810 - DNA, 2172 bp, synthetic construct
  misc_feature 1..2172: note = Description of Artificial Sequence: Synthetic coding sequence
  source 1..2172: mol_type = other DNA
atgggggagactaagatcatttatcacctggacgggcaggagaccccttacctcgtcaagctgcccttaccggccgaacgagtaacactggctgattttaagggagtcctgcagcggccaagctacaaattcttcttcaaatctatggacgatgatttcggcgtggtcaaagaggagatttcagacgacaacgcaaagctgccatgttttaatgggcgggtggtttcttggcttgtgagtgctgagggctcccatccggatccagctcctttctgcgctgataaccccagcgaattgcctcctccaatggaacgtactggagggatcggagactcccgtccccccagctttcaccctcacgcaggggggggctcacaggagaacctggacaacgatacagaaactgatagtctggtgtcagcacaaagggagagacctcgcaggcgagatggacctgaacacgccacgcgactaaatggaacagccaagggggagaggcgccgcgagcctggagggtatgactccagttccacattgatgtcaagcgagctggaaacgacatctttttttgattccgatgaggatgacagtacttcccgcttttcttcttccacagaacagtcttctgcgtcccgcctgatgcgaaggcataaacggcgaaggcgaaagcaaaaggtctcacgtattgaaaggagcagtagctttagctccatcacagatagtaccatgagcttgaacatcatcacagtcacactcaacatggaaaagtataactttttaggtatctccatcgtgggccaatcaaatgaaagaggcgacggcgggatctatatcggctccatcatgaagggcggggccgttgccgccgacggccgtatcgaacctggagacatgctcctgcaggtgaacgaaattaactttgagaacatgagtaatgatgacgccgtacgggtgcttcgcgagatcgttcataagccaggcccaataaccctgacagtggccaagtgttgggacccttcccccagaggttgttttactctgccgaggagcgagcccatccgcccaatagatccggctgcctgggtcagccacaccgctgctatgacaggcaccttcccagcctacggcatgtcaccgtctctgagcacgattaccagcacaagcagctccataacttccagtatcccagacaccgaacgcctggacgatttccacctttccatacactctgacatggccgcaattgttaaagcgatggcgagtccagaatcgggtttggaggtgcgcgatcggatgtggcttaagatcactataccgaatgcttttatagggtccgatgttgtggattggctgtaccacaatgtggaggggtttaccgatcgtcgggaggccaggaagtacgccagcaacctgctcaaagcgggtttcatcaggcacaccgttaataaaatcacattttccgagcagtgctattacatttttggtgacctttgcggcaatatggctaacctatcattacacgaccacgacgggtcctcaggcgcctccgatcaggataccctggcccctttgccgcatcccggtgcggccccttggccaatggctttcccataccaataccctccccctccccatccatacaacccacaccccgggtttccagaactggggtattcatacgggggcggcagcgctagctcacagcattctgagggttctaggtcctccggttcaaataggtccggtagcgatcgtaggaaggagaaggacccgaaagctggggacagtaagtccggcggttccggttccgagtccgatcataccaccaggtccagtctacgcggacccagagagagagcgccatcggaaaggtctggaccagcggcttccgagcatagccatcgcagtcatcatagccttgcctcctctctccgcagccatcatactcatccctcgtacgggccacccggggtgccgccgctgtatggaccacctatgctcatgatgccccccccacctgcagccatgggtcccccgggtgcccccccaggtcgggatcttgcgtctgtgccgcctgaactcaccgccagcagacagagcttccgcatggccatgggtaatccttctgagtttttcgtcgacgttatggtgttacggggatggggcgcctag

SEQ ID NO: 114811 - DNA, 2100 bp, synthetic construct
  misc_feature 1..2100: note = Description of Artificial Sequence: Synthetic coding sequence
  source 1..2100: mol_type = other DNA
atgggggaaacaaaaatcatttaccatctagacggccaagaaacaccctatctggtgaaacttccattgcctgctgaacgggtcaccttagcggattttaagggcgtcctccagagacctagctacaagtttttcttcaagtcgatggacgacgattttggtgtcgtgaaggaggaaatctctgacgacaatgccaagctcccatgcttcaacggccgggtggtgtcctggctcgtgtccgcagaaggaagccacccggaccccgctcctttttgcgcggataaccctagtgaactgcccccaccaatggagcgcacaggaggaatcggcgactctcgacccccctcgttccatccccacgcgggcggcggcagccaggaaaatctggacaacgacacggaaacagacagtctagtgtctgcccagcgcgaaaggcctagaaggcgcgatggcccagagcatgccaccaggttaaatggcacagcaaagggcgaacggcggagagaacctggcggatacgactccagttccaccctcatgtctagtgaacttgagaccacatccttttttgactctgatgaagacgacagcacatcacgtttttcaagtagcacagaacagagctcagcttcaagattgatgagacgccataagcggcggcggcgaaagcagaaggtgtcacggattgaaaggagctcatctttttctagcattaccgactccaccatgtcattgaatattattacagtaactctgaacatggagaagtataattttcttggtattagcattgtaggccagtcgaacgaaaggggcgatggcgggatctacattggcagcatcatgaagggtggtgccgtggccgcagacggtcgaatcgaaccaggagacatgctgctgcaagtgaacgaaattaatttcgagaatatgtcgaacgacgatgctgtccgcgtgctccgggagatcgtacacaaaccaggccccattactctgactgtcgcgaagtgctgggatccctcaccaaggggctgtttcacgctgccccggaccatgaccggtaccttccccgcatacggaatgagcccttcactgagcaccattacctcgacctcaagctcaattaccagtagtattcccgataccgagcggctggatgacttccacctctctattcatagcgacatggcggccattgtgaaggccatggccagccctgagagcggattggaagtgagagacaggatgtggctcaaaattacaataccaaatgccttcatcggaagtgatgtggtcgattggctatatcacaacgtcgaaggtttcactgaccgtcgggaggcacgtaagtacgcctccaacctcctgaaggccggctttatccgccacacagtgaataagatcacattcagtgagcagtgttattatatttttggcgacctgtgtgggaatatggccaacctatcattgcacgatcacgatggatcgtcgggagcttcagatcaagacacccttgcccctttgcctcatcctggcgctgcaccgtggcctatggctttcccgtatcagtaccctcccccaccccatccttataatccacatcccggcttcccagagctgggatactcctacggaggaggttccgccagttctcagcactccgagggaagtcggtcctccgggagcaatcggtccggctccgatcgccggaaggaaaaagatccgaaagccggagatagcaaatcaggcggctccggatcagaaagtgaccacaccactcgttcaagtctgaggggcccaagagagagagccccatccgagagaagtgggcctgcagcatcggagcattcacacagatcccaccattcactggccagttccctaagaagccatcacacccacccttcatacggcccaccaggggtaccgccactttacgggccgcccatgttaatgatgcctccccctccagccgccatggggccacctggtgcccctcctgggagagacctcgctagtgtcccgcctgaactgaccgcatcccgccaatcgtttcgaatggccatgggtaatccctccgagtttttcgtcgatgttatgtag

SEQ ID NO: 114812 - DNA, 315 bp, synthetic construct
  misc_feature 1..315: note = Description of Artificial Sequence: Synthetic coding sequence
  source 1..315: mol_type = other DNA
atgccagaggcccacatgcaaccggcaaaacttcagacatcactgccaaccacagaccatggttccaagaagccagtaagctgttatctcccccccctctccaatgcccatcctatgtgcatcgaagttcagaacgcacaaaattgttcctccgctgcagccacgctggagccatcaattatctccgatacttgtttttacaaaccaatcaccaaagatcaactgtccagccgctctgagctcaatacagtacggttgaagtgtctgaacagcctgagaggctggaagatcttgaatcagctttccctgacctag

SEQ ID NO: 114813 - DNA, 1437 bp, synthetic construct
  misc_feature 1..1437: note = Description of Artificial Sequence: Synthetic coding sequence
  source 1..1437: mol_type = other DNA
atgggttctaggtggtctagtgaagaggaacgccagcccctattgggccccggcctggggcccggcttaggggctagctggcgtagtcgagaagcggcagcagctgcactgcccgccgctgtccccggccccggtagagtctatggccgccgctggctggttctgttgcttttttctctcctggccttcgtccagggcctcgtctggaacacatggggacctatccagaacagcgccaggcaagcctacggcttcagtagctgggacattgcattgttagtgctctggggaccgatcggcttcctcccctgcttcgcgtttatgtggcttctcgacaagcgtggattgcgcattaccgttctgctgacctcctttctgatggtgttggggaccggcctccgttgcattcctataagcgacctaatcctgaagaggagactgattcatggcggccagatgctcaacgggctcgccgggccaacagtaatgaacgctgcaccttttctttcgacaacctggttttcagccgacgagcgcgccactgcaaccgctatcgcatccatgctcagttacctcgggggcgcctgcgcctttctggtggggccactggtggtgcctgcccctaatggtaccagccccttgctggctgccgagtccagccgggctcacatcaaagacagaatcgaggctgtcctgtatgccgagtttggcgttgtctgcctgatcttctccgctactttggcttatttccctcccagaccccccctgccaccttccgtagctgcagcttcgcaacgtcttagctatcgtcgatccgtgtgtagacttctctccaatttccggtttttaatgatcgccctcgcgtatgccatccccctcggagtgtttgccggctggtccggtgtgctcgacctgatcctgacacctgcacacgttagtcaagtggacgccggatggatcgggttttggtcaatagttggcggctgcgtggtgggcatcgccatggctcggtttgccgacttcataagagggatgttaaagctgatcctgctccttttattttccggggccacactatcttctacctggttcaccctcacctgtcttaactcaataacgcatttgccactgactacagttaccttatacgcctcttgcattcttctcggagtctttttgaattcctctgtcccaatttttttcgagttgttcgtagaaactgtatatcctgtgccagagggaattacttgcggggtggtgacctttctgagcaatatgtttatgggtgtgctcctgttcttcctgaccttttatcacaccgagctctcttggttcaactggtgcctgcctggatcctgtctgcttagccttctcctgatcctctgcttccgcgagtcttatgacagactgtacctcgacgtggtggtttccgtgtag

SEQ ID NO: 114814 - DNA, 1644 bp, synthetic construct
  misc_feature 1..1644: note = Description of Artificial Sequence: Synthetic coding sequence
  source 1..1644: mol_type = other DNA
atgcctggcgggggcccccagggggcacccgccgcagccggcggaggcggcgtgagtcacagggccggatcgcgagactgtctgccccctgctgcttgcttccgtagacgccgactggcacgacgccccggttacatgaggtcttccacaggcccgggcatcggatttctaagtcctgcagtgggaacattgtttcggttccctgggggggtgagtggagaggaatcccaccactccgagtcaagggcacgccagtgcggtcttgatagccgcggtctgctcgtacgaagcccagtctcaaagagtgcagctgcaccaacagtaaccagcgttcgggggacttcagctcacttcggcattcagcttcggggggggacacggcttcctgacaggctgtcctggccttgtggtcctggatctgcaggctggcagcaggagtttgccgccatggacagttctgagaccttggacgcctcttgggaggcagcatgctccgatggggctaggagagtgcgcgctgccggctccttaccctctgcagaactgtctagcaatagctgttcaccagggtgcggcccagaggtgccacctacccccccaggctctcactcggcctttacatctagtttcagttttatccgcttgagtctgggatcggccggagagagaggggaggctgaaggttgtccccctagtcgagaggcagagagccactgtcagtctcctcaggaaatgggagctaaggccgcctccctcgacgggccacatgaagatcccagatgcctgagcaggcctttctcgctgctggcgacacgggtgtccgccgacctggcgcaggctgcgagaaatagttcacgccccgaacgtgatatgcactccctcccggacatggaccctggctcatcctcctctcttgatcccagcctggctgggtgcgggggcgacggatctagtgggtccggtgatgctcattcatgggacacgctgctgcgcaaatgggagccagtgctgagagactgcctcttaaggaaccgcaggcaaatggaagtcatctcgttgcggctaaagttacagaaattgcaggaagacgctgtggagaatgacgattacgacaaggctgagactctacagcagcgtctggaagatttagaacaggagaaaatctcactacattttcagctcccatcccgccaaccggccctgagtagcttccttgggcaccttgcagcacaggtgcaagctgccctgagaagaggagccacccagcaggcgtccggtgatgacacccatactcctcttagaatggaacctcggttgctcgagcctaccgcccaggattctttacacgtcagtatcactcggagggactggctcctgcaggaaaagcagcagctccagaaggagatcgaggcccttcaagctcgaatgttcgtgctggaagccaaagatcagcaactgcggcgggagattgaagaacaagaacagcagctgcaatggcagggctgtgacctcacgccactggtggggcagctcagcctgggtcagcttcaggaagtctctaaggccctgcaggatacactggcaagcgcaggtcagattcctttccacgctgaacctcctgagaccattcggcgctgcgtatag

SEQ ID NO: 114815 - DNA, 1110 bp, synthetic construct
  misc_feature 1..1110: note = Description of Artificial Sequence: Synthetic coding sequence
  source 1..1110: mol_type = other DNA
atgcccggcggcggcccccagggggcgcctgcggcagccggcggcggtggggtgtcccaccgggccggctcccgggattgtctcccccctgccgcgtgtttcagaaggcgtaggctggcgagacggcccggctacatgagaagctccaccgggcccggaataggtttcctgtcacctgcggtaggcacgctgttccgcttcccaggcggagtttcgggcgaggaaagtcatcactctgaatcgagggccaggcaatgtggactcgattcacgaggactcctggtgcggtcccccgtttccaagtccgctgcagcacctacagtgacctctgtgaggggtacatcagcacacttcggcattcaacttagaggtgggaccaggctgccagatcgcctgtcatggccttgcggcccaggctctgccggatggcagcaagaatttgctgccatggatagcagtgagactctcgatgccagttgggaggccgcgtgctcggacggcgcgagacgcgttagggcagccgggtctctgccttctgcggaattgtcatccaactcctgctctcctggttgtgggcctgaagtcccccctactccccctggctcacacagcgccttcacctcaagctttagcttcattcgactctcccttggctccgccggggagagaggcgaggcggagggctgtccacccagccgcgaagctgaaagccactgccaaagcccacaggaaatgggtgcaaaagcagcaagtttggacggcccgcacgaagaccctcgttgtttgagtcgtcccttttctctgctcgctacccgggtgtccgccgaccttgcgcaggccgccaggaactcctcacgccctgaaagggacatgcactcattgcccgacatggatccaggttcgtcttcatcacttgacccttctctggccggctgtggcggggatggttccagcggaagcggcgatgctcatagctgggataccttactgcggaaatgggaacctgtgctacgagactgtctgctgaggaacagacggcagatggaactggagccgatagctctggaccccccgtggaagcctagacatcccgaacccaattcttactag

SEQ ID NO: 114816 - DNA, 717 bp, synthetic construct
  misc_feature 1..717: note = Description of Artificial Sequence: Synthetic coding sequence
  source 1..717: mol_type = other DNA
atggactccagcgaaacactggacgcttcctgggaagcagcatgttctgacggagcccgacgcgtacgggctgctggcagtctgccatcggccgaactctcctcaaactcatgcagcccagggtgtggtcccgaagtcccgccaacccctccaggctcacactccgccttcacctcctccttcagctttatacgtctgtccctggggagtgccggggagcggggtgaagccgagggatgccccccatcccgcgaggctgagtcccactgccaatcccctcaggaaatgggagccaaagcagcttcacttgacggcccgcacgaggaccctaggtgtctgagtcgcccattttccctgctggcaacacgagtaagcgccgacctggcccaggccgctcgaaatagttctcggccagagagagacatgcactctctccctgacatggaccccggaagttcctcctctctggacccctccctggctggctgtggtggggatggttcttcaggatccggggatgctcattcatgggataccttgctcagaaagtgggagccagtcctgagagattgtctactgagaaatcgccggcagatggaagtgatctcattgaggctgaagctgcaaaaacttcaggaagatgccgtggagaacgacgactatgacaaagctgggaccaactgcttcggcagtactatggaagcttcaactagttag

SEQ ID NO: 114817 - DNA, 2268 bp, synthetic construct
  misc_feature 1..2268: note = Description of Artificial Sequence: Synthetic coding sequence
  source 1..2268: mol_type = other DNA
atgccaggaggaggcccccagggcgctcccgccgctgccggaggtggaggcgtgagccacagagccgggtccagagactgtctcccgcctgccgcatgctttcgacggcgaagactggcacgacgcccggggtacatgcgatcgtcaaccggaccaggcatcgggtttttgtctcctgctgttggcactctgtttcggttccctgggggagtcagtggggaggaaagccaccactctgaatcaagggcaaggcagtgcggtctcgactctcgtgggctcctggttagatctccggtgtctaagagcgctgcagccccaacagtcaccagcgttcgcggcacctcggcacactttggaatacaactgagaggaggaacccgtttaccagatcgcctgagttggccctgtggtccaggtagcgcagggtggcaacaggagttcgccgcgatggactcatctgaaactttagatgcaagttgggaggccgcttgtagcgatggggcgcgaagggtgcgagccgctgggagcctgccttctgctgagctctcgagtaattcttgctcccccggctgcggacctgaggttccaccgacacctcccgggtcccacagcgcattcactagcagcttttccttcattagactcagcctgggcagtgcgggggaacgcggagaagctgagggatgtccccctagccgagaggcagagagtcactgccagtctccccaggaaatgggagccaaggccgccagcctggacggcccacatgaagaccctcgttgtttaagtcgtcccttttcattgttggcaacccgcgtcagcgctgatctggctcaagctgcacggaattcatctagaccagagcgcgatatgcatagcctacccgacatggatcctggatcttcctcttctctggatccctcactagccggctgcgggggagatggctcatctgggtccggggatgctcattcctgggatacccttctacgaaaatgggagcccgtgcttagagactgtttactgcgcaatcgacgccagatggaagttatttctctccgcctaaagcttcagaagctgcaggaggacgcagtcgagaacgatgattacgacaaggcagagacactccaacagaggttggaagacttagaacaagagaagatttccctacactttcagctgccttccagacaaccagccctgagttcctttttgggacacctcgccgcccaggtacaagcggccctgagaaggggggctacgcagcaggcctcgggtgacgatacccacacacctcttcggatggaacccagactgctggaaccaacggctcaggactctctacacgtgagtatcaccaggagagattggctcctccaggaaaaacagcagctgcagaaagaaatcgaagctctccaggcccgcatgttcgtgctggaagccaaggatcaacagttaagaagggagatcgaggagcaggaacagcagctgcaatggcaaggctgtgacctcaccccattggtgggccaactctcattgggacaactccaagaggtaagcaaggccctgcaagacacattggccagcgccgggcaaattcccttccacgccgagcctccggaaaccatcagaagtttgcaagagcgcataaaatccttgaatctcagtctaaaggaaattacaactaaagtatgcatgtcggaaaagttctgttcaactttaagaaaaaaagtcaatgatattgagacccagctccctgctctgctcgaggcaaaaatgcatgctattagcggaaatcatttttggaccgccaaggacttgacggaagagattagatccctcacatcagagcgagagggtctggaggggctactgagcaagctgttagtgttgagttctcgtaacgtgaaaaagctagggtccgtgaaagaggattacaacagactgagacgcgaggtggagcatcaggagaccgcctacgacggagtgagcctgtgcagacctgtatggtctgccgttgttcgctcttgctccctgcagccattgcctcccgaattcaaacaatttagctgtctgtccctacgcagctcatgggattatcggtgccctcccccatgtttagcaaatttcgtcttcctcgttgagatgggcttctaccatgtggaccagaccgggcttaagctgctcaccagcagcgaccctccttcctccgctagccaatccgccggaattacggatatgtcccattgtgcctggccactgcaatag

SEQ ID NO: 114818 - DNA, 2037 bp, synthetic construct
  misc_feature 1..2037: note = Description of Artificial Sequence: Synthetic coding sequence
  source 1..2037: mol_type = other DNA
atgccaggaggtggcccgcagggggctccagctgctgccggagggggaggtgtgagccatcgagctggaagtcgcgactgcctgcccccagccgcctgcttcaggcgacgtcgcctggctcggcgaccaggctacatgaggtccagcactgggccaggtatcggattcctcagcccggccgtcggcaccctatttaggtttcccggcggtgtgtctggcgaggaatctcaccatagtgagtcaagggcgaggcagtgtggcttagatagccggggtcttctcgtacggtccccggtctcaaaatctgccgccgcacccaccgttacctccgttcggggaacatcagcgcatttcggaatccagctgagaggcggaaccagattgccagatcggctttcttggccctgtggacccggctccgcaggctggcagcaggagttcgctgctatggatagctccgagaccctcgacgcgtcatgggaggctgcttgtagcgacggtgcgaggcgcgtgcgggcggccggctcgctcccatcggctgagctgtcaagcaactcctgcagccctggttgcggtcctgaggtgccaccaactccacccggttcccactctgcctttacatccagtttctcattcattcgccttagcctggggtccgctggcgagcggggggaagcagagggatgtccacccagcagggaggctgaatcccactgccagagccctcaagagatgggtgcgaaagctgctagtcttgatggcccccacgaggatcccagatgcctcagtcgacccttcagtctactcgctactagggtgtctgctgacctcgcgcaggctgccagaaactcttcaagacccgagcgggatatgcacagcctgccagatatggacccggggtcttcttcttcacttgacccatctctggctggctgcggcggtgacggcagcagcgggagcggggacgcccacagctgggacacgctgctccggaagtgggagccagtgttaagagattgcttgttacggaaccgacgacagatggaggtgatctctctccgcctcaagctgcaaaagctgcaggaggatgctgttgagaatgatgattatgataaagccgaaacattgcagcagaggctggaggatctcgaacaagagaaaatcagtcttcatttccagctgccctcacgccagcctgccctctccagtttccttgggcacctagccgcacaagtccaggcagctctcagacgcggagcaacccagcaggcttctggcgacgatacacatacaccacttagaatggagccccggctactggagcccacagcccaggattctctccatgtttcaatcacccgtagggattggctgttacaggaaaagcagcaactgcagaaggaaattgaggcccttcaggctaggatgtttgtacttgaggcaaaggatcagcagcttaggcgcgagatcgaggagcaggagcagcagctgcagtggcaagggtgcgacctaactccgctggtgggacagctgagcctgggccaactccaggaagttagtaaagcgctacaggataccctggcaagcgccggccagattccttttcatgccgagcctccagagactatcaggtccctccaggagcgcatcaaaagccttaacctctccttgaaagaaattacgactaaggtctgtatgagcgaaaaattctgcagcactctgagaaaaaaggtgaacgacatcgagacacagttaccggcgctcctagaggcaaagatgcacgccattagcggaaatcatttctggacagcgaaagacctcaccgaagagattcgcagtctgacaagcgaaagggagggcctggaaggcttgctgagtaaacttctggtgcttagcagcagaaatgtaaaaaagctcggatctgtgaaagaagattataacagactgagaagagaggtagagcaccaggaaacagcgtacggctataagtactgcgacgcagagtcttggacccagagatcacaacagctagcctag

SEQ ID NO: 114819 - DNA, 2499 bp, synthetic construct
  misc_feature 1..2499: note = Description of Artificial Sequence: Synthetic coding sequence
  source 1..2499: mol_type = other DNA
atgcccggggggggtcctcaaggagcgcctgccgccgcaggtggggggggtgtcagccatagggccggctccagggattgtctgccccctgccgcttgttttcggagacggcgcctcgccaggaggcccggatacatgcggtcaagcacagggccaggtattggtttcctgagtcccgcagtggggacattatttcggttcccaggtggggtgtcaggcgaggagtcacatcacagtgaatccagggcacgacagtgtggattggacagtagagggttgctcgtgcgcagtccagtgagtaagtctgccgctgcgcccacagtcacatccgtgcgggggacaagcgcccattttggtatccagttgcgggggggtacgaggttacctgacaggttatcgtggccatgcggccctggatcagccggctggcagcaagagtttgcagctatggatagtagtgagaccctggacgcctcctgggaagcagcatgcagtgatggagcacgcagggtccgcgcagccggcagtctcccgtcagccgaacttagctccaattcttgcagccctggatgcggacccgaagtcccaccaacgcctcccggttcacatagtgccttcacctcttcattttctttcatcaggctgtctctgggaagtgccggcgaaaggggagaggccgaggggtgcccccctagtagagaggccgaaagtcactgtcagtcgccacaggaaatgggcgcaaaagccgccagccttgatgggcctcatgaggaccccaggtgtctgtctcggccatttagtctgcttgccaccagagtgtccgccgacctggctcaggccgcacggaatagctctcgtcctgaacgggacatgcactccctaccagatatggatccggggtcgagctcatcgctggatcctagcttggctggatgcggaggcgatggctctagtggtagcggtgacgctcactcttgggataccttgcttcggaaatgggagcctgtcctaagagattgcctactcaggaatcgcagacagatggaagttataagcttgcggctaaaactgcagaaacttcaggaagacgccgtcgagaacgatgattacgacaaagcagagacattgcaacagcgcttggaggacctcgagcaggaaaagatttcactacacttccaactcccctcacggcagccagcactgtctagcttcctgggacacctggccgcccaggtgcaggccgcactgcggcgcggcgcaacacagcaggctagtggagacgacactcataccccactgaggatggaacctcggttactcgaacctacagctcaggattctctccatgtttccataaccagacgggactggctattgcaggagaagcaacagcttcagaaagagatcgaagcactccaggcccgtatgtttgtgttggaggctaaagaccagcagctgaggcgtgaaatagaggagcaggagcaacagctgcaatggcagggctgcgatttaactccactggtagggcagctgagtttggggcagttgcaagaggtgtcgaaggcccttcaggatactctcgcctctgccggccaaatccctttccacgccgagccacctgaaaccatacgtagcctgcaggaaaggattaagtccctgaacctgtccctcaaagagatcaccacgaaggtatgtatgtcagagaaattctgctccacactccggaaaaaagtgaatgatattgaaacccagctgcccgctctgctggaggcaaagatgcatgcaattagtggcaaccacttctggaccgcgaaggatcttacagaggagatccgctctctgacttcagagcgggaaggtctcgagggtttgcttagcaaactactggtgctgtcaagtaggaacgtgaagaagctaggttcagttaaggaagactataaccgtttacgccgcgaagttgaacaccaggaaactgcctatgagacctccgtcaaggagaacactatgaaatacatggagacattgaaaaacaaactgtgcagttgcaagtgccctctcctgggaaaggtgtgggaggctgatctggaagcctgccggctgctcatccagagcctgcagctgcaggaggcccgtggcagcctttctgtggaagatgagcggcagatggacgacctggaaggcgcagctccacccattccacctagacttcattccgaggataagaggaaaacccccctgaaagaatcgtacatcctgtctgcagaacttggggagaagtgcgaggatataggtaagaagctgctgtaccttgaggaccaactgcataccgccatacattcacatgatgaagacctaattcactctctgcgaagggagctgcagatggtaaaggagacactgcaagccatgatcttgcaactccaaccggctaaggaagcaggggagagggaagctgctgcatcatgtatgactgcaggggtgcacgaggcccaagcctag

SEQ ID NO: 114820 - DNA, 2661 bp, synthetic construct
  misc_feature 1..2661: note = Description of Artificial Sequence: Synthetic coding sequence
  source 1..2661: mol_type = other DNA
atgcccggtggcgggccacagggggcaccagccgcggccggaggcggaggcgttagccatagagcagggtctcgggattgtcttccgccagctgcctgtttccggcgcaggaggctggctcggcgccccggctatatgagaagtagcaccgggccaggcattggttttctctcacctgctgtgggcacactgttcagattcccagggggggtctccggcgaagagagccatcatagtgaatcacgcgcaaggcagtgcgggcttgattctcggggtctgcttgtgagaagccctgtgtctaaatcggctgctgcacccacagtgacctcggtgcgcggcacctccgcccactttggcattcagctccgggggggaactagattgccggatagactctcctggccttgtggacctggcagcgccggttggcagcaggagtttgctgctatggattctagtgaaacgttggacgcatcatgggaggctgcttgctctgacggcgcacgtcgggtccgagcggccggaagtctgcccagcgccgagttgagttccaactcttgtagtccagggtgcggacctgaggtcccacccacaccacccggttcgcattcggcttttacttcctcatttagctttattagattgtctctggggtctgccggagagcggggggaagcagaaggttgtcctccgagtagagaggccgaaagccactgccagtcgcctcaagaaatgggagctaaagctgcttcgctggacggcccacacgaggatccaagatgcctctcccggccattttcactacttgcaacccgcgttagtgcagacctggcgcaggctgctcgcaattcaagcagaccggagagagatatgcactccctacctgatatggatccaggttcttcatcaagtctcgatccatccctcgctggttgcggcggcgatggaagctcgggttccggagatgcacactcatgggacacactgttgagaaagtgggagccagtcctaagggactgtctcctgcgaaacaggcgccagatggaggttatctctctcaggctgaaactgcagaaactccaggaagatgctgtggaaaatgatgactatgataaggtggagacaggattccattacgtcggccaagctggcttggaactcttaacctccagcaacccacccgcctcggccagccagtccgctggcatcaccgccgaaaccctccagcagaggctggaagatttggagcaagaaaaaatcagtctgcactttcagctgccatcccgccagccagctctctcctcattcctgggacatctggccgcacaggttcaggccgcactcaggagaggcgcaacacagcaggcgtcaggcgatgacacacacactcccctgcgaatggagcccagactcctggaaccaacagcgcaggactccttgcatgtgtccatcactcgcagagactggctacttcaggagaagcagcagctccagaaagagattgaggccctgcaagcacggatgttcgtgttggaagctaaagatcagcaactgcgaagggagatcgaagaacaagaacagcaactgcagtggcagggctgcgatctgacacccttggtgggccaactgtccctgggacagttgcaggaagtgtccaaggccctgcaagacacactggcctcagcaggacagatcccattccacgcagaaccccccgagacgattagatctctgcaggagcgtattaaatctttgaaccttagtctgaaggagattacaacaaaggtgtgcatgagtgagaagttctgcagcacattacggaagaaggtgaacgacatcgagacccagttaccggctctgctggaagccaaaatgcacgctataagcggaaatcacttctggaccgccaaggatctcacagaagaaattcgttccctgacctccgaacgggaagggcttgaagggctgctgagtaagctcttggtgttgtcctccagaaacgtcaagaaattaggcagcgtcaaagaggactacaatagactgcgccgtgaagtggaacatcaggaaacagcctacgagacaagcgtgaaggaaaatactatgaagtacatggaaactttaaagaataaactctgcagttgtaaatgccccctcctgggtaaggtctgggaggcggacctggaggcttgcagactgcttatccagagcctgcagttgcaggaggctcgcgggtctctatcagttgaggatgagcgccaaatggatgaccttgaaggagccgcaccacctatcccacctcggctacatagtgaagataagcgaaagactccacttaaagtgttggaagagtggaaaacccacctgataccatcactgcattgcgccggaggcgagcaaaaagaagagagctacattctgagtgctgagttgggcgagaagtgtgaggacatcggcaagaaactgctttacctggaggatcaattgcacaccgcgattcactctcacgacgaggaccttatacattccctgagacgcgaattgcagatggtcaaagagactctgcaggccatgatcctgcagctacagcctgccaaagaagccggcgaacgggaggcagccgcaagctgcatgactgcaggtgtgcacgaggcccaagcgtag

SEQ ID NO: 114821 - DNA, 621 bp, synthetic construct
  misc_feature 1..621: note = Description of Artificial Sequence: Synthetic coding sequence
  source 1..621: mol_type = other DNA
tgaaatcacttctggaccgctaaggaccttactgaggagatcagaagcttgaccagcgaaagggaggggctcgagggcctgcttagtaaacttttagtactgtcttcaagaaatgtgaagaaattagggtccgttaaggaggactataaccggttgagaagggaagtggaacatcaggaaaccgcgtacgaaacttctgtgaaggaaaacacgatgaagtacatggaaaccttgaaaaataagctctgctcctgcaagtgccccctgttaggaaaggtgtgggaggcggatttggaggcttgtcgtctgctgatacagtctcttcaactgcaggaggcaagggggtcactatccgtcgaggacgaacgacagatggatgaccttgaaggagccgcaccccccatcccaccacggttgcatagtgaggacaagcgaaagactcctttgaaagtgctggaagagtggaagactcatctgattcccagcttacactgcgctggaggcgagcagaaggaagtgtgtccgttccacatggcctcacgcggcgacccctatagtaagggatgctttgggacaatgttacaaatgggaacgattaacattgggaaggcctctcactag

SEQ ID NO: 114822 - DNA, 279 bp, synthetic construct
  misc_feature 1..279: note = Description of Artificial Sequence: Synthetic coding sequence
  source 1..279: mol_type = other DNA
atgaagtatatggagaccttgaagaataagctatgtagttgcaaatgcccattgctgggtaaagtatgggaggccgatctggaagcctgtcgcctccttattcagtcacttcagttgcaagaggcacgcggcagcctctcagtggaagacgagcgacagatggatgacctggaaggggcggcccctcctatccctccaagactgcatagcgaagataagagaaaaactccactgaaggtgctcgaagagtggaaaacacacctgattccctccctgtag

SEQ ID NO: 114823 - DNA, 2565 bp, synthetic construct
  misc_feature 1..2565: note = Description of Artificial Sequence: Synthetic coding sequence
  source 1..2565: mol_type = other DNA
atgccaggagggggtcctcagggcgcgccagccgcagcaggtggggggggcgtcagtcatcgtgctgggagcagggattgcctaccgcccgccgcttgcttcagacgaaggcgactcgccagacgccccggatacatgagatcaagcactgggcccggcatcggatttctttcgcccgcggtgggtaccctgtttcggtttcccggaggcgtgagcggggaagaaagtcatcacagtgagagccgggcacgccagtgcggactagacagtcgcgggttactggtccggtcccctgtaagcaagtctgctgcagctccgaccgttacctctgttcgtggtactagtgctcacttcgggatccaactcagagggggaacacgcctgcctgataggctgagctggccctgtggacccggtagcgctgggtggcagcaggaattcgcagccatggatagttcagaaacgttagacgcctcctgggaggctgcatgcagcgacggagcacggagggttagggccgctggatctctgccaagcgctgaactgtcatctaactcctgctcccccggctgcggacccgaggtcccgcctacgccaccaggaagccattcagcatttaccagcagtttttcattcatacgcttgagtctcgggagcgccggagaacggggcgaggcggagggctgtccgccatcccgagaagctgagagccactgtcagtccccgcaagagatgggcgccaaggcagcttctctcgacggcccacacgaggacccccgttgcctttctcgccccttcagcctgttggcgacccgggtgagcgcagacttggcgcaggcagcccgaaacagctctagacccgaaagagatatgcacagtttgcccgatatggaccctggtagtagtagctccctcgacccatcccttgcgggatgcgggggcgacgggtcctcagggagtggggacgcccacagctgggacactctcctacggaagtgggaacctgtactcagggactgtctcctgcgcaataggcggcagatggaggtcatttcgctgaggctcaaattacagaagctgcaggaggacgccgtggaaaacgatgattacgacaaagctgaaactctgcagcagcgacttgaagatctggagcaggagaagattagtctgcacttccagttgccatcaaggcagcctgcactctcgtcattcctgggccacctcgcagcacaagtccaagctgccctacgccggggtgccacacagcaggcatcaggagacgacacccatactcccttgaggatggaaccacggctgttagaaccaacagctcaggattctctgcacgttagcattaccagacgggattggctactgcaggagaaacagcagctgcaaaaggaaatcgaggctctccaggccaggatgttcgtactcgaagccaaggatcagcagctaaggcgcgagatcgaggaacaggagcaacagctgcagtggcaagggtgcgacctgactccgttggtgggacagctttcattagggcagttacaggaggtctctaaggctcttcaggacaccttggcatccgctggtcaaatcccctttcatgctgaacctccagagaccataaggtcactgcaagaacgaatcaagtcgctgaatctctcgctgaaggaaataaccaccaaggtgtgcatgagcgagaagttttgctccactctccggaagaaagtaaatgacatagagactcagctgcctgctctcctggaagccaaaatgcacgccatctccgggaatcacttctggaccgccaaggacctcaccgaagaaataaggtccctgacatctgaacgtgagggtctggagggactactgagtaagttgctggttcttagctcccgcaacgtcaaaaaactgggatctgtgaaagaggattacaaccgccttcggcgcgaggtagagcatcaggagaccgcctatgaaacaagcgtcaaggaaaacacaatgaaatacatggaaacactgaagaacaagctgtgttcctgcaaatgcccactcttggggaaagtttgggaagctgatctggaggcctgccgcctgttgatccagagcctgcagcttcaagaagcccgcggaagcttgtctgtggaggacgagaggcaaatggacgacctcgaaggcgccgccccccctatcccccctcgattgcattccgaggataaaagaaagactcccctgaaagtactggaggagtggaagacgcatctcattcccagcctccactgcgccggcggcgaacaaaaggaggaatcttatatcctatcagctgagctgggagaaaaatgcgaggatattggcaaaaaactcttgtacctggaagaccaactccacactgctatacattcacacgacgaggatctgattcacagcctgcgtagagaactgcaaatggtgaaagagaccttacaggccatgattctacagcttcagcccgcgaaggaggctggagaacgggaggccgccgcatcgtgtatgacagctggtgtgcatgaggcccaggcatag

SEQ ID NO: 114824 - DNA, 2199 bp, synthetic construct
  misc_feature 1..2199: note = Description of Artificial Sequence: Synthetic coding sequence
  source 1..2199: mol_type = other DNA
atgccagggggtgggccacaaggggcgcccgctgcagctggcggggggggggtgtctcacagagctgggagtcgcgattgcttgcctcctgccgcctgctttagaagacgtcggctggcacggaggcccgggtatatgcggagctctacaggcccaggtatcggattcttgagtcccgcggttggcactttgttccggttcccaggtggggtatctggagaggagagccatcactcagagtctagagctcgccagtgtgggcttgactcacgcgggctgctagtgaggtctcccgtgtcaaaaagcgctgcagcacctactgtgacaagtgtgcggggcacctctgctcactttggtattcagctgagaggcggtacccgattgcccgatagactgtcttggccatgtgggcccggatctgcaggttggcagcaagagttcgccgctatggatagttccgagacactggacgcctcttgggaggcggcctgctccgacggtgcacgacgcgtgcgcgcagccggtagcctgccaagcgccgaactctcctcaaattcttgcagtcccgggtgcggccccgaagtaccgcctacccccccgggctcacatagtgccttcacttcctctttctcgttcatccgactgtcccttgggagcgccggcgaacgaggggaggcagagggttgtccgcctagcagggaggcagagtcacattgccagtctcctcaggagatgggcgctaaggctgcctcgctcgatggccctcacgaggatcccaggtgcttaagtcgtcctttcagcctcctcgctaccagggtgagtgctgacctagctcaggctgcacgtaactcaagtagaccagaaagagacatgcactctttacctgacatggatcccggatccagcagtagcctggatccgtctcttgcagggtgcgggggcgatggatcctcgggtagcggggatgcccactcatgggatactctcctgcgtaagtgggagccagtactgcgcgactgtctgcttagaaaccgcaggcagatggaggtgattagtctacgcctgaaactgcagaagctgcaagaagatgcagtggaaaatgacgactatgataaggcagaaactctacagcagcggttggaagacctggaacaggaaaagatcagcctacactttcagctcccaagccgacagcctgctttgagttcattcctggggcatctggctgcccaggtgcaggccgctttaagaaggggggctacccagcacctgcaggagagaatcaagtccctcaacctgtcactcaaagaaatcaccaccaaagtgtgtatgtccgagaagttctgtagcactctcagaaaaaaggtgaacgacattgaaacacaactgcctgctctgctggaggccaagatgcacgccatctctggcaaccacttttggaccgccaaggacctaactgaggagattcgctcactgacctctgagcgcgagggacttgaagggctcctttcaaagctcctagtgctcagtagccgaaatgtaaagaagctcggctcagtgaaggaagattacaaccgcctacgacgggaggtcgaacatcaagaaaccgcctatgagacaagtgtcaaggaaaataccatgaagtatatggagacattaaagaacaagttatgcagttgtaagtgccccctccttggcaaagtgtgggaagctgatttagaggcttgtagactcctgatccagagcctgcagctacaggaagcaagggggtctctgtcagtcgaggatgaacgtcaaatggacgatttggagggcgctgctccaccaatccccccacgcctccactccgaggacaagcggaaaacccctctgaaagtcctcgaggagtggaaaacacatcttatacccagcctccactgcgccgggggtgagcagaaggaagaaagttacattctgtcagccgagctgggggagaagtgcgaagatatcgggaagaagctgctgtacctggaggaccaactgcacacagctatccactcacatgatgaagacctgattcatagtctccgaagggagctccagatggtgaaggaaaccttgcaggctatgatcctccagctacagccggcaaaagaagccggagagagagaagctgcggccagctgtatgacggcaggtgttcacgaggcacaggcatag

SEQ ID NO: 114825 - DNA, 1830 bp, synthetic construct
  misc_feature 1..1830: note = Description of Artificial Sequence: Synthetic coding sequence
  source 1..1830: mol_type = other DNA
atgcctggaggtggaccccaaggagctcctgctgcagcaggtggcgggggcgtgtcccatcgcgccggtagccgtgattgtttgccccctgcagcttgctttaggagaaggagattggcgaggcggccgggctacatgcggagcagtaccggtcccggaattgggttcctgagtccagcagtaggtaccctttttcgattccctggtggtgtgagcggtgaggaatctcatcatagcgaatcgagagcccgtcagtgtgggctagacagtcgaggattactcgtacgcagtcctgtctcaaaaagtgccgccgctcccactgtgacctctgttcgcggcaccagtgcccacttcgggatccagctaagaggcggaacccgcctccccgacaggctctcctggccttgtgggccagggtccgcagggtggcagcaagaatttgcagccatggatagcagtgagactctggacgcctcgtgggaggctgcctgctccgacggagcgcgaagagtgcgcgccgccggtagccttccatccgcggagttgtcctctaattcttgttccccaggctgcggaccagaagtgcctcccacaccgcctggctcgcacagcgcttttaccagctcctttagttttattcggctctccctgggctcagcaggagaaaggggcgaagccgaaggctgcccacccagccgggaggccgaatcccactgtcagagcccacaggagatgggcgccaaagcagcctctctcgatgggccacatgaagaccctcggtgtttgtcccggcccttctcacttctagcgaccagagtgagcgccgacctggctcaggctgccagaaacagttcccgccccgaacgcgacatgcattccctcccagacatggatccaggcagttcctctagcctggacccaagtttggccgggtgtgggggtgacggcagctcgggatccggggatgcgcatagttgggacactctgttgaggaagtgggagcctgtgctgagggactgcctcctccggaaccgtcggcagatggaagtgattagcctccgtctcaagctccaaaagctccaggaggacgcggttgaaaatgatgattacgacaaggcggaaacccttcaacagagattagaagacctggagcaggaaaaaatatccctgcatttccagctgcccagccgccagccagctctctcttcattccttgggcacctggcagcacaggtgcaggctgccctgcgcagaggagctacacagcaggccagcggtgacgatacccacaccccactgcggatggagccccgtctgctcgaacccactgcccaggatagtctgcacgtgagcataacacgcagagactggctgcttcaggaaaagcagcaattgcagaaagagatcgaagccttgcaagccagaatgttcgtgttggaggctaaagaccagcagttgagacgcgaaattgaagagcaggagcagcagctccagtggcaagggtgcgatctgacccctctcgttggacaattgagtctggggcagctccaagaagtttcgaaggccttgcaggacactcttgcatctgctgggcaaataccattccacgccgagccacctgagacaattcggagagaggtgcggcaccaaacagccccctgtaggaatcaccaactcgaaaagccagtcatcaatatctgggccttccacctaagacgaaagatttgcctgtttcaggccgatggcttgcagcacgggagtgcagaggtgaagcacctgaaggagacttccgtggagcctgccggaagcaccgcctcccgcaaggagtag

SEQ ID NO: 114826 - DNA, 2088 bp, synthetic construct
  misc_feature 1..2088: note = Description of Artificial Sequence: Synthetic coding sequence
  source 1..2088: mol_type = other DNA
atgcctggtggcggaccgcagggcgcccccgctgcagcgggaggaggtggagtatcacacagggcaggttccagagactgcctgccacccgctgcttgttttagaaggcgtaggctggctcgacgacccggctacatgcggtccagtaccggcccaggcataggatttctgtcccctgctgtggggacattgttccggtttccgggtggcgtctcaggggaggaatctcatcacagcgaaagtcgcgcacgccagtgcgggctggacagccgcgggctactggtgcgcagccccgtaagcaaatccgccgctgccccaacagtcacgtccgtgcgcgggacttcagcacacttcgggatacagttgagaggcgggacccggttgcccgaccggctgagctggccatgcggtcctgggtcggcggggtggcagcaagaatttgctgcaatggatagttccgaaactctagacgcgtcctgggaggcagcttgttcagacggagctagaagggtgcgtgccgcgggcagcttgccctctgcagagctgagcagtaatagctgtagcccagggtgcggaccagaagtaccacccactccacctggctcccacagcgccttcacttccagtttctccttcatcaggttgtcattgggctccgccggcgagaggggagaagccgagggatgccccccaagccgagaggccgagtcgcactgccagagcccccaagaaatgggcgcaaaagcagctagtttggatggaccccacgaggatccccggtgtctgtctagaccattcagccttctagccacacgcgtgtccgccgatctggcccaggcagccagaaatagcagccgcccggagagagacatgcactccctgccagacatggacccaggctcctcctcatccctggacccctctcttgccggttgcgggggcgacgggagttcagggtccggagacgcccattcttgggacacgttgctacggaagtgggagccggtgttacgagattgtctgttgcggaacagacgtcagatggaggttataagcctgcggcttaagctgcagaagctccaagaggatgccgtggagaacgatgattatgacaaagcagaaacattgcaacaaaggctcgaggatctggaacaggagaaaatcagcttacactttcagctcccgtccagacagccagctctttcttccttcctgggacacctggctgcccaggtccaggcggctctgaggcgaggggctacccagcaggcttccggagatgacactcacacaccattgaggatggaaccccggctgctggagcccacggcgcaggatagcctccatgtgtctatcacccgcagagactggctcctgcaagagaagcagcaactgcagaaagagattgaagctctgcaggcccggatgttcgttctcgaagcaaaggaccagcagctcagacgggagatcgaggagcaggaacagcagttgcaatggcagggatgcgatctgacaccactggtgggccaactttctctggggcagctgcaagaagtgtcaaaggcattgcaggatactctcgcctctgcagggcagattccattccatgctgaaccacctgaaacaattcggtctctccaggagaggatcaagtccctcaatcttagcctgaaagagattactaccaaggtatgcatgtctgagaagttttgtagcacccttcggaagaaggtgaatgatatcgagacgcagcttccagcccttctcgaggcaaagatgcatgcgattagtgggaatcacttctggactgcaaaagatctgactgaagagattcggtcattgacctccgaacgcgagggactcgaaggactgctgtcgaagcttctcgtactctcttccagaaacgtgaaaaaactgggttcagttaaggaggattataacagactgaggcgtgaagttgaacaccaggagactgcctatgcagcctcagtgcattgtctggggaagtgcggcaaacttacatggaagctagttgactgtctgtcgagggcctattcaagcaggaaaccaggagaggcgtgtctgtag

SEQ ID NO: 114827 - DNA, 1680 bp, synthetic construct
  misc_feature 1..1680: note = Description of Artificial Sequence: Synthetic coding sequence
  source 1..1680: mol_type = other DNA
atgcccggcggcgggcctcagggggcacccgccgctgcaggaggaggcggggtatctcatcgggcaggaagtagggactgtctccccccagctgcgtgttttcgtcgccgtcggctcgcaagacgtcccggctacatgagaagcagtacagggcctggcatcgggtttctcagcccggccgtgggtaccctcttccggttccccggcggggtgagtggagaagaatcacatcacagcgagagtagggcaaggcaatgtggtcttgattcacggggattgcttgtaagatctcccgtatctaaatccgcggcggccccaaccgtgacctcagtgaggggcacatccgcccattttggaatccagcttcgcggcggcactcgcctcccggatcggctgtcctggccatgcggacccggtagcgccggatggcagcaggagttcgcagcaatggattcctccgagactttggatgccagttgggaggccgcctgttctgacggcgcccgccgtgtgcgagctgcgggctcactgccgtccgctgaattgtccagcaatagctgctcccccggctgtgggcccgaggttccgcccacccctcctggatcacatagcgcttttacttcctcattcagctttatccgacttagcctcgggtcagcgggagagcggggtgaggccgaggggtgtccgccgtcgagagaagccgaaagtcactgccagtcaccccaggagatgggggcaaaggccgcaagtctggacgggcctcacgaagaccctcgctgcctgtcgcggccattttcacttttagcgactagagtgagcgccgatctggcacaggcagccaggaatagcagtaggcccgaaagagacatgcattccctgccagacatggaccccggatcaagttcaagccttgacccttccttagccggatgtggaggagatggatccagcggcagtggtgacgcccattcatgggacacccttcttcggaaatgggagcccgtcctgagagattgtctactgagaaacaggaggcaaatggaggttatctccttgcggctgaagcttcagaagttgcaagaagacgctgtggagaacgacgactacgacaaggccgaaacattgcagcagcgacttgaagatttggagcaggaaaaaatcagtcttcactttcagctgccatcacgccaacccgctttgtctagctttcttgggcatttagctgcgcaggtgcaggcagccctccgcaggggggcaacccagcaggccagcggtgatgacacgcacacccctttgcgcatggagccccgactcctcgagccaaccgcgcaggactcgttgcatgtatctataacccgaagagattggctccttcaagagaagcagcagctgcagaaggagatagaggctctccaggcccgcatgttcgtgctggaggcaaaagatcagcagcttcgccgggagatcgaggagcaggaacagcaactgcaatggcagggatgtgatctcaccccactcgttggccagctctcactcggccagctgcaagaggtgagcaaggctctgcaagatactctcgcttctgctggacagatcccatttcacgcagaaccacctgagacaatacgccggaataaatgtgaaggaaaatactatgaagtgcacggtaacacatag

SEQ ID NO: 114828 - DNA, 1740 bp, synthetic construct
  misc_feature 1..1740: note = Description of Artificial Sequence: Synthetic coding sequence
  source 1..1740: mol_type = other DNA
atgcctggcggcggcccgcagggggctcctgccgcagccggaggaggaggggtgagtcatcgtgctggcagcagggactgcctgccgcctgccgcctgtttcaggcgaagacgcttggccaggcgacctggatatatgagatcctcaactgggccagggatcgggtttctgagccccgcagtcggcacgctgttcagatttcctggcggggtttcaggcgaggaatcgcaccactcagaaagtagggccaggcagtgcggcttggacagtcggggtcttttagtgcgatctccagtgagcaagtcagcggctgcacctactgtcacttctgttcggggaacgtctgctcacttcggaattcaactgagaggtggcactagactacccgacagattgtcctggccatgcggtcccggatccgctggatggcaacaagaattcgccgccatggattcatctgagactcttgacgcctcctgggaggcggcctgttccgacggtgctagacgagtcagagctgccggttccctgcctagcgcagagttatcctctaattcttgttcacccggatgtggccccgaggtgcctccaacaccgccgggaagccactccgccttcacaagcagtttctcctttattcgcctgagcctaggctctgcgggggagcgaggcgaggcggagggatgccccccctcaagagaggctgaatcccattgtcagtctccccaagaaatgggcgcgaaagctgcctccctagacggccctcatgaggaccctagatgcctgagtagacccttttccttgctggcaacaagagtgtccgcagacctggctcaggccgcccggaatagctccagacccgagcgcgacatgcatagccttcccgacatggacccgggcagctccagctcattggacccttccttagccggctgtggtggggatggatccagcggctcaggggacgcacattcatgggatacactgctccgcaagtgggagcctgttctccgcgactgcctcctgaggaacaggcggcaaatggaagtgatcagcctcagactgaagctgcagaaactgcaggaagacgcggtcgagaacgatgactatgataaggccgagaccctccagcagcggctagaggacctggagcaagaaaaaatcagcctccattttcagcttccaagtcgccagccagcgctatctagtttcctggggcacctcgcagcgcaggtccaggcagccctgagacggggcgccacccagcaggcctccggtgacgacactcacaccccattgcggatggaacctaggttattagagcccacagcacaagactctctccacgtgagcattacacggagagactggctcttacaggagaagcagcaactccaaaaagagatagaggccctgcaggcacgtatgttcgtgctggaggctaaggaccaacagctgcgcagggaaattgaagagcaggaacagcagctccagtggcaaggttgcgacctgacgccgctcgtaggacaactgtcactgggtcagctccaggaggtttccaaggctctccaagacacgctagcaagcgcaggccagatcccttttcacgctgagccaccggagaccattcggagcttacaggaaagaattaagagtctgaacttgtccctgaaggagatcactacaaaggagactatttccgggagactcaaaacctccccaagacgtctggaccactag

SEQ ID NO: 114829 - DNA, 390 bp, synthetic construct
  misc_feature 1..390: note = Description of Artificial Sequence: Synthetic coding sequence
  source 1..390: mol_type = other DNA
atgactatgacaactatgccagagtcacttaattctcccgtctcagggaaagctgtgtttatggagttcgggcccccaaaccagcagatgagcccgtctcccatgtctcacggccactactccatgcattgtctccattctgcaggtcattcccagcccgacggcgcttattctagtgcatctagtttctcccgtccgttggggtacccttatgtgaattcagtctcctcacacgcaagcagtccctacatctcctctgtgcagagttatccaggctcagctagtctagcgcaatcccgactggaggaccctgggcaggatctggtgccgaagcaggccatacaggtgcaggaggcagatgaggcagggtggggagggagcggcggctag

SEQ ID NO: 114830 - DNA, 516 bp, synthetic construct
  misc_feature 1..516: note = Description of Artificial Sequence: Synthetic coding sequence
  source 1..516: mol_type = other DNA
atgactatgacaacaatgcctgagtccctgaacagccctgtgtctggaaaagcggtctttatggagttcggcccccctaatcagcagatgagtccttctccgatgtctcacggccattactccatgcactgccttcatagtgccggccattcccaaccggatggcgcctattcatctgcttcttctttcagtaggccactgggttacccctatgtgaattctgtctccagtcatgccagctccccatatatatcaagcgtgcagagctatcctggatctgctagccttgcccagtcacgactcgaggaccccggagcagactctgaaaaatctaccgtcgtggaagggggcgaagtaagatttaatggcaaaggcaagaagattcgaaaacctcgcaccatttactcgtcactgcagcttcaggccctcaacagaagattccagcagacccaatatcttgctctccctgagcgggccgaacttgctgcctccttgggccttacccagacccagtag

SEQ ID NO: 114831 - DNA, 768 bp, synthetic construct
  misc_feature 1..768: note = Description of Artificial Sequence: Synthetic coding sequence
  source 1..768: mol_type = other DNA
atgactatgaccactatgccagagtcattgaactcacctgtgtcagggaaggccgtttttatggaattcggtccacccaaccagcagatgagcccgagcccgatgtcccacggacattactccatgcactgtctgcattctgccggccattcacaacctgacggggcctactctagtgcatcatcattctcgagacccctcggatatccatacgtgaacagcgtcagtagtcacgcttcttctccctacattagttcagtgcaatcctatcccggtagtgcttccctggcacagagcagacttgaagaccccggcgctgattcggagaagagtacagtggtggagggaggagaagtgcgattcaacgggaagggaaagaaaatccgcaaaccgaggactatctatagctccctgcagctgcaggctctgaataggagatttcagcagacccagtatctggctcttcctgagcgcgccgagttggctgcctctcttgggctgacccagacccaggttaaaatctggttccagaacaagaggagcaaatttaaaaagctcatgaagcaaggaggcgccgccctcgaggggagtgctctcgccaacggcagagctctgagtgccggatcccccccggtgcccccaggctggaatcccaattcttcgtctggaaaaggatccgggggcaacgcagggagctatatccccagttatacctcgtggtatcccagcgcccaccaggaggctatgcagcagccccaattgatgtag

SEQ ID NO: 114832 - DNA, 564 bp, synthetic construct
  misc_feature 1..564: note = Description of Artificial Sequence: Synthetic coding sequence
  source 1..564: mol_type = other DNA
atgacaatgaccacaatgccggaaagcctgaactctcctgtgtctggaaaggcagtctttatggagtttgggcctcctaaccagcagatgtctccatcgccaatgtcgcatggccactactcaatgcactgcctgcactccgccggacatagccaacctgacggtgcctattcctctgcaagctcttttagcaggccattgggctacccatacgtcaactccgttagcagtcacgcatctagtccgtacatctccagcgtgcagagttatcctgggtccgcaagtcttgcccagagtagattggaggatcctggggccgactctgagaaatctacagttgtggaaggtggagaggtgcgatttaacggaaaagggaagaaaattaggaagccacgtacaatttactccagcctccagctgcaggctttaaacaggcggttccagcagacgcaatatctggctctccctgaacgcgccgaattggctgcaagccttgggctgacccaaacccaggtaaaaatttggttccaaaacaagcgctccaagttcaagaaactcatgtag

SEQ ID NO: 114833 - DNA, 1722 bp, synthetic construct
  misc_feature 1..1722: note = Description of Artificial Sequence: Synthetic coding sequence
  source 1..1722: mol_type = other DNA
atgggcaagtgtctgagttgctgtaaagaggatcaaagtttccagagatgtagcccagaggatcaggtcagcactgatgctcaacaccggggggcttcaagcatatctcagccatcaatatctttgggtcataaaacaagctactcgccggtgacacacaaggttaacgcagctaaggcgagtagacggctgctctcagtgtcttctcccagttttagtgagcgaaggtacagcctctttgtgggcttccagaaaaggaacgcctctccctattggcagcagtccagggccaatttcgattctgaggaagacaccggattcacggacatcaagtctagcagcgaccactgcggatcctttatttcgcgcaggagaagattctcctcccggaaactgtccattgtgtcctactacaaaagcgccatctttttcgacccccaagcatctggccagaacgtcttcaacctaaacgagatagaaattttttccaaaacatcttctaacacagacgcaaagaagcacattaccatctctgcccccgagtataatacaaagaatttcaagaactttgagactaacaccacatctcccgccttcggaaacaccatagacaccgcgagttaccaacagtccacttctagcttcttttccctagctagcgacattagctcccccgaccaacaaaacggaattgccaacgacatccagcagagaggtcaactctgcaaggacctgaaggatttcctgcaccctagaccggagagttattctacgggacacagccccatcatgatcccccaacacccatctcagtccggaacttttcctttcctacataaggctgggttttcgagctcatacaagaattctggctgctttatccccccacagagcgagctcacaagcggcctatttgaggatgaggacttcgctgtgctgtttcaagacgaggatagatcgtcccccatcgagataccgaaaatcagatacataacagccaataccgatacagaggagcagagctttcccgtgccaaaggcctttaatacaagggtagaagagttgaatctggacgtgcttttgcaaaaggtcgaccacctgcgtatgagtgaaagcggcaaaagcgagagcttcgaactcctaagggatcataaggaaaagtttagggatgaaatcgaatttatgtggagatttgcacgggcctacggagatatgtatgagctttctaccaatacacaggagaagaagcactacgctaatattggcaagactctctccgaacgggccatcaatcgagcgcccatgaacgggcattgccacttgtggtacgccgttctctgcggctatgtatctgagtttgaaggcctgcagaacaagatcaactatgggcatttatttaaagaacatctcgatatagccatcaagctgctccccgaggaaccctttctttactatcttaaaggcagatactgctacactgtaagcaaactctcgtggattgagaaaaagatggccgctaccttgtttggcaaaatcccctcgtcaaccgtccaagaagccctccacaacttcttaaaggccgaggagctctgccctgggtacagcaaccctaactatatgtacctggccaagtgctacacagacttggaggagaatcagaacgccctaaaattctgtaatctagctctcctgctgccaacggtcacaaaagaagagttgtag

SEQ ID NO: 114834 - DNA, 654 bp, synthetic construct
  misc_feature 1..654: note = Description of Artificial Sequence: Synthetic coding sequence
  source 1..654: mol_type = other DNA
atgaccggagttttcgacagtctggtggctgacatgcacagcacccagatcgccgcgtcctcaacctaccaccagcaccaacagcccccctccggcgggggggctggccccggaggaaacagttctagctctagctcgctgcacaaacctcaagagagcccaaccctgccagtgagtaccgccactgatagtagttactatactaatcagcagcatcctgctggggggggaggcggagggggatccccttatgcacacatgggatcgtaccaataccaggcatccggcctgaacaatgttccctacagcgcgaagtccagttacgacctgggatacactgccgcctacacgtcatatgccccctatggcacctctagtagccctgccaataatgaaccggagaaagaggatctggaacctgaaatccgcatcgtgaacgggaagccaaagaaggtgcgtaaacctcgaacgatctactcatccttccagctggcagcgctccaacgaagattccagaaaactcagtacctcgctctccccgaaagagccgaactcgcagcttccttaggcctcactcagacccaggttggcctcgccccttgccggggcgaggagtcagctgggctccgttggctcggctctcgaagggtgtag

SEQ ID NO: 114835 - DNA, 864 bp, synthetic construct
  misc_feature 1..864: note = Description of Artificial Sequence: Synthetic coding sequence
  source 1..864: mol_type = other DNA
atgtccgggtctttcgatcgtaagctgagcagcattcttacggacatctctagctctctaagttgtcacgcaggatcgaaagactccccaacacttcccgagtcctccgtcacggacttgggttattacagcgcacctcagcacgattattattcaggtcaaccctacggacagaccgtgaacccctatacgtaccatcaccagtttaacctgaatggactggctgggaccggagcctacagtcctaaaagtgaatatacttacggggcttcttatcgccagtacggggcctacagggaacaaccccttcccgctcaagaccctgtgtccgtaaaggaagaacctgaggctgaagtgcgcatggtcaacgggaaacccaaaaaagttcggaaacctcgaactatctattcctcataccagcttgccgccctgcagcgccggttccagaaggctcagtatcttgccctaccagaaagggccgaattagctgcgcagcttggcctcactcaaacacaggtgaaaatatggtttcagaacagaagaagcaagttcaaaaagctgtacaaaaacggagaagtgccactggaacactcaccgaataatagcgactctatggcatgcaactctccccctagcccggctctttgggacacttcctcacattccacccccgccccggcccgttcccagctgcctcctcctctgccttatagcgcatcacctagttacctggacgacccaacaaactcctggtaccatgcgcagaatctgtccgggccccatctacagcagcaacctcctcaaccagccacactgcatcacgcgtcacctgggccaccacccaaccctggcgctgtctactag

SEQ ID NO: 114836 - DNA, 723 bp, synthetic construct
  misc_feature 1..723: note = Description of Artificial Sequence: Synthetic coding sequence
  source 1..723: mol_type = other DNA
atgaccagcctaccttgtcctcttccgggacgggacgctagtaaggccgtcttcccagacctggctccagtgccaagcgtggccgcggcatacccccttggcctttctccaacaactgcagcatctcctaacctgtcctattcgcgtccatacggccacctgctgagttacccatacaccgagcccgctaaccccggagactcctacctttcctgccagcagcctgccgccctgtctcagccgctgtgtggccctgctgaacaccctcaagaacttgaggcggactctgaaaaaccccggctttcgcctgaaccctcagaacgtcggcctcaggccccggccaaaaaacttcgaaaaccaagaaccatttatagttcgcttcaactgcagcacctcaatcagagatttcagcatacgcagtatcttgccttgcccgaacgagcacagctggcagcacagctgggactcacacagacccaggtcaagatctggtttcagaacaagagatccaaatataaaaaacttctgaaacagaatagcggagggcaagagggtgatttccctggacggacattttctgtgtccccatgtagcccccctctgcccagtctctgggacctgcctaaagcaggaaccctgccaacttccggatacgggaatagttttggtgcatggtatcagcatcactcatcagatgtcctggccagcccccagatgatgtag

SEQ ID NO: 114837 - DNA, 507 bp, synthetic construct
  misc_feature 1..507: note = Description of Artificial Sequence: Synthetic coding sequence
  source 1..507: mol_type = other DNA
atgaaactgtcggtcctccctccgcggagcctactggctccctacacggtcctgtgttgccctcccgactcagaaaaacctcgcctatcaccggaaccttcagagagacgacctcaagcaccagcaaagaagttgaggaaaccccggaccatctactcgtctctgcaactgcagcatctcaatcagcggttccaacatactcagtacttggccctacctgaacgcgcacagctcgctgcacagctgggcctcacgcagacacaagttaagatctggttccaaaacaaacgtagtaagtacaaaaagctgctgaaacagaacagtggtggccaagaaggggatttccctgggaggacattcagtgttagtccatgctcaccacccctccctagcctctgggacctgcctaaggctggcactctgccaacatctggttatggcaattccttcggggcttggtaccagcaccactctagtgacgtcctggcctcgcctcaaatgatgtag

SEQ ID NO: 114838 - DNA, 1473 bp, synthetic construct
  misc_feature 1..1473: note = Description of Artificial Sequence: Synthetic coding sequence
  source 1..1473: mol_type = other DNA
atggaccataccgacaacgagttgcagggaacaaacagctctggctcactcggtggattagacgttcggcgtagaatacccatcaaactgatcagtaaacaggctaacaaggccaagcccgcccctaggactcaacggactatcaacagaatgccagcaaaggccccccccggtgatgaaggattcgactacaatgaggaggagcgttatgattgtaagggtggcgagctgtttgctaatcagaggcggtttcccggccatctgttctgggactttcaaatcaatatactcggcgagaaggacgataccccagttcacttctgcgacaagtgcgggctgccaatcaaaatctatgggagaatgattccgtgtaagcacgtattctgctatgattgtgccattttgcacgaaaaaaagggagacaagatgtgtcccgggtgctctgatccagtgcagaggattgagcagtgcacccgcggtagcctgtttatgtgttctatcgtgcaaggctgtaagaggacatacctgtcccagagggatctgcaggcccatataaatcaccgtcacatgagagcgggcaagcccgtgacacgggccagcttggaaaacgtacatcctccaattgctccaccacctacagagattccagagcggttcatcatgccaccggataaacatcacatgagccacatcccgcccaagcaacatatcatgatgcctccgccccctctgcagcacgtaccgcacgagcactataatcaacctcatgaagacattcgtgcaccgccggccgaactttcaatggctcctccacctcctcgctccgtgagccaggagacctttagaatcagcacaaggaagcattccaaccttataactgttcctatacaggatgacagcaacagcggtgctagagagcccccgccccccgcccctgcgccagcccatcatcatccagagtaccaggggcaacctgtggtaagtcatccccatcacattatgccgccccagcaacattatgccccacccccccccccgccaccacccatcagccaccctatgcctcatcctccccaagccgccggcaccccccatctcgtgtacagccaggcccccccaccaccgatgacgtctgcgccgccgcccattacgccccctcctgggcacattattgctcagatgccaccttatatgaatcacccacctcccgggcctccccctcctcagcatggtggtccccctgtcactgccccaccgcctcaccactacaaccctaatagccttccccagttcaccgaggaccaggggaccctttcaccccccttcactcagccggggggtatgagcccgggaatctggccagccccccgcggcccgcccccccccccaaggctccagggccctccctcacaaaccccccttcctggacctcaccacccagatcaaaccagatacagaccgtactaccagtag

SEQ ID NO: 114839 - DNA, 798 bp, synthetic construct
  misc_feature 1..798: note = Description of Artificial Sequence: Synthetic coding sequence
  source 1..798: mol_type = other DNA
atgatgaccatgactacaatggccgatggcctcgaaggccaagatagttcaaaatccgcctttatggagtttggccaacagcagcagcagcagcactcccctgccatggccggggcacattatcctttacactgcttacatagtgcagccgccgctgcagcggccgggtcgcaccaccaccatcatcaccagcaccaccaccatggtagtccatacgcatcagggggaggtaatagctataaccaccggtcgttagccgcttatccgtacatgagccattctcagcactccccatacctacagtcataccacaactccagtgccgccgcgcaaaccagaggggacgatacagatcagcagaaaacaactgtgatcgaaaatggcgaaatccgttttaatgggaagggaaagaaaatccgtaaaccgagaacaatctacagtagcctccagctccaggctctcaaccaccgattccaacagacacagtatctggcgttgccagaaagagccgaacttgccgctagtcttgggttgacccagacccaagtcaagatttggtttcaaaataaacggtctaagtttaaaaaacttcttaagcagggcagcaacccccatgaatcggatcctctccaaggctccgcggccctttcgccgagaagccccgctctgccacccgtgtgggatgtctccgcatctgcgaaaggcgtgtcaatgccccccaattcatacatgccaggttactctcactggtactctagcccacaccaggatacgatgcagaggccacaaatgatgtag

SEQ ID NO: 114840 - DNA, 882 bp, synthetic construct
  misc_feature 1..882: note = Description of Artificial Sequence: Synthetic coding sequence
  source 1..882: mol_type = other DNA
atgatgaccatgacaaccatggcagacggtctagagggccaggactctagcaaatctgccttcatggaattcgggcaacagcagcagcagcagcagcagcagcaacagcagcagcagcagcagcagcagcagccaccacctcctcctccacctcctccacagcctcacagtcagcaatcaagccccgccatggccggggcccactatcccctgcattgtttacactccgccgcagcggcagctgcggctggatcccatcatcaccaccaccaccaacatcaccaccatggcagcccttacgcatctggcggaggcaattcatataatcatcggagcctggctgcttatccctacatgagtcattcgcagcatagcccctacctgcagtcttaccataactcaagtgcggctgcacagacaaggggagatgacacagaccagcagaagactactgtgatcgagaatggagagatccggttcaacggaaaagggaagaaaattcggaagccacgtacaatatatagttcccttcagcttcaggctctcaatcataggtttcagcaaacacagtacttggctctcccagagagagctgaactggccgccagtctcgggttaactcagacacaggttaagatctggtttcaaaataaacgctccaaattcaagaagctcctaaaacagggttctaaccctcatgagtcggacccattacagggtagcgccgcattgagcccccgctctcctgccctccccccagtctgggacgtgagtgcctcagctaagggcgtgagcatgcctcccaactcttatatgccaggctattcacactggtattccagtcctcaccaggataccatgcagcggccccaaatgatgtag

SEQ ID NO: 114841 - DNA, 9084 bp, synthetic construct
  misc_feature 1..9084: note = Description of Artificial Sequence: Synthetic coding sequence
  source 1..9084: mol_type = other DNA
atgaatctccaccaggtgctgactggtgccgtgaaccccggagaccactgcttctctgtaggctctattggcgatcaacgctttaccgcatatgcaagcgggtgtgatatcgtgatcctggggtctgatttcgagcgtctgcaaatcatccccggcgcgaaacacggaaatatccaggtgggttgtgtagattgctccatgcagcagggaaaaatcgccgcttcgtatggaaatgtgatcagtatatttgagcctgtgaacctccctaaacagaagaaaaatttggagctttactcccagtggcaaaagtccggccagttctttttagaatcaatcgctcataatatcacttgggacccgacagggtccagactgctgacggggtcctcctacttgcagctctggagcaatactaacctggagaaacctaccgaagacgaaaatctgaataagaccgacctcaatttcggggattggaagtgtatatggcactgcaaaaccgcaagccaagtgcacctaatgaagttttcaccagacggggagtttttcgcaacagcagggaaggacgactgtcttttgaaagtatggtacaacgttgagaactggagaaccgcagttacaagccctgacggctccagcgaaaaacaaagtcagggtgaaatagatttttcgtttgtatatttggcacaccctcgcgctgtgaatggtttttcatggaggaaaacttccaaatatatgcctcgcgcttcagtctgtaatgtgctgctgacttgttgtaaggataatgtctgtagactttgggtggagacgtttctgcctaatgattgtcttctctacgggggggactgttcccactggacggaaagtattaatctgacgaataacttcaaacggaatgcctcaagcaaggagcgcgtacagaacgctcttgaggtgaacctgcggcacttccggagggggcgtaggagatccctggccctggttgcccatacgggctacctgccacaccagcaggacccacaccacgtccatcgaaatactcccctgcacgccaacgctctctgtcactttcacatagcagccagcatcaaccccgccaccgatatacccctgctgcccagcatcacgtcactgtcattaaatgagaacgaagaaaagaccggtccgttcgttgtgcactggctgaataacaaagaacttcactttactctgagcatggaagtgtttctacagcagctgcgtaagagtttcgagcagccttcctcagaggcctctgtggaagactctaatcaagctgacgtcaaatccgacgaggagaccgacgacggcgtggacgatctgaaaatcaatccagagaagaaggagctcgggtgcgacaagatggtgccgaactcatcattcacctctctctccagtgcggcaatagaccaccaaatcgaggtactcctgtctgagtggtcaaagaatgccgacatgctgttttccatccaccccatggatgggagtctccttgtgtggcatgtggactggcttgatgagtaccagcctggtatgttcaggcaggttcaggtgagctttgtaagtagaatacccgtagcatttccaactggggatgcaaattcgctttgtaagagcataatgatgtatgcctgtaccaagaacgttgacctcgctattcaacagggcaagcagaagcccagcggactgacacgtagcacaagtatgctgatctcgagtgggcacaataagtccagcaacagtctgaaattgagtatcttcaccccaaatgtgatgatgattagcaagcacgccgatggatccctgaaccagtggctcgtaagctttgctgaggaatccgcattctctaccgtccttagcatcagtcataaatcccggtattgtggacacaggttccacctcaatgatctggcatgccactctgtactgccgctgctactcactacatctcaccataacgcgcttagaacacccgatgtggacaatcctgaacagccctttgatgctcttaacattgaagagtgcagcctgacacagcagaacaagtcaacagtggacgtcgccttccaggaccctagtgccgtttacagcgagctcatcttgtggcgcgtggaccccgttggccctcttagcttttctgggggtgtatccgaactggcacggataaacagtctgcatgtgagcgctttcagcaacgttgcctggctgcccacactcataccaagctactgtctcggtgcatattgtaattccccaagtgcctgttttgtcgcttccgacggacagtatctcaggctgtacgaagctgtgatcgatgccaagaagctgctgagcgagctgtctaatcccgagatcagtaagtacgtgggagaagtcttcaatatcgttagccaacaatcaacagctcggcctggatgcatcatagccctcgatccaatcacaaagcttcatggcagaaaaacacagctattgcacgtctttgaggaggatttcattctcaacaatctagaaaagaaaagcctgggcaaagattctattctgtcaaacgccggatccagtcccaacggattttccgagaagttctatctcattgtgatcgaatgcactcaagacaaccgcagcctcctccacatgtggaatctacatctgaagagtatccccgtttctctggacgagaaagtagatacaaaattgtcggaggccgtgtggcagccagaggagcattattcatctagtccagagaaaattctgtctcccttcagccagaaataccaggcatgtagggcaaatttgcagtcaacctcacggctcacactcttttccgaaatggtctattcacaggaattgcatctcccagagggggtcgagatcatctcaatcaagccaagcgctggccacctgtctagttcttccatctatcccgcctgtagcgctccgtatctcctggctacgtcctgcagcgacgaaaaggtgaggttttggcgttgtcgggtaaccgacggcgagtcagccacctcaaagaatggcaagatcgacttagcttacatctgggaagagtggcctctactcatcgaagacgggttgcaatcaaacagctcgatcactgtaccagggagacccgtagaagtgagctgtgcccacaccaatcgtctggcagtggcatataagcaacctgccagtaactctagatcgtcccaagattttgtgatgcatgtcagcatattcgagtgcgagtcaaccggcggcagttgttgggttctcgagcagactatacatctggatgagctttccaccgtgctcgattcaggcatttcagtagatagcaatttggttgcgtacaataaacaagatatgtatctttccagtaaagagaacattacctcgaacaccaagcatctggttcacctggattggatgagtcgcgaggacggtagccatatactcaccgtgggcattggttctaaacttttcatgtacggacccctcgctgggaaggtgcaggatcagacagggaaagaaaccctggctttcccactctgggaaagcacgaaggttgtccccttgtccaaattcgttttgctccgtagtgtcgacttggtgtccagcgtggatggctctccacccttccccgtgagcctgagctgggtaagggacggaattctggtcgttggcatggattgtgagatgcatgtgtactgccagtggcagccctctagtaaacaagagcccgtgattaccgacagttactcgggtagtacaccctccattaccagccttatcaagcaatccaacagtagcagcggacttcacccacccaaaaagaccctgacacgatccatgacttccttggcccagaagatctgtggtaagaagactgcattcgacccaagcgtggacatggaggactccggactctttgaggccgcacacgttttatcgcccacactgcctcagtatcatcctttgcagctattggagctgatggatctcgggaaggtccgccgcgccaaagccattctgagccatctggtgaaatgcattgcaggcgaggtggttgcattaaacgaggctgagtcaaatcatgagagaagactcaggagtttgacaatcagtgcgagtggctcgactacaagggatccccaagcttttaataaagcagaaaatactgactatacagaaatagacagcgtgccccctctacccctctacgcactgctggccgcagatgacgacagctgctactcgtctctcgaaaagtcctctaatgagagcacactgagtaaaagcaaccagctgtcgaaagagagctacgatgagctcttccaaactcagctcttgatgaccgatacccacatgttggaaaccgacgaagaaaacactaagccgagggtcatcgatctatcccaatatagtccgacctactttgggccagagcatgctcaggtactgtccggccacctcctgcactcttccctgccaggtctgtcacgaatggaacagatgtcgttgatggccctggccgataccattgctaccacgagcacggacattggggagagtagggacagaagccaaggtggcgaaacactggatgagtgcggactgaaattcttgctcgccgtacgactgcacactttcctaactaccagtctccccgcttatagggctcagctccttcatcaaggcctgagcacatcacattttgcttgggccttccactcagtggctgaggaggaattgctgaatatgttacccgctatgcagaaggacgacccaacctggtcagaattaagagcaatgggcgttggctggtgggtgaggaacactcgcattcttcgtaagtgtatcgagaaagtagcaaaggccgccttctaccgcaaaaacgaccctctggatgccgcaatcttttatttggcaatgaagaaaaaggctgtgatttggggattgtacagagccgagaagaatacacggatgacccagttctttgggcacaacttcgaagatgagagatggcggaaggccgcactgaagaatgccttttcattgcttggaaaacagcggtttgagcattccgcagccttcttccttctggccggttgcctgcgggatgctatcgaagtttgcctggaaaagctcaatgacattcagctggccctagtcatagctcggctttatgaaagtgaatttgatacttcagctgcgtataagtccatactgagaaaaaaagtgctcggaattgactctcccgtgtccgagctgtgcagcctcaacatcaatatgcaccatgatcctttcctgcggtcgatggcctattggatcctcgaggactattctggggcactggagactctcatcaaacaaccaatccgagagaacgatgaccaggtgctttctgcttcaaaccctaccgtgttcaatttctataattacctgcgcactcatcccttgctcctccggaggcatttcggctcttctgacacatttagtacccatatgtccttgaccggcaaaagcggcttagccggtactatcaacctgtcggaacggcgcctattctttacaacagcaagtgctcatttgaaagcgggctgccccatgctggccttagaagtgctgagtaaaatgcccaaggtgataaaaaagacaaggccattttaccgcgcctcctcctttctcgacacctcaaaggactgctctccctcttctcccctcaagctggacgcacgcgaagataaatcctctgccgttgactggagccagtcgctgatcaacggttttggctctagcagtgaggggtcaagcgaaaagcagtccaactctacgctgtcattcgattggagtcagcccagtgtcgtcttccaggacgactccttagagctgaagtgggatagcgacaacgatgaggagaatgaggacgtgccaattagcatgaaggagctaaaaccactgcagaggaagactgataagaagctggacgacataagctctaactatacggagtctttcagcacactggatgaaaacgatctcctgaatcccagcgaggatataatcgctgtgcagctaaagtttagagcctgcctaaaaatccttactgttgaactgagaacattgagcaccggctacgagatcgatgggggtaagctgcgttaccagctgtaccactggcttgaaaaggaggttatagctctgcagcgcacctgtgacttctgctctgatgcagaggaactgcagagcgcattcggccggaatgaagacgaatttgggttgaacgaggacgccgaggacctgccgcaccaaacaaaagtcaagcaactgagagaaaatttccaggagaagaggcaatggttactgaaatatcaatctctgctgcggatgttcttgagctactgcattttgcatggctcccacggcggaggcttagccagcgttagaatggagctgatcctactcctgcaagagtcacagcaggaaacttcagagccattgttctcgtctccactgagtgaacagacttccgtccctctcttgtttgcctgtaccgcaaatgctaagactgtggtcgctaatccattattacatctgagtaatctgacgcatgatatccttcacgccatcataaacttcgactcacctccccatcctgatattcagagcaataaagtatatgttatgcacactctggctgcttctcttagtgcgtgcatatatcagtgcctgtgcggctctcacaactacagttcattccagaccaatcaattcaccggaatggtgtaccaaaccgtcctgctgccccacaggcccagccttaagaccggaagcttggatgaggcactgactcctaatacttcacccgcacagtggcctggcattacctgtctgatcaggctgctgaacagctcaggcgaggaagcacaatcaggccttaccgtgctgctgtgtgagattctgaccgccgtttatttaagcttgtttatccacggtttggccactcactcctctaacgagctttttcggattgttgcccatccacttaatgagaagatgtggtcagctgtcttcggtggaggagctcacgtgccaagcaaggaacaaactcacagcaagacgctgccggtgtcaagccttgtcgaggagggcgagaagcaaaacaagaggttcaggccatcaaagatgagctgtcgtgagagcgcccctctgacaccgtcctctgctcctgtttctcaagagagtttggcagtcaaggaaaaattcatcccccccgaacttagtatctgggattacttcattgccaagccatttcttccatcctcccagtccagagcagagtacgacagcgaagaatccctgggctctgacgacgatgacaacgacgacgatgatgatgtgctagcctcagatttccatttacaggaacattctaatagcaattcttacagctggtctttgatgcgcctggccatggtgcaactggtcctgaataacctaaaaaccttttatcctttcgccgggcacgatttagctgagctgcctgtaagcagtcctttgtgtcatgcagttctcaagaccctacagtgctgggaacaggtgctgcttcggaggttggagatccacggaggtcctcctcagaattacatcgcctcacacacggccgaagagagcctgagtgccggaccagctattcttagacataaagccctgctagaacctacgaataccccctttaagtccaagcaccatctagctttgtcagtaaaaaggctctggcagtatctggtgaagcaggaggagatccaagaaacatttatcaaaaatatctttacgaagaaaaggtgcctcaatgagattgaagctgatctgggataccctggcggcaaagcacggattatacacaaggaatccgacattatcaccgccttcgccgtgaacaaagctaaccggaattgtatcgccatcgccagtagccacgacgtccaagaactcgatgtgtccggcatactcgccactcaggtctatacttgggttgacgacgacattgaagtcgagacaaaggggtctgaggatttcctcgtgatccatgccagggatgatttaaccgctgtccagggcaccaccccttatacccatagcaaccctgggacccccattaacatgccatggttgggatccacccaaaccggtcgcggggcttcagtaatgattaagaaagctattaataacgtgcgacgaatgacatctcatcctaccttgccgtactaccttacaggcgcccaggatgggagcgtgcggatgttcgagtggggacactcccaacagatcacttgtttcagaagcggggggaactcccgtgttacgaggatgaggtttaactatcaagggaacaagttcggaatagtcgacgccgatggatacttgagtttgtatcaaaccaattggaaatgctgtccggtgacaggctctatgcctaaaccctaccttacctggcagtgccacaacaagactgccaatgacttcgtctttgtctccagcagttctctgatcgccacagccggcctttccactgacaacaggaacgtttgtctttgggacaccctggtcgcgccagccaacagcctggtccatgctttcacatgccatgatagcggggcgaccgtcctggcctatgcccccaagcatcagctgcttatttctggaggacgaaaaggctttacttatgtgtttgacctctgtcagcggcagcagagacaactgttccagagccacgactcccctgttaaagccgtggccgtggaccctacagaggagtattttgtgaccggttctgccgagggcaacatcaagatttggtccctctccacattcgggcttctgcacacctttgtttctgagcacgcccgccagagcatattcagaaatattggcaccggagtgatgcaaatcgaaaccgggcccgctaatcatattttctcctgtggggcagatgggaccatgaagatgcgtatactgcctgaccagttctcaccacttaacgaggttctgaagaacgacgttaagtttatgctatag

SEQ ID NO: 114842 - DNA, 1770 bp, synthetic construct
  misc_feature 1..1770: note = Description of Artificial Sequence: Synthetic coding sequence
  source 1..1770: mol_type = other DNA
atgaatctgcaccaggttctgacgggagccgtaaaccctggagaccactgctttagcgtgggcagcattggcgaccagagatttactgcatatgcatctggctgcgatattgttatactcggaagcgactttgagcgcctacaaattatccccggggctaaacacggtaatattcaggtgggttgcgttgactgtagcatgcagcagggcaagatcgcggcttcctacggtaacgtaatcagtatctttgaacctgtgaaccttcccaagcagaagaagaacctggaactatacagtcagtggcagaagtcaggacaattcttcctagagagcatcgctcacaatattacatgggaccccacaggcagccggttattaaccggttcttcctatctccagttgtggagtaatacaaatctggagaaacctaccgaagatgagaatctgaacaaaacagacttgaattttggggactggaagtgcatttggcattgcaagacagcatcccaagtccatctgatgaagttcagcccggacggggagttctttgcaacagccggtaaggatgattgtcttctcaaggtatggtataacgtcgagaactggcgcactgccgtgacaagccctgacggatcttctgaaaagcagtctcagggcgaaatagacttctcatttgtttatttggcgcacccccgggcggttaatggcttctcctggcgaaaaacctccaaatatatgccccgggccagcgtgtgcaacgtacttctgacgtgctgtaaagataatgtgtgcaggctttgggtcgagacctttttaccaaacgattgtcttctctatgggggcgactgctcgcattggactgaatcaattaatctgaccaataactttaagcgaaacgcatcctcgaaggaacgagtgcagaatgcactggaggttaacctgcgccactttcggcgcgggcgacgccggtccctggcactggtagcccacacaggatacctgccacaccagcaggacccacaccacgttcaccgaaatacacccctacatgccaatgccctctgccactttcacattgccgccagcatcaatccagccactgacatccccctcctgccaagcattacttctttgtccttgaatgagaatgaggagaagaccggtccattcgtcgtccattggttaaataataaagagctgcactttacactgtccatggaagtgtttctgcagcagctaagaaagtcctttgagcaacccagcagtgaagcctcagtcgaggactctaatcaggcggatgtgaagagtgacgaagagaccgacgatggagtggacgatctgaagattaaccccgagaagaaagagttgggatgtgataagatggtcccgaactcctccttcacatctctaagcagcgccgccattgatcatcagattgaggttcttttgtctgagtggtccaagaatgcggacatgctgttttccatccaccctatggacggatccctgctcgtttggcatgtggactggctcgatgagtatcaacccggcatgttccggcaggtgcaggtgagctttgtctccaggattccggttgctttcccaactggcgatgctaattctctctgcaagtctatcatgatgtacgcttgcacaaagaacgttgatttagcgattcagcaggggaagcagaagccgtcaggtcttacccgatccacctcaatgttgatctctagtggccataataagtccagtaattccctcaaatag

SEQ ID NO: 114843 - DNA, 9147 bp, synthetic construct
  misc_feature 1..9147: note = Description of Artificial Sequence: Synthetic coding sequence
  source 1..9147: mol_type = other DNA
atgaaccttcatcaggtcttaactggcgccgtcaatccgggagaccactgtttttcagtgggttcaattggagaccagcggtttaccgcctacgcttcggggtgtgacattgtcattcttggaagcgattttgagcggctgcagatcattcccggtgcaaagcacgggaatatccaagtgggatgcgtggactgtagtatgcagcagggcaagatcgccgcctcctacggtaatgtaatatccattttcgaacccgttaacctacccaaacagaagaaaaatctggagctgtactcccaatggcaaaaatcgggacagtttttcctcgaaagtatcgcccataatattacttgggaccctaccggcagtaggctgcttacaggctcaagctatcttcagctttggtctaataccaatcttgagaagccaaccgaagacgagaatctgaataagaccgacttaaattttggggattggaagtgtatctggcactgcaaaaccgcttcccaggtgcacctcatgaaattctcgcctgatggcgagtttttcgctaccgcgggaaaagacgattgtctcctgaaagtgtggtataatgtcgagaactggcgcactgctgtgacttcgccggacggatcttcagaaaagcagagccagggggagatcgacttcagcttcgtttatctcgcccatccacgtgctgtaaacggattctcttggagaaaaacctctaagtatatgccgcgagcctctgtgtgcaacgtgctcttaacatgttgcaaggacaacgtatgcaggctgtgggtggagactttcctcccaaacgactgtcttttgtacgggggggactgctctcactggacagaaagcatcaacctgactaacaattttaaacggaatgcatcgtctaaggaacgcgtgcagaacgcactcgaggtcaatctccgacacttcagacgcggaagaaggcgttcactggctctggtcgctcacactggctatttaccccaccagcaggacccccaccacgtacaccgcaacacaccgcttcatgctaatgccctctgtcacttccatattgccgcctctattaacccagccacggatattcctctgctgccctctatcacaagtcttagcctgaacgagaatgaagaaaagaccggcccctttgtggtgcactggctgaataacaaggaactgcattttaccctgagcatggaggtttttctgcagcagctccgaaaatccttcgaacagcccagttctgaggcttcagttgaagacagcaatcaagccgacgtgaaaagcgatgaggagacagacgatggcgtagatgacctgaagattaaccctgagaagaaggagctgggatgtgacaaaatggtacctaattccagtttcaccagtttgtcatctgccgcaattgatcatcagatcgaggtgctccttagcgagtggtccaagaacgcagatatgctcttcagcatccaccccatggatgggtcgctacttgtttggcacgtggattggcttgatgagtaccagccaggaatgtttcgtcaggtgcaggtttcttttgtgtctaggatccccgtggcgtttcctacaggagatgccaatagcctttgcaaaagcatcatgatgtatgcatgtactaagaacgtcgatctggctatccagcaagggaaacaaaaaccatcaggcctgacgcggagtacctcaatgttaatatcaagcggacataataaatcttcaaactcattgaagttgagcatattcacaccaaatgtcatgatgatcagtaagcacgccgacggaagcctgaatcagtggctagtcagttttgccgaagaatccgccttctcaacggtgttatcaatatcccataagtctcgatattgcggtcacagattccacctcaatgacctggcctgccattctgttctcccactgcttctcacgacttcgcaccacaacgccctgcgaactccagacgtagataatccagagcagccttttgatgctcttaatatagaagagtgtagtctcacccagcagaacaaatccacagtggatgttgcatttcaggacccctccgcagtttattctgagctcatcctgtggcgagtggaccccgtcggcccactctcctttagtggaggggtgagcgagcttgcccgcataaattcgctccatgtgtccgccttcagtaatgtggcctggctccccactttgatacccagctattgcctgggcgcctattgcaactctccatcagcctgttttgttgcctcagatggtcagtatctgcggttgtatgaggcagtgattgacgccaagaaactgctcagtgaactgtccaacccagagatcagtaaatacgtgggcgaggttttcaatatcgtttcccagcagagcacagcaagaccaggctgcatcattgccttagatccaattaccaagcttcatggacggaaaacccagctcctccacgtgttcgaggaggattttattctgaataacctcgaaaagaaatccctgggcaaagattccattctatccaatgcaggatcctctccaaacgggttctccgaaaaattttacttgatcgtgattgaatgcacacaggacaatcggtctctgctgcatatgtggaacctccatctgaaatccattcctgtctcacttgacgaaaaggttgatactaaactgagtgaggctgtatggcagcccgaagaacactacagcagtagccctgagaaaatcttatctcccttctcccagaagtaccaggcttgcagggccaacctgcagtctacaagccgtctgaccctgttcagcgaaatggtctattctcaggagctccatctgcctgagggggttgaaatcataagtattaaaccaagcgctggacacctctcttctagcagcatctatccggcttgttctgctccctacctgctggcgacaagctgttctgatgagaaggtaagattttggagatgccgcgtgaccgatggtgaatcggcgacttctaagaacggcaagatcgatcttgcctatatttgggaggaatggccactattgattgaagatggtctgcagtctaattcttctattacagtgcccggcagacccgtggaagtttcctgtgctcacacaaacagacttgccgtggcttataaacagcccgccagtaattcaagatcttcacaggactttgtgatgcacgtaagcatcttcgaatgcgagtccacaggaggctcctgttgggtactggaacagactatccacttagacgagctgtctacagtccttgattctggcatcagcgttgatagcaacttagttgcgtataacaagcaagatatgtatctgtcctctaaggaaaatattaccagcaataccaagcatcttgttcacctggattggatgagccgtgaggatgggagtcatattctcaccgtcgggatagggtcaaagctctttatgtatggccctttggccggaaaagtgcaagaccagaccggcaaggagaccctggccttcccactgtgggaatccaccaaagtcgtacccctgtcaaagttcgtgttgctgaggagtgtagatttggtttcatccgtcgatggaagccctcctttccctgtcagcttgagctgggtccgcgatgggattctagtcgtaggaatggattgcgaaatgcacgtatactgtcagtggcagccatcatcaaaacaggagcccgtgatcacagacagctacagtggtagcacaccaagtatcaccagcctgattaaacaatccaactcatcgagcggcctacatccgccgaagaaaaccctgactagatctatgacttcgttagcccagaagatctgcgggaagaagacagcttttgaccctagtgtcgatatggaggactcaggccttttcgaagctgcccatgtgctcagccctacgctgcctcagtatcatcccttacagctgctagaacttatggatttggggaaagttcgcagggcaaaggccatccttagccatctggttaagtgcatcgccggcgaggtagtcgctttgaatgaggctgagagcaatcatgagaggaggctgaggtccctcacaatttctgcgtctgggtccaccacaagagatccacaggcatttaacaaggctgagaataccgactacacagaaattgattcagtcccaccgttgccactatatgcccttctggcagccgacgatgattcctgttattcaagcttggaaaaatccagtaatgagagcacattaagcaagtccaaccagttgtccaaggagtcctacgatgagctgttccaaacacaattactcatgactgacacgcacatgctggaaaccgacgaggagaacaccaagccacgggtgatcgacttatcccagtattccccaacgtatttcggcccagagcacgcccaggtattaagcggacacctgttgcacagctcactgccagggctttccaggatggagcagatgtcattgatggccctagcagatactatcgcaaccacatctaccgacattggggagagccgagatagaagccaggggggggagaccctggacgagtgtggtctaaaattcctgctggcagtgcggcttcatacttttcttactacatctttgccagcttacagggcacaactgctgcaccaggggctatctacaagccactttgcatgggcctttcatagtgtcgctgaggaggagctgctgaacatgctccccgcaatgcagaaagatgacccgacgtggtccgagttaagagccatgggggtcggctggtgggtaaggaatacccggatactcagaaagtgcatagagaaggtcgctaaagcagcgttctacaggaagaacgaccccctggacgcagctattttctacctggccatgaaaaaaaaggccgtgatatggggcctctacagggcggaaaaaaacacgaggatgacccaattttttgggcacaactttgaggacgaacggtggagaaaagccgccctaaaaaacgccttttctctactgggtaaacagagattcgagcattctgcagcattcttcttgctggccgggtgtttacgggacgcgattgaagtctgtttggaaaagctaaatgacattcagctggctttggtcatagcgagactgtatgaaagcgagttcgatacctccgcggcctataaatcgattctcagaaagaaagtcttaggcattgattcgccggttagtgagctctgtagcttgaacatcaatatgcaccacgaccccttcctgcggtccatggcatattggatcctggaggattacagcggcgccctggagacattgataaagcaacccattcgtgaaaacgacgaccaagtgttatcggcatcgaatccgacagtcttcaacttttataactacctacggacacaccctcttctccttcgtagacacttcgggtcctccgatactttctccacacatatgtcactcacaggtaaatccggtctggccgggacaattaacctgagcgagagacgcctgttttttacaactgcgagcgcccacctgaaagcaggctgtcctatgcttgcactcgaggtgctgtccaagatgcctaaagtcataaaaaaaacaagaccattctaccgggcctcttctttcttggataccagtaaggactgtagtcccagctcacctttgaagctcgatgcccgcgaggacaaatcaagtgcggttgattggtcgcaatctctcatcaacgggtttggcagcagtagtgaaggctctagcgaaaaacagagcaacagcactctgagttttgactggtctcagccaagcgttgtgttccaggacgatagcttggaactgaagtgggactcagataacgacgaggagaatgaggatgtgcctatctccatgaaagaacttaagcctctgcagcggaaaacagacaaaaagctcgacgatatatcctctaactacaccgaaagcttcagcactctggatgagaatgatctactcaatcctagtgaagacatcatcgccgtgcagctgaaatttcgagcctgtttgaagattctcaccgtggaactacggactctgtctacaggatatgaaatcgacggcggaaagctgcggtaccagctctaccactggctggaaaaggaggtgatcgccctgcagcggacctgtgatttttgctcggacgcagaggaactacaaagtgcatttgggcggaatgaggacgaatttggtctaaatgaggatgccgaggacctgccccaccaaacaaaagttaaacaactgcgagaaaactttcaggaaaaacgacagtggctgcttaagtatcaaagcctattgcgcatgttcttgagctattgtattttgcacgggtcgcatggcggtgggctcgcttctgtgcgtatggaattgattctgctcctgcaagaaagccaacaggagacctccgagcctttgtttagctcccctcttagcgagcaaacctccgttccactcctcttcgcctgtacagcaaatgcgaaaaccgttgtggcgaatcctcttcttcacctcagcaatttgacgcatgacatcttgcacgcaatcattaatttcgacagcccgccccatccagatatccagtctaataaggtgtacgtaatgcacacactcgccgcttccctgtccgcatgcatctaccagtgtctttgcggctctcataattactcgtcatttcaaacgaaccagttcactggcatggtgtatcagaccgtcttgctgcctcacagaccctcactgaaaacgggatctttggatgaagccttgactccaaacacctctcccgcacagtggcctggcataacatgcttaatcagacttctcaatagcagtggcgaggaagcgcagtcaggacttaccgtactgctctgtgaaattcttaccgcagtttatctctctctctttatccacggtctggcaacacatagctcgaatgaactttttcggattgtggcccacccactgaacgaaaaaatgtggagcgctgttttcggcgggggggctcatgttccaagcaaagaacagacccacagtaaaaccttgcccgtgagttcactggtggaggagggggaaaaacagaataaacgttttagaccatccaagatgtcttgcagggaatccgctcctttgacgccgtctagcgcgcccgtttcccaggagagcctggccgtaaaagagaaattcattccaccagagctgtcaatctgggactattttatcgctaaaccctttctgccctcatcacagtctcgcgctgagtacgatagcgaagagagtttggggtctgatgatgatgacaatgatgatgatgatgatgtcttagcaagcgattttcatctccaggaacactcaaattccaacagctactcttggagcctaatgcgactggccatggtgcagctcgtgctcaacaatctgaaaaccttctatccctttgctgggcatgatttagccgagttgccggtgtcatcacccctctgtcatgctgtgctgaagactctccagtgctgggaacaggtcttgcttaggcgacttgaaattcacggaggtcctccccaaaattatatagcttctcacactgcagaggagagcctgagtgcggggccagccatacttaggcacaaagccctcctggagcctacgaatacaccattcaaatccaaacaccatttggccctgtctgtcaaacgcttatggcaatatctcgtcaagcaggaggaaatacaggaaaccttcattaaaaacattttcaccaaaaaaaggtgcctgaacgaatctcttgaggacaactccgaaacaattaagaatagtatgatggaggagcccaatatcaataaaatcgaggccgacctgggctatcctggggggaaggctcgaatcatccacaaagaaagtgacatcatcaccgcctttgcggttaacaaggccaacagaaattgtattgcgatcgcctcctcgcacgatgtgcaggagctggacgtctctggcatcctggcaactcaggtttacacctgggtcgacgacgatatagaggttgagaccaaaggttcggaggacttcctggttatccatgcccgcgatgatctgacggccgtgcagggaacaaccccgtatacccacagtaacccaggtacacctatcaacatgccgtggctgggttccacccagacaggccggggtgcctcagtcatgattaagaaggctatcaacaacgtcagacgcatgacttcccacccgaccttgccttactacctgacaggagcacaggacggcagcgtccgcatgtttgagtggggccattctcaacaaataacgtgctttcgctccgggggaaacagcagggttacccggatgcgctttaactaccaggggaacaaattcggtatcgtggatgctgatggctacttgagcctgtatcaaaccaattggaagtgttgtccagtcaccggatcaatgccaaagccttacttaacttggcagtgccataataaaacagctaacgactttgtgtttgtgagcagctccagtcttatcgccactgctggtctgagcactgacaaccgcaatgtgtgtttatgggacacactggtggcccccgctaatagtctcgtgcacgcctttacgtgccatgactctggtgccaccgtactggcttacgcccccaagcatcaattactgatcagtggcgggaggaagggctttacctatgtgttcgacttgtgtcagcgacagcagcgtcaactatttcagagccacgatagcccagtgaaggccgtggcggtagaccccacagaggaatactttgttacaggctccgcggagggtaacattaaaatctggtcgctatccacttttgggctcctccatacctttgtgtcggagcatgccaggcaaagcatcttccggaacatagggactggggttatgcaaatcgaaactggtccagccaatcatattttcagttgtggcgctgatggcaccatgaagatgcgaattctgcccgaccagttttcacctctgaatgaggtgcttaaaaacgacgtgaagttcatgctgtag

SEQ ID NO: 114844 - DNA, 9111 bp, synthetic construct
  misc_feature 1..9111: note = Description of Artificial Sequence: Synthetic coding sequence
  source 1..9111: mol_type = other DNA
atgcatctccatcaggttcttaccggggctgttaatcctggcgataattgttactccgtcggaagcgtgggtgatgtgccttttaccgcatatggttccggatgtgacatcgttatccttgcgaatgatttcgagtgcgttcagatcatccctggcgctaagcatggaaatatccaagtgagctgtgtggagtgttccaatcagcaaggccggattgccgcgtcatatgggaacgctgtgtgtatcttcgaaccgctcggtattaattcccataagagaaactgccagctgaaatgccaatggttgaaaacaggacaattctttctgtccagcgtcacttacaatttagcatgggacccacaggataaccggctgctgaccgctactgatagtatccaactatgggctcctcccggtgacgatattctggaagaggaggaggaaattgataacactgtcccacccgttctgaatgactggaagtgtgtttggcagtgcaagacaagcgtgagcgtccacctgatggagtggtcccctgatggagaatactttgctaccgccggcaaggacgattgtctcctcaaggtatggtaccccatgacgggctggaagtcttctattatcccacaggatcatcacgaggtgaagcgacgccaatcctcaactcagttctcattcgtgtatcttgcacatccccgcgccgtgaccggatttagctggaggaaaacatcaaaatatatgccgaggggaagcgtctgtaacgtgcttctcactagctgtcatgacggagtctgtagactatgggcggagactctgttgccagaagactgcctgttgggagagcaaatttgcgagactactacctcttccattgctagtagcttgagtcacgcaggccggcataaagacagaatccagcatgccttggaaactatccatcacctgaaaaatcttcgcaagggacagaggcggagcagcgtgctcgtcacccacgctgagcttatgcctgatcagacggccatgcacgaggtacagagacatatcagccaccacgccaacgccttgtgtcacttccatattgcggcctcaataaacccagccaccgatatcccaaacgttcttgtcggaactgcttttaacgtggacgacggtaacggtggtttcgtggttcattggctgaataacaaggaattccatttcacaagttctacagaggtgttcatgcatcagctccgcaagctatctgataagcaggtggaccatgagaatgatgacgctgacagagaggacgaagaacactcccaggaggaccgagaacgaggcctgcacatgaagcttgatcacgatctgagcttggaccgggaatctgaagcaggcaccggctcttccgaacacgaagacggtgagcgcgagggcagcccgaggacatactctcggctgtccgtgcccatgccactgccaacagtgctgcttgatagaaaaatcgagactctgcttacagagtggaacaaaaaccctgacatgctttttacaatacacccggttgatggtactttcctagtgtggcatgtgaagtacctggacgagtacaacccgggcatttttcgccaggtgcaggtgtcattttcgtcgcgtatcccagtcgcttttcccagtggggacgcctctagcctgtcaaagaacattatgatgtacgcctgcattaatgcaaccaaggacagccatcataccctgttacatcaggagggcatgtccgtgggcagtccccatgggagccagccacattctcggtcacatagtacacacatgaatattttagcccctacagtgatgatgataagcaaacacattgacggtagtctaaaccaatgggcagtgacattcgcggacaagtccgcttttaccacggtattaaccgtgtcccacaagttccgctattgtggtcacagatttcatctgaacgaccttgcttgccactccgtgctccctttgttgctgacttccagtcaccacaatgccctgttgacccccgagctggactgtcagtgggacagcgataataagctctcaagactgatggaccccgtaaagcacataaagggctccagcaagcagccattgaggaacgcagccacccgcacctttcacgacccaaatgccatctactccgagctcatactttggagggttgaccccattggcccactgtcctacacggggggtgtgtctgaactggctcgcattaactccttgcacacatcggcattttctaatgtggcttggctgcccacactcatcccaagctattgtctcgggacatattgcaactctgcttccgcgtgctttgtcgcatcagatggaaagaatctccggctctaccaggcggtggtggacgcccgcaagctgctggacgagctgtctgatcccgagagctcaaagttaattggggaggtgttcaacatcgtgtcccagcagtctactgctagacccggctgcatcatcgaactggacgcaattactaatcagtgcggcagcaatactcaactgctgcacgtgttccaggaggatttcataataggctataaacctcacaaagaggatatggagaagaaagaaactgagattttttttcagcctagtcagggctaccgtccacctcctttttccgagaaattttttctggttgtgatcgaaaaggactcaaataataattctatcttgcatatgtggcatctgcacttgaagagcgtgcaagcctgtttggcgaaggctagcgagggggctagtagcgaatccttgctctccgtccctgggcagaaaaacgtcgattcatccccagagaccagtccatcggtcagtccaatgcctcatagcagctctattgcgaatctccagacagcttcaaagctgatcctttcttcgcgccttgtctattctcagcccctagatttgccggaatccgtggaggtcatcagagctactccatccgccggtcatctgagctcaagctctatctatcccgtatgcctcgctccctatttagtcgtcacgacctgctccgataacaaggtgcgattttggaaatgttgcatggaagccaatcccgagtgtaacaaaagcgacgagaaagagatctatcattggaagagatggccactgatgaatgatgagggggaggacaatagcagtaccgtgagcatcgttggacgaccagtggccgtgtcttgctcatacacaggacggctcgcggtggcttacaagcagccaattcatcacaatggattcgtaagcaaagaatttagtatgcacgtgtgcattttcgaatgtgagtccactggtggaagcgagtgggtcctagagcagaccatacacctggacgacctggtcaaggtggggagtgtgctggactcacgggtctccgtggacagcaacttgtttgtgtattctaagagcgatgccctgctctctaaagataggtacttgatccccaacatcaagcatcttgtgcacctcgactgggtgtctaaggaggacggttcccacatattaacagttggggtgggggccaatatcttcatgtatgggcggctttcgggtatcgtcaccgagcagaccaatagcaaggacggtgtggccgttatcactttgcctctcgggggatcaattaagcagggggtaaagtcaagatgggttctgctgagatctattgatctggtgtcctcagtagacggtaccccctcattgcccgtgagtctctcttgggtgcgagacggcattcttgtggtgggcatggattgtgaaatgcacgtctacgcacagtggaaacatgccgtgaaatttggggacactgaggcagatagcagcaatgcagaggaagcagcaatgcaggatcacagcaccttcaagagtaacatgctggcgcgtaagtccgtggtggagggcaccgctatatccgatgacgttttttgtagtcccacagtgatacaggacggagggctgtttgaagctgcacacgtgctgagcccaacgctccctcagtatcatcctacccagcttcttgaactgatggatctgggcaaggtgcgtcgcgcaaaagcaatactatctcatttagtaaaatgcattgctggcgaggtggcaatcgtccgcgacccagacgctggtgaggggaccaagcgccacctgtctagaacaattagtgtctcaggtagcaccgccaaggaaacagtcacagtgggcaaagatggaacccgagactacactgaaatcgattcaattcctcctctacccttgtatgctctgcttgctgccgatcaggacacgtcgtataggatttcagaggaaagcaccaaaataccacagtcctatgaggaccagaccgtgagtcagcccgaggatcagtactccgaactgtttcagatccaagatattcccacggatgacattgatctggagccagagaagcgcgagaacaagtctaaggtcattaacttgagtcagtacggccctgcgtacttcggacaggagcatgccagagttctgtcatctcacttgatgcactcttccctgcctggcctgactagattagaacagatgttcttggttgctctggccgatacagtggccacaaccagcaccgaactggatgagagtcgtgataaatcctgtagcggtagggatacactagacgagtgtgggttgcggtatctcctcgcaatgagactccacacctgcctgctcacatccctgccaccactttaccgggtacagttgctgcaccagggcgtcagcacatgtcacttcgcttgggcattccactcagaagccgaagaagagctgatcaacatgattcccgctatccagcgcggagaccctcaatggagtgaacttcgagccatgggaatcgggtggtgggtgcggaacataaacactctgcgtaggtgcattgagaaagtggccaaagcttcatttcagaggaacaatgatgcactcgatgctgcccttttctatctgtcgatgaagaagaaggcagtagtgtggggactgtttagatcccagcacgacgaaaaaatgacgaccttctttagccataatttcaatgaggaccgttggcgtaaagcagcactgaagaatgctttctccttgctgggtaaacaacgatttgagcagtccgcagccttcttcctcctcgccggctcgctgaaagacgctatagaagtgtgccttgagaagatggaggacatacagttggccatggttatcgcaagactttacgagtcggagttcgagactagtagcacttatataagtatattaaatcagaagatccttgggtgccagaaagatggaagtggattttcttgtaaacggttacatcctgacccattcctgaggtcactggcctattgggtaatgaaagattacacaagggccctggatacactgttggagcagactccgaaggaagatgacgagcaccaagtaattatcaaatcatgcaaccccgtcgctttctcgttctataattatctccgaacccaccccctgctgatacgccgtaacctcgcttccccggaagggaccctggcgactctcggactcaagaccgagaaaaatttcgtcgataaaatcaacctcatcgaaagaaagttgttttttaccaccgccaacgcccatttcaaggtcggctgccctgtacttgccctggaggttctgagcaaaatccctaaggtcactaagacgtcagctctcagtgccaaaaaagaccagcctgatttcatcagccatagaatggacgatgtacctagtcattcaaaggccctgtcagatggtaatggctctagcggcattgagtggtcaaacgttaccagcagccagtatgactggtctcagccgatagtcaaggtcgatgaggaacccctgaatctggactggggggaagaccacgactcagcactggatgaggaggaagatgacgcggtcggactggtgatgaagagcactgacgcgcgcgagaaggataaacagtctgatcaaaaggcatctgatccaaatatgcttctcaccccacaggaggaggacgaccccgaaggagacacagaagtcgatgtgatcgccgaacagctgaaatttagagcatgtttgaagattctgatgaccgagttacgtaccctcgctacgggctatgaggtggatggtggcaaactgagattccagctttataattggttggagaaagagatcgccgcgctgcacgaaatctgcaaccatgagagcgtgatcaaggaatactcgagtaagacgtactccaaagtggaatctgacttgctcgaccaggaggagatggtagacaagccggacattggcagctacgaacgccaccagattgagaggcgtagattacaggcaaaacgagagcacgcggagcgacgcaaatcctggttacagaagaaccaagacctgttgagggtgttcctgtcttattgctccttgcatggggcacaggggggaggcttggcctcagtgcggatggaactgaaattcttactccaggagtcccagcaggaaactaccgtgaagcagctgcaaagtccactgccattaccgaccactctcccactgctcagtgccagcatcgctagtaccaaaaccgtgatcgcgaaccccgtgctgtacctgaacaaccacatccatgatatcctgtacaccattgtgcagatgaagacccctccacaccctagcattgaagatgtgaaggtgcataccttacacagcctggctgccagtctgagcgcgagcatctaccaagcgctgtgcgatagtcacagctactcacagacggaaggtaaccagtttacaggtatggcttaccagggcttactgctgtcagaccggcgccgactgagaacagaatccatcgaagagcacgcaactcctaacagctctcctgcccagtggccaggagtgtcctcactcataaacctgttgagtagcgctcaggacgaggatcagcccaagctgaatatcctgctctgcgaggctgtggtagccgtctacttatctttactgatccacgccctggctactaactcgagttctgaactattcagactggccgcccatcctctcaacaatcggatgtgggccgccgtgtttggtggaggtgtcaagctggttgtcaagcctcgccgtcaatcagagaatatcagcgccccgcccgtgctgagcgaggacattgataagcatcggaggcgctttaatatgcgcatgttagtgccaggacgccctgtgaaagatgcaacacctccacctgtgccggcagagcgtccaagctataaggagaaattcatccctccggaactgtcaatgtgggactatttcgtggcaaaaccctttttacccctatctgacagtggggtgatctacgactccgatgaatcaattcacagtgatgaggaagacgacgcctttttctctgatacccaaatccaggaacatcaagatcctaactcttattcttgggcactactacacctcaccatggtcaagctggcacttcataacgtgaaaaatttcttcccaattgctggcctcgagttcagtgaactccccgtcactagccccctgggtattgctgtgataaagaacctggaaaactgggagcagatcttgcaggaaaaaatggaccagttcgaaggaccccccccaaactatataaacacatatccgacggacctgagcgtcggggctggccctgcgatcctgcgcaacaaagccatgctcgaaccagagaatactcccttcaaaagtcgggactctagtgcctttccggtgaaacggctttggcacttcctggtcaaacaggaggttctgcaggagaccttcattcgatacatttttaccaaaaagcggaagcagtctgaggtggaggcagatttggggtacccaggaggcaaagccaaggtgatccacaaagagagcgacatgatcatggcctttagtgtgaataaagccaactgtaatgagatcgtgctggctagcactcatgacgtgcaagaactggacgtgacatcactgctggcttgccagtcatatatctggattggcgaggagtacgacagagaaagtaagagcagcgacgatgtggattaccggggttccacaaccactctgtaccagccctctgctacctcatactctgcttcccaagtccatccgccaagttcgctaccctggctcggaaccgggcagacctcaactggcgcttcagtgttaatgaagcgcaacctccataatgtaaagcgcatgacgagccacccagttcatcagtactaccttacaggcgcgcaggacggatcagtccgtatgtttgagtggactcggccccaacaacttgtgtgttttagacaggctggcaatgctcgcgtaacccggctgtacttcaattcgcagggtaacaagtgcggcgtggcagatggcgagggttttttgagtatatggcaggtgaaccaaacagccagcaacccaaagccatatatgagctggcaatgtcacagtaaggcgacttccgacttcgcatttatcacgagctcgagtctagtggccaccagtggccattctaacgataacaggaatgtgtgcctgtgggatacactaataagcccaggcaattctcttatccatggatttacctgtcacgatcatggagccaccgtgctccaatacgctccgaaacagcagctgctaatcagcggcgggaggaagggtcacgtgtgtattttcgacattagacaacgacagctgattcacacctttcaagcccatgattctgccatcaaagccctggcacttgatccttatgaggagtactttactaccgggtctgccgaaggaaatataaaggtgtggagactgacaggtcatggcctgattcattcgtttaaatctgaacatgccaagcagtctatattcagaaacatcggcgcgggggtgatgcaaatcgacatcattcagggcaacagactatttagctgtggagctgatggaacactgaaaacgcgcgtgctgcccaacgctttcaacatcccgaaccgcatattggacattctttag

SEQ ID NO: 114845 - DNA, 1809 bp, synthetic construct
  misc_feature 1..1809: note = Description of Artificial Sequence: Synthetic coding sequence
  source 1..1809: mol_type = other DNA
atgtgggattacttcgtggccaaacccttcctcccactgagtgacagtggggtgatctacgactctgatgaaagcatacatagcgacgaggaggatgacgctttcttctccgacacacagatccaggaacaccaagaccctaattcttactcctgggctctcctgcatcttactatggtcaaactggcactgcataacgttaagaatttttttccaatcgctgggttggagttcagtgagctccccgtcacctccccactgggaatcgccgtcatcaaaaatttagagaactgggagcagatactccaggagaagatggaccagtttgaaggaccccccccaaattacatcaatacatatccaacagaccttagcgttggggctgggccagcaatacttcgtaataaagctatgctcgaacccgaaaacacccccttcaaatcgagggattcgagcgcttttcctgtaaaacggctgtggcattttctggtgaagcaggaggtgcttcaggaaacgttcataagatacatcttcaccaaaaaacgaaaacaatccgaatccatcgaggaacacgttgagcaggtgaatcagaactgtatcgccgaagattgtcacatcaaggtggaagcagacctgggctacccaggaggaaaggccaaggttattcataaggagtctgacatgattatggccttctctgttaacaaggccaattgcaatgaaatcgttttggcaagcacacatgacgttcaagagcttgatgtgactagccttctggcctgtcagtcctacatctggattggggaggaatatgatcgtgaatcaaaatcgtcagacgacgtcgattatcgcggaagcacaacgactctgtaccagccaagcgcaacgtcatacagcgctagccaagtgcaccctcccagttcacttccatggctcggcaccggccagacttccaccggagcaagtgtgctcatgaagaggaatctacacaacgtcaagcgtatgacgtctcaccccgttcaccagtactatctcaccggagcccaggacggttccgtgaggatgtttgagtggaccaggccccagcagctcgtatgtttcaggcaggcaggaaacgcccgagtgactaggctatacttcaattcccaggggaataagtgcggggttgccgatggagaaggatttcttagcatatggcaggtcaaccagaccgcatccaatccgaagccttatatgtcttggcaatgtcactccaaggctactagcgatttcgccttcatcacatcaagttccctcgtggccacttcagggcattctaacgacaacaggaacgtgtgcctatgggatacacttatctctcctggcaattcccttatacatggctttacatgccacgaccatggggccaccgtgctccaatacgccccgaagcaacagctgttaatctctggcggcaggaaagggcacgtctgcatattcgacatccgccagcgtcagctgatccatacttttcaggcccatgattctgctatcaaggccttagctctagatccttatgaagagtattttacaacaggcagtgcagagggcaatatcaaggtgtggcgcttaaccgggcatgggctgatccatagcttcaaatctgagcatgccaaacagtcaattttcagaaacatcggtgctggcgtcatgcagatcgatattattcagggtaataggctgttctcttgcggggctgacggcactctgaaaactagggttctgcctaacgcatttaacatcccgaatcggatattggacatcctgtag

SEQ ID NO: 114846 - DNA, 7203 bp, synthetic construct
  misc_feature 1..7203: note = Description of Artificial Sequence: Synthetic coding sequence
  source 1..7203: mol_type = other DNA
atgcacctgcatcaggttctgactggagcggtgaaccccggtgacaactgctatagtgtcggctccgtgggcgacgtgccatttaccgcctacggttccggatgtgacatcgttattctggccaatgattttgagtgtgttcagattattccaggcgccaagcatggcaatatccaagtctcatgcgtcgagtgcagcaatcagcagggacgcatcgcggcgtcttatgggaacgccgtttgcattttcgaacccctggggataaacagtcacaagcggaattgccagctcaaatgccaatggctgaagacaggccagttttttttatcttcggtgacatacaacctagcctgggacccccaagacaatcgccttttgactgccacagactcaatccaattgtgggctccccccggggatgacatattggaggaagaggaggaaattgataacacggtgccgcccgttctcaacgactggaagtgcgtgtggcagtgtaaaacaagtgtatcagtccatctaatggagtggtcccctgatggcgagtattttgctactgctggaaaggatgactgtctcctgaaggtctggtacccaatgacgggctggaaatcttcaatcatacctcaggaccatcacgaagttaaaaggcgccagtccagcacacagttcagcttcgtgtacctggcccatcctagggccgttactggtttttcctggcggaagacctccaagtacatgcctcggggttcagtgtgcaatgtgcttctcacaagctgccacgacggcgtgtgtcgcctctgggcagagacactcctcccagaagattgtttattgggcgaacagatttgcgaaacgactacttcttcaatcgccagctccctgtcacacgccggccggcataaagatcggattcagcatgccctggaaaccatccaccaccttaaaaacctgcgcaaaggccaacggcgttcttcagtattggtaacccacgccgagcttatgccagatcaaaccgcaatgcatgaagttcagaggcacataagtcaccatgccaacgccctgtgccactttcacatcgccgcctcgatcaaccccgcgaccgacattccaaacgtgctagtgggaaccgcattcaacgtggacgatggaaatggcggattcgtggtccactggttgaacaacaaagagttccatttcacttcgagcacagaggtattcatgcaccaattaagaaagctaagtgacaaacaggtagatcacgagaatgatgatgccgatcgggaggacgaggagcacagtcaggaagatcgcgaacgtggcctccacatgaagcttgatcacgatctgtcgctagacagagaatcggaggcagggaccgggtcatcagagcatgaggatggggagagagaggggtcccctagaacatactccagactcagtgtgcctatgccactccccactgtccttttggaccggaagattgagacactcttgaccgaatggaataagaaccccgatatgctcttcacgatccatccagtcgatggcacgttcttagtatggcacgttaagtaccttgacgagtacaatcctggaatattcaggcaggtccaagtgagctttagctcgcgaattcccgtcgcctttccctccggtgatgcttcatccctttctaagaatataatgatgtacgcctgtataaacgcaactaaggactcccatcatacactgctccaccaggaagggatgagcgtaggctcccctcacgggtcacaaccccattcccgctcccactcgactcacatgaacatattggcgccaaccgtgatgatgatcagtaaacatatcgacgggtcactaaatcagtgggcggtcactttcgctgacaagtctgctttcaccactgtactgactgtgagccacaagtttagatattgtggccaccgctttcatctaaatgatctggcctgtcacagtgtgctgcctctgctcctgacgagctcacatcacaatgctctgctgacccctgaactagattgccagtgggattctgataacaagctttctagattgatggatccagttaaacacattaagggaagctcaaagcaacccctgcggaacgccgccactcgtactttccatgatcccaacgctatctactcagagctcattctgtggcgcgtggacccgattggtcctctctcttacactggcggtgtgtccgaactcgctaggatcaactcgctgcacaccagcgctttctctaacgtcgcatggctgccaactctgattccaagctattgcttaggaacgtattgtaacagcgcatcagcttgcttcgttgccagcgatggtaagaatctgagattatatcaggcggtcgtggacgcaaggaagctccttgatgaattgtccgaccctgagagttccaagctgattggagaagtgttcaacatcgtttcccagcagagtaccgctcgcccaggatgcattatcgaactagacgccatcaccaatcagtgtgggtccaatacacagctgctgcacgtttttcaagaagattttatcattggctataagccccataaagaggacatggaaaagaaagaaacagaaattttttttcagccatcccagggatacaggcctcccccgtttagcgaaaagttttttcttgtggtgattgagaaagatagcaataacaatagcattctacacatgtggcatttacacttgaaaagcgttcaggcttgcctcggcagagatacactggatgagtgtggcctccggtatctcctggccatgcggctccatacttgtctcctcacatcgctcccacccctgtacagggtgcagctcttgcatcagggagtgtctacctgccatttcgcttgggcctttcactctgaagccgaggaagagcttataaacatgattcctgctatccagcggggggatccccagtggtccgaactgcgggcaatgggcatcggctggtgggtgcgtaacatcaacacgctgaggcgatgcatcgagaaggtcgcaaaggcgtcctttcagaggaataacgatgctttagacgccgcattattctatctttcgatgaagaagaaggctgtggtgtggggactttttagatctcagcatgatgagaagatgacaacgtttttttctcacaactttaacgaggataggtggagaaaggcggcacttaaaaacgccttttctttgctggggaaacagaggtttgaacagtccgctgcgttctttctgctggccgggtctctgaaagatgcaatcgaggtgtgtctggagaaaatggaggacatccaactggccatggtcattgcacgcttgtacgaatccgagttcgaaacctcaagcacgtatatcagtattttaaatcaaaagatcctgggctgccagaaagatggaagcggcttctcgtgtaagcgcctccaccccgacccattcctgcggtcactcgcatattgggtgatgaaggattatacacgcgccttagacacgttgctggaacagactccaaaggaggatgatgagcaccaggttattattaaaagttgcaacccagttgccttttctttctataattacctaaggactcaccctttgttgattcgcaggaatttagcctcacctgaaggcactctggccacactggggctgaaaaccgagaagaacttcgtggataaaatcaaccttatcgagagaaagcttttctttactaccgccaatgctcactttaaagtcggttgtcccgtccttgccttagaggtgctgtcgaaaatccccaaggtcacaaagacttctgcactttccgcaaagaaggaccagcccgatttcatcagccacagaatggacgacgtgccatcccactctaaggccctaagcgacggcaatggtagctctgggatcgaatggagcaacgtgacgagcagtcagtacgattggtcacaacccattgtgaaggtcgacgaggaacctctgaacctggactggggggaagaccacgattcagcgctggatgaggaggaagatgatgctgtaggcctcgtgatgaagtcaacggacgcgcgcgaaaaggacaagcagagcgaccagaaggcttccgatcccaatatgcttctgactcctcaggaggaagacgatccagagggggataccgaagtcgatgttatagccgaacaactgaagtttagagcgtgtctgaagattcttatgaccgagctaagaaccctagctaccggatacgaggttgatggcggtaaactgcggttccagctgtataattggctcgagaaagagatcgctgccctgcacgaaatatgtaatcatgagtcagtcattaaggagtattctagcaagacctacagtaaagtcgagagcgacctgctggatcaagaggagatggttgacaagcctgatattggcagttatgaaaggcaccagattgagcggcggaggttacaggccaagcgagaacacgcggaaagacgaaaatcttggctgcagaagaatcaggatttacttcgggtcttcctctcatactgctctctgcacggagcccaggggggagggctggcttcagtacgcatggagctcaagttcttgttgcaggagtctcagcaggagacaacagtgaagcagctgcaaagcccgctgccactcccaacgaccctcccgctgttatcagctagcatagctagtactaaaacagttattgcgaacccagtcctctacctcaataaccacattcatgacattctttacaccattgtccagatgaagacccctcctcacccctccatagaagacgtgaaagtgcacacccttcattctttagccgctagcttaagtgctagtatctaccaggccctttgtgatagccactcttatagccaaactgaaggaaaccagttcacaggcatggcctaccaaggcctcctactgtcagaccgcaggcggctgcgcacagagagcatagaagaacacgccacacctaacagctcacctgcccagtggcccggagtgtccagcttgatcaacttgctgagtagtgcccaggatgaagaccagccaaaacttaatatcctcttatgcgaggccgtggtggcagtgtatctgagcctgctgattcacgctctggcaaccaacagttcctccgagctgttccggttagcggctcaccctctaaacaacaggatgtgggcggctgtgttcggaggaggtgtgaaattagtggtgaagccccgcaggcagagtgagaatatctcagctccaccggtgcttagcgaagacattgataagcaccggcggaggtttaacatgagaatgctagtgcccggtcgtcctgtgaaggacgcgactccaccccccgtccctgcggagcgcccaagctacaaagaaaaatttatcccacccgagctgtcaatgtgggactattttgtcgcgaaaccattcctgccacttagcgattcaggagtcatctacgactccgatgaaagtattcacagtgatgaggaggatgatgctttctttagtgacacccagatccaggagcaccaagaccctaactcatattcttgggctttgctgcatttaaccatggtgaagctggccttgcataatgtgaagaatttttttcccattgccggattggaattctcagaactgccagtgacatcgcctctgggaattgctgttattaagaacctcgaaaactgggaacagattcttcaggaaaaaatggaccaattcgagggccctcctccaaactacatcaacacttatcccactgacctgtctgtcggggccggacccgctatcctgagaaacaaggccatgctggaacccgagaatactccctttaaaagtagagatagcagtgcgttccctgtcaagcggttgtggcactttctggtgaaacaagaggtgcttcaggagacatttatcagatatatctttacaaagaagcgcaagcaatcggaggtggaggctgatctcgggtacccagggggtaaagcgaaggtcatccacaaagaaagcgatatgatcatggcattctctgtgaacaaggctaattgtaatgaaattgtcctcgccagcacccatgatgtgcaagagctggatgttaccagcctgctggcatgccaatcttatatttggattggggaggagtacgaccgtgagtcaaaaagttccgatgatgtagactatcgggggtctaccacaacactgtaccagcccagcgccacgtcttactctgcttcccaggttcaccccccatcaagtctgccatggcttggaactgggcaaacctctactggagcttcagtgctcatgaagcgtaaccttcacaatgtgaagcggatgacctctcatcctgtgcaccagtactacctgaccggcgcacaagatggcagtgtgcggatgtttgaatggacaagaccccagcaactggtttgttttcgccaggctgggaatgccagagtgaccagattatacttcaattcacagggaaacaaatgtggagtggcggacggtgaaggcttcctgagcatctggcaggttaatcagactgcatccaatcccaaaccttacatgtcatggcaatgccacagcaaagcgacaagcgacttcgctttcataacaagttcctccctggttgccaccagcggccactcaaacgacaataggaacgtgtgcctgtgggacaccctgatttctcctgggaattccctgattcatggatttacctgtcacgaccacggggccactgtcctgcagtacgcccctaagcaacagctgctgatttcaggaggccggaaaggccacgtctgtatttttgacatccgccagaggcagctcattcacacttttcaggctcacgattcagccatcaaggccctggcgctggatccttacgaagagtattttacaaccggctccgctgaaggcaacataaaagtgtggcgactaaccgggcacggattgatccactcctttaagtccgagcatgccaagcagtcaatcttccgtaatataggtgctggggtaatgcaaatcgatatcatccaaggcaatcgcctcttttcgtgcggcgctgacgggacactgaagacgcgggtgcttcccaacgcctttaacattccaaacaggatcttggacatcctgtag

SEQ ID NO: 114847 - DNA, 9114 bp, synthetic construct
  misc_feature 1..9114: note = Description of Artificial Sequence: Synthetic coding sequence
  source 1..9114: mol_type = other DNA
atgcacctgcaccaggtgctgacaggtgccgtgaaccctggggataattgctactccgtaggatctgtgggcgacgttccatttactgcctacggaagtgggtgcgatatcgtcatactcgcaaatgatttcgagtgcgtccagatcattcccggtgcgaagcatggaaatattcaagtcagctgcgtagaatgctctaatcagcaagggcgaattgcagccagctacgggaatgcagtgtgtatctttgagcccttggggatcaactcgcacaaacgtaattgccagcttaagtgccagtggctgaaaaccggtcagttcttcctgagcagtgtaacctacaatttagcctgggacccacaggacaataggctgctaactgcaacggattctatccagctctgggcgccccccggagacgacatcctggaggaagaggaagaaatcgacaacactgttccccctgtgctcaacgattggaaatgcgtctggcagtgcaagacatctgtgagcgtacacttaatggagtggtcacccgacggcgagtacttcgcaaccgctggcaaagacgattgcctgctgaaagtctggtatcccatgactggctggaagagttcaataatcccgcaggaccaccacgaagtaaagcgccggcagagctccactcaattctccttcgtgtacctggcccatcctagagctgtgactggcttcagttggcgaaagacctccaaatatatgcccaggggctcggtgtgtaatgttctcctcacatcatgccatgacggagtctgtcgactgtgggctgagactctgctccctgaagactgtttacttggcgagcagatttgcgaaaccacgacaagtagcatcgcaagtagtctcagccatgcggggcgccataaagaccgcattcaacatgccttagaaaccatccaccatttaaaaaacctgcgcaagggacagaggcgctcctctgtgctcgtgacacacgcagagctgatgcctgatcagacagccatgcacgaagtgcagaggcacatcagtcaccacgctaatgccctgtgccatttccacatcgcagcatccattaatccggctaccgacatcccgaacgtgctggtcggcactgcctttaatgtggatgacggtaacggagggttcgtggtccactggctgaacaataaggagttccactttacttcctcaactgaagtctttatgcaccagctgcggaagctatcagacaaacaagtggatcatgagaatgacgatgccgatcgcgaagacgaggaacacagccaggaggatcgggagcgtgggctgcatatgaaacttgatcacgacctgtcgctcgacagggagagcgaagcagggacagggagtagcgagcacgaggatggtgagcgtgaggggagcccacggacctattccagactgtccgtgcctatgccactgcccaccgttttgttggatcggaaaatcgagaccctgcttacagaatggaataagaacccggatatgctgtttaccatccaccccgtcgacggcactttcctcgtgtggcatgtaaagtacctcgatgaatacaatcccgggatcttccgccaggtccaggtgagtttcagtagcagaatcccagtggcattcccttcaggtgacgcgagttctttatccaagaacattatgatgtatgcctgcatcaatgccacgaaggacagtcatcataccctcttgcatcaggaaggcatgagtgtcgggtctccacacggctctcagccccactccaggtcccactctacacatatgaacatattggcacccaccgtcatgatgatctcaaaacacatagatggatctctgaatcagtgggctgtgaccttcgcggacaagtcagcctttaccactgttctgaccgttagccacaagtttcgttactgtggccataggtttcatctgaatgacctggcctgtcattccgtcttgcccttgctccttacctcaagtcaccacaatgcactgttgaccccggaattagattgccagtgggactccgacaacaaactgtctcgcctcatggaccctgtgaaacacattaaaggatcctctaaacagcctctgaggaatgccgccacaaggacctttcatgaccccaatgcaatctatagcgagttaattctgtggagggttgaccccattggcccgctaagctacaccggcggggtgagcgagctggcccggatcaacagtctacataccagcgcattcagtaacgtggcatggctgcccactctgatccccagttactgccttgggacatattgcaacagcgcttctgcctgcttcgtggcaagtgacggcaaaaacctgcgactctatcaggccgttgtcgatgctcggaaactgctggatgaattatcggaccctgaatcctctaagctgattggcgaagtgttcaacatcgtgagtcagcagtccactgccagaccagggtgcattattgagctagatgcaatcaccaatcagtgtgggagcaacacacagcttcttcatgtgttccaagaggactttataataggctacaagccacacaaagaggacatggagaaaaaagagactgagatcttcttccagccatcacaggggtatagaccgccgcctttttccgagaagttcttcctagtcgtaatagaaaaggattctaacaataattccatacttcacatgtggcacctgcatctcaagagcgtgcaggcatgcctggcgaaagcctctgagggtgctagcagcgaatctcttttgagcgtccccgggcaaaagaatgtcgactctagccctgaaaccagcccttcagtgtcacccatgccgcactcctcttccatcgccaatctccagacagccagtaagctgattctgtcctcacgcctcgtatactcccagccactggatttacccgagtccgtggaagtgatacgcgcaacgccttcagcaggacatctttcctcatcttccatctacccagtgtgcttggcgccctacttagttgtaacaacctgttccgataataaggtccggttttggaagtgctgtatggaggccaatcctgaatgtaataagagcgacgagaaggaaatttaccactggaagaggtggcccctcatgaatgatgaaggcgaggacaattccagtaccgtttccatcgttggacgacccgtggccgtgtcatgctcctataccggaaggctcgccgtggcatacaaacagccgattcaccacaacggcttcgtttcgaaagagttttcaatgcacgtgtgcatttttgagtgcgagtccaccggcggaagtgagtgggttttagagcagaccattcatttagacgatttggtcaaggtaggttccgttctggatagcagggtgtcagttgactctaacctgtttgtgtactctaagtcagatgcgcttctctccaaagatcggtatctgattccaaatattaaacacttagttcatctggactgggtgtcaaaggaagacggcagccatattctcaccgtaggtgtgggcgccaatatttttatgtacggccggctgtcaggaattgtgaccgagcagaccaactccaaggatggcgtagccgtcattacactgcccctcgggggctctatcaaacagggggtgaagtcgaggtgggtactacttcggtctatcgatctcgtctctagtgtagacggcaccccctctctgccggtgtccctctcttgggtgcgcgatggaatcctggttgtcggaatggattgtgaaatgcacgtctatgcgcaatggaagcacgcagtgaaattcggcgatacagaagcagatagcagcaatgccgaagaagcagccatgcaggatcattccaccttcaagtccaacatgctggctagaaagtccgtggtagagggcacagccatcagtgatgacgtgttttgctcccccaccgtgattcaggatggaggcctattcgaggccgcgcacgtgttgagccccacgctgccgcaatatcatccaacacagctgctcgagctgatggaccttgggaaggtgcggagagccaaagcaattctgtcccatctagtcaagtgtattgcaggcgaggtggcaatcgttcgcgaccctgatgccggggaaggtaccaagcggcatctcagtcgaacaatcagtgtgtccgggtctacagctaaggaaacagtaacagttggcaaggatggcactcgtgattacacagaaatcgactctatccctcccctcccactctacgcactgttagccgccgaccaggatacttcatacagaatatctgaggaatctacgaagattcctcagtcctacgaggaccagacggtcagccagcctgaggaccagtactcggagctgttccaaatccaggacataccaactgacgacattgacctggagcctgagaagcgggagaataaatcaaaggtgattaacctgtcccaatacggtcccgcatacttcggccaggagcatgccagggttctttcaagccatctgatgcacagctccctcccaggtcttactcgtttagagcagatgtttcttgtagcgctggccgatactgtggcgaccacttctacagaattagacgagagtcgcgacaagtcctgttccggacgcgacacgctagacgaatgtggcctgcggtatctattagctatgaggctccatacatgcttattgacatccttgcccccgctatacagagtccaacttctgcatcagggggtatccacatgtcacttcgcttgggccttccacagtgaagcggaggaggaactgatcaacatgattcctgctatccagaggggcgaccctcaatggtctgagctccgagccatggggataggttggtgggtgagaaatattaatacgctccgccggtgtatcgagaaggtggcaaaggcgtccttccagagaaataacgatgcattagacgccgccttgttctacctgtcaatgaaaaagaaagccgtggtttgggggttatttaggtcacagcacgacgagaagatgaccacattcttctcgcataacttcaacgaagataggtggaggaaggcagctttgaaaaacgctttctcccttctgggcaaacagagattcgaacagagcgctgccttctttctcctcgccggctcattgaaggatgccatcgaagtttgcctggaaaagatggaagatattcagctcgccatggtaattgccaggctgtatgagagtgaatttgaaactagcagcacctatatctctatccttaatcaaaagatcctgggctgtcagaaagatggatccggattttcctgtaaacggctgcacccagacccatttctgagatccctggcctactgggtcatgaaggactatacacgcgccctggatacgctgttggaacagacacctaaagaggatgacgagcatcaggtgatcattaaatcatgcaatcctgtcgcatttagcttttataattaccttcggactcacccccttttaatcaggcggaaccttgcaagccccgaaggcaccctggcaaccttgggactgaaaactgagaagaattttgttgacaagattaacttaatagaaaggaaactgtttttcactactgctaacgcacatttcaaggtcggttgcccagttctcgcattagaagttctgtctaagataccaaaggtcaccaagacctcagcgctgtcagctaaaaaagaccagcctgattttatttctcatcggatggatgacgtaccttcacacagcaaagctttatcagacggcaatggatcaagcgggatcgaatggtccaacgtgacgtcttctcagtacgattggtctcagccaattgttaaagttgacgaggagcccttgaatctcgactggggagaagatcatgattccgccctcgacgaggaagaagacgacgcagtcggactggtaatgaaatcaactgatgcgcgcgagaaggataagcagtcagaccagaaagcttccgaccctaatatgctgctcacaccgcaagaggaggatgatcccgagggtgacactgaagttgacgttatcgctgagcagctgaagtttagggcatgccttaaaatcctgatgactgaattgcgaactctcgctaccgggtatgaagtggacggtggtaaattgcgcttccaactgtacaactggttagagaaggagattgccgccttgcatgaaatttgcaaccatgaaagcgtgattaaagaatatagctcaaagacctactcgaaagtggagagtgatctcttggaccaagaggagatggtggacaagcctgatataggatcatatgaaagacatcagattgagcgaagacgactgcaggccaagcgcgaacacgccgaacgccgtaagtcctggcttcagaagaatcaggacctgctgcgggtgttcctgtcttattgctctctgcacggcgcacaaggtggtggacttgcatccgtacggatggagttaaagttccttctccaggaatctcaacaggaaactacagtcaagcagctacagagccctcttccactacctactaccctccctctgctatcggcctctattgctagtacaaagaccgtgatagccaaccccgtgctgtaccttaacaaccacatccacgatatcctgtacactatcgtccaaatgaaaactcctcctcacccatcgatcgaagatgttaaagtgcacactcttcatagcctggccgcctctctcagcgcgagcatctatcaggcgctctgtgatagccattcttactctagtcaaaccgagggaaaccagtttacggggatggcttaccaggggctcctgttgagcgatagacggcggctgcgtaccgagtccatcgaagagcacgctaccccgaattccagtccagcccagtggccaggagtcagtagcctgatcaatcttctgtcatcagcccaggacgaagaccagccaaagctgaacatcctcctgtgtgaagctgtcgtggcagtgtacctcagcctactgattcatgcgttagctaccaactcctcctcagagctgtttagattggctgctcacccgttgaacaatcgcatgtgggcagctgtgtttggtggtggtgtgaagctcgttgtcaaacccaggagacagtcagagaatatttcagccccccccgtgttatcggaagatatagataaacatcgtcgccgatttaacatgcggatgctggtgcctggacggcctgtcaaagacgcgaccccacctccagtgccagccgaaagaccaagttacaaggaaaaatttataccgccagagctgagtatgtgggactacttcgtggcaaagccattcctgcctctcagtgactccggggtaatctacgacagtgacgagtcgatccacagcgatgaagaggacgatgcgtttttctctgatacacagattcaggagcaccaggaccccaatagttatagctgggccctcttgcacctgacgatggtgaaactcgccctgcataatgtgaagaattttttccctattgcgggcctggaattctctgagcttcccgtcactagccccctgggcattgcagtgatcaaaaacctagaaaattgggagcagatccttcaggagaagatggaccaattcgaggggccacccccaaattacatcaacacgtacccaaccgacctgtcagtcggtgccggcccggccatcctgcggaataaggctatgttagagcctgagaacactccttttaagtccagggacagctccgctttccctgtgaagcgtctatggcactttctagtgaagcaggaggttttacaagaaacatttatcagatatatcttcaccaaaaagcgcaagcagagcgaagtggaagcagatcttggttaccccggagggaaggcaaaagtaatccataaggaaagcgatatgattatggcgttcagcgtcaataaagccaactgcaacgagatcgttttagcaagcacacatgatgttcaggagctcgatgttacaagcctcctggcttgtcagtcctacatttggatcggggaggagtacgaccgtgagtcaaaatcttccgatgacgtagattatagggggtccaccaccactctgtatcaacctagcgcaacgtcttacagcgcaagccaagtccatccacctagcagcctgccgtggctgggcactggccagacatccactggcgcttctgtgcttatgaagaggaatctccataacgttaaaaggatgacctcacatccagtccaccagtattacctcaccggtgcccaagacggaagtgttagaatgttcgaatggacacggccacaacaactggtatgtttccggcaagctggcaacgcccgggtcaccaggctgtacttcaatagtcagggaaataaatgcggcgtagcagacggggagggattcctctccatctggcaggtgaatcagaccgctagcaaccccaagccttatatgtcatggcaatgtcactcgaaggcaaccagtgactttgcctttataaccagcagcagcctggtcgcaacaagcgggcactccaatgataatcgcaacgtgtgcctctgggacactttgatatctcccggaaatagcttaatccacggttttacatgccatgatcatggggctacagtactgcagtacgcccctaaacaacaactgctgatttctggtgggaggaagggccacgtgtgtatcttcgacatcagacaaaggcagctgatccacacttttcaagcccatgactccgctatcaaggccctcgccttggacccctatgaggagtacttcacaactggaagcgccgagggtaatattaaagtctggcggttaactgggcatggcttgatccattcttttaagtccgaacatgccaaacagagtatctttcggaacattggtgcgggcgttatgcaaattgacataattcagggaaacaggcttttctcctgcggggccgacgggaccctgaagacacgggttcttccaaacgcattcaatatcccaaatcggatcctcgacattctctag

SEQ ID NO: 114848 - DNA, 4851 bp, synthetic construct
  misc_feature 1..4851: note = Description of Artificial Sequence: Synthetic coding sequence
  source 1..4851: mol_type = other DNA
atgcccgcgagaactgcccctgctagagtgcccaccctggcggtcccagccatttccctcccagatgacgtgcgacgcagactgaaagacctggagcgggatagcctaactgaaaaggagtgcgtgaaagagaagctgaatcttctccacgaattcctgcagaccgagataaaaaatcaactatgcgacctggaaactaaattacggaaggaagaactgagtgaagaaggctacctggcaaaagtcaaatcgttgttgaacaaggacctttctctcgagaacggagctcacgcatacaaccgcgaggtaaacggcagactggaaaacgggaatcaagcacgctcagaggcccgtcgtgttgggatggctgatgccaattcaccacctaaacccctgagcaaacctaggaccccccgccgttctaaaagtgacggagaggcaaagcctgagccgtctccctccccacggattaccaggaagtccactcggcagactacgatcacttcacacttcgctaagggccctgcaaaacgtaaaccccaagaggagtctgagcgggctaagagtgatgagagcattaaggaagaggataaggatcaagacgaaaagaggcgccgtgtgacctcccgcgaacgcgtggctagaccactcccagctgaggaacccgaaagggccaaatccgggaccaggaccgagaaagaagaggaacgtgatgaaaaggaagagaaacggctaaggtcgcagaccaaagaaccgacccctaagcaaaaacttaaagaggagcccgacagagaggctagggccggcgtacaggcggatgaggacgaggacggagacgagaaagatgagaaaaaacacagaagtcagcccaaagatctcgctgcaaaaaggcggcccgaagagaaggaacctgagaaggtgaaccctcaaattagtgatgagaaggacgaggatgaaaaggaggaaaaaaggcgcaaaaccacaccaaaggaaccaacagagaagaagatggcacgcgcgaaaacagtcatgaattccaaaacacaccctcccaaatgtatccagtgcggccagtatttagacgatcccgatctcaaatacggccaacacccacctgacgcagttgatgagccacaaatgctgacaaatgagaaactctctatttttgacgccaacgagagcggctttgaatcctatgaggctcttccccagcataaactgacatgcttcagtgtctactgcaagcacggccatctttgccctatagacacaggcctgatcgaaaaaaatattgaactgttctttagtggcagtgccaagccaatatatgacgatgatccaagtctggagggaggcgtgaatggcaagaatctcggcccaataaatgaatggtggattacaggcttcgacggcggggagaaggcattaatcgggttttctacaagttttgcagagtacatactcatggatcccagtccggaatatgcgcctatcttcggcttaatgcaggagaaaatttatatctctaaaatagttgtcgagtttctgcagagcaattcagactctacgtacgaagacttaatcaacaagattgaaacaaccgtccccccttcaggcctgaatttgaaccgttttaccgaagattccttactgcggcatgcacagtttgtcgttgaacaggtggagagttacgatgaagctggcgatagcgacgagcaacctatcttcctgacaccttgcatgagagacctgattaagttggccggagttacactcggacagagacgcgcacaggccaggcgacagactattaggcatagcacccgggagaaggacaggggccccacaaaagccacaaccacaaagctggtctaccagatttttgacactttcttcgcagaacagatagagaaggacgacagggaggacaaggaaaatgcatttaaacgacgtaggtgcggcgtatgtgaggtgtgccaacaaccagagtgtggcaaatgcaaggcctgcaaagatatggttaaatttgggggtagtggtcgttctaagcaggcctgtcaggagaggcggtgtccaaacatggcgatgaaagaggctgacgatgatgaggaggtcgatgataacataccggagatgccatccccaaagaaaatgcaccaggggaagaagaaaaaacaaaataagaaccgcatatcctgggtcggagaagccgtgaagactgacgggaagaaatcatattataagaaagtgtgcattgatgcggagaccctcgaagtgggtgattgtgtatccgttatccctgatgatagcagcaaaccgctgtacttggcccgagtgacagcattgtgggaggacagttccaacggccaaatgttccatgcccattggttctgcgctggtaccgatactgttcttggcgctaccagcgacccacttgagctcttcctggttgacgagtgtgaggatatgcaactgagctatattcattctaaagtgaaggttatctacaaggcgcccagcgagaattgggctatggaaggggggatggacccagagtcactgctggagggagacgatggtaaaacttatttttatcagctgtggtacgaccaggattatgcacgctttgaatctcctccaaaaactcaaccaacagaagacaacaagtttaagttttgtgtatcgtgcgcacgcctggcggaaatgcgacagaaggagataccccgcgtcttagagcagttggaggatttggatagccgagtactgtattattccgctacaaaaaacggcatcttgtatcgcgtgggcgacggagtgtatctgcctccggaggccttcacgtttaacattaaactgtctagtcccgtgaaaagaccccggaaggagccagtggacgaggatctttaccccgaacactataggaaatactccgactacatcaaaggttcaaaccttgatgcaccagaaccataccgaatcgggagaataaaggaaatattttgccctaaaaaatccaatggacgaccgaatgagaccgatatcaaaattcgcgtcaataaattttatcgccccgaaaatacacataaatcaacccctgctagctaccacgcagacatcaacctgctctactggtccgatgaggaagcagtcgtcgatttcaaggctgtacagggaaggtgtaccgtggaatatggagaggatctgcccgaatgcgtgcaagtgtactccatgggtggccccaacaggttctactttctcgaggcatacaatgctaagtctaagagctttgaggatccacccaaccacgccagatctcctggcaacaaaggcaaggggaagggtaagggcaagggcaagcctaagtcacaggcttgcgaacctagcgagcctgaaatcgagattaagctgccgaagttgagaacactcgacgtattcagtggctgtggcggcctgtctgaaggcttccatcaggccggaatttcagacacactctgggccatagaaatgtgggatcctgcagcccaggccttccggcttaataacccaggttccaccgtgttcactgaggattgcaatatcctcttgaagctggtgatggccggcgagaccactaatagtcgggggcagcgccttccccagaaaggcgacgtagaaatgctgtgcggaggccccccttgtcaaggattctccggaatgaatagatttaactctcgcacgtattcaaagttcaagaatagcttagtcgtcagttttttgagttattgcgactactacagacccaggttcttcctgctggagaacgtaaggaattttgtgtccttcaagaggtccatggtgctgaaattgaccttgcggtgcctggtgcgaatgggttaccagtgtacctttggggttctgcaggccgggcagtacggggtggcccagacaagaaggagggcaatcatcttggccgccgcaccaggcgaaaagcttccactatttcctgagcctctgcacgtctttgcccctcgggcgtgccaactgagcgtcgtggtggacgataagaagtttgtctccaacattactcgattatccagcgggcctttccggactattactgtaagagacaccatgagcgatctgcccgaggttcgcaatggagcgagtgcactcgagatatcctacaacggagaacctcaaagttggttccagcggcagctaaggggagcccaataccagcccattctgagggaccacatttgtaaagacatgtctgccttagtggctgcccgcatgagacatatccccctcgcccccggatcggactggcgggatctgcccaacattgaggtgaggctatccgatggtacaatggcacgcaagctgcgttacactcaccatgataggaagaacggacgttcaagcagcggcgcactgcgaggcgtctgctcctgcgtcgaagctgggaaggcctgtgaccctgccgcgaggcaatttaacacactgatcccttggtgcctaccgcacacaggaaataggcacaaccactgggctgggctgtacgggcggttagaatgggatggcttctttagtaccacagtaacaaaccctgagcccatgggcaaacagggcagggtattgcacccagaacagcaccgggtcgtgagtgtccgggaatgcgcccgctcccaggggtttccagacacatataggctgtttggtaacattcttgataagcacagacaggttgggaacgccgtgccgccacccttagccaaggctattggactcgagattaagttgtgtatgctggccaaggccagggaatcagcatccgcaaaaatcaaagaagaagaggccgcaaaagattag

SEQ ID NO: 114849 - DNA, 4899 bp, synthetic construct
  misc_feature 1..4899: note = Description of Artificial Sequence: Synthetic coding sequence
  source 1..4899: mol_type = other DNA
atgccagcccgcacagcccctgcccgagtgcctacactggcggtccccgccatctcactaccagacgacgtgcggcggaggttgaaagacttagagcgggattcacttacagaaaaggaatgtgtcaaggagaaactgaacctgctgcacgaatttcttcagacagagatcaagaaccagttgtgtgatctggagaccaaactgagaaaggaggagttgtcagaagaggggtaccttgcaaaagtgaagtcacttctgaataaggacctaagcttggagaatggcgctcatgcatataacagggaggtgaacgggcggcttgagaacggcaatcaggccaggtccgaggctcgccgcgtgggcatggctgatgccaacagcccaccaaaacccttgtccaaaccacgtacgccacgcagaagcaagagcgacggagaggccaagcggagcagggacccccctgccagcgctagccaggtcaccgggatccgtgctgaacccagcccctcacccaggattacaagaaaaagtacccggcagacaaccatcacttcccactttgccaagggtcctgccaagcgcaaaccacaggaagaatctgaaagggccaagtcggatgagtctatcaaagaggaggataaggaccaagatgagaaacgtagacgtgtgacctcaagggaacgcgtcgcccgtccactcccggccgaggagccggagagagctaagtctggtactagaaccgagaaagaagaggagagggacgaaaaggaggaaaagaggctgagatcacagaccaaagagccgacccctaagcagaaactgaaagaggaacccgatcgcgaggcgcgggcgggggtccaggccgacgaagacgaagatggagatgaaaaagacgagaaaaaacaccggtcgcagccaaaggatctggcggcaaagagaaggccagaagagaaagaacccgaaaaggtgaaccctcagatatccgacgagaaggacgaggacgagaaagaggagaagcggcgcaaaacaacaccaaaggaaccgaccgagaaaaaaatggcaagggctaaaacagttatgaattccaaaactcatccgccaaaatgcatacagtgtgggcagtatctggacgacccagatctcaagtatggccagcatccacctgacgccgtcgacgaacctcagatgttgaccaatgagaaactaagcatcttcgatgctaatgagtccggttttgagagttatgaagcgctgccgcagcacaagctgacgtgcttttctgtgtactgtaagcatgggcacctctgtcccatcgatactggcctgattgaaaagaacatagaactgttcttttccggttccgcaaaaccgatttacgatgacgacccctcattggaggggggtgtgaacggaaagaacttaggtcctatcaacgagtggtggataaccgggttcgatggtggggagaaagcgctgatcggcttcagcacatcatttgctgaatatattttaatggacccctcacctgaatatgctcccatcttcggactgatgcaagaaaaaatctatatttcgaagatcgtcgtggaatttttgcagtccaattcagactcaacatacgaggatttaatcaataagatcgagacaacagtgcccccgtcaggcctcaatctgaatcggtttactgaggattcgttgctcaggcatgcacagttcgtggtcgagcaggttgagagttatgatgaagcaggggattctgacgagcagccaattttcttgaccccatgcatgagggatctgatcaagcttgctggcgtgacactcgggcagcgacgcgcacaggctagaaggcagacgatcagacactcaacccgggagaaggatcgcggtcctaccaaagctactactactaaattagtctaccagatattcgataccttttttgcagagcagatagagaaggatgaccgagaagacaaggagaacgcctttaagaggcgcaggtgtggcgtgtgcgaggtgtgccagcagcctgagtgcggaaaatgtaaagcctgcaaggatatggttaaatttggcgggtcaggacgaagtaagcaggcgtgccaagaacgccggtgcccaaacatggcaatgaaggaggcagacgatgacgaggaagttgatgataacattccagaaatgccttcccccaaaaagatgcaccagggaaaaaagaagaagcagaataaaaaccggatcagctgggtgggggaggccgtaaagacggacgggaagaaaagctactacaaaaaagtgtgtatagacgccgaaacccttgaggtgggggactgtgtgagcgtcatcccggacgattcctcaaaacccctctatctagcgagggtcactgcactgtgggaagactcttccaacggccagatgttccatgcccactggttctgcgccggtactgataccgtattgggcgccacatcagatccactcgaattgttccttgtggatgagtgtgaggacatgcaattaagctacatccactcaaaggttaaggtgatctataaagcaccttctgagaactgggcgatggagggaggcatggatcctgagtctcttttggaaggtgacgatggtaagacctacttctaccagttatggtacgaccaggactacgccaggttcgagtcaccccccaagacgcagcccactgaagataataagttcaaattttgcgtgtcatgcgccagactcgccgaaatgagacaaaaagaaatccctagagtcctggagcagctggaagacctggacagcagagtgctgtactattctgctacaaagaacgggatactgtatcgcgtgggcgacggagtttacctgccacccgaggctttcactttcaatatcaaactctctagcccagtgaaacgcccccgcaaagaacccgttgatgaggatctgtatccagagcactatcgaaagtacagcgactacattaaggggagtaatttggacgcccctgaaccttatcgcattgggcggataaaggagattttctgtccgaagaaatctaacgggaggcccaatgagacagacattaagattcgagtgaacaaattttataggccagaaaatactcataagtcgacacctgctagctatcacgccgatatcaatctgctgtactggagcgacgaggaagccgtggtggatttcaaagccgtgcagggacggtgcactgtagagtacggggaagatttgcctgaatgtgtgcaggtctatagtatgggtggcccgaacagattttacttcttagaagcctataatgccaaaagtaaaagtttcgaggatccccctaatcatgcacggtcacctggcaataaaggaaagggcaaaggcaaagggaaggggaaaccaaaatcacaggcctgcgaaccaagtgaacccgagatcgaaattaagctgccaaagctgcgcactctcgacgtatttagcgggtgcggcgggctttccgaaggattccaccaggcaggcatctctgacacactgtgggcaattgaaatgtgggatcccgccgcccaagctttcagactgaacaatcctgggtcaacagtcttcacagaggattgcaacattctccttaagctcgtcatggcaggcgagactactaattctaggggccagcgcctcccccagaaaggagacgtcgaaatgctgtgcggtggtccgccctgccagggtttttccggaatgaatcgcttcaatagccggacctactcaaaatttaaaaactctctggtggtgtccttcttatcctactgcgactactacaggcccagattttttctattggagaacgtgcggaacttcgtgtcctttaagagaagtatggttttgaagcttactctaagatgcctggttagaatgggataccagtgtacattcggagtccttcaggccggccaatacggggtggcccaaacacggcgcagggctattattttagctgccgcccccggtgagaagctccccctgttcccagagccgttacacgtcttcgcgcccagggcctgccagctgagcgtcgttgtcgatgataagaagtttgtctctaacatcacaagactgtcctctggaccctttcggaccattacggttcgtgacaccatgtctgaccttccagaagtgagaaatggtgcaagcgccttggaaatttcctataacggtgagcctcagtcctggttccaacgacagttgaggggcgctcaataccagcccatactccgagatcacatctgtaaagatatgtctgcccttgtggccgcacggatgagacacatccccctggccccaggcagtgattggcgggacctcccgaatattgaagtgagactgtccgacgggaccatggcgcggaagctacgctacacccatcacgatagaaagaacggacgatcttcctctggggccttacgaggggtttgcagctgtgtcgaggccggaaaggcttgtgatcctgccgcccggcagtttaataccctcataccatggtgtctcccgcatacaggaaacaggcataaccattgggccgggctgtacggccgactggagtgggacggatttttcagtactaccgtgaccaaccctgaacctatgggcaagcaggggcgcgttctgcaccccgaacaacaccgcgtggtgtctgtgagagagtgcgcccggagccagggcttccccgatacatatcgtctcttcgggaatattctcgacaagcaccgacaggtgggaaacgccgtgcctccgcccttggccaaggccatcgggttagaaatcaagctgtgcatgctcgccaaggcacgcgagagtgcatcggctaaaattaaggaggaagaggccgcgaaagactag

SEQ ID NO: 114850 - DNA, 4860 bp, synthetic construct
  misc_feature 1..4860: note = Description of Artificial Sequence: Synthetic coding sequence
  source 1..4860: mol_type = other DNA
atgcctgccaggacagcacccgcacgagtaccgacccttgctgtgcccgccatctcactgcccgatgatgtgaggcgaaggcttaaagatctcgagcgggattcactcacagagaaggaatgtgtcaaagagaaactcaatttgcttcacgaatttctccagacggaaatcaagaatcagttgtgcgatctggagaccaagctcagaaaagaggaactcagtgaggaggggtatctcgcaaaagtgaagtcgctgttgaacaaggatctatccttagaaaatggcgcccatgcttacaatcgggaagtaaacgggagactcgaaaacgggaaccaagccaggtctgaggctaggagggtgggtatggccgatgcaaatagccccccaaagcccttatctaaacctcgaactccaagacggtctaagagtgatggtgaggcaaaaccagaacccagccccagcccccggataacacgaaagtccacgcgacagaccacgatcacatctcactttgccaagggccctgctaagaggaaaccgcaggaagagtctgagagggcaaagtccgatgaatcgattaaggaagaggataaggatcaggacgaaaaacgccgaagagtgacctctagagaaagggtcgcacggccgctccccgctgaggaacctgagcgggccaagtctggcacgcggacggaaaaagaggaggagagagacgaaaaggaggaaaagaggctcaggtctcagacgaaggagccaacgcctaagcagaaactcaaggaggaacctgaccgcgaagcgcgagctggcgtccaggccgacgaagatgaggacggagatgagaaggacgaaaagaaacacagaagtcagccaaaggatctggccgcgaagcggcgtccggaggaaaaggaaccggagaaggttaatcctcaaatttccgatgaaaaagatgaagatgaaaaggaggaaaagagacgcaagaccacacctaaggaacccactgaaaaaaagatggcccgagccaagactgtgatgaactcaaagactcatcctcccaaatgcatccaatgtggtcagtacctggacgaccctgacttgaagtatggccagcacccaccagacgcagttgacgagccccaaatgttgactaacgagaagctgtccattttcgatgcaaacgaaagcggcttcgagtcatacgaagccctgccccagcataagctgacgtgtttttccgtgtattgcaagcatgggcacctgtgcccaatagacacgggccttattgaaaaaaatatcgagctgttcttctccggttcagcgaagcctatctacgatgacgatcctagtctagaagggggagtgaacggaaaaaaccttggacctataaacgagtggtggattacgggattcgatggaggagaaaaagcactgatcggattttccacttcttttgccgagtatattctgatggatccgagtccggaatatgcacccatttttgggctgatgcaggaaaaaatctacattagcaaaattgtcgtggaattcctgcagagtaatagcgacagcacttacgaagatctgattaacaagattgagacgaccgtcccaccgagcggccttaaccttaaccggttcaccgaggattctcttctgcggcacgctcagtttgttgtcgagcaggtggagtcctatgacgaggcaggtgattcagacgaacaacccattttcttaacaccatgcatgcgcgatttgattaagctcgcgggcgtcacactgggccagaggcgcgcccaggctcgcagacagacaattcgtcacagcacccgcgaaaaagaccgagggcctaccaaggcaaccactactaagcttgtatatcagatcttcgacactttttttgcagagcaaatcgagaaggacgacagagaagataaggaaaatgcttttaagcgacgcaggtgcggcgtgtgtgaagtctgccagcagcccgaatgcggaaagtgcaaggcatgtaaggacatggtcaagtttggaggcagtgggagaagcaagcaggcctgccaggagcgcaggtgtcccaacatggcaatgaaagaagccgacgatgatgaggaagtggacgacaacattcctgaaatgccaagccctaagaaaatgcatcaaggaaagaaaaaaaaacaaaataagaatcggatcagctgggtaggggaggccgtcaagactgacggcaaaaagtcctactacaagaaagtgtgtatagatgctgaaaccttggaagtcggcgactgtgtgtctgtgattccagatgattcttccaaacccctgtatctggccagggtgactgctctgtgggaggactcctctaatggacagatgttccacgcccattggttctgcgccggaacagatactgtgcttggagccacctcggatcctctggaactgtttctggtggacgagtgcgaggacatgcagctcagctacattcacagtaaggtgaaggttatctataaggcgccttctgagaattgggctatggagggcgggatggacccggagtcattattggaaggcgacgatggaaagacatacttctaccagctgtggtacgaccaagactatgctaggtttgagtctccacccaaaactcagccaaccgaggacaacaagttcaagttctgtgtctcatgcgcacggcttgccgaaatgcgacaaaaagaaattcccagggtcttagagcagttggaggacctggattccagggtcctctactactctgccaccaaaaacggcatactctaccgggtgggggacggcgtttacctaccccccgaagccttcacatttaacattaaactttctagtcctgtaaagcgaccgcgcaaggagccagtggacgaagacttgtaccccgagcactatcgcaagtattctgattacatcaaaggttcaaacctggatgcacccgaaccatatcggatcggtcgtatcaaggaaattttttgccccaagaaatcaaacgggcgtcccaacgaaactgacattaaaatcagggttaataagttttacagacccgagaatacgcacaaaagtacacccgcgagctaccacgctgacattaatctactgtattggtccgacgaggaggcagtagtagatttcaaagcggtgcagggccgctgtaccgtggaatatggagaagacctcccggagtgtgtccaggtttacagcatgggcggtccgaatcgtttttactttctcgaggcctataatgcaaaatcaaagagttttgaagaccctccaaatcatgccaggtcacccgggaacaaaggcaaaggcaaggggaaaggcaagggtaaacccaagagtcaagcctgcgaaccgagcgagcctgaaatagagattaagctgcctaaactacggactctggacgttttctctgggtgcggtggcctcagtgaggggtttcatcaggctgggattagcgataccctgtgggcgattgaaatgtgggaccctgccgcccaggcgttcagactaaataaccctgggtccactgtttttacggaggattgcaatatcttgcttaagctggtcatggcaggcgaaaccaccaactcacgcgggcagaggctcccccagaagggcgacgtcgaaatgctatgtggagggcctccatgtcagggatttagcggaatgaatcggtttaactcccgtacctatagcaagttcaagaatagcttagtagtgtccttcctgtcatattgtgattattaccggccacgattcttcctgcttgaaaacgttcgaaattttgtttctttcaaacgttctatggtgttaaagttgaccctccggtgcttagtgcggatggggtaccaatgcacatttggcgtcctccaagccggacagtatggggtggctcagaccagacggcgggccatcatactggccgctgctcccggggaaaagttgccgctgtttcccgaaccactacatgtctttgcaccaagggcttgccaactgtccgtcgttgtggacgacaagaaattcgtgtctaatatcactcgcctgtcatcaggcccattccgtactataacagtgcgggacactatgagcgatcttcccgaggttaggaatggagcaagcgccttggaaatttcatacaacggcgagccccagtcttggtttcagaggcagctcagaggcgcgcagtatcagcccatcctccgggatcacatttgcaaggatatgtccgccctggtggcggccagaatgcggcacatcccactagcccctgggtccgactggcgtgacttgccgaacattgaagttcggctctcagatggtaccatggcgcgcaaactacggtacacccaccatgaccggaagaacggacgttcttcatctggcgccttaaggggggtgtgcagttgtgtggagggcgggtcatctggcaaggcctgcgacccggccgctagacaatttaacactctcatcccgtggtgtctcccacacaccggtaaccggcacaatcattgggccggcctttacggtaggttggagtgggacggtttcttctccaccactgttacgaacccagagcccatgggcaaacaggggcgggttctgcatccagaacagcacagggtggtgagtgttcgggaatgcgctcgctctcaggggtttccagacacttacaggcttttcggcaatattctggacaagcaccgccaagtcggaaacgcagtgcccccccctctggcaaaggcaatcggcctggaaatcaaattgtgtatgctggcaaaggcccgggagagcgccagtgccaaaatcaaagaagaggaggccgctaaagattag

SEQ ID NO: 114851 - DNA, 4455 bp, synthetic construct
  misc_feature 1..4455: note = Description of Artificial Sequence: Synthetic coding sequence
  source 1..4455: mol_type = other DNA
gggtcatgccactcccccgccagcgcaagccaggtggccggtacaacagccgagcccagtccaagccccagaatcacccggaagtccacccggcagacgactatcacttcccactttgcaaagggcccggcaaaacgaaaacctcaggaagagtctgagcgcgccaaaagcgacgaatctatcaaagaagaggacaaggaccaggatgaaaagcgacggcgggtgactagtagggaaagagtggcccgacctctgccagcagaggagcccgagcgggcgaagtccggtacacgcactgaaaaggaggaggagcgggacgagaaggaggagaagaggctgcggtctcagacaaaagagccaacgccaaagcagaagctgaaggaggagcccgatcgcgaggctagagcgggggttcaggctgacgaggatgaagatggggatgaaaaagacgaaaagaaacaccgctcacagccaaaggacctggctgctaaacggcgccccgaggaaaaggagcccgaaaaggtaaatccccagatttctgacgaaaaggacgaagacgaaaaagaggagaagcggagaaagactactccaaaggaacccacagagaagaaaatggcccgtgcaaaaacggtgatgaactctaaaacacaccctcctaagtgcatccagtgcggccagtaccttgacgacccagaccttaagtatgggcaacacccccctgacgccgtagatgagccccaaatgctcaccaacgagaagctgagcatattcgacgctaacgagagtggctttgagtcctatgaagccctgccccagcataagctcacatgtttttccgtgtattgtaagcacggacatctgtgccctatcgatacgggattaattgaaaaaaacatagagttgttctttagcggtagcgcaaagccaatctatgacgatgatcccagtttggagggcggagttaatggtaaaaacctgggcccgataaatgaatggtggatcactggttttgacggtggggagaaagccctgatcggcttttcgaccagttttgccgagtatatcctgatggacccgtctcccgagtacgcccccatttttggcctgatgcaagagaagatctatatcagcaagatcgttgtagagtttctgcagtcaaacagtgattccacgtatgaggacttaataaacaagatagagacaaccgtgcctccttctgggctcaacctgaaccgtttcacggaggatagcctgcttcgacacgcccagtttgttgttgaacaggtagaatcttacgatgaagccggtgacagtgacgagcagcccatatttctgacaccttgcatgagggacctcatcaaactggcaggagttacactcggccaacgtcgcgcacaggctaggagacagactattaggcattctactcgggagaaggatcggggcccaaccaaagcaacaacgaccaaactggtgtatcagatcttcgacactttttttgccgaacagattgagaaagatgatcgcgaagataaggagaatgcgttcaaacgccggcgctgtggtgtatgtgaagtgtgccaacaacctgagtgtggaaagtgcaaggcttgcaaggacatggtcaagtttggcggatctggccgatcaaaacaggcatgccaggaaaggaggtgccccaacatggcaatgaaggaagcagacgacgatgaggaagtcgatgataatatccccgagatgccttctccaaagaagatgcaccaggggaagaagaagaagcagaacaagaacagaatctcatgggtgggagaggccgttaaaaccgacggcaagaaatcatattacaaaaaggtgtgcatcgacgccgaaacactggaggtcggggattgtgtttctgtgatcccagacgactcatcaaagcctctgtacctggccagagtgacggcgttatgggaggactcaagcaacgggcagatgttccatgcccattggttttgcgcggggaccgataccgtgctgggagcaacctcagatcccttggagttgtttctggtggacgagtgtgaggatatgcagctcagttacattcactccaaggttaaggtcatttacaaggcaccatcagaaaattgggccatggaaggtggcatggaccctgaatctttgctggaaggcgatgacggcaagacttacttctaccagctctggtacgatcaggactatgcccgcttcgagagtcctcctaaaacacaaccaaccgaggataataagtttaagttctgtgtgagctgtgcaaggctggctgagatgaggcagaaggagatccctcgggtgcttgaacagctcgaagacctggactcccgtgttctatattacagtgctaccaagaacggcatcctgtaccgggtgggtgacggagtatatctgcctccagaggctttcactttcaacattaagcttagttcgccggtaaagcgcccccgaaaggagcccgtcgacgaggacttgtaccctgaacactataggaagtactccgattatatcaagggtagcaatttggatgcccccgagccctacagaattggacgcattaaggaaatcttttgtccgaaaaagagcaacggacgccccaatgagacggatatcaagatcagggtcaataagttttacaggcccgagaacacccacaagagcacccccgcatcatatcacgccgacatcaacttgctgtactggagcgatgaagaggcggtggtggacttcaaggctgtccagggccggtgtaccgtggaatacggtgaagacctgcccgaatgcgtgcaggtctattcaatgggcggccccaataggttctatttcttggaggcctacaacgccaagtcgaagagcttcgaagatccccctaatcatgctcggtcaccaggaaacaaggggaaaggcaaaggcaagggtaaaggaaagcccaagagccaggcatgcgagccgagtgagccagagattgaaattaagctcccaaaactccggaccttggacgtctttagcggctgtggcgggcttagcgaaggctttcatcaagctgggatatctgataccctgtgggccattgagatgtgggatcccgcagcgcaggcattccgtctgaacaaccccggaagcacggtgttcaccgaagactgcaacattcttttgaagctcgtgatggcaggcgagaccaccaatagcagaggccaacgcctgccgcagaagggggacgttgagatgctgtgcggcggccctccctgccaggggttcagtggcatgaacaggttcaacagtagaacctacagcaaattcaagaattccctggtcgtctctttcctgagctattgcgattactatagaccaagattcttcctccttgaaaatgtgcggaatttcgtatcttttaagaggtcaatggtactcaagctgactctccggtgtctggtgcgtatgggataccagtgtaccttcggggtgctgcaggccggacagtacggcgtcgcccaaacacgccgcagggcaatcatcctggctgccgctcccggggaaaaactgccgttatttcccgaaccccttcacgtgttcgctcccagggcttgtcagctgtccgtagtagtggacgataagaaattcgtgtcaaacataaccagactttcttcaggacccttcaggacgatcactgtgcgggatacaatgtccgatctgcccgaggtgagaaatggagcttccgctcttgagatttcctacaacggcgagccccagtcatggtttcagcggcaacttagaggcgcccaataccagcccattttgcgggatcatatctgcaaggacatgtcggcactagtagctgcccggatgagacacattcctttggcaccagggtcagattggcgtgatctgcctaacatagaagttcgcctgtcggacgggaccatggcccgtaaactgcgctacacgcatcacgaccgcaaaaatgggcggagcagttcgggagccctgcgaggagtctgcagttgcgtggaggcgggaaaggcctgtgatccagctgctagacagttcaatacactcatcccttggtgcctgcctcataccggcaaccgccataatcactgggccggcctgtatggtcgccttgagtgggatggctttttctcaactaccgtgacaaacccagaacctatgggcaaacaaggtcgggtactgcatccagaacaacaccgagtagtgagcgtccgggagtgtgcccggtcccaggggtttccagacacttaccggttatttggaaacattctcgataagcacagacaggttgggaatgctgtgcccccacctctcgctaaagccatcggactcgaaatcaaactatgcatgctggctaaggccagggaatccgcctccgccaaaatcaaggaagaggaagccgccaaggactag

SEQ ID NO: 114852 - DNA, 2739 bp, synthetic construct
  misc_feature 1..2739: note = Description of Artificial Sequence: Synthetic coding sequence
  source 1..2739: mol_type = other DNA
atgcctgcaatgccttccagcggccccggcgatacctcaagttctgctgctgagcgcgaagaggataggaaagacggtgaggagcaagaagaacctagagggaaagaggagcgccaagagccatccaccacggctaggaaggtaggcaggcctggacgcaaacgaaaacatcctccagttgaatccggggacacaccaaaggatcctgcggtgattagcaaatcacctagcatggcccaggattctggcgcctccgaactgttgcccaatggagatctcgagaagcgcagcgagccacaacccgaagaaggctcacctgccggcggacagaaggggggcgcacctgcagagggagagggggccgccgagactcttccagaggcaagcagagcagtggagaatggctgctgtaccccgaaggagggtcggggagcccccgccgaggccggcaaggaacagaaggagacaaatatcgagagtatgaaaatggagggaagccgggggagactccgcggggggttgggctgggaatcttctctccggcaacgaccaatgccaaggctgacattccaggcaggcgacccgtactacatttctaaaagaaagcgcgacgaatggttggcccgctggaaacgggaagcagaaaaaaaggccaaagtcattgctggaatgaatgccgttgaggaaaatcaaggccccggcgaatcccagaaggtggaagaggccagcccgccggccgtccaacagccgacagaccctgcgtctcccacggtagcaactacccccgagcccgtggggtccgacgccggggacaaaaacgccaccaaggccggcgatgatgaaccagaatatgaggatgggcgggggttcggaatcggcgagctggtttggggtaagctcaggggctttagttggtggccagggcgcattgtcagctggtggatgacaggccgcagtcgggcagccgaggggacacggtgggtgatgtggtttggcgatggcaagttcagcgttgtctgcgtggaaaaactgatgcccctgtccagcttctgttcagcttttcaccaggctacatataacaaacagccgatgtaccgtaaggccatctatgaggtgctccaggtagccagctctagggctggcaagctatttccggtgtgtcacgacagcgatgagtccgacacagctaaggctgtagaggtccagaacaagcccatgattgaatgggcgctaggcgggtttcagccctccggccctaagggcctggaaccacctgaagaggagaagaatccctacaaggaggtgtacacagatatgtgggtggagcctgaggctgccgcatacgccccacctccccccgccaagaagccccgcaagtcaaccgcagagaagccaaaggtgaaggagattatcgatgaaagaacaagagaaagactggtatacgaggtgagacagaagtgtagaaacattgaggatatttgcataagctgtggatctctgaatgttactctagagcaccctctgttcgtaggtggcatgtgccagaattgtaagaactgtttccttgagtgcgcgtatcagtacgacgacgacgggtatcagtcctattgtaccatttgttgtggaggccgagaagtgctgatgtgcgggaacaataattgctgtaggtgtttctgcgttgaatgcgtggatttgttggtgggccctggagctgcccaggcggctataaaggaggatccatggaactgttatatgtgtggccacaaaggcacatacggcctattaaggcgtcgtgaggactggcctagcagactgcagatgttcttcgcgaacaatcatgatcaggaattcgaccctccaaaggtttatcccccagtgcctgctgagaagaggaagcccatcagggtgctgtccttgttcgatggtatcgcgacagggcttctggtgctaaaggatctgggaatccaggttgacaggtatattgcttccgaggtgtgtgaggattcaataaccgttggcatggtccggcaccagggcaaaataatgtatgtgggggatgtccggtcagtgacacagaaacacattcaggagtggggcccatttgatctggtgatcggcggctcgccttgcaacgatctctccattgtcaatcctgctaggaaagggctctacgaaggaacggggaggttattcttcgagttctacagattattgcacgacgcgaggcctaaagagggagacgatagacctttcttctggcttttcgaaaatgtcgtggccatgggcgtgagtgataagcgggacatcagcaggttcctggaatccaacccagtgatgattgacgccaaagaggtttcagcagctcacagagcaagatatttttgggggaatctacccgggatgaatcgccctctggccagcaccgtgaatgacaaattagagctccaggagtgtctcgagcacggacgcatcgcgaaattttcaaaagtgcgaacaatcacaacgcgctccaattctatcaaacagggaaaagatcagcactttcctgtgttcatgaatgaaaaggaggacatcctgtggtgcaccgagatggagcgcgtttttggtttccccgtgcattataccgacgtgtcaaatatgagcagactagcaagacagagactgctaggccgctcctggagcgtgcccgtgatccgccatctgtttgcacctttgaaggagtactttgcctgcgtctag

SEQ ID NO: 114853 - DNA, 2739 bp, synthetic construct
  misc_feature 1..2739: note = Description of Artificial Sequence: Synthetic coding sequence
  source 1..2739: mol_type = other DNA
atgcccgcaatgccttctagtgggccaggagataccagctcctccgcagccgagcgggaggaggaccgcaaggatggagaggagcaggaggagccccggggaaaagaagagcgccaggaaccaagcacgacagcccgtaaggtggggaggcctgggcgaaaaaggaagcatcctccagtggaaagcggggatacaccaaaagatcccgcagtaatctccaagtctccaagtatggcccaggactctggcgcaagcgagctgctccccaatggtgaccttgagaagcggagcgaaccacagcctgaggagggttcccccgcaggtgggcagaagggcggcgctccggccgaaggggagggagctgctgaaactctacccgaggcctctagagcggtggagaacggttgctgtactcccaaggaaggccgcggtgctcctgcagaagccgggaaggaacagaaagagaccaacatcgagtctatgaagatggaaggctcccgaggaagactccggggaggcctgggctgggagtcgtccctgcgccagaggccgatgccgaggctcaccttccaggcaggggatccctattacatctctaaacgaaaacgggacgaatggctagctcggtggaaacgagaggccgagaaaaaagcaaaagtgattgctggcatgaatgcagttgaggagaaccaggggccaggggaatcccagaaggtcgaagaagcaagcccgcctgccgtgcagcagcctacagatcctgcgtcgcctactgttgccactacacctgaaccagtaggctccgacgccggcgacaaaaatgccaccaaggctggcgatgacgaacccgaatacgaagacggaaggggattcgggatcggagaactggtatggggaaagctgcggggcttctcatggtggccaggacgcattgtgagttggtggatgactggacgctcccgagccgcggagggcacaaggtgggtgatgtggtttggggacggaaaatttagtgtggtgtgcgttgagaagcttatgcctttaagtagcttttgttccgcgttccaccaggcaacatataataaacagccaatgtaccgcaaggctatctatgaggtgctccaggtcgcctcatctagagcgggaaaactattccccgtgtgccatgattcagacgagagcgacacggcaaaagccgttgaagtgcagaacaagccaatgatcgagtgggcccttggtggcttccagccctccggacctaagggactggaaccacccgaggaggagaagaatccatacaaagaggtatacacagatatgtgggtggagccagaagcagccgcttacgctccgccaccgcctgctaaaaaaccccgtaaatcaaccgctgagaagcctaaggttaaagagatcatcgatgaaaggactagggaacgattggtttacgaggtaaggcaaaaatgtcggaatatcgaagacatttgtataagctgcggctcactgaacgttacgcttgaacatcccctctttgtgggtggcatgtgtcagaactgcaagaactgtttcctggagtgtgcttatcagtatgatgacgatggttatcagtcctattgcacaatttgttgcgggggacgcgaagttctgatgtgcggcaataacaattgctgtagatgcttttgtgtagagtgcgtggacctgttggtaggtccaggcgccgcccaggcagccataaaggaggatccttggaattgctatatgtgcggacacaaagggacatacggtctgctaaggaggagggaagactggccttccaggctgcaaatgttttttgccaacaaccatgatcaggaatttgatcccccaaaggtttatccacccgtcccggccgagaagagaaaacctatcagagtgctatcactcttcgacggaattgctaccgggttgttagtgctgaaagacttagggatccaagtggaccgctatattgcatctgaggtttgcgaggattctatcactgtgggaatggtacgtcatcagggaaaaattatgtatgtcggagacgtgcgttccgtgacccagaaacacatacaagagtggggtcctttcgatttggtgatcggcgggagtccatgtaatgacctcagcatcgtcaatcctgccaggaagggcctgtatgaaggtacaggtcgtctcttttttgaattctatcgtcttctccacgatgcacgtccaaaggagggtgacgatcggccgtttttttggttgttcgagaacgtggtggcgatgggtgtgagcgataagagggatatttcccgtttccttgaaagtaacccagtcatgatcgacgctaaggaagtgtcagccgctcacagagcccgctacttttggggcaacctccccgggatgaacaggcccctggcctccacagtcaatgataagctggagctgcaggagtgtcttgaacatggtcgtattgctaagttcagtaaggttcgaacaatcacaacccggtccaactctataaagcaaggcaaggatcagcatttccccgtgttcatgaacgagaaggaggatatcctctggtgcaccgagatggagcgcgtttttggcttccccgtacattacactgacgtgtcaaatatgtccagactggctagacaaagactacttgggcgctcttggtctgttcctgttataagacacctctttgccccattgaaggagtatttcgcctgtgtgtag

SEQ ID NO: 114854 - DNA, 2172 bp, synthetic construct
  misc_feature 1..2172: note = Description of Artificial Sequence: Synthetic coding sequence
  source 1..2172: mol_type = other DNA
atgggcattttggagcgagtggtgaggcgcaacggacgcgtggacaggtcactgaaggatgagtgcgacacggcagaaaaaaaggccaaagtcattgccggcatgaatgccgtggaggaaaaccagggccccggagaatctcagaaagttgaagaggcctcaccccccgccgttcagcagcctactgaccctgcatctcccactgtcgctactacacctgagcccgtggggagcgatgcaggagacaagaatgcaacgaaggccggggacgacgaaccagagtacgaggacggaaggggctttggcatcggggaactcgtgtggggcaagcttcgtgggtttagctggtggccgggccgcatcgtttcttggtggatgaccggacgcagccgggctgccgaaggaacccgttgggtcatgtggtttggagatggtaagttctccgttgtttgtgttgagaagctaatgcctttaagctctttctgcagtgccttccatcaggctacctacaataagcagcccatgtacaggaaggcgatctacgaggtgttacaggtggcgtctagtcgagccggcaagcttttcccagtgtgccacgacagtgacgagtccgatactgccaaagcggtcgaagtccaaaacaaacctatgatagagtgggccctgggcggcttccaaccgagtggtccgaagggattggagccacccgaggaagagaaaaacccttataaggaggtctatactgatatgtgggttgaacccgaggccgctgcttacgcgcctccgccacccgctaaaaaaccccggaagagcaccgcagagaaacccaaggtcaaggagatcatcgacgagcggacgagggaaaggctggtgtacgaagtccggcagaaatgtagaaacatcgaagacatctgtattagctgcggatcactaaacgtgaccctggagcatccactcttcgtcggaggaatgtgccaaaactgtaagaactgtttcctcgagtgcgcatatcagtacgatgatgacggataccaaagctactgcactatttgctgcggcggccgggaggtacttatgtgtggcaataacaactgttgtcgatgcttttgcgtcgaatgtgtggacctgctcgttggccccggggccgcacaggcagcaatcaaagaggatccatggaattgttatatgtgcggacataaggggacgtacggtctgctccgccgccgagaagactggcccagtcgccttcaaatgttcttcgcaaacaatcatgatcaggagttcgacccacctaaagtctacccccctgtgcctgccgagaagcgcaaaccgattagagtgctgtccctgttcgacggcatagccacaggacttctggtcctgaaggatttgggaattcaggtagatagatacatagcctccgaggtttgcgaggacagtatcactgtcggcatggtgcggcatcagggcaaaattatgtacgttggagatgtgaggtccgtgacccagaagcacatccaggaatgggggcctttcgatcttgttatcgggggctctccatgcaacgatctgtctatagtgaatcctgccaggaaaggcctgtacgaaggcacaggcaggttgttctttgaattctaccggttgctacatgatgcaaggcctaaagagggcgacgatagacctttcttttggctgtttgagaacgtggtggccatgggcgtgtccgataagcgggacatcagtcggtttcttgagagcaacccagtgatgattgacgctaaagaagtgtccgctgctcacagggccaggtatttctgggggaatctccccggcatgaaccggcctctggcatccacagtgaacgacaagctggagctgcaggagtgcctggagcacggcagaatcgccaaattttcaaaagttcgaacaattacaacccgaagtaattctatcaagcagggcaaggatcagcattttcccgttttcatgaacgagaaagaggatatcctgtggtgcaccgaaatggagagggttttcggattccccgttcattacactgatgtgtcaaatatgagcaggctggcccgtcagagattactggggcgtagttggagcgtccctgtcattaggcatttgtttgccccactcaaggaatatttcgcctgtgtctag

SEQ ID NO: 114855 - DNA, 2070 bp, synthetic construct
  misc_feature 1..2070: note = Description of Artificial Sequence: Synthetic coding sequence
  source 1..2070: mol_type = other DNA
atgaacgcggtcgaggaaaatcagggacccggcgagagccaaaaggtggaggaggcgtcgccaccagctgtccaacaacctacggatccagcttcccccacggtggccaccacccccgagcctgtggggagtgatgctggcgataagaatgctaccaaagcaggggatgatgagcctgaatatgaggatggccggggcttcggcataggtgagctggtatggggaaaactgcgtggcttttcttggtggcccgggcgcatcgttagctggtggatgactggccgttcacgagccgcggagggcactcggtgggtcatgtggtttggcgacggaaaattttccgtcgtgtgcgtggaaaagctcatgcccttatcctccttttgcagtgcattccatcaggcgacgtataataaacaacccatgtaccggaaagccatttatgaggtgctgcaggtcgctagttctcgggccgggaagctattcccagtttgtcacgattccgatgaaagcgacacggcaaaagctgtggaggtgcagaataaacccatgattgaatgggcactcggaggcttccagccctccggtcctaaaggtctggaaccaccagaggaagagaagaatccttacaaagaggtgtacaccgacatgtgggtcgaacccgaagccgccgcttacgcacctcctccccccgcaaagaaaccccggaagagtacagccgagaagccaaaagttaaagagatcatcgatgagcgaacaagggagcgccttgtgtacgaggttagacagaagtgcagaaatatagaagacatttgcatctcttgtgggagcctgaacgtgacacttgaacaccctctatttgtgggtggtatgtgccagaactgcaaaaactgctttctcgaatgtgcctatcaatatgacgatgatggctaccaatcttattgcaccatttgctgcggaggaagagaggttctgatgtgcgggaataataattgctgccggtgtttctgcgtggagtgcgtagacctactcgtgggccctggagcagctcaggctgctatcaaggaggacccctggaactgctacatgtgcggtcataagggaacatatggactgcttaggaggagggaggactggcccagtagactgcagatgttttttgccaacaaccacgaccaggagtttgaccctccaaaagtttatccacctgttccagccgagaagaggaagccaattagggtgctttccttgtttgatgggatagcaacagggctattagttcttaaggacctggggatacaggtcgacaggtatattgccagcgaagtctgcgaggacagtattaccgttggcatggtacggcaccaggggaaaatcatgtatgtcggcgatgtgcggagtgtcactcagaaacacattcaagaatgggggccatttgatctggtaattggaggatcaccatgtaatgacctcagcattgtgaaccccgccaggaagggtttatacgaaggcacgggacgcctgttcttcgaattctatcggctgctgcatgatgcccggccgaaggagggtgacgatagacctttcttttggttatttgaaaatgtggtcgcgatgggggtctctgacaagcgggatatcagcagattcctggaaagcaaccctgtcatgatcgacgcaaaagaagtctcagccgcccatcgggcacgctatttttgggggaacttgcccggcatgaaccggcctttagcctccaccgttaatgataagcttgaactacaagagtgcttggagcatggccgcatagccaagtttagtaaggtccgcacgataaccacccgctctaatagcataaaacagggcaaggaccagcatttccccgtgtttatgaacgagaaagaggacattctgtggtgtactgagatggaaagagttttcggcttccctgtgcactacacagatgtatccaatatgtcaaggctggcgaggcaacgactcttgggacgttcttggtctgtgccagtgatcaggcacctgttcgcacccctcaaagagtattttgcatgcgtgtag

SEQ ID NO: 114856 - DNA, 501 bp, synthetic construct
  misc_feature 1..501: note = Description of Artificial Sequence: Synthetic coding sequence
  source 1..501: mol_type = other DNA
atgccagccatgccatcttcaggcccaggcgatacaagctccagcgctgctgagagagaggaagatcggaaggacggtgaagagcaggaagaacctcgtgggaaagaggaaaggcaagagcctagtactacagcaagaaaagtgggcaggccagggcgaaaacggaaacatccccccgtcgagtccggtgacacgcctaaagacccagctgtcattagcaaaagcccttctatggcacaggactctggcgcaagcgaactgttaccaaatggagatttggagaagcgatctgagccccagccagaggagggcagccccgcaggcgggcagaaaggcggcgctccggccgagggcgagggggccgctgaaaccctcccagaggccagccgggccgtggagaacggctgttgcactccgaaggaggggcgtggcgcacctgctgaggccggggaatcctcagctcctggcgctgcctccagcggacccactagtatcccctag

SEQ ID NO: 114857 - DNA, 2538 bp, synthetic construct
  misc_feature 1..2538: note = Description of Artificial Sequence: Synthetic coding sequence
  source 1..2538: mol_type = other DNA
atggaacccagcccagaacctcctagcctggagtccatgaagggtgatactcggcatctaaacggcgaggaagacgctggcgggagggaagattcaatattggtgaatggtgcttgctccgaccagagtagcgatagcccaccaatcctggaagcaatcagaacacccgagattcgggggaggcgcagttcatctcggctgtctaaacgcgaagttagctctttgctttcctacactcaggacctgaccggcgacggggatggagaagacggggacgggtcagacacgcccgtgatgccgaagctcttcagggaaacacgaacaagaagcgaatctcccgccgtgagaactcgcaacaacaactcagtttcatcgcgcgagagacatcggcccagcccaagaagcacaagaggtcggcaggggcgcaatcatgtagatgaatccccagtcgagttccctgcaacaagatctctccggagacgggccactgcatcggctggaacgccgtggccctcgccgccttcgtcgtacttgaccatcgacctcaccgacgatactgaggacactcatggcactccgcagtcttcttcaacaccatatgcacggttggcacaagactctcagcaaggaggaatggagtcccctcaagtggaagcagatagcggcgatggtgatagctctgagtaccaggatggcaaagaatttggcattggggatctcgtgtggggtaagatcaagggcttctcttggtggcctgctatggtggtctcctggaaggccacaagtaaaaggcaagccatgagtggcatgaggtgggtccagtggtttggtgacggtaaattctcagaagtctccgcagacaaacttgtggcactcggcctttttagccaacacttcaatttggccaccttcaacaaactggtgagttatcggaaagcaatgtatcacgcccttgagaaagcccgtgtcagagctggaaaaacgttcccaagcagtccaggggacagtctggaggatcaactcaagccaatgcttgaatgggcccacggcggatttaaacctaccggtattgagggactcaagccgaataatacccaacccgagaacaaaaccagaagaagaacagccgacgatagcgccacttctgattattgccctgcccctaagcggcttaaaacgaactgctacaataacgggaaagaccgaggcgacgaagaccagagccgtgagcagatggcgagcgacgtcgcaaacaacaaaagttcactcgaagatgggtgccttagctgtggcagaaagaacccggtctcctttcatcctttgttcgagggcgggctgtgccaaacttgtcgagaccgattcctggagctattttacatgtacgatgacgatggctaccagtcatactgcactgtatgttgcgaggggcgggaactgctactgtgctccaacactagctgctgccggtgcttctgcgtggagtgcctggaagtattagtgggaacgggtactgccgccgaagctaagctgcaggagccgtggtcctgctacatgtgccttccccagcggtgtcatggcgtgctgaggcgaaggaaagactggaatgtccggctacaggctttcttcacttcagatactggcctggagtacgaggctcccaagctatatcccgccattcccgccgcacggcgtcggcccattagggtactctcattgttcgacggcatcgcaaccggttacctcgtgctgaaagagctggggattaaagttggtaagtatgttgctagcgaagtttgcgaggagtccattgccgtgggaactgttaaacacgaaggcaacattaagtacgtgaacgatgtgaggaatatcactaaaaagaatattgaggagtggggcccttttgatctggttattggtggatcgccctgcaacgacttgagtaatgtgaaccccgcacgtaaaggcctctacgagggaacaggcaggttattctttgaattctatcacttgctgaactatagtaggcccaaggaaggggatgacagaccttttttttggatgttcgaaaatgtagtggcaatgaaggtgggagataagagggatatcagtagatttctggagtgtaatccagttatgatcgatgcaattaaggtcagcgcagcccaccgtgcccgatacttctggggaaacttgcctggaatgaaccgtcctgtgattgctagcaagaatgataagctggaacttcaggattgcctggagtacaatagaatcgcaaagctgaagaaagtgcaaactattactacaaaatccaattccatcaagcagggaaagaaccagctttttcctgtggtgatgaatgggaaagaagacgtcctttggtgtaccgaactggaaaggatttttggctttcctgtgcactacaccgacgtgagtaatatgggcaggggcgcaaggcaaaaattgctggggagaagctggagtgtcccagttattaggcacctgtttgccccacttaaggactacttcgcttgtgagtag

SEQ ID NO: 114858 - DNA, 2562 bp, synthetic construct
  misc_feature 1..2562: note = Description of Artificial Sequence: Synthetic coding sequence
  source 1..2562: mol_type = other DNA
atgaagggggacactagacacctcaatggggaagaagacgcaggaggaagagaggatagcatcctagtgaatggcgcttgtagcgatcagagttccgacagcccccctatcctggaggccatccggaccccagaaatcagaggccgccgcagcagctcacggttgtccaaaagggaggttagttcgctgttaagctatactcaggatctaacaggtgatggggatggcgaggatggggacggtagcgatacccccgtcatgcccaagttatttcgggaaactagaaccagaagcgagagccccgccgtccgcacacgcaataataactccgtgtcaagcagggagcgccaccgcccctcaccacgctctacacgagggagacaggggcggaaccatgtcgacgagtctcctgtggaatttcctgctacccgcagcctgcgtagaagggctactgcctccgccggaaccccatggccgtctcctccctcttcttacctgacgatagatcttaccgacgacaccgaggatactcatgggacaccacagtcaagtagtaccccttatgctcggctagcacaggatagtcagcagggaggcatggaaagcccacaggtggaggccgactcaggtgacggcgacagctctgagtatcaggacggaaaagagtttggcataggggatctggtttgggggaagataaagggttttagctggtggcctgctatggtggtcagctggaaagccacatcaaagaggcaagcgatgtcaggtatgaggtgggtacagtggttcggcgatggcaaattcagtgaggtcagcgctgataaacttgtcgcgctgggactcttttctcagcactttaacctcgctaccttcaacaagctcgtcagctatagaaaagcaatgtatcacgccttggagaaggcccgtgtgcgcgctggaaaaacttttccttcatcgccaggcgacagcctcgaagaccaacttaaacccatgctggagtgggctcatggaggatttaaacccacaggaatcgaaggactgaagcccaataatactcaaccagtggttaataagagcaaagtccgacgggcaggctctagaaagcttgagtctcggaagtatgagaacaaaacccgacgccggactgctgacgactctgcgacaagcgactattgtccggcaccaaagcgattgaagactaactgctacaacaatgggaaggataggggcgacgaggaccaatcaagagagcaaatggcaagcgatgtcgcaaacaacaagtcgtcactcgaggacgggtgcctcagctgcggacgtaagaacccagttagttttcaccccctgtttgagggaggattgtgtcagacctgccgagaccgttttctagagctattctatatgtacgacgatgatggataccagagctattgtaccgtgtgctgcgaggggagggaactcctgctctgcagcaacaccagttgttgccggtgcttttgtgtggagtgcctcgaagtcttggtggggacaggcaccgctgccgaagctaaactgcaagagccctggtcctgttatatgtgtctcccacagagatgccacggagtgctccgaaggcgaaaagattggaatgtacgcctacaggccttcttcacaagtgatacaggtctggaatatgaggcccctaagctctatcctgctattccagccgcacgacgccgccccatacgggtgttgtcccttttcgatggcatcgccaccggatacttggtcctgaaagagctgggaattaaggtcggaaagtatgtcgcatcagaggtatgtgaggagtcaattgcagtgggcaccgtaaagcacgagggcaacattaagtacgtcaatgacgtaagaaacattactaagaagaatattgaggagtggggtccatttgacctggtgataggaggtagcccctgtaacgacctgtccaacgtcaaccccgcccgaaagggtctatatgagggcactgggaggctattttttgaattctatcacctacttaactactcgcgacccaaggagggggatgaccgcccctttttctggatgtttgagaatgtggtggctatgaaagttggggataagagggatatcagccggtttcttgagtgcaaccctgttatgatcgatgctatcaaggtgagcgctgcccaccgagctcggtatttctggggaaatcttcccgggatgaatcgcccagtcattgcgtctaagaatgacaagttggaactccaggactgtttagagtataatcggatagcgaagttaaagaaggtccaaacgatcaccactaaatcgaattcaatcaaacaaggtaaaaatcagctcttccctgtggttatgaacgggaaagaggacgttttgtggtgtactgaactcgagcgtatatttgggttcccagtgcactacacagacgtgtccaatatgggtcggggggcccgccaaaaactgctaggaaggtcatggtccgtgcccgtcattaggcatctttttgctccactgaaggattactttgcctgcgaatag

SEQ ID NO: 114859 - DNA, 2379 bp, synthetic construct
  misc_feature 1..2379: note = Description of Artificial Sequence: Synthetic coding sequence
  source 1..2379: mol_type = other DNA
atgaagggcgataccaggcaccttaatggcgaagaagatgcaggtggccgtgaagattccatcttggtgaacggagcctgctcggatcagagtagcgacagcccaccaatccttgaggctatacggactcctgaaatacgaggtcgtaggtccagctcacgactgagtaagcgcgaggtttcgagcttgctttcttatacacaggacctgacaggcgacggagatggtgaagacggcgatgggtcagataccccagttatgcctaaactttttcgtgagacccggacacggtcagaatctccagcagtccgcacccggaacaacaactctgtaagctcacgggaacgccaccgtccatcccctaggtcaacccgcggtcggcagggcaggaaccacgtcgatgaatcccccgtcgagttccctgctacacgatctctgaggcgtcgggcaacagcctctgctggaactccatggccaagcccacccagcagctatttaaccattgacctgactgacgatacggaggacactcacggtacaccccaatcttcatccacaccctatgcccgcctggcacaagattcacagcagggcgggatggagagcccacaagtggaagcagatagcggggatggagatagcagtgagtatcaagatggaaaggagttcgggattggagacctcgtatggggcaaaatcaaaggcttttcttggtggcccgccatggtggtaagttggaaagccacatccaagcggcaggccatgtctggcatgcggtgggtgcagtggttcggggacgggaaattttcagaggtatcagccgataaactggttgcccttggcctgtttagccagcattttaatctagcaacctttaataagctggtgagctaccggaaagcgatgtaccatgctctggaaaaggccagggtgcgggctggcaaaacattcccatccagcccgggagattctctggaggatcaactaaaacccatgcttgagtgggcccatggtggttttaagcctactggcatcgaaggcctgaagcctaacaatacacaaccagagaacaaaacacgccggaggactgcagatgactcagcaactagcgattactgcccagctcccaagaggctcaaaaccaactgctacaataacgggaaggacaggggtgacgaagatcagtctagagagcagatggctagtgacgtagcaaataacaagtcttccttggaggatggttgcttgtcctgcggccgaaaaaaccccgtgtcttttcatccccttttcgaaggtgggctgtgtcagacttgtagggacagatttttggaactgttttatatgtacgacgacgatggttaccaaagctattgtaccgtgtgttgcgagggtcgcgaactgttactttgtagtaacacatcctgctgtaggtgtttttgcgtggagtgtctcgaggtcctggtggggaccggcactgctgctgaggctaaactgcaggagccatggtcttgctacatgtgtctgcctcaaagatgccacggagtcctgagacgacgaaaagactggaatgttagacttcaagctttctttacatctgatactggtctagaatatgaagcccctaagctttaccctgcaatcccagctgccaggagaagacccattagggtactgtctttattcgacggaatcgctacgggctatctggtccttaaagagttgggcattaaagtcggaaagtacgttgcatcagaagtgtgcgaggaatcgatcgccgtgggaacagtgaagcacgagggaaacattaagtacgtcaatgatgttcgcaatatcacaaagaaaaacattgaggaatggggccctttcgatctagtgataggaggatccccatgtaacgatctgagcaacgtaaatcccgcacgaaaaggactctacgagggcacggggcgcctcttcttcgagttttaccacttgctgaactatagtagaccgaaggagggcgacgacagaccatttttctggatgttcgagaacgttgtcgcgatgaaagtcggtgacaaaagggacatttctaggtttctcgagtgcaatccagtgatgatcgatgccattaaagtctctgccgcacatcgcgcccgctatttctggggaaacctaccaggaatgaacagaccggttattgcttctaagaatgataagttagagcttcaggattgtcttgagtataaccgcatcgctaaagacctttggctgtcatgtgcacttcatcggagagtgcagcacgggccctggtgtccacccgaggcggccggtaaagtcctggagagagcatgccacccgactcctttacggccttctgagggtctgttgtgtatgtag

SEQ ID NO: 114860 - DNA, 2313 bp, synthetic construct
  misc_feature 1..2313: note = Description of Artificial Sequence: Synthetic coding sequence
  source 1..2313: mol_type = other DNA
atgaagggagacacccggcatctgaacggggaagaggacgctgggggtcgcgaggattcgatactggtgaacggggcgtgctcagaccagtctagtgattctcccccaattcttgaagccataaggacgcctgagatccgaggaagacgaagcagcagtcggctttctaagagggaagtgagttccctcctgagctatacacaggatctcactggagacggcgacggtgaggatggggacggttccgacacccccgtaatgccaaagctttttagggaaacccggactcgcagtgaatcccccgccgtgcgaacacgcaacaacaactcagtctcttctcgtgaaagacataggccatcacccaggtctacaaggggaagacaggggcggaatcacgtggacgaatccccagttgaattccctgctactaggtcactcaggcgcagagctacagcttccgctggtaccccatggccttctcctccatcaagctatctcacaatcgatctcacagatgacaccgaagatacacatggcacccctcaaagctcttctacaccttatgcccgccttgcacaggatagccagcaggggggcatggagtccccgcaagtcgaagccgattcaggagatggagactcatcagaatatcaggatggaaaggaatttggtattggcgaccttgtatggggtaaaatcaaagggttctcttggtggccagctatggtggtgtcatggaaagccacctccaaaaggcaggccatgtcaggaatgagatgggtccaatggtttggcgatggaaagttctccgaagtatcagccgacaagttagtggctcttggcctgttctcccagcatttcaatctcgctacattcaataagttagtatcttatcggaaggccatgtatcacgctcttgagaaagctcgcgtacgcgccggcaaaaccttcccctctagcccgggggattctttagaggatcagctgaaacctatgcttgaatgggcacatggaggttttaaacctaccggtatcgagggcctgaaacctaataatactcagcccgaaaataaaacccgaagacgaaccgctgacgatagcgcaacgtctgactactgtccagctcctaagaggctgaagaccaactgttataataatggcaaagaccgaggcgatgaggatcagtcacgtgagcagatggcatccgacgtggccaataataaatcttctctggaggatggatgtctgtcctgcggacgaaaaaatccagtgagtttccatcccctgtttgagggagggctgtgtcaaacctgccgggaccgcttcctagaattgttctatatgtacgatgatgatggctatcagtcatactgcaccgtgtgctgtgaaggtagagagttactgctttgtagcaacacttcctgctgccgctgcttttgcgtagaatgtcttgaagtgttagtcggaaccggaacagccgccgaggctaaattacaggaaccatggtcttgctatatgtgtctccctcagagatgtcacggcgtattacggagacgcaaagattggaatgtcaggctccaagctttcttcacctctgatactgggctcgaatatgaggctccaaagctctacccagctattccagcggctagacgacgcccaatcagggtgctgtccctttttgatgggattgccactggatacctcgttttgaaagagctcggtattaaggtcgggaagtatgttgcatccgaagtgtgtgaggaatcaatcgccgtgggtaccgtcaaacacgaggggaacattaaatacgtcaacgacgtacggaacatcacaaagaagaacatagaggagtgggggccctttgacctggtcatcggagggtccccctgcaacgacctgtccaacgtcaaccctgcacgcaaaggcctgtacgaaggaaccggcaggcttttctttgaattctatcatctgctgaactattccagacccaaagagggcgacgatcgcccctttttctggatgttcgaaaatgttgtggccatgaaggtgggcgacaaacgagatatctcacgttttctggaatgtaatccggtgatgatcgatgctattaaggtttctgctgcccaccgcgcccgctatttctggggcaatctgccaggaatgaacagaatcttcggctttcccgttcactataccgacgtaagcaacatggggaggggcgcgagacagaagttgctaggccgttcctggtctgtgcctgtcatcaggcacttgtttgctcccctgaaggattacttcgcatgcgagtag

SEQ ID NO: 114861 - DNA, 2502 bp, synthetic construct
  misc_feature 1..2502: note = Description of Artificial Sequence: Synthetic coding sequence
  source 1..2502: mol_type = other DNA
atgaagggggatactaggcacttgaacggagaggaggacgccggaggtcgcgaggattctatactggtgaatggagcatgttccgatcagagcagcgacagtcccccaatcttggaggctataaggacccccgagatacgtggaagacgctcttcgtctcgactgtcaaagagagaggtatcgagcctgctctcatacacccaagatctgactggggacggtgacggggaggacggggacggtagtgataccccagtcatgcccaagctgtttcgagagacacgcactagaagtgaaagtccagcagtcagaactcggaacaataattccgtctcctctagagagcgacaccgtccatcaccaaggtcaacacgggggcgtcagggcaggaatcacgttgacgaaagcccagttgaatttcccgccacacggagcctgcgcaggagagcaacagcctccgcaggcaccccttggcccagtccaccctccagctacctgactatcgacctgacagacgacacagaagacacccatggcacacctcagagtagcagtactccatacgccaggctcgcacaagattctcagcagggaggaatggaatcaccgcaggtggaggcagacagtggagatggagatagttctgagtaccaggacggaaaggaatttggcataggcgatcttgtgtgggggaaaattaaggggttctcttggtggccagctatggtcgtttcctggaaagcaacctctaaacgccaagctatgagcgggatgaggtgggtgcagtggttcggagatgggaaatttagtgaggtttctgccgataagctggtggcgttgggtctgttctctcagcactttaaccttgcgaccttcaataaacttgtgtcttacagaaaggctatgtatcacgccttagagaaagctagagttagagccgggaaaaccttcccaagtagtccaggcgactctctggaggaccaactgaaacccatgctggagtgggcccacggcggcttcaaacctacgggtatcgaagggttaaagccaaacaacacccagcccgagaataaaacacgccggcgtaccgcggacgatagcgccacgtccgactactgtcctgcccccaaacgactgaagaccaattgctataacaacgggaaggatcgcggggatgaagatcagtctcgtgagcaaatggcatctgacgtcgccaacaataagagctctctggaggatggctgtctttcgtgcggacgcaagaatccagtgtctttccaccctctgtttgagggtggcttatgccagacatgtcgggatcggttcctagagcttttctatatgtatgacgatgatggataccagtcatactgtacggtgtgttgtgagggccgtgagttactactctgtagcaacacctcatgctgtagatgcttctgtgtggagtgcctggaagtgctcgtgggtactggcaccgccgcagaggcaaagctgcaggagccttggtcctgttacatgtgtcttccacagagatgccacggcgtattgcggcgacgcaaggattggaacgtgcgactgcaggcattctttacgagtgataccggccttgagtacgaggcccctaagttgtatccagcaattccggcagcccgccggagaccgattcgggtgctgtccttatttgatggtatcgctacgggctatctggtgttgaaagaattaggcatcaaggtaggaaagtacgtggcttctgaagtgtgcgaagaatctatcgcggtaggaactgttaagcacgagggcaatatcaagtacgtcaatgatgtgcgcaacatcactaagaaaaacatcgaggagtggggtcctttcgacctagtaatcggtgggagcccctgtaacgatttaagcaatgtgaacccagctcgaaaaggactctatgagggcaccggaaggctgttcttcgagttttaccaccttctgaattactcgagacccaaggaaggtgacgacaggcccttcttctggatgtttgagaacgttgtagccatgaaggtgggggacaagcgtgatattagccgctttctagagtgtaaccccgtcatgattgacgcgattaaggtgagtgccgcacacagggctaggtacttctggggtaacctgccgggcatgaaccggcccgtgatcgcctcgaaaaacgataagttggagttgcaggattgccttgagtataaccgaatagcaaagctcaagaaagtgcagacaatcaccacgaagagcaacagcatcaaacagggcaagaaccaactctttcccgtggtcatgaatggcaaagaagacgtattatggtgtaccgagctggaacgtatcttcgggtttccggttcattacacagatgtcagtaacatgggtcgcggagctcggcaaaagctcttgggccggtcttggtccgtccctgtcatccgccaccttttcgcaccactgaaggattattttgcgtgcgaatag

SEQ ID NO: 114862 - DNA, 999 bp, synthetic construct
  misc_feature 1..999: note = Description of Artificial Sequence: Synthetic coding sequence
  source 1..999: mol_type = other DNA
atgaaaggggatacacgccacctgaacggcgaggaagatgctggtggaagggaggattcgattctggtgaacggagcttgctcagaccaatctagcgattccccgcccatcctggaggctatccgtaccccggagattcgaggacgccggagtagctctcgcctgtcaaagagggaggtgtcgtccctgctgagctatactcaggacctgactggggacggggacggtgaggacggagatggctcggatactccagttatgccgaagctattcagagagactcgcaccagatcagagtctcccgctagtctgaggagacgcgctacggcctcagcaggcaccccctggccaagcccgccttcaagttatctcaccatagacctcaccgatgataccgaggatacccacgggacgccgcagtcctcaagtactccatacgcacgattggcccaggactctcaacaaggtggtatggagtccccccaggtagaggcagactccggggacggcgacagtagcgagtaccaagacgggaaggagtttggcattggggacctagtgtggggaaagattaagggcttttcttggtggccagccatggtggtgagctggaaggcaacctctaagaggcaggcaatgtcaggcatgaggtgggtgcagtggtttggggacggtaaattcagtgaagtaagcgccgataaactggtggccttggggcttttcagtcagcattttaacctggccacattcaacaaactagtgagttaccgcaaagcaatgtaccacgccttagaacgaacgcggctggaagatgctcagctgactacacagcccccgcttaccacagcccctcacccctccgccagccggcaaatcgccataacaaccgccaagactgaaggcatgaaaattagggcagagaataagtggctccagatgctgcccacaacgagggccgcttggaaggagaagcctcgagttctgccaccctccttgtag

SEQ ID NO: 114863 - DNA, 2187 bp, synthetic construct
  misc_feature 1..2187: note = Description of Artificial Sequence: Synthetic coding sequence
  source 1..2187: mol_type = other DNA
atgaaaggagataccaggcatctgaacggagaggaagacgccggcggcagagaggatagcatccttgtgaatggggcctgttctgatcagtcctccgactctccccctattctcgaggccattcggactcctgagatccgtggcaggagatcaagttctcgcttgtctaagagggaggtctcctctctactcagctacacgcaggacctcacaggagacggggatggagaagatggtgacggatcagatacccccgtgatgcccaagctttttcgcgagaccaggacccgctctgaaagccctgccagcctgcggagacgagctaccgccagcgctggtaccccatggccgagcccaccctcttcctacctcactattgacctcacagacgataccgaagacactcatggcactccgcagtcttccagcaccccatatgccagactagctcaggacagccagcaaggcgggatggaatccccacaagtggaagctgatagtggagacggagattcctcggaataccaggacggaaaggagtttggaattggcgatctggtgtgggggaaaatcaaaggcttcagttggtggcctgccatggtggtttcatggaaggccacgagcaagcggcaggcaatgtctggtatgcgctgggtgcagtggttcggtgacggaaaattcagcgaagtgagcgccgataagcttgtggcccttggcttattttctcagcacttcaatctcgcgacctttaacaaactcgtttcttataggaaggcaatgtaccacgccttggaaaaggcccgcgtcagagctgggaagacatttcctagctccccgggtgatagccttgaagaccagctgaaacccatgctagagtgggcacacgggggattcaagcctacaggtatcgaaggcctgaaacctaacaacacccaaccagagaacaaaactagaaggagaactgcagacgacagcgccacttccgattactgcccagcccctaagaggcttaagaccaattgttataacaatggcaaggataggggagacgaggatcagtcccgcgagcaaatggcaagtgacgttgccaataataagagctctcttgaggacggttgtctctcctgcggccgcaagaatcccgtgtcctttcaccccctgttcgagggagggctgtgccagacatgtagagaccgctttctggagttgttctatatgtatgacgacgacgggtatcagtcatactgtacagtttgctgtgaaggccgggagcttttactgtgctccaatactagttgttgtcggtgtttttgtgtggaatgtctggaggtattggtaggcactgggacggcagcagaagcaaaactgcaagagccatggtcctgttacatgtgccttccacagcgctgccatggagtcttgcgccgtcggaaggactggaacgtcaggctgcaggcgttctttaccagcgatacagggctggagtacgaagcgccaaaactttatcctgccatccctgctgcccgtcgccgccctatcagggtcctgtcactgtttgacgggattgctacggggtaccttgtacttaaagagctcggaatcaaggtcggcaaatatgtcgccagcgaggtgtgtgaagagagcatcgctgtggggaccgtaaaacatgaagggaatatcaagtatgttaacgacgtacgtaatatcaccaagaagaacattgaagaatggggcccatttgacttagtcatcgggggtagtccctgcaacgacttgtctaacgttaatcctgcacgtaaaggtttatacgagggcacgggacgcctattttttgagttctatcacctgttaaattattcacgccctaaagaaggggacgaccgaccatttttctggatgtttgaaaatgtggtggccatgaaagtcggcgataagagagatatcagccgtttcctggagtgcaatccagtcatgattgacgccatcaaggtttcagcggcccaccgggcacggtacttttgggggaatctgcccggaatgaacaggatatttggcttccccgtgcactataccgatgtgtcaaatatgggccgtggtgcccggcagaagctgctggggcggtcatggagcgtccctgtgattcgccacctgttcgcaccccttaaagattactttgcttgtgagtag

SEQ ID NO: 114864 - DNA, 2085 bp, synthetic construct
  misc_feature 1..2085: note = Description of Artificial Sequence: Synthetic coding sequence
  source 1..2085: mol_type = other DNA
atgaagggcgataccaggcacctgaacggagaagaggatgccgggggtcgagaggactccattttggtaaacggtgcttgctccgaccagtcctctgactctccccctatactggaagccatccgaacgccagaaattcgtggccggcgctccagctctaggttgtccaaaagggaggtgtcgtcccttctctcctacactcagtctctcagaagaagagcgaccgcttccgctgggactccatggcccagcccgccatcatcttacctgacaatcgacctcacagacgatactgaggacacccacggcacaccccagtctagttctaccccctacgctaggttggctcaggactctcagcagggcggcatggaaagtccacaggtcgaggccgactccggcgacggagactcttcagagtatcaggacggaaaagaatttggaatcggggatctggtgtggggaaaaatcaaagggttttcctggtggcccgctatggtggttagttggaaggccactagcaaacgtcaagctatgagcggcatgcgctgggtccagtggtttggtgacgggaagttcagcgaggtcagcgcggacaaactcgtggccctgggcttatttagtcagcactttaaccttgctacatttaataagctggtcagttaccgcaaggctatgtaccacgccctagaaaaagcccgggttcgggcgggaaagacctttcctagctctcccggcgactctctggaggaccagctgaagcctatgctggagtgggcacacggtggtttcaagcccaccggcatagagggactcaagcctaataatacccagcctgagaataaaacccgacggaggaccgctgacgacagcgcaacaagcgattattgtcccgcgcctaagcgcctgaagaccaattgttacaataacggaaaggataggggcgacgaagatcaatccagagagcagatggcatccgatgtggccaacaacaaatcttccctcgaggacgggtgcttatcatgtggtcggaaaaacccagtgagtttccatcccctgtttgagggtggtctgtgccagacttgtcgggataggttcctagagctcttctacatgtacgacgacgacgggtaccagtcttattgcacagtgtgctgcgaggggcgggaacttttgttatgtagcaatacttcctgctgtaggtgcttctgtgtggaatgtttagaggtcctggtcggcactggcaccgcagctgaggctaagctgcaggaaccgtggtcttgttatatgtgcctgcctcagcggtgtcacggtgtacttcggaggagaaaggattggaatgtgcggttacaggcctttttcacgagtgataccggcctcgagtatgaagccccaaagttatatccagcgattccggctgccaggcgcaggcctatcagagttctgtcgctgttcgatgggattgctacggggtacctggttctcaaggaactggggatcaaagtcggaaagtacgtcgcctctgaagtgtgcgaggaaagcatagccgtgggcaccgttaaacacgagggaaatatcaaatacgtaaacgacgttagaaatattacaaagaagaatatcgaagaatggggccctttcgacctggttatcggcggctcaccttgtaacgacctgagcaacgttaaccctgcgaggaagggcctgtatgagggaactggacgtctgttctttgaattttatcacctgctgaattactcgagacctaaagagggggacgataggccatttttctggatgttcgagaatgtggtggcaatgaaagtcggcgataagagggacataagtagatttcttgaatgcaatcccgtcatgatcgacgccattaaagtcagcgccgctcacagagcccggtatttttgggggaacctgcctggcatgaaccggatttttggctttcccgttcactataccgacgtcagtaacatgggccgcggggccaggcagaagttactgggaagatcctggtctgtcccagtgatcagacaccttttcgcaccccttaaggattatttcgcctgcgaatag

SEQ ID NO: 114865 - DNA, 1701 bp, synthetic construct
  misc_feature 1..1701: note = Description of Artificial Sequence: Synthetic coding sequence
  source 1..1701: mol_type = other DNA
ggtcgatcaccccgggggaggagtgaacgcccacccaccgatggcacagggtccctggcggtcggtagggctggtggcaatgccgccagaccggctgcattaggcctgtctggcccttctaaaccttcaagtgcaataggcgccggcgacagccgcgctcagcgcccggcacgcccccccgccggcttgccccccgcatcaccagatccaaggctccggcggccagcggcacctcagccggcccttcggcaagagtctatgaagggggatacacgccatttgaacggtgaagaggacgccgggggtagagaagactcaatactggtaaatggagcatgttcagaccagagctctgacagtccccccatccttgaggccattaggacacccgagattcgaggaaggcggagttcctctagattgtcaaaacgagaggtgagctccctcctttcttacactcaggacctcacgggcgacggagatggcgaggacggagacggctccgacacacctgttatgcctaagctgttcagggagactaggacacgaagtgagagcccagcagtgcgtacaagaaacaacaatagtgtatccagccgtgagagacatcgtccctcccccagatccactcgtggccggcagggacggaaccacgttgatgagtccccggtcgaattccccgcgacaagaagtctacgaagaagagccacagcctccgccggcacaccatggcccagcccccctagctcctatcttacaatcgatcttactgacgacaccgaggatacccacgggactccgcagtcctcctcaactccctatgcccggctcgcccaggacagccagcaaggcggcatggagtcccctcaagtggaggccgactccggtgatggagattcctctgagtatcaggacggaaaggaatttggcatcggagatctggtgtggggaaaaatcaaaggcttcagttggtggcccgccatggtggtatcctggaaagccactagcaagagacaagctatgtctggaatgcgctgggtgcaatggttcggcgatgggaagtttagcgaggtctcagccgacaaactggttgccctcggtctgtttagccagcattttaacctcgctacatttaacaagttggtgtcttaccgtaaagcgatgtaccacgctctggagaaggcgcgtgtgcgcgccggcaaaactttccctagcagccctggcgattccttagaggatcagctgaagcccatgctggaatgggcccatgggggatttaagccaactgggatcgaggggctcaagcccaataacacccagcctgaaaataagacgaggcgcagaacagccgatgactccgctaccagcgactactgccccgcccctaagagactcaagactaattgttataacaacggtaaggaccggggggatgaggaccaaagcagggaacagatggccagtgacgtggcgaataacaaaagtagcctggaagatggatgtttgtcttgtggccgcaagaaccctgtttcatttcacccgttgtttgaggggggactctgccaaacttgcagacatctgtgtggggactcagtgaagcccactcacccctcttgtctcgcactttgtctgtggggaagaatgggcgattcatgtcaccggggccagtggcatgccggtcactctcagcttagtttctag

SEQ ID NO: 114866 - DNA, 1164 bp, synthetic construct
  misc_feature 1..1164: note = Description of Artificial Sequence: Synthetic coding sequence
  source 1..1164: mol_type = other DNA
atggccgctatcccagctcttgacccagaggctgagccatccatggacgtcatccttgtgggctctagcgagctgtcctccagcgtaagcccaggcaccgggcgcgatctcatagcctacgaggtgaaagcgaatcaacggaacattgaagatatatgtatctgttgtggaagcctccaagtacacactcagcatccactgtttgaaggcgggatatgcgcaccatgcaaggacaagtttctggacgccctgtttctgtatgatgatgacggctaccagtcctactgcagcatctgctgcagcggagagacactgctcatctgcggcaatcccgattgtactcgctgttattgcttcgagtgcgtcgattctcttgtgggacccggcacctctggcaaggtccacgctatgagtaactgggtgtgctacttatgtctcccctccagtagatccggcttattgcagcgtaggagaaagtggcgaagccagctgaaggcattttacgatcgcgagtccgagaaccccctggagatgttcgaaacggtgccagtctggcggcgtcagcccgtccgggttttgagcctctttgaggacatcaaaaaagagttgacaagcctgggctttctcgaatccggctctgatccagggcagctaaagcatgttgtggatgtcaccgatacggttcggaaagacgtcgaggaatggggaccttttgatctcgtgtatggagccactccccccttgggccatacctgtgatcgaccgccaagctggtacttgttccagtttcaccggctgctccagtatgctcgcccaaagcctgggtcccctagacccttcttctggatgttcgtagacaatctcgtgctcaacaaggaagacctggatgtcgcttccagatttttagaaatggaacccgtgaccatacccgacgtccacgggggtagcctccagaatgcagtgagagtgtggtccaatatcccggctatcagaagctccaggcactgggcactggtgtctgaggaggagctgtccctactggctcagaataagcagtcatccaagctcgccgcaaagtggcctaccaagcttgtgaagaactgctttctgcccctccgcgaatatttcaagtatttcagtacagaactcacatcttccctgtag

SEQ ID NO: 114867 - DNA, 1161 bp, synthetic construct
  misc_feature 1..1161: note = Description of Artificial Sequence: Synthetic coding sequence
  source 1..1161: mol_type = other DNA
atggctgccatccccgctctggaccccgaagcagagccgtcaatggacgtcattctggtaggatcttctgagctgtcctcctccgtcagccccggcactggaagagacctgatcgcatatgaagtgaaggccaatcagagaaatatcgaggacatttgcatctgttgcggcagtcttcaagtgcacacccagcaccccctgttcgagggaggcatttgtgccccgtgcaaagataaattcttggatgctctgttcctttatgatgacgacgggtaccagtcctactgctcaatttgttgcagcggtgaaacactccttatctgtggaaaccccgactgcactcggtgctattgcttcgagtgcgtggattccctcgtggggccaggcacatccggtaaggtgcatgccatgtccaattgggtgtgttacctctgtcttccaagttcacgatcgggactactgcagcggagacggaagtggcggagccagttaaaagctttttatgaccgtgagagtgagaaccccctggagatgttcgagacagttccagtctggcggcggcaacctgtcagggtcctctcccttttcgaagacatcaaaaaagaactgacaagcctcggcttcctggaaagcggatccgaccccggccagctgaagcacgtggtggacgtaacagacactgtgcgcaaagacgtcgaagagtgggggcccttcgatttagtgtatggggccacgcccccgctcggtcatacctgcgatcgaccgccaagctggtatctctttcagtttcacaggctgctacaatacgcccgcccaaagcccgggagccccaggccattcttctggatgtttgtcgataaccttgtgctgaacaaagaagatctggacgtggcatcccggttcctggaaatggaacctgttaccattccagatgtgcatggtggttccttacaaaatgcggtgagagtgtggagtaacattcctgctatacggtcacgtcattgggcattagtatctgaagaagagctcagtctactggcacagaataagcaatcttccaagctggcagctaaatggcccacaaagctggtgaagaactgcttcctgccactgagggaatactttaaatacttttccaccgaactgacatcatctctttag

SEQ ID NO: 114868 - DNA, 3123 bp, synthetic construct
  misc_feature 1..3123: note = Description of Artificial Sequence: Synthetic coding sequence
  source 1..3123: mol_type = other DNA
atgctcgaagatatctccgaagaggatatctgggagtacaagagtaaaagaaaacccaagcgagtggaccccaacaatggatcaaagaatatactcaaatcagttgaaaaagcaaccgatggcaaataccagtcaaagcggagtcgcaatcgaaaacgagcagcagaagccaaagaggtcaaggaccatgaggtgccactcggaaatgccggttgccagacttccgtggccagttcgcagaactcaagctgtggtgacggcattcagcaaacccaagataaggaaacgacgccaggaaagctctgtcgcacacagaaatctcagcatgtatcccccaagattcgacctgtttacgatgggtactgcccgaattgccaaatgccttttagctcactgattggccagacgccccggtggcacgtgtttgaatgtctggactctccaccacggtccgaaaccgagtgtccagacggtctgctctgcacctctacaattccgttccattataagcgctatacccacttcctgctggcgcagagtcgcgctggcgaccatcccttttcatccccttcccccgctagcggagggagcttcagtgagactaagagcggcgttctgtgttcattggaggaaagatggagcagctatcagaaccagactgacaactctgtgtctaatgatccactccttatgacccagtatttcaaaaagtcccccagcctgaccgaagcctccgagaaaatttctacccacattcagactagtcagcaggccctccaatttacggattttgttgagaatgacaagctggtgggcgtcgccctgcggttggcaaataatagcgagcacatcaatttgccgctacccgagaacgattttagtgattgcgagattagctatagtccccttcaatcagatgaggatacacatgatattgatgaaaagcctgacgacagtcaggagcagctgttcttcacggaatcctctaaggatgggtctctcgaggaggacgatgactcctgcggattcttcaagaagcggcacggacccctgctgaaggaccaggatgagtcctgcccaaaggtgaactcattcctgaccagggacaaatatgacgaaggtctttacagatttaatagccttaacgatttatcgcagccaatatcccagaataatgaatccaccctgccttatgacctggcctgcacaggcggggactttgtcctattcccgcccgcattagctggaaagcttgcagcttcggtgcaccaggccacaaaggctaagccagatgagcccgaatttcattccgcccagagtaataagcagaagcaggtcatcgaggaaagtagtgtgtacaaccaagtctccctcccactggttaaaagtctcatgttgaagcccttcgagagccaggtagaaggttatctttccagccaaccgacccagaataccattcgcaaacttagctccgaaaatctaaacgccaaaaacaatactaatagcgcatgtttctgcaggaaagcactcgaaggggtgcctgtcggcaaagctaccattttaaacaccgagaacttaagtagcactccagcaccaaaataccttaagattctgccttccggcctgaaatacaacgcccggcatccctcaacaaaggttatgaagcagatggacataggcgtgtacttcggactgccaccaaagcgaaaggaagagaagctgctgggggagagtgctctcgaggggatcaacttgaatcctgtgccctctcccaaccagaaacggtcaagtcagtgcaagcgcaaggcagaaaaatcattaagcgatctggagtttgacgccagcaccctgcacgaatctcagttgtctgtagaactgtcctcggagagatcccagcgccagaaaaagaggtgtaggaagagtaactccttacaagaaggagcttgtcagaagaggtctgaccatctaattaacacagagtcagaggccgtaaatttatctaaagtgaaggtgtttaccaagtccgcccatgggggtctacagcgtgggaataaaaaaatccccgaaagtagcaacgttggcggatctcggaagaaaacctgcccattctacaagaagatccccggaaccggattcactgttgatgctttccaatacggcgtggtcgagggctgtacggcatactttctgacacacttccactctgaccactacgccgggctgtccaagcactttacctttccagtgtattgcagcgagatcaccggaaacctgctcaagaacaaattgcatgttcaagagcagtatatccatcccctccccttagacaccgaatgcattgtcaacggggttaaagtagttctgctcgatgctaaccattgtcctggcgcagtcatgattctgttctacctgccaaatggcaccgttatcctgcacaccggcgacttccgtgccgaccccagcatggaaaggtcactcctggctgaccagaaagtgcatatgttatatctagatacaacatactgctcccctgaatatacttttccgagccagcaggaggttataagatttgctatcaatactgctttcgaggcagtgacactcaatccacacgctctggtggtgtgcgggacttactctattggcaaagagaaggtctttctggcgatcgcagacgtgctgggatcgaaggtgggcatgagccaagagaagtataagaccctgcagtgccttaacatacccgaaatcaactctctcatcacaacagacatgtgcagctcactggtccatctcttgcctatgatgcaaataaattttaaaggattacagtcccatctgaaaaaatgtggaggtaaatataaccagatcctggcttttaggcccaccggatggactcactctaataagttcacccgcatcgcagatgttattccacaaacaaagggaaacatttccatctatgggattccgtattctgaacactcctcctacctagagatgaaaaggtttgtgcagtggctgaaaccacagaaaattattcccaccgtgaatgtgggtacctggaaatcgaggtctaccatggaaaaatatttccgggagtggaagctggaggccgggtactag

SEQ ID NO: 114869 - DNA, 3123 bp, synthetic construct
  misc_feature 1..3123: note = Description of Artificial Sequence: Synthetic coding sequence
  source 1..3123: mol_type = other DNA
atgcttgaggatatatcagaggaagacatctgggaatataaatcaaagaggaagccaaagagagtggaccccaacaacgggtccaaaaatattcttaagagcgtcgagaaagctaccgacgggaaataccagagtaagaggtcccgcaatagaaaaagggcagccgaggcaaaagaagtgaaggaccacgaggtcccgctgggaaacgcaggctgccagactagtgtggctagcagccaaaactctagttgtggagacggcatccaacaaactcaggacaaagaaacgacgccggggaagctgtgtcggactcagaaaagccagcacgtgagccctaaaatccggcccgtttacgacggctactgccccaactgccaaatgcctttcagctcgctgattggccagactccacggtggcacgtttttgagtgcttggatagtcctccccgttctgaaactgaatgcccggatggtcttctatgcactagcaccatcccctttcattacaagcggtacacccacttcctcctggcccagtctagagccggcgatcacccattcagctccccgagccctgccagtgggggatcttttagtgaaactaagagtggggtgctgtgcagcttggaagaacgctggagtagctaccagaaccagaccgataactctgttagcaacgatcccttgctcatgacccagtacttcaagaagtccccatctctgacagaagccagcgaaaaaatatctacacacattcagacctctcaacaggcactgcagttcaccgatttcgtcgagaacgataaactggttggggtggccctcaggctggctaataatagcgagcatattaatctgcctctcccagagaacgacttcagtgattgcgagatcagctactcccccctgcagtcagatgaggatacgcacgatatcgatgaaaagcctgatgactctcaggaacagttatttttcacggagagcagcaaggacggcagtctcgaagaagacgatgacagttgcggattctttaagaaaagacatggccccctgcttaaagatcaggatgaaagctgcccaaaggtgaatagtttccttaccagggacaaatatgatgagggactctatcggttcaattcattgaatgatttgagtcaacccatcagccagaataacgaatcaacactgccttacgatctggcatgcaccggaggtgattttgtgctgttcccccctgccctcgctgggaaactggctgcctcggttcatcaggcgaccaaggccaagcccgacgaacccgagtttcatagcgctcagagcaataagcagaagcaggtgattgaagaatccagcgtgtacaaccaggtgtccttgcctttggtgaagagcttgatgcttaagccctttgagtctcaggtggagggctatctgagcagccaacccacccagaacacaatccgaaaacttagttccgaaaacctcaatgcgaaaaacaataccaatagcgcctgcttttgccgcaaagcgctcgagggagtgcctgtcggaaaggctaccattctcaacactgaaaacctgtcatccacaccagccccaaagtacctgaagatactcccctcagggctcaagtataacgcccggcatccttccacaaaggtcatgaagcagatggacataggtgtatatttcgggctgccacccaagaggaaggaggaaaagctgctcggagaatctgctctcgagggcatcaatctcaaccccgtcccctctccaaaccagaagcgaagttcgcagtgtaaacgcaaggctgaaaaatcactaagcgatctagaattcgacgcgtcgaccctccatgaaagccagctatcagtggaactgagtagcgagagaagccagcggcagaaaaagcggtgccgaaagtcgaattccctgcaggagggagcctgccagaagaggagtgaccacctgatcaataccgagtcagaagcggttaatctcagcaaagtaaaggtgttcacaaagagcgcccacggcggccttcagagaggaaacaagaaaattcccgaaagcagcaatgttggaggctcacgcaagaagacgtgcccattctacaagaaaatcccaggaaccggttttaccgtggacgcttttcagtatggtgtcgtggaaggctgtacagcctattttctcacacacttccactcagatcattatgcgggcttgagcaaacattttacctttcccgtgtattgctccgaaatcaccgggaacttgctcaagaataagcttcacgtccaggaacagtacatccatccactgccgttggacacagagtgcatcgtgaatggtgtgaaagtggtactgttggacgcgaaccactgccctggagcagtcatgattctgttctatcttcctaatgggacagttattctgcacaccggcgatttccgcgccgacccctctatggagcggagcctgctggctgaccaaaaagttcatatgctgtatctggacactacttactgttcacctgaatacacctttccctcgcaacaagaggtcatccgttttgccatcaacactgccttcgaggctgtcaccctgaatccgcacgccctggtcgtgtgcggaacctatagtattgggaaggagaaagtgtttctggcgatagctgatgtgctggggagtaaggtgggtatgtctcaggagaagtataagaccctccagtgcctgaatattccagagatcaactccttaatcaccacggacatgtgcagcagtctggttcatttactgcctatgatgcagattaactttaaaggcctacagtctcacctcaagaaatgcgggggcaaatacaatcaaatcctggcttttcgacccactggatggacccattctaataagttcacccgcattgctgacgttattccccagaccaaaggaaatatcagtatctacgggatcccatacagtgagcatagtagctatctggagatgaagcggtttgtgcagtggcttaaacctcaaaaaatcatcccgacagtaaatgtgggaacctggaagagccgcagtacaatggaaaagtatttcagagagtggaaactggaggccgggtactag

SEQ ID NO: 114870 - DNA, 813 bp, synthetic construct
  misc_feature 1..813: note = Description of Artificial Sequence: Synthetic coding sequence
  source 1..813: mol_type = other DNA
atgcttcaaaaacccaaatccgtgaagctccgggccctccgctcccccaggaagtttggagtggctggccgctcgtgccaggaggtgctaaggaagggttgcttaaggttccaactgcctgagagaggaagtagactatgcctgtacgaagacgggaccgagctcaccgaggattatttcccgtccgtgcctgataatgcagagttggtcctgctcacattgggccaggcctggcagggctatgtgtccgacatcagaaggttcttgtctgctttccacgagccccaggtcggtctgattcaggccgctcaacaactgctgtgcgacgagcaggccccccagaggcagaggctgctggcggacctgctgcacaacgtgtcccagaacatagccgcagaaacaagagccgaagacccaccctggtttgaggggctggaatctcgcttccagtctaaatcgggttatctgcggtattcctgcgaatcccgtatccgaagctaccttcgcgaggtgtcgagctaccctagcactgtcggcgccgaggctcaagaagagtttcttagggtgctcggctccatgtgccagaggctgcgctcgatgcagtataacggttcttacttcgaccgcggcgccaagggaggttccaggctgtgtactcccgagggttggtttagctgccagggcccttttgatatggacagttgcttaagcagacactccattaatccgtattccaaccgcgagtctagaatcctcttttccacctggaatctggaccacatcgacggtgttctgttatgcggccccggatag

SEQ ID NO: 114871 - DNA, 825 bp, synthetic construct
  misc_feature 1..825: note = Description of Artificial Sequence: Synthetic coding sequence
  source 1..825: mol_type = other DNA
atgtgcctgttactggatagacacctcctcttcgtaccactggttgccgacgtgtcggatataagacgctttctttcagctttccacgaaccccaggtggggctaatccaggctgcacagcagctcttgtgcgatgaacaagcaccacagaggcagcgcctgctggcggatctgctccacaatgtttcgcagaatatcgccgctgagacgagagcagaagatccaccttggtttgagggactagagtcccggtttcaatcaaagtcgggatatctgcgatattcgtgcgagagtagaattagaagctaccttagagaagtgagttcctatccttcaaccgtcggtgcagaggcacaggaagaatttttgagggttcttggtagcatgtgtcaaagactgagaagcatgcaatacaatggaagttactttgacagaggggccaaaggaggctccaggttgtgcacgcctgaaggttggttctcatgccaagggccctttgatatggacagctgcctgagcagacattccattaatccttactccaatagagagtctaggattctgttctctacttggaatctggatcatattatagaaaaaaaaagaaccatcatccccactctggtcgaggctattaaggagcaggatggcagggaagtggactgggaatacttctacggcctactctttacatctgagaacttgaagctagttcacattgtctgccacaagaagaccacccacaagttgaactgcgacccttcacgtatatataagccgcagaccaggttaaagcggaagcaacccgtgagaaaacgtcagtag

SEQ ID NO: 114872 - DNA, 312 bp, synthetic construct
  misc_feature 1..312: note = Description of Artificial Sequence: Synthetic coding sequence
  source 1..312: mol_type = other DNA
atgctgcagaagccgaaaagtgtcaagctgcgggccctgcgcagccctagaaaattcggggtcgccggtaggagctgccaagaggtgttacgtaagggttgcctgagattccagctgccagaacgcggcagcaggctgtgcctctacgaagacggtacagagctcaccgaagactacttccccagcgtgcccgataatgctgagttggtgttattaaccctgggtcaggcctggcaggggtggttccggcacgtgagccaggactccttaacactactaggatccagttgcccaccagcactggtttcctag

SEQ ID NO: 114873 - DNA, 825 bp, synthetic construct
  misc_feature 1..825: note = Description of Artificial Sequence: Synthetic coding sequence
  source 1..825: mol_type = other DNA
atgtgtctgttactcgaccgtcacctgttattcgtgcccctggtggccgatgtgtccgatatccggagatttctgtccgcctttcacgaacctcaggtaggactaatccaggccgcacagcaattactctgtgacgaacaggcacctcagcgacagagactgcttgccgacttactgcacaatgtaagtcaaaacattgccgctgagacccgggcagaggaccctccatggtttgagggccttgaaagcagattccagtcaaaaagcggatacctccgttactcttgcgagtcacgcatacggagctacctgcgtgaagtgtcctcctatcccagcacagtaggtgccgaggcacaggaggaatttctgcgcgtgctgggatccatgtgtcaaagactgagaagcatgcagtataatgggagttactttgacaggggcgccaaaggcggctccagactgtgcacaccagaaggttggttcagttgtcagggaccttttgacatggactcctgcctatctagacacagtatcaacccgtattccaacagggagagcagaattcttttttctacctggaacttggaccacataatcgaaaagaaacggacgatcatccccaccctggtagaagccatcaaagagcaggatggacgcgaggtcgattgggagtacttctatggccttctttttaccagcgagaacctcaaactagttcacatcgtctgccacaaaaaaaccacccataaactgaattgcgacccgtcaagaatatacaaaccccagacccgcttgaaacggaaacagccggttcgcaagagacaatag

SEQ ID NO: 114874 - DNA, 1017 bp, synthetic construct
  misc_feature 1..1017: note = Description of Artificial Sequence: Synthetic coding sequence
  source 1..1017: mol_type = other DNA
atgctccagaaacctaaatcagtcaagcttagggccctcagatctccgaggaagttcggagtggcagggcgcagctgtcaggaggtgctgcggaaggggtgccttcgtttccagctaccagagcgtggtagtcggctgtgtttgtacgaggatgggaccgagttgaccgaagattacttccctagcgtccctgataacgccgaactagtgctcctgactttaggccaggcctggcaggggtatgtgtcggacatcagacggtttttatccgcctttcacgagccacaggttgggcttatccaggccgcgcagcaactgttgtgtgatgagcaggccccccagagacaacgcctcctggccgacctcttgcataatgtgtcacagaatatcgccgctgagacacgagctgaggacccgccctggttcgaaggactagagagccgattccagagcaagagtggttacctcaggtactcctgcgagtctagaatccgctcatatctccgggaggttagtagctacccctcaaccgtcggggctgaggctcaggaagaatttctccgagtcctgggctcaatgtgtcagcgccttcgctcaatgcaatacaacggctcatatttcgatagaggggctaaggggggctctcgactctgcacccccgaaggttggttcagctgtcagggccctttcgatatggatagttgtctcagcaggcacagcattaatccttactcaaatagagagagtcggatcctattcagtacatggaatctggatcacattatagaaaagaagcgaaccatcatccctacccttgtcgaggccataaaagagcaggacggtcgggaagtagattgggagtacttttacgggttgctctttacgtccgaaaaccttaagttggttcacatcgtttgccacaaaaagacaacccacaagctgaactgtgacccgtcacgaatctataaaccgcaaacgcgtctgaaacgtaaacaacccgttcgaaagcgccagtag

SEQ ID NO: 114875 - DNA, 351 bp, synthetic construct
  misc_feature 1..351: note = Description of Artificial Sequence: Synthetic coding sequence
  source 1..351: mol_type = other DNA
atgctccagaagccgaagagcgtgaaacttagggcactcagatcgccccgtaagtttggggtggccggccgcagttgccaagaagtcttacgcaaggggtgtctgcgattccagctgccagagagggggagtcgattatgtctctacgaagacgggaccgaattaaccgaggattactttccatccgtgcctgacaacgccgaactcgtgctgttgaccttaggacaggcctggcagggatcagtgggtgtgagggcccggacaaagacacgggacacatcttcactctctccaggcgactgccaagccctcggtaacggaggaagatgcggacagagactattcctttag

SEQ ID NO: 114876 - DNA, 261 bp, synthetic construct
  misc_feature 1..261: note = Description of Artificial Sequence: Synthetic coding sequence
  source 1..261: mol_type = other DNA
atgctccagaaacctaagagcgtgaaactgagggccctgaggtcccctcgcaagttcggagtagccggacgctcctgccaagaggtactgaggaagggatgtttgaggtttcagctacccgagagaggatcacggctgtgtctatacgaagacggaaccgagctaactgaagactactttccgagtgtccccgataatgccgagctggtcttattaaccctgggtcaggcctggcagggatgctggtctgccgtcgcgtag

SEQ ID NO: 114877 - DNA, 249 bp, synthetic construct
  misc_feature 1..249: note = Description of Artificial Sequence: Synthetic coding sequence
  source 1..249: mol_type = other DNA
atgctccagaaaccgaagagtgtcaagctccgagccctccgtagcccacgcaaattcggggtggcgggccgcagttgtcaagaggtcctgaggaagggttgcctaagatttcagctgcccgagcgcggaagccgcctctgcctctacgaagatgggaccgaactgactgaggactacttcccctctgtcccagataacgccgagctggtgttattgaccctgggacaggcctggcagggctgcgagtag

SEQ ID NO: 114878 - DNA, 813 bp, synthetic construct
  misc_feature 1..813: note = Description of Artificial Sequence: Synthetic coding sequence
  source 1..813: mol_type = other DNA
atgctgcagaagcctaaatcagtgaaattgcgagctctgcgatctccaaggaaattcggcgtcgcaggcaggtcctgtcaagaggtgctgaggaaagggtgccttcggttccaactgcccgagcggggaagtcggctgtgcctttatgaggacggcactgagttgacagaagattacttccccagcgtcccagataatgctgaactcgtcctgcttaccctggggcaggcttggcaagggtatgtgtctgacattcggcggtttctttccgctttccatgaaccacaggtcggccttatacaggctgcacagcagctcctgtgcgacgaacaggcaccgcagcgacagagattgctagctgatttactgcacaatgtttcacagaacatcgccgccgaaacaagggccgaggaccctccatggtttgaggggctcgaatctcgttttcaatctaagagcggctatcttcgctacagctgcgagagcaggatacgttcctatctgagggaggtcagcagctacccttccaccgtgggcgctgaagcccaggaggagttcttgagggttttaggttcaatgtgtcagcgactgcggtccatgcagtacaatggttcatactttgaccggggggcgaaaggaggatcccggctctgtaccccagagggttggttctcgtgccagggaccctttgatatggacagctgccttagtaggcatagtatcaatccatattccaatcgagaaagccgcatcctgttctccacttggaacttagaccatatagacggagtgttgttgtgtggacccgggtag

SEQ ID NO: 114879 - DNA, 3183 bp, synthetic construct
  misc_feature 1..3183: note = Description of Artificial Sequence: Synthetic coding sequence
  source 1..3183: mol_type = other DNA
atggaacagttgaacgagctcgagctgcttatggagaagtccttctgggaggaggctgaacttccagcagagctatttcaaaaaaaggtcgtggcctcttttccacgaactgtcctgtcaacaggtatggacaataggtatctcgtgttagcagtgaataccgtgcagaataaggagggaaattgtgaaaaaagactggtcattacagcttcccagagcctcgagaacaaggagctgtgcattcttaggaacgactggtgcagtgttccagtggaacctggcgacattatacatcttgagggtgattgcacatcagacacatggatcatcgataaggatttcgggtacctcattctctatccagacatgctaatatcaggcaccagtattgcctcgtcaatcaggtgcatgagacgagcagtcttaagcgagacattcaggtcgagcgaccctgcgacccggcaaatgctgatcggtaccgtcctccacgaagtctttcagaaagccataaataactccttcgcgccagagaaattgcaggagctggcatttcaaacaatacaagaaattaggcatctgaaggaaatgtatcgcctgaacctgagccaggacgagatcaaacaggaggtggaagactacctgccatctttctgtaagtgggcgggggactttatgcataagaatacttctaccgactttccacagatgcagctgagtctgccatccgacaactcaaaggacaattcgacatgtaacatcgaggtggttaaacctatggatattgaggaatctatttggtccccccgctttgggctgaaggggaagattgatgtcaccgtgggagtgaaaatccatcggggttacaagactaagtataagatcatgccccttgaattgaaaacagggaaggaaagcaacagtattgaacatcggtctcaggtggtgttgtacacactgttgtctcaagagaggagagccgatccggaggccggtcttcttctctacttgaagacaggacagatgtatcctgtgcccgccaatcacctagataaacgggaattgctaaaactaaggaatcagatggcgtttagcctttttcaccggatatctaagtccgccacacgccaaaagacccagctcgcctccttaccccagataatagaagaggagaagacctgtaaatattgttcacagatcggcaattgtgccctgtacagtagagccgtggagcaacagatggactgcagctcagtgccaattgttatgcttccgaaaatcgaggaggagactcagcatctcaaacagacccatctggagtatttctccctgtggtgcctcatgcttactctggaatcacagagcaaggataacaagaagaaccatcagaacatttggcttatgcccgcctctgagatggagaaaagtggatcctgtatcggcaatctgatcaggatggagcacgtaaagattgtttgtgatggacaatatcttcacaatttccagtgcaagcacggcgccattcccgttactaacctgatggctggcgatcgcgtcatcgtctccggcgaggaacgtagtctattcgccctctcacgcgggtacgttaaggagattaacatgacaaccgtaacttgtttgctggaccgcaacttatctgttcttcctgaatcaacccttttccgcctggaccaggaggagaaaaattgcgacattgacactccgctgggcaacctgagtaaactaatggagaacaccttcgtgagcaagaagctgagagacctcatcattgattttagagagccgcagtttatctcatacttatctagcgtactgccccatgacgcgaaagatacagtcgcttgcattctcaaagggctgaacaagccgcaaagacaggctatgaaaaaggtgctcctatctaaagattacactctaatcgtcggaatgcccggcacaggaaaaacgactactatctgcaccttggtccgcatcttgtacgcttgcggcttttcagtgctcctcactagttacacccactccgctgtggacaatatactcctcaaacttgcaaaatttaaaatcgggtttcttagattagggcagatccagaaggtccaccctgctatccagcaattcacagaacaggaaatttgtcgcagtaagtctatcaaatccttagcgctcttggaagagctgtataactcccaattaattgtggccaccacctgcatgggtatcaatcatcctatttttagtcgcaagatctttgatttctgcatcgtggatgaggcgtcccagatctcccagcctatttgcttgggaccactatttttcagtagacgctttgtgctcgtgggggatcaccagcagctgccacctttagtacttaatagggaagccagggccctcggaatgtccgaatccttattcaagaggctagagcaaaacaagtcagccgtagttcagttaacagtgcagtaccggatgaattcaaaaattatgtccttaagcaataaactcacttacgagggcaaactagagtgcggtagtgacaaggtggctaatgcagtcattaacctccgccatttcaaggacgtaaaacttgaactagaattttacgctgattacagtgacaacccttggctaatgggagtgttcgaacctaataatccagtgtgcttcctcaatacggacaaggtccctgcccctgagcaggtggagaaaggtggagtgagcaatgtgacagaggctaaactcattgtgtttctaacctccatcttcgtaaaagccgggtgctccccttcagatatcgggataattgcaccctaccggcagcaactcaaaattattaatgatctgctggccaggtccattggaatggtggaggtgaacactgtggataagtaccagggccgcgacaaatcaattgtgctggtgagctttgtgagaagtaacaaagatggtaccgtgggggagctgctgaaagattggagacgattaaacgtcgctatcactcgcgcaaaacacaaactgattctcctcggatgtgtcccatcgctcaactgctacccacccctcgagaagctgctgaaccacctgaattcagagaaactgatcatagacctcccatctcgggagcacgaatcactctgtcacatcctcggcgacttccagcgtgagtag

SEQ ID NO: 114880 - DNA, 2469 bp, synthetic construct
  misc_feature 1..2469: note = Description of Artificial Sequence: Synthetic coding sequence
  source 1..2469: mol_type = other DNA
atggaacagctgaacgaactcgagctcctgatggagaagagtttctgggaggaagccgaactccccgcagagctattccagaaaaaggtggtggcctcattcccgcggaccgttctgagcactggtatggataacaggtacctcgttctggcagtcaacactgtgcagaacaaagaaggaaattgtgaaaagagactcgtcattaccgcatcacaaagtctcgagaacaaagagctttgcattctaaggaacgactggtgttcagtgccagtagagcctggagatataatccacctggaaggggattgcaccagcgatacctggatcattgataaggactttgggtacctaatcctgtaccccgacatgctcatttcggggacatcaatagccagtagcataaggtgcatgcgtcgtgctgttctgagcgagaccttccgatcatctgatccggccacaaggcagatgctgatcgggaccgtactgcacgaagtttttcagaaggcgatcaacaacagcttcgcccctgagaaactacaggagcttgcctttcagacaatccaagagattagacacctaaaggaaatgtatcgactgaacctgagtcaggacgaaattaaacaagaggtcgaggattatctccccagtttctgcaaatgggctggagattttatgcacaagaacacatctactgatttcccccagatgcagttgtctctcccttcggataattcgaaggataatagtacttgtaatatcgaagttgtcaaacccatggacattgaagagagcatttggtcgcctcgatttggccttaagggcaagatcgacgtcacagtgggagttaaaatccaccgcgggtataaaactaagtataaaattatgccactggaattaaaaaccggaaaagagtctaactcgatagagcatcgatcccaggtagtgctctacacgctgctgtcacaagagcgccgtgccgacccagaggcggggctgcttttgtacctaaagaccgggcaaatgtaccccgtccccgcaaaccatttagacaaacgggaactacttaaacttaggaaccaaatggcattcagcctgttccaccggatatctaagtcagctaccaggcaaaaaactcaactggcatccctccctcaaatcatcgaagaggaaaaaacatgtaagtattgcagtcagattggcaattgtgccctctattcacgtgcagtcgagcaacagatggactgtagctccgtcccaatagtgatgctgccaaagattgaggaggagacacagcacttaaagcagacgcacctcgagtatttcagcctgtggtgccttatgctcacactggagtctcagagcaaagacaacaaaaagaaccaccaaaacatctggttgatgccagcatccgagatggaaaagtcaggctcctgcattgggaatctgatccgtatggaacacgtgaaaatagtgtgtgatggccaatatttgcataactttcaatgcaagcacggagcgatccctgtcaccaacttgatggcaggcgatagagtgatcgtgagcggggaggagcgtagtttgttcgcactaagcaggggctacgttaaagaaattaacatgacgaccgtgacctgcctcctggaccggaatctgtccgtgcttccggagagcacactgtttagacttgaccaggaggagaagaactgcgatatcgatacacccctaggaaacctctcaaaacttatggaaaacactttcgtgtcaaaaaaacttagagacctgatcatcgatttccgcgaaccacagttcattagctacctcagctccgtgctaccccatgatgctaaagatactgtcgcctgtatcttgaaagggcttaataaaccccagcggcaggccatgaaaaaagttctgttaagtaaggactatacattaatcgttggcatgcccggaaccggaaagaccacgactatatgtacacttgtgcctgcccccgaacaggtggagaaaggaggagtaagtaatgtgactgaggccaaacttatcgttttccttacttctatcttcgtcaaggccgggtgctcgccctcagacatagggattattgcgccctacaggcagcagctaaaaatcatcaatgacttacttgcgcgcagcatcggtatggtggaggtgaacacagtcgacaaataccaggggagagataagagcatcgtgctcgtttccttcgtgcggtccaataaagacggcactgttggggagcttctaaaagactggcggagactcaatgtagctataacgagagctaagcacaaactgatccttctgggctgcgtcccatctctcaactgctatcctccattggagaaactgctgaaccatctcaactcagaaaagctgatcatcgatctgcccagtcgggaacacgagtctctctgccacatcttaggcgattttcagcgggagtag

SEQ ID NO: 114881 - DNA, 3441 bp, synthetic construct
  misc_feature 1..3441: note = Description of Artificial Sequence: Synthetic coding sequence
  source 1..3441: mol_type = other DNA
atgaaaaccccctgtattccgagtccaaaacagggcagtaagggccggggacagagcccagcggctcaggtccgcggccctacgtggaacgctcccgcgcgggaggggcggccaggagcagggcacctggggcatctccgcgtgggagcttgtgcccggggggcgcaggcgcgcgctttctttccatttctttccttcctatgctatccgcgttttagatgtctcttctgtttgcagttcgcgatacctgcttcccgtatggaacagctgaacgagctagagcttctcatggagaagagcttttgggaggaggccgagctcccagccgagctctttcagaagaaagttgtggcctctttcccaaggaccgtgctgagtaccggcatggataatcgctatttggttctggctgtcaatacagtgcagaataaggaaggaaactgcgagaaaagactagtcatcaccgccagccagtccctggagaacaaggaactgtgtatacttcggaacgactggtgctccgtgcccgtcgaacctggggacataattcacttagagggcgattgcacctcggacacctggattatcgataaagattttggatacctcatcctctaccccgacatgctgataagcgggactagcatcgcgtccagtatccggtgcatgaggcgagcagtgctcagcgagaccttccgcagctcagacccagccactcgtcagatgctgattggtactgtcctccacgaggtcttccagaaggccattaacaacagtttcgccccagagaagttgcaagagctggctttccaaaccatccaggaaatccgccacttgaaggagatgtaccgcctgaatttgtcccaagacgaaattaagcaggaggtggaggattacctaccatctttttgcaagtgggctggagacttcatgcataagaatacctctactgacttcccgcagatgcaattgtctctcccttccgacaattccaaagataattccacctgtaacatcgaggtggtcaagcctatggatatcgaggagtcaatctggtctccacgatttggactcaaggggaaaattgatgtgaccgtgggggtgaagatccacaggggatacaaaactaagtataaaattatgcctctggaactgaaaacaggaaaggagagcaactctattgagcatagatctcaagtcgtcctgtacactctgctctcccaggagcgccgcgcagaccccgaagcaggcctactgctctacttgaagacaggacaaatgtaccccgtacccgctaaccaccttgacaagagggaactgctgaagcttcggaaccaaatggcattttcacttttccaccggatcagtaagtcggccactaggcagaaaacacagctggcatctctcccccaaattatagaagaagaaaagacctgtaagtactgcagtcagatcggaaactgcgccctctatagccgagccgtggagcagcagatggactgctcctccgttcccatagtgatgttgcctaagatagaggaagagacccagcatttgaaacagacccacctggagtatttctccttatggtgcttaatgttgactctcgagtcacagtcaaaggataacaaaaagaaccatcagaacatctggctgatgcctgcgagcgagatggaaaagagtggaagctgcattggaaatctgattcggatggagcacgtaaaaattgtctgcgatgggcaataccttcataattttcagtgcaaacacggggccattccagtaacaaatctgatggccggcgacagggtcatcgtgtccggcgaagaacgatctttattcgcattatcccgggggtacgtgaaagagattaatatgacaaccgttacctgtttactcgacagaaatctctccgttctgccagagtctactctgtttcgtttggaccaagaggagaagaactgtgatattgatacgcctctcggaaatctttctaagctgatggagaacacatttgtcagcaaaaagttaagggatctaatcatcgacttcagggagccgcaatttatttcttacttatcgagcgttctgcctcacgacgccaaagatacagtggcatgtattctgaaaggcctaaacaaacctcaacggcaggccatgaaaaaagtcttgctaagcaaggactataccttgattgttggcatgcccggcacagggaagactacaacaatttgtacactggtgagaattctttacgcctgcgggttctccgtgcttttaacctcatacacccacagcgcggtggacaacatcttacttaaactcgccaaatttaagatagggttcttacgccttgggcagattcaaaaggtgcatccggccatccagcagtttactgaacaggagatttgccgatccaaatctatcaaatccttggcacttcttgaggaactgtacaatagccagctcatcgtggcaacaacttgcatgggcatcaaccatcctattttctctaggaaaatttttgatttctgcatagtcgacgaggcttctcagatctcccagcccatttgtctgggacctctatttttttctcggaggtttgtactggtgggagatcaccagcagctgccgcccctggttctcaacagggaggcccgagcactaggaatgagcgaaagtctctttaagaggttggaacagaacaagagcgctgtggttcaacttacagttcagtatcggatgaattcaaaaatcatgagtctgtccaataagttgacatacgaaggtaaattggagtgcggcagcgataaggtggcaaatgcagtcatcaatctgcgccactttaaagacgtgaagctggagctcgagttctatgcagattacagtgacaatccgtggctgatgggagtgtttgaaccgaacaatccagtttgctttttaaacaccgacaaagtgcctgcccccgaacaagtggagaaaggaggcgtaagtaacgtcacagaagccaaactgatcgtgtttcttacgagcatcttcgttaaagcaggctgcagcccctccgatatcgggataattgctccctatcgacaacagttaaagattatcaacgacctgctcgcccggtcaatcggaatggtggaagtgaataccgtggataagtatcaaggcagggacaagtcaatcgtactggtgtcctttgtgcggtcgaacaaggatgggacagttggtgaactccttaaggattggaggcgacttaacgtagccattactagggctaagcacaagcttattcttctgggatgtgttcccagcttaaattgttaccctcctttggaaaagctccttaaccaccttaattctgaaaaactaattattgaccttccctcacgcgagcatgaatccctttgccatatcctaggagacttccaacgagagtag

SEQ ID NO: 114882 - DNA, 717 bp, synthetic construct
  misc_feature 1..717: note = Description of Artificial Sequence: Synthetic coding sequence
  source 1..717: mol_type = other DNA
atgttatgtttcctgcgcggaatggccttcgtcccatttctcctggtgacgtggagctcggccgcgtttattatctcctacgttgtggcagtgctgtccggacatgtcaatccctttctgccttatatctccgatacaggcaccactccacctgagagtggaatatttggctttatgatcaatttcagtgcctttttgggggcagccaccatgtatacacgctataaaattgtgcagaaacagaaccagacttgttatttctccacacctgtgtttaaccttgtgagcctagtgctcgggctggtggggtgcttcggtatgggcattgttgcaaattttcaagaactagcagtgccagtcgtccatgatggcggagccctgctggcctttgtttgcggcgtggtgtacactctgcttcagtccattatttcgtacaagtcttgcccacagtggaattcactctcaacctgccatatcaggatggtgattagcgcggtgtcctgcgccgctgttattcccatgattgtgtgtgcatcgctcatctccatcactaagctagagtggaatccgcgtgaaaaagactatgtgtaccatgtggtgtctgcgatctgcgaatggaccgttgcttttggatttattttttacttcctcaccttcatccaagatttccagtctgtgacgctgcgtatcagcaccgagatcaacggggacatctag

SEQ ID NO: 114883 - DNA, 801 bp, synthetic construct
  misc_feature 1..801: note = Description of Artificial Sequence: Synthetic coding sequence
  source 1..801: mol_type = other DNA
atgtggtggttccagcaaggcctgtcttttttgcccagtgcattggtgatttggacctccgccgcatttatcttcagttacattactgctgtgactctacaccatatcgatccagctctgccatacatctccgacacagggaccgtcgcccccgagaagtgcctctttggtgccatgcttaacattgccgcggtgctctgcatcgccactatttatgtccggtataaacaggtacacgcgttgtcacccgaggagaacgtgatcataaagctgaacaaggccgggcttgtgctggggatcttaagctgtctaggactcagtattgtcgcgaactttcaaaaaacgacattgttcgccgctcatgtctctggcgccgtgttgactttcggtatggggagtctgtatatgttcgtgcaaaccatcctcagctatcagatgcagcctaagatccatggtaagcaagtgttctggatacggctgttgctggttatctggtgtggcgtgtcggcccttagcatgctgacctgcagctcagtcctccacagcggcaattttgggacagatttagagcagaagctgcattggaaccctgaggataaagggtacgtgcttcatatgataactactgccgccgaatggtctatgagtttttccttctttggcttcttccttacatacattcgcgattttcaaaagatctccctgagggtcgaagctaacttgcatggcctgacactgtatgataccgcaccctgccctataaacaacgagcgaactcggctgctttctcgggacatttag

SEQ ID NO: 114884 - DNA, 801 bp, synthetic construct
  misc_feature 1..801: note = Description of Artificial Sequence: Synthetic coding sequence
  source 1..801: mol_type = other DNA
atgtggtggttccagcagggactgtcgtttctgccttcggcccttgttatctggacgagtgctgctttcatattcagttatataaccgccgtcaccctgcatcacatcgaccctgctctgccatacatttccgatactggcaccgtagcccctgaaaaatgcttattcggagctatgctcaacatagcagcagtcctatgcattgccaccatatatgtgcgctataagcaggtgcacgctttatcccctgaggagaatgtgatcataaagcttaacaaagccggattggttcttggtatattgtcttgtctcggtctgtcgatcgtggcaaacttccaaaagaccactttatttgcagcccacgtgtcaggggctgttctcacgttcggcatgggctctctttacatgtttgtgcagacaatcctatcctatcagatgcagcctaaaatccacggaaagcaggtattctggatcaggctcctcctggtgatctggtgcggtgtgtccgctttaagtatgctgacctgttccagtgtgctccattctgggaactttggtactgatctggagcaaaagttgcattggaaccccgaggacaagggatatgtgttacacatgattaccaccgccgccgagtggtcaatgtccttcagcttctttggcttctttttaacttacattagagacttccagaaaatttccctgagagtggaagccaatctgcacggactgaccctgtatgacacagccccttgcccaattaacaacgagagaacaagattactgtcacgtgatatctag

SEQ ID NO: 114885 - DNA, 699 bp, synthetic construct
  misc_feature 1..699: note = Description of Artificial Sequence: Synthetic coding sequence
  source 1..699: mol_type = other DNA
atgccgtctttgtgggaccgattcagcagcagctctacttcctccagcccgagctctcttcctcggacgccaacacctgacagacctccaaggtcagcatggggatctgccacaagagaggaaggtttcgataggtcgacttccctcgagagctccgactgtgagtctttggattcaagcaactcaggctttggaccagaagaagatacagcatatctcgatggggtctctctgcccgactttgagttactgagcgaccctgaagatgagcacctctgtgcaaatctgatgcagttgctgcaggagagccttgcccaggccagactgggctcaagacgccccgctcggttactcatgccatctcagctcgtgtcccaggtgggaaaagaactactgaggctggcatactccgaaccatgtggtttgcgaggtgccctgctggatgtgtgcgtcgagcaggggaagtcttgccattctgtgggtcaactcgcactcgatccctcattggtacctacctttcagctaacactggtgctccgtttggatagtaggctgtggccaaagattcaggggctgttctcttctgcgaacagcccatttctgcctggctttagtcaaagcctcaccctctctaccggcttcagggtcattaaaaagaagctgtacagctcagaacagctcctcatcgaagaatgctag

SEQ ID NO: 114886 - DNA, 582 bp, synthetic construct
  misc_feature 1..582: note = Description of Artificial Sequence: Synthetic coding sequence
  source 1..582: mol_type = other DNA
atggtggcaaccgggagtctgagctcgaagaatccagcttccatttccgaactgcttgattgtggatatcaccctgagagcttgctgtcagattttgactattgggactacgtcgtcccagagccaaacctcaacgaagtcatcttcgaggagagcacctgtcaaaatctcgtgaaaatgctggagaactgtctgagcaaatcgaagcagaccaaactgggatgctccaaagttttagttcctgaaaaactgacacagcgcatcgcacaggatgttctacgattgagttccacagagccctgcgggctccgcggctgcgtgatgcacgtcaacttggagattgaaaacgtgtgcaaaaaactggacaggatcgtgtgtgactcttccgttgtgcccaccttcgaattgacactggtgtttaaacaggaaaattgttcatggacaagctttcgcgactttttcttcagtcgcgggcgattttcatctggttttagacgtacactgatcctgagtagcgggtttcggctggttaaaaagaagctttactcgctcatcggaactacagtcattgagggaagctag

SEQ ID NO: 114887 - DNA, 534 bp, synthetic construct
  misc_feature 1..534: note = Description of Artificial Sequence: Synthetic coding sequence
  source 1..534: mol_type = other DNA
atggtggccactggtagcctgtctagtaagaatccggcctcgattagcgagctgctggactgcgggtatcaccccgagagtctgctcagcgacttcgattattgggactacgtggtgcccgaaccgaatctgaacgaagttatttttgaggagtccacctgccaaaatcttgtcaagatgctcgaaaattgcctgtccaaatccaagcagacaaaactgggatgtagtaaagtactggtgcccgaaaaactgacacaaagaattgcccaggatgtgctgagactgagctcgactgagccttgtggcctccggggctgtgtgatgcatgtcaacctcgaaatagagaacgtatgtaagaaattggatcgtatcgtctgtgactcttcagttgtgccaaccttcgagctgaccctggtatttaagcaagagaattgtagctggactagcttccgcgacttttttttttccagaggtaggttttcttccggttttcgacgcacactcatactcagtagcggattcaggctggtgtag

SEQ ID NO: 114888 - DNA, 387 bp, synthetic construct
  misc_feature 1..387: note = Description of Artificial Sequence: Synthetic coding sequence
  source 1..387: mol_type = other DNA
atggtagccacaggtagcttgagctccaagaacccagcctcaatctccgagctgctggattgtgggtatcatccagagtccctcctgtccgatttcgactactgggattatgtggtccccgagcccaatctgaacgaggtgatcttcgaggagtccacatgtcagaatctcgtaaaaatgctggagaactgcctgagtaaatccaagcagaccaaactcggctgtagcaaagtgcttgtaccggagaaattgacacaaagaatcgctcaggacgttttgcgcctatctagcacggagccgtgcggcttacgtggctgcgtcatgcatgtcaatctggagattgaaaatgtgtgtaaaaagctggaccgcattgtctgcgatagctag

SEQ ID NO: 114889 - DNA, 1239 bp, synthetic construct
  misc_feature 1..1239: note = Description of Artificial Sequence: Synthetic coding sequence
  source 1..1239: mol_type = other DNA
atggcaaatgtggcagacaccaagctgtacgacatcttaggagttcctcccggagcctcagagaacgagctgaaaaaagcatacaggaagttggcaaaagaatatcatcctgataagaaccctaacgcaggtgacaagttcaaggagatcagctttgcctatgaagtgctgagtaaccctgagaaacgagagctgtacgatagatatggcgagcagggcctgagagagggatccggcggtggaggtggcatggacgatattttctcgcatattttcggcggaggactcttcggttttatgggtaaccaaagcaggtcccgcaacggacgccggcggggagaggacatgatgcacccgctgaaggtttccctcgaggatctgtataatggaaaaactaccaagctgcagttgagcaagaacgtcctgtgttctgcttgtagcggtcaggggggcaagtctggtgcggtacagaagtgctcggcatgtagagggcgaggtgtacggataatgattcgccagttagccccaggcatggtgcagcagatgcaaagtgtttgcagtgattgtaacggagagggcgaagtgattaatgagaaggatagatgcaagaagtgtgagggcaagaaggttataaaggaagtgaaaattttggaggtccatgtggataaagggatgaaacacggacaaaggattactttcaccggggaagccgaccaggcccccggagtagaacccggggacatagtccttctgcttcaagaaaaggaacacgaggtctttcagagggacggaaatgaccttcatatgacttacaaaataggccttgttgaagccctgtgtggattccagttcacattcaaacatttagacggcagacagatcgtcgtgaaatacccgcccggcaaagtgatcgaaccaggttgtgtgagagtggtgagaggtgaggggatgccacagtaccgtaaccccttcgaaaagggcgacctgtatataaaattcgacgtacagtttcctgaaaataattggatcaacccagacaagctgtccgagttggaagatctactgccttcccgcccagaggtgcccaatattataggtgagaccgaagaagttgagctgcaggagttcgactctacacgggggagcggcggcggacagcggcgcgaggcttataatgactcctcagacgaggagtcaagcagccatcacggacctggggttcagtgcgctcatcagtag

SEQ ID NO: 114890 - DNA, 1443 bp, synthetic construct
  misc_feature 1..1443: note = Description of Artificial Sequence: Synthetic coding sequence
  source 1..1443: mol_type = other DNA
atggctgctcgctgcagtacgaggtggctgctcgtggtagttggcacccctcgcttacctgcgatcagcggtaggggcgctcgccccccaagagaaggcgtcgtcggtgcctggctgagccgcaagctctcggtgccagcctttgcctcatcgctcactagctgcgggcctagggccctgcttacactgaggcccggcgtctccctcactggcacgaagcataatccattcatctgcacagcatcctttcacacttcagcacctttagctaaagaagattactatcaaattctgggagtaccccgcaatgcatctcagaaagaaattaagaaagcgtattatcagctggccaaaaaataccacccggacacaaacaaggatgatccaaaggcaaaggaaaagttctcccaactcgctgaggcgtatgaagtcctgtcagatgaggtcaaacggaaacaatatgatgcctacggaagcgccggctttgaccctggtgccagcggctctcagcacagttactggaagggaggcccaaccgtcgaccccgaagaactgtttaggaaaatcttcggggaattctcatcatccagttttggcgacttccagactgtgtttgaccaaccacaggagtattttatggagctgacctttaaccaagccgcaaaaggtgtgaacaaggagttcaccgtgaatataatggacacgtgcgaaagatgcaatggcaaggggaacgaacccggaaccaaggtccagcactgccattattgtggcggtagcggtatggagaccataaacaccggcccgttcgtcatgcggtccacctgtcgtagatgcggcggaagggggtcaattatcatttcgccctgcgtcgtttgcagaggcgccgggcaggcgaagcagaaaaagcgcgtgatgatcccggtccccgccggagtcgaggatggtcaaacggttagaatgcctgtgggaaagagagagattttcatcactttccgggtacaaaagagccccgtctttcgacgcgatggcgcagacatacatagcgatctttttatttccattgcgcaggccctgctgggaggcaccgccagagcccagggcctctatgaaactatcaatgtcaccattcctccaggaacgcagaccgaccagaaaattcgcatggggggaaaaggtattccaagaatcaattcttacggatacggcgatcattacattcatattaagatacgggtccctaagaggttaacgtcccggcaacagagcctgattttgagttatgcggaggatgagactgatgtcgaaggaaccgttaacggcgtcacattaacatcatccggcggatccacaatggattccagcgctggcagcaaagcccggcgggaggcaggagaggacgaagaaggatttttaagtaagcttaaaaagatgttcacaagttag

SEQ ID NO: 114891 - DNA, 1362 bp, synthetic construct
  misc_feature 1..1362: note = Description of Artificial Sequence: Synthetic coding sequence
  source 1..1362: mol_type = other DNA
atggctgcccgttgcagtacaaggtggctacttgtcgtcgtgggaaccccaaggctccctgcaatcagcggtaggggggcacgcccccctcgcgagggagttgttggggcgtggctctctcgcaaactgagcgtgccagccttcgcgtccagccttacatcctgcggtccaagagctcttctgacgctgagacccggtgtatccctgacggggaccaaacataacccatttatttgcacggcgtcttttcacacatcagctcccctcgcaaaggaggactactatcaaatcctgggggtaccccgaaacgcaagccaaaaagagatcaagaaagcctactaccagctcgctaaaaagtaccatccagatacgaataaagacgaccccaaggcaaaagagaaattctcccagcttgcggaagcctacgaagttctgtcagacgaagtcaaacgcaaacagtacgatgcatacggcagtgctggattcgacccaggagccagcggatctcagcacagttactggaagggcggaccaactgttgaccctgaagagctcttcagaaaaatctttggagaattcagcagttcctcctttggggactttcagacagtgttcgatcaaccccaagagtatttcatggaactgacattcaaccaggctgctaaaggcgtgaataaagagtttacagtgaatattatggatacctgcgaacggtgtaatggaaagggcaacgaaccgggcaccaaagttcaacactgtcattactgcggtggaagcggaatggagaccatcaacacaggacctttcgtgatgcggagtacgtgccgtcgctgcggaggccgagggtcaatcattatttccccatgtgttgtgtgcagaggcgccggccaggcgaaacagaagaagagggtgatgataccagtgcccgctggtgtcgaggatggacaaacggtccggatgcccgttgggaaacgggagatctttattaccttccgagtgcaaaagagccctgtatttcggagggatggtgccgacatccactctgacctgttcatctctatcgcccaggctcttctggggggcacagcgcgcgcccaaggactctacgaaactatcaatgtcacaattccacctggaactcagactgatcagaagatcaggatgggcggaaaagggattccgaggataaattcctatggctacggggaccactacattcacatcaagatacgagtccccaaaaggctgaccagcaggcagcagtccctgattctctcatacgccgaggacgaaacggatgtggaaggcacggtgaatggagtgactctgacctcttctgggaagcgttctactgggaattag

SEQ ID NO: 114892 - DNA, 903 bp, synthetic construct
  misc_feature 1..903: note = Description of Artificial Sequence: Synthetic coding sequence
  source 1..903: mol_type = other DNA
atggccgagccccaggcggagaggcctcggctgtgcgtttttcctgacctgctgcgccctcctagcgcagccgacatagaaacatggtgccaaccgtatcgcaagattttcggggagttttcgagtagctcgttcggtgattttcagacagtctttgatcagccacaggagtattttatggagttgacctttaatcaggctgcaaagggagttaataaggaatttaccgtgaatatcatggatacatgtgagcggtgtaacggcaaaggaaacgaacccggtacaaaagttcaacactgccactattgcggcggttcaggcatggagacaatcaacactgggccttttgtcatgcggtcaacctgccggagatgcggcgggagggggtcaatcattataagtccgtgtgtcgtgtgtcgaggcgccggccaagccaaacagaaaaaaagagtaatgattcccgtgccagctggagtagaggacggccagaccgttcgtatgccggtcggaaagcgtgaaatttttatcacgtttcgcgtccagaaaagcccagttttcagacgcgatggcgcagacatacactctgacctctttattagtatcgctcaggctcttctcggtgggaccgctcgggcacaagggttatatgaaacgattaatgtgactattccacctgggactcagacagaccagaaaattagaatgggaggcaagggaatcccccgaattaactcctatgggtatggcgatcactacatacatatcaagatccgggtccctaaacggctaacaagccgccagcaatcactgatccttagctacgccgaggatgaaactgacgttgagggaactgtaaatggagtgaccttgactagctctgggaagagaagcacaggaaactag

SEQ ID NO: 114893 - DNA, 1023 bp, synthetic construct
  misc_feature 1..1023: note = Description of Artificial Sequence: Synthetic coding sequence
  source 1..1023: mol_type = other DNA
atggggaaggactactatcagaccttaggcctggctcgtggagcctcagatgaagaaatcaaaagagcttatcgacgacaagccctgcggtaccacccagacaaaaacaaggagcccggtgcagaggaaaagttcaaagagatcgcagaagcctacgatgtgctttccgaccctagaaagagggagatcttcgataggtacggagaagaaggcctcaaggggagcgggccctccggcggcagcggtggaggtgccaacggcaccagtttcagttatacatttcatggggatccacatgccatgtttgccgaattctttggcggacgaaaccctttcgacacttttttcggccagaggaatggagaggaaggtatggatatagatgacccattctccgggttccccatgggcatgggtggtttcacaaatgtgaatttcgggcggtctagatctgcccaggagccggctcggaagaagcaggacccacccgtaacacacgacctgagggtctctctggaggagatttacagcggttgtaccaaaaaaatgaagatctcccacaagcgcctgaatcctgacgggaagagcatccggaatgaggataagatcctgactatcgaggtgaaaaagggctggaaggaggggacgaagataacctttcctaaagaaggggatcagaccagtaacaacattcccgccgatattgtgttcgtacttaaggacaaaccgcacaacatttttaagcgggatgggagcgatgtcatttacccggcacgtatcagcttacgggaggctttgtgtggctgtacggtgaacgtgcctactctggacgggcggaccatcccggtggtgttcaaggatgttatacggcccggtatgcgacgtaaggtccccggggagggtctgccactgcctaaaactccagagaagcgaggcgacttgataatagagttcgaagttatttttccggaaagaattccacaaaccagtcgcacggtcttagagcaagtgcttcccatctag

SEQ ID NO: 114894 - DNA, 723 bp, synthetic construct
  misc_feature 1..723: note = Description of Artificial Sequence: Synthetic coding sequence
  source 1..723: mol_type = other DNA
atgttcgccgagttctttggggggcgcaacccattcgacacctttttcggccaacgtaatggtgaagagggaatggatatcgacgacccgttttccggtttcccgatgggcatgggaggattcaccaatgtgaattttggtaggtccaggagcgcccaggaacccgcaaggaagaagcaggaccctcccgtcacacacgaccttagggtttctcttgaggaaatctactcaggctgcaccaaaaagatgaaaatctctcataaaagacttaatcccgatggtaaatccatcagaaatgaagataaaattcttaccatcgaagtgaagaaaggctggaaagagggcacaaagatcacgtttcccaaggagggggaccagacctccaataacattccggctgacatcgtctttgtacttaaggacaagcctcacaacatctttaagagggatggctccgatgtgatctaccctgctaggataagcctgagagaggccctgtgcggctgcacagtgaatgttcccacacttgacgggcggacgatcccggtagtctttaaggacgtgataaggcccgggatgcgtcgaaaagtaccaggagagggcctgccactgccaaaaacgccggagaagcgaggggacctgataatcgagttcgaagtgattttccccgaaaggattcctcagacctcacggaccgtcttagagcaggtgctgccgatatag

SEQ ID NO: 114895 - DNA, 1230 bp, synthetic construct
  misc_feature 1..1230: note = Description of Artificial Sequence: Synthetic coding sequence
  source 1..1230: mol_type = other DNA
atgtccagtcttagggcacgtctgcccgctactcggcgtcgggtagcgcagccgttcgcacggcccgcgagcccctctctagtgccccgtagtgggtcagctatggagtcaaacaaagacgaggccgagaggtgtatttctattgccctaaaggctatacagtctaaccagccagacagagcgctgcgttttctcgaaaaagcccaacgcctgtatccaactccacgcgtgagagcgctgattgaatcattaaaccaaaaaccgcaaacagctggggaccagcctccgcccactgatactactcacgccacacatcgtaaggcgggcgggacggacgctccttctgccaatggggaggctggcggagagagcaccaagggctataccgcagagcaagtggcagcagtgaaaagagtgaaacagtgcaaggactactatgaaattctcggagtgtcaagaggggcaagtgatgaagacttgaagaaggcctacagacgcctcgcactgaaattccaccccgacaagaatcatgccccaggggcaaccgaggccttcaaggccataggtactgcatacgcagtgctaagcaaccctgagaagagaaaacagtatgatcagttcggtgacgataaatcccaggccgcccgtcatggccatggtcacggtgactttcaccgtggttttgaggccgacatttcacccgaggatctttttaacatgtttttcggaggggggtttccatcttctaacgtgcatgtgtattccaacggtaggatgcggtacacataccaacaaagacaggatcggcgagataaccagggggacgggggactaggcgtgttcgtccaactaatgcctatacttatactcattttggtctcggcattgtcccagctcatggtgtcttctccgccttattcactcagtcccaggcccagcgtgggacatattcatcggcgggtgactgaccatctcggggtcgtgtactatgtcggagatacattttccgaagagtacacaggctcctctctgaagacagtcgagcggaatgttgaggatgactatatcgccaaccttcggaataactgttggaaagagaaacaacagaaagaaggccttctgtaccgggcaagatacttcggggacacagatatgtaccaccgtgcacagaagatgggcacaccatcctgctcccggctctccgaggtgcaggctagtctacacggctag

SEQ ID NO: 114896 - DNA, 1230 bp, synthetic construct
  misc_feature 1..1230: note = Description of Artificial Sequence: Synthetic coding sequence
  source 1..1230: mol_type = other DNA
atgtcctccctacgagctcggctcccagccactcgcaggagggtcgctcagccttttgcaagacccgcatctccgtcgctcgtgccaagatccggcagtgccatggagagtaacaaggatgaggccgagcgctgtatctctatcgcactgaaggccatacagagcaaccagcctgatagagctctccgtttccttgaaaaagcccaaagactatatccaacgccaagagttagggcattaatagaatctctgaatcaaaagcctcaaacagccggggaccagccccctccaaccgacaccacacatgccacccatcgaaaggccggagggaccgacgcccctagcgctaatggagaggcgggcggtgagagtacaaagggctatacagctgagcaggtggccgctgtgaagcgggtgaaacagtgcaaagattactacgagatactgggcgttagccggggcgctagtgacgaagacctgaaaaaggcgtataggcgtctggcgttaaagtttcaccctgacaagaatcatgcacccggcgctacggaggcattcaaggccataggcaccgcctatgcagtgctcagcaatccggagaaaaggaaacagtacgaccagttcggtgacgataagtctcaagcagctcgccacggtcacgggcatggagattttcatcgcgggtttgaagctgacattagccccgaagacttattcaacatgttcttcggaggcggtttcccaagcagcaatgtacacgtatactcaaatggccgaatgcggtatacatatcagcagcgccaggacagacgggacaaccagggggacggcggccttggcgtttttgtccagttgatgcccattcttatcctcattttagtgtctgcactgtctcagctaatggtctcctccccgccatattctctgtctccccgacccagtgtgggtcacatacaccgaagagtcaccgaccatttaggcgttgtgtattatgtcggtgacaccttctccgaggagtacacaggatcctctttgaagactgttgaaaggaatgtagaagacgactacatcgccaacttgaggaataattgttggaaggagaaacaacagaaagagggcctactttatagagcacgctactttggggataccgatatgtatcacagagctcagaagatgggcactccctcatgttcacggctgtcagaagtgcaggccagcctccatggttag

SEQ ID NO: 114897 - DNA, 1128 bp, synthetic construct
  misc_feature 1..1128: note = Description of Artificial Sequence: Synthetic coding sequence
  source 1..1128: mol_type = other DNA
atggaaagcaataaggatgaggccgagagatgtatcagcatcgccctgaaagcaatacagtcaaatcaacctgatagagccctcaggtttctcgaaaaagctcaacgattataccctacgccccgagtccgagcccttatcgagagtctaaaccagaaaccccagacggctggcgatcagccccccccaacggatacaacacacgccacccaccgcaaggctggtgggactgacgcgccttccgccaatggcgaggccggtggagagagcacaaagggttacacggctgagcaggtggcagcggtgaaacgcgtcaaacaatgtaaggactactacgagattctcggagtttctcgtggggcgagcgacgaagacctcaagaaagcttaccggcgactggccctgaaatttcatccagataagaatcacgcacctggcgcgacggaagccttcaaagcaattggtaccgcttacgcagtcctgagtaaccctgagaagagaaaacaatacgaccagttcggcgacgacaagtcacaggctgcacgccacggtcatggacacggagactttcaccgtggtttcgaagcggatatttccccggaagacctgttcaacatgttcttcgggggcggcttccccagtagtaacgtgcatgtctattccaatggtaggatgagatacacttaccaacagagacaagaccggcgagacaaccagggcgatggtggccttggagtatttgtgcagctgatgcccatactgattctcatcctcgtgtcagctctctcccagttgatggtgagtagccccccctattctctgagcccaagaccgtccgtcgggcacatccacagacgcgtgacggatcacctgggcgtggtgtattatgtgggagatactttttctgaggagtacactggctcttctttaaaaacagtggagcgcaatgtagaggacgattacatcgctaacctgagaaacaattgctggaaggagaagcagcagaaggaaggcctcctgtatagagctcgctactttggggacacagacatgtaccaccgggctcagaagatggggaccccgtcctgttctcgactcagcgaggttcaggcctctctgcatggctag

SEQ ID NO: 114898 - DNA, 975 bp, synthetic construct
  misc_feature 1..975: note = Description of Artificial Sequence: Synthetic coding sequence
  source 1..975: mol_type = other DNA
atggcttcttattacgaaattctggacgttcctcgctcggcttcagccgacgatatcaagaaggcatacagaaggaaagccctgcaatggcaccccgataagaatcccgataacaaagaatttgcggagaagaagttcaaagaggtggcagaggcctacgaggtactttcagacaaacacaaaagagagatttatgacagatatggccgggaggggttaacaggcaccggaacgggtccttcgcgcgccgaggcaggttcagggggtccaggctttacctttaccttccggagcccagaggaggtatttcgggaattcttcgggtctggggatcccttcgcagagctttttgatgacttgggaccattttctgagctgcagaatagggggagcaggcacagtggccccttttttaccttcagcagttccttccccggtcactctgactttagcagcagctccttctctttcagccctggagctggggcctttagaagcgtctccactagcaccactttcgtgcaagggcggaggatcactactcggaggatcatggagaacggtcaagaaagggtggaagttgaagaggacggccagttgaagtcagtaacaatcaacggcgtccccgacgacctggctctgggactggaactgtctcggcgcgaacagcagcccagtgttacctcccggtctggcggaactcaggtccagcaaacacccgcttcttgtccgctcgactccgatttatctgaggacgaggatctccagctcgcaatggcctactctctctcagagatggaagccgctggcaagaagccagcaggtggccgggaagcacagcataggaggcagggaagacccaaagcccaacaccaggatccaggcctcggcgggactcaggagggcgcccggggggaggccactaagcgatctcccagccctgaggagaaagccagcaggtgcctgatcctgtag

SEQ ID NO: 114899 - DNA, 834 bp, synthetic construct
  misc_feature 1..834: note = Description of Artificial Sequence: Synthetic coding sequence
  source 1..834: mol_type = other DNA
atggcttcgtactacgagattctggacgtgccgcggtccgcctccgctgacgacattaaaaaggcgtacagaagaaaggcgctgcagtggcacccggataaaaaccccgacaataaggagtttgctgaaaagaagttcaaagaggtggcggaggcatatgaagtcctgagcgataagcataagcgtgaaatttatgatcgctacggccgggagggtcttaccggaaccggtacaggaccctcccgagcggaagccggctcaggcggacctggtttcaccttcactttccggtcacccgaagaagtatttcgcgagttttttggatccggcgacccttttgccgagctgtttgatgatctggggccctttagcgaattgcagaaccgcgggtctcgccacagcggtccctttttcacattttcatcatctttcccaggacacagcgatttcagtagcagcagttttagctttagtcccggggccggcgcttttcgtagcgtcagcacgtccaccacttttgtccagggaagaagaattacaactcgacgcatcatggaaaatggacaagagagagtggaggtggaagaggacggacaactgaaaagtgtcacaataaacggcgtgcctgacgacttggctctgggattggaactctcccgacgcgagcagcaaccctctgtgacctccagatccggggggacacaggttcaacaaaccccagcctcatgccctctcgatagcgacttgtctgaggacgaggacctccaactggcaatggcttatagcctgtcagagatggaggccgccgggaagaagcccgcagacgtcttctag

SEQ ID NO: 114900 - DNA, 687 bp, synthetic construct
  misc_feature 1..687: note = Description of Artificial Sequence: Synthetic coding sequence
  source 1..687: mol_type = other DNA
atggcctcatactacgaaattctggacgttccccggagcgcttctgctgacgatattaagaaggcatataggcgcaaggcgctgcagtggcaccctgacaagaatccagacaacaaagagttcgccgagaagaaatttaaagaggtcgctgaagcatacgaggtactttccgataagcacaaaagagaaatctacgacaggtacggtcgggaaggcctcacaggtacaggcacaggacctagcagagccgaagccggctctggaggccctgggtttacgtttacattccggtcaccagaagaggtatttcgtgaatttttcggcagcggtgaccccttcgccgaattattcgacgatctgggcccctttagcgaactgcagaatcgaggctctagacatagtggcccctttttcacattctcatcttccttccccggtcacagcgatttttcaagctcaagcttttctttttcgcctggagccggagctttccgctcagtgtcaactagtactaccttcgtccaaggccggcgaataaccacacgccgaatcatggaaaatggtcaggaacgggtggaggtagaggaagatggacagctcaaatctgtgacgatcaatggtgtgccagatgatcttgcccttgggctggaactgtctcgacgcgagcagcagccaagcgtcacatag

SEQ ID NO: 114901 - DNA, 447 bp, synthetic construct
  misc_feature 1..447: note = Description of Artificial Sequence: Synthetic coding sequence
  source 1..447: mol_type = other DNA
atggcatcttattatgagattcttgacgtccccagatccgccagcgcggacgatattaaaaaggcttaccggcgcaaggcccttcagtggcatcctgacaagaatccggacaacaaggagtttgcggagaagaaattcaaggaagtggccgaagcctacgaggttctgtccgacaaacacaaaagggagatttacgacagatacggccgggaggggctaactggcacgggcactggacctagccgcgccgaggcaggttccggtggcccggggtttacctttacattcaggagccccgaagaggtattccgtgaattctttggtagcggcgacccatttgcagagctcttcgacgatctgggtcccttctctgagttacaaaacagggggagccgacactcagggccttttttcacatttagcagttcatttccaggccatagttag

SEQ ID NO: 114902 - DNA, 369 bp, synthetic construct
  misc_feature 1..369: note = Description of Artificial Sequence: Synthetic coding sequence
  source 1..369: mol_type = other DNA
atggcgagctattatgagatcctggatgtgcccaggtccgcatctgctgacgacataaagaaggcctacagaagaaaagcactgcagtggcatcccgacaaaaatccagacaataaggaatttgcggagaaaaagtttaaagaagtagctgaggcctatgaagtgctttctgacaaacacaaaagggaaatttacgaccggtacggtcgcgagggacttactggtacgggaaccgggcctagcagggcggaggccggctcaggcggaccaggattcacctttaccttcagatcgcccgaagaggtttttcgcgagtttttcggcagcggcgacccattcgcagaactctttgacgatctggggccatag

SEQ ID NO: 114903 - DNA, 981 bp, synthetic construct
  misc_feature 1..981: note = Description of Artificial Sequence: Synthetic coding sequence
  source 1..981: mol_type = other DNA
atggtggattattatgaagtcctcggggtgcagaggcacgccagccctgaagatattaaaaaagcttaccggaagctagccctcaaatggcaccccgacaagaaccccgagaataaagaggaggcggagaggaagttcaagcaggtcgcagaggcctacgaggtcttaagcgacgccaagaagcgggatatttacgataagtatggcaaagaggggctaaatggagggggaggtggcggctctcactttgatagccccttcgaatttggattcaccttccggaatccagatgacgtgttcagggaatttttcgggggacgtgatcccttcagtttcgactttttcgaagatccttttgaagacttctttggaaatcggcgcggcccgagaggcagtaggtcacgcggtactggctccttcttttcagcctttagcggttttccatccttcgggtccggattctccagcttcgacaccggctttacctcctttggatctcttggacacggtgggctgacctccttctctagcacatcttttggggggtcagggatggggaatttcaagagcatctctaccagtactaaaatggtcaacggtcggaagattacaacaaaacgaatcgtggaaaatggccaagaacgcgtggaggtggaagaggacggccaactgaagtcgttaacgataaatggcgtcgctgacgatgacgctttagctgaggagcggatgcgccgaggccagaatgccctgccggctcaacccgctgggttgcgcccaccgaagccaccccgacccgcaagcctgctgaggcatgcgccgcactgtctgtctgaggaggaaggcgaacaagaccgtcccagagctcctggaccatgggatccactcgccagcgccgccggactaaaggagggcgggaaacgaaaaaaacagaagcagcgggaagaaagcaagaagaagaaatcaacaaaaggcaatcattag

SEQ ID NO: 114904 - DNA, 378 bp, synthetic construct
  misc_feature 1..378: note = Description of Artificial Sequence: Synthetic coding sequence
  source 1..378: mol_type = other DNA
atggttgattactatgaagtgctgggtgtgcagcgacacgcctccccagaagatatcaaaaaggcgtataggaaactcgctctgaaatggcatcccgacaaaaaccctgagaacaaagaagaggctgaacgcaaattcaagcaggtggctgaggcgtatgaggtcctgagcgatgcaaagaagagggacatatacgacaaatatggtaaggaaggcttgaacgggggcgggggcggaggctcccactttgatagccccttcgaattcggattcaccttccggaatcctgatgacgtgttcagagaattcttcggcgggagggacccatttagcttcgactttttcgaagacccattcgaagatttttttgggaactag

SEQ ID NO: 114905 - DNA, 687 bp, synthetic construct
  misc_feature 1..687: note = Description of Artificial Sequence: Synthetic coding sequence
  source 1..687: mol_type = other DNA
atggtggactactatgaggtcttgggggtgcagaggcacgctagcccagaggatatcaagaaagcctatcggaaactcgcactgaagtggcacccggataaaaaccccgaaaacaaggaggaggcagagagaaagttcaagcaggttgccgaggcatacgaggtgttgagtgacgcaaaaaaaagggatatatatgacaagtatggcaaagaggggcttaatgggggcggagggggaggaagtcactttgactctccctttgaattcggctttaccttccggaaccctgatgatgtctttcgagagttcttcgggggcagagatcccttctcttttgatttcttcgaggacccttttgaagatttttttggaaacaggagaggaccacgaggatcgagatcacggggcacagggtcattttttagtgccttcagtggctttccctcatttgggagcggcttctctagttttgataccggcttcacatccttcggttcgttaggtcacgggggcctaacgagctttagttctacaagctttggggggagtgggatggggaattttaagagcatatcaacttctaccaaaatggtgaatggacgcaaaatcaccacaaagcgcattgtggagaacggccaagagcgggtggaggtggaggaggacggccagttgaagtccttgacatag

SEQ ID NO: 114906 - DNA, 648 bp, synthetic construct
  misc_feature 1..648: note = Description of Artificial Sequence: Synthetic coding sequence
  source 1..648: mol_type = other DNA
atggtggactactacgaagtgctgggggtgcaaagacatgcatcacccgaggatatcaaaaaggcgtacagaaagcttgctctcaaatggcacccagacaaaaatccagaaaacaaggaggaggccgagagaaaattcaagcaagtggcggaagcctacgaggtgctgtccgatgcaaaaaagcgagacatttatgacaaatatggaaaagagggcctaaatgggggcggaggaggcgggtcccacttcgacagtccgtttgagtttggatttaccttccgcaacccagacgatgtcttcagggagttttttggcgggagagatccgttcagtttcgatttctttgaagatcccttcgaagattttttcggcaatcggcgggggcctcgtgggtcacggtcacggggcactggcagctttttttccgctttcagcggctttccaagcttcgggtctgggttttctagctttgataccggattcacgagcttcgggtcacttggacatggtggcctcacgtcatttagctctacttcgtttggtggaagtgggatgggcaatttcaaatccatttctacaagcacaaaatggctcatggcggaaaagagcctccagcgggagctaagccgcaccgtgaagaaggagtag

SEQ ID NO: 114907 - DNA, 726 bp, synthetic construct
  misc_feature 1..726: note = Description of Artificial Sequence: Synthetic coding sequence
  source 1..726: mol_type = other DNA
atggtcgactactacgaggtcctgggcgtgcagcggcatgcatctccagaggatatcaagaaggcttatagaaaactggctctgaaatggcacccggacaaaaacccagaaaacaaagaagaggctgagaggaagttcaagcaggtggccgaggcctatgaagtactttctgacgcaaaaaagcgggacatttacgataagtacggtaaagagggcctgaacgggggtggtggcggaggatcgcacttcgatagccctttcgagttcgggtttaccttccggaaccctgatgacgtgtttcgagaattctttggaggaagagaccctttttcctttgacttcttcgaggatccgttcgaagatttcttcgggaatcggcgaggaccacgtggaagtcggtcgaggggcactgggtcttttttctcagcatttagcgggttcccttcctttggctcgggcttttctagcttcgacactgggtttacttcttttgggagcttaggccatggaggattgacatccttttcttccaccagcttcggcggcagcgggatggggaactttaagagtatctcaacctcaaccaagatggtgaacggccgcaagattaccacaaagcggatagtggaaaacggtcaggagcgagtcgaagtggaggaggacgggcagctgaagagcctcacaatcaatggcaaggagcagctgctgcgcctggacaacaagtag

SEQ ID NO: 114908 - DNA, 201 bp, synthetic construct
  misc_feature 1..201: note = Description of Artificial Sequence: Synthetic coding sequence
  source 1..201: mol_type = other DNA
atggtagactactacgaagtactgggagtccagagacatgctagtccagaagacatcaagaaggcctaccgcaagcttgctttgaagtggcatcctgataaaaatccggagaacaaagaggaggcggagcggaaattcaaacaggtggccgaggcctacgaggttctgagcgatgcgaaaaaaagagacatttacgattag

SEQ ID NO: 114909 - DNA, 138 bp, synthetic construct
  misc_feature 1..138: note = Description of Artificial Sequence: Synthetic coding sequence
  source 1..138: mol_type = other DNA
atggtggactactacgaagtgttaggcgtacagaggcacgccagtcctgaggacattaagaaggcatatcgaaagttggccctgaaatggcatcctgacaagaaccctgagaacaaagaggaagctgagagaaagtag

SEQ ID NO: 114910 - DNA, 441 bp, synthetic construct
  misc_feature 1..441: note = Description of Artificial Sequence: Synthetic coding sequence
  source 1..441: mol_type = other DNA
atggtggactattacgaagtgttgggtgtacagcggcacgcttctcctgaggacattaagaaggcctacagaaagctcgcactaaaatggcatccggacaagaaccctgaaaacaaggaagaagccgagcgcaagttcaaacaggtggcggaggcttatgaggtcctttcagacgctaaaaagcgtgatatctacgacaaatatggtaaagaagggctgaacggaggtggcgggggaggctctcatttcgactctcctttcgaatttggttttacttttaggaacccggatgatgtgttccgggaattcttcggaggcagggatcctttctctttcgattttttcgaggaccctttcgaagacttcttcggaaaccgacgagggccccgcggcagtaggtccagggggaccgggtctttctttagcgcgttctcaggttag

SEQ ID NO: 114911 - DNA, 636 bp, synthetic construct
  misc_feature 1..636: note = Description of Artificial Sequence: Synthetic coding sequence
  source 1..636: mol_type = other DNA
atggttgactactatgaagtgctcggagtgcagcgccacgccagtccagaagacattaagaaggcctacagaaaactggcacttaagtggcatcctgacaagaatcccgagaacaaggaagaagccgagagaaaattcaagcaggtagccgaagcctatgaggtgctctcagacgctaaaaagagggatatttacgataaatatggtaaagaaggcctgaatggcggcggcggcggtggttctcacttcgatagcccgttcgagttcggcttcacgttcaggaacccggatgacgtgttcagggaattttttggtggaagggaccctttttcattcgacttctttggagtagcggacgacgatgctcttgcagaggagcgcatgaggcgtggccaaaatgcccttcccgcacagcctgccggactgaggccccccaagcctcctaggcctgcctcactgctgaggcacgctccacactgcttgtctgaagaggagggagaacaggacagaccccgcgctcccggcccctgggatcctctcgcatctgcggcagggctgaaagagggaggaaagagaaaaaagcagaaacagcgggaagaatctaaaaaaaagaagtccaccaaggggaatcactag

SEQ ID NO: 114912 - DNA, 834 bp, synthetic construct
  misc_feature 1..834: note = Description of Artificial Sequence: Synthetic coding sequence
  source 1..834: mol_type = other DNA
atgccacacccccgcattctcaaacggccaaagaagagggacatctacgataagtatggcaaggagggacttaacggagggggggggggtggcagccatttcgactccccattcgaattcggatttacttttagaaatccagatgacgtgttccgagagttctttggagggcgggaccctttctcgtttgatttcttcgaggacccattcgaagatttcttcggaaaccggcgcggcccccggggatcccggtccagaggcacagggtccttcttctccgcgttttctggtttccctagttttggctccggtttctctagcttcgacactggcttcacctcatttggctccctgggccatggcggactgacctcttttagctccaccagtttcggcggaagcgggatgggtaatttcaaaagcatcagtacctctacaaagatggtcaacggaaggaaaatcaccaccaagcgcatagtagaaaacggacaggagcgggtggaggtggaggaagacggtcagctgaaaagcctcaccatcaatggagtggccgatgacgacgctctcgcggaagagcggatgcgacgcgggcagaacgccctaccagcacagccggccggattaaggccgcctaaacccccaagacccgcctctctcctccgtcacgctccacattgcttgagcgaggaagagggcgaacaggatagaccaagagcacccggaccatgggatccgctcgccagtgctgccggcctgaaagagggcggaaaaaggaagaagcagaagcagcgggaggaatcaaagaagaagaaatctaccaaaggaaaccactag

SEQ ID NO: 114913 - DNA, 297 bp, synthetic construct
  misc_feature 1..297: note = Description of Artificial Sequence: Synthetic coding sequence
  source 1..297: mol_type = other DNA
atggtagattattacgaggtgttgggggtgcaaagacacgcatcacccgaagacatcaagaaggcataccgcaaactggctctgaagtggcaccctgataagaaccctgagaacaaggaagaagcggagcggaagtttaagcaggtcgcagaagcctacgaggtcctttccgacgcgaagaaaagggacatctatgataagtatggcaaggaaggcctgaatgggggcggaggtggaggaagtcacttcgactcccctttcgagttcggctttaccttcagaaaccccgatgattag

SEQ ID NO: 114914 - DNA, 672 bp, synthetic construct
  misc_feature 1..672: note = Description of Artificial Sequence: Synthetic coding sequence
  source 1..672: mol_type = other DNA
atggccacaccccagtctatcttcattttcgcaatctgcatactgatgataacggaactcattctggcctccaaatcatattatgacattctgggggtacctaaaagcgcaagcgagaggcagattaaaaaggcgtttcacaaactggcgatgaagtaccaccccgataaaaacaagagtccagacgcagaggccaaattccgggaaatcgcagaagcttacgaaaccctgagcgatgcgaacagaagaaaggaatacgatactctcggccatagcgcgtttacaagcggaaaaggccagcgcgggtctggaagcagtttcgaacaatccttcaatttcaactttgacgatttgttcaaggactttggcttcttcgggcaaaatcagaatacagggagcaagaagaggtttgaaaaccacttccaaactaggcaggatgggggaagttccagacaacgccaccacttccaggaatttagttttggcggggggcttttcgatgatatgtttgaggacatggaaaagatgtttagctttagtgggttcgactccacaaatcagcacacggttcagaccgaaaataggtttcatggctccagcaagcattgtagaactgtcacacagcggcggggcaatatggtaacaacctacactgattgctccggacagtag

SEQ ID NO: 114915 - DNA, 2382 bp, synthetic construct
  misc_feature 1..2382: note = Description of Artificial Sequence: Synthetic coding sequence
  source 1..2382: mol_type = other DNA
atgggagtgtggctcaacaaggacgattacattcgggatctgaagaggattatcctctgtttcctaatcgtgtacatggcaatcctggtcggaacagaccaggatttctacagtctgttgggtgtgagcaaaaccgcatcttctagggagattaggcaggcgttcaaaaaactcgccctgaagctgcaccctgacaagaaccctaataatcctaacgcccatggggattttctgaaaattaaccgtgcctacgaggtgcttaaagacgaagacttgcggaaaaaatatgataagtacggcgagaagggcctcgaagataatcaaggcggacaatatgaatcctggaactactataggtacgattttgggatctacgacgacgaccctgaaattatcactctggagcgacgtgaatttgacgcagccgtcaactctggcgaactctggtttgtgaatttctattcgcctggctgttctcactgccacgacttggctcccacctggcgcgacttcgccaaggaagttgatgggctgctgcggattggagctgtgaactgcggggacgatcgtatgctgtgccgcatgaagggtgtgaatagttatccctcgctgttcatcttccgatctgggatggcccccgtgaagtatcacggcgatcgtagtaaagagtctctggtgagtttcgctatgcagcatgtccgaagcacggttactgagctgtggaccggcaactttgtcaacagtatccaaacagcctttgctgcgggtatcggctggctcatcacattctgcagtaaaggaggggattgcttaacttcacaaacacggctcagactaagtgggatgcttgacggactggtgaacgtggggtggatggattgcgcgacacaggacaatctgtgtaaaagccttgatattacaacttccactaccgcgtatttccctcccggggccacactcaataataaggaaaaaaactccatcctgttcctgaacagcctggacgcgaaggagatctatctcgaagtgatacacaacctcccggattttgaactgctctcagccaataccctcgaggacagacttgcacaccacagatggctgctgttcttccatttcgggaaaaatgagaatagcaatgatcccgagttaaaaaaactgaagaccctcttgaagaacgatcatatccaggtgggccgtttcgattgttcatcggcccctgacatctgctcaaatctttacgtatttcagccatcactggctgttttcaaaggacagggcacaaaggagtatgagattcaccatggaaagaaaattttgtatgacatcctggccttcgccaaagaatccgttaacagtcacgtgaccacactggggccccaaaatttccctgctaacgacaaggagccttggctggtcgacttcttcgcaccttggtgtccgccatgccgcgccctgttgcccgaactgcgtagggccagcaacttactttacggtcagctgaagtttggaactctggactgcaccgtgcacgagggcctctgtaacatgtataacatccaggcctacccaacaaccgtggtctttaaccaatcgaacatccatgagtacgaaggacaccacagcgcagagcaaatcctggagttcatcgaggacctaatgaacccaagcgtcgtgagtctgactcccacaacatttaatgaactggtgactcagagaaagcacaatgaggtatggatggtcgatttttacagcccatggtgccacccttgccaagtgctaatgcctgaatggaaaagaatggccaggacgctgaccggcctgatcaacgtgggcagcatagactgccagcaatatcattcgttttgcgctcaagaaaatgttcagagataccctgagattcgattcttccctcccaaatccaacaaggcatatcactatcattcctataacggatggaatcgagatgcctattccttgcgcatttgggggttaggatttttgcctcaagtcagcacagatctcacacctcagacatttagcgagaaagtcctgcagggcaagaatcactgggtgattgacttctatgccccttggtgtgggccctgccaaaactttgcacccgagtttgagttgctggcgcggatgatcaagggtaaagtcaaagcaggaaaggttgactgtcaggcctatgctcagacatgccaaaaagccggtatcagagcttaccccaccgtcaagttctatttttacgaaagggctaagcggaattttcaggaggaacagattaatacgcgggatgcgaaggcaatcgctgccttaatctccgaaaagctggaaacactgcggaaccagggcaagcgcaataaggatgagctgtag

SEQ ID NO: 114916 - DNA, 2244 bp, synthetic construct
  misc_feature 1..2244: note = Description of Artificial Sequence: Synthetic coding sequence
  source 1..2244: mol_type = other DNA
atgggggtgtggttaaacaaggatgattatatacgggacctgaagaggattattctctgttttcttatcgtttatatggcaatcctggtgggcacagatcaagatttttactctctgcttggggtcagtaaaacagccagcagtcgggagattaggcaggccttcaaaaaattagctctcaaattgcatccggacaagaatccaaataaccctaatgcccacggagactttttgaagattaacagggcatatgaggtcctcaaagatgaggatctgcgaaagaaatatgacaagtacggagagaagggcctcgaggataatcagggtggtcaatatgagagctggaactactatcgatacgacttcggaatctacgatgatgacccggagattattacccttgaaagacgggagttcgatgctgcagttaattcgggggaactatggttcgttaacttctattcaccaggatgcagccactgtcatgacctagctcccacctggagagacttcgccaaggaagttgatgggctactccgcatcggcgccgtcaactgtggggatgaccgtatgctttgccggatgaagggggtgaattcctatccctcactgttcatctttcggtctggcatggcacccgtcaagtatcatggagatagaagtaaagaaagcctggtgtctttcgccatgcaacacgtgaggtccaccgtcacagagctctggaccgggaacttcgtgaactccatccagaccgcatttgcggctggtattgggtggctcattacattttgctccaaagggggcgactgcctcaccagtcagaccagactgcggctgagcggtatgctgttcctcaacagtctcgatgctaaggagatctacctcgaagttatccataaccttccagattttgaactcctgagtgctaacactctggaggataggttggcacaccaccgctggctgctgttttttcatttcgggaagaacgagaactccaacgacccggaattaaagaaactaaaaacccttctgaaaaacgaccacattcaggtcgggcggttcgactgcagctcagctcctgatatttgctcgaacctgtatgtctttcagccctcgctggccgtgtttaagggacagggaactaaagagtatgagattcaccatggcaagaaaatactctacgacatccttgcgtttgccaaggagtcagtcaattctcatgtgacgactctcggtccgcagaacttcccagctaacgacaaagagccgtggctggtggacttcttcgctccctggtgcccgccgtgtcgggcgctcctcccagagctgcggcgagcttcaaatctgctgtatgggcagctgaaattcgggaccctggattgcacagtgcacgaagggctgtgcaatatgtataatatacaggcatatccaacaactgtcgtgttcaaccagtctaatatccacgagtatgaaggccatcatagcgcagagcaaattctcgagttcattgaggatctgatgaatcctagtgtggtgtcgctaacaccaacaaccttcaatgagcttgtgacgcaacgcaagcacaacgaggtctggatggtggatttttattccccttggtgccacccgtgtcaggtcttgatgccggagtggaaaagaatggctcggaccctcactggtttgattaacgtgggcagtatagactgtcagcagtaccatagtttctgtgctcaggagaatgtccagcggtaccctgaaataaggttttttcccccaaaatctaacaaggcataccactaccatagctacaacggctggaaccgcgacgcctattccctgagaatctggggccttggctttttgccacaagtgtctaccgatttaactcctcagactttctccgagaaagtcttgcagggaaagaatcactgggtgattgatttttatgctccctggtgtggtccgtgccagaattttgcacctgagttcgagctcctggcccggatgataaaggggaaggtcaaggcaggcaaggtcgactgtcaggcttacgcgcagacatgtcagaaagccggaattcgggcgtaccccactgtaaagttttatttctacgagcgcgcgaaacgtaacttccaggaagaacagattaacacacgtgacgccaaggccatcgcagccctgatcagcgagaaacttgaaacactccgaaatcaggggaagcggaacaaggatcatctgtag

SEQ ID NO: 114917 - DNA, 534 bp, synthetic construct
  misc_feature 1..534: note = Description of Artificial Sequence: Synthetic coding sequence
  source 1..534: mol_type = other DNA
atgggagtctggcttaacaaggatgactatatccgagacctaaaacgcattattttatgtttccttatcgtgtatatggccattctggttggaactgaccaggacttctacagcctgctcggagtgagtaagaccgctagctcccgggagatacgccaggcctttaaaaagcttgccctgaagctgcacccagacaagaaccccaataatccaaatgcacatggcgattttctcaagatcaaccgagcttatgaagtactgaaggacgaagacctcagaaagaaatacgacaagtacggggagaaaggactcgaagacaaccaaggtggccagtatgaaagctggaattattatcgatacgactttgggatatacgacgacgaccccgaaatcattacactggagagacgtgaatttgacgccgccgtaaattctggagagctctggttcgttaacttttatagccccggctgttcgcattgtcatgacctggccccaacatggagagactttgccaaggaatcacttcggtag

SEQ ID NO: 114918 - DNA, 999 bp, synthetic construct
  misc_feature 1..999: note = Description of Artificial Sequence: Synthetic coding sequence
  source 1..999: mol_type = other DNA
atgggtgtttggcttaacaaagatgactatataagggacttaaaacgtatcattctgtgctttttgattgtgtacatggctattctggtagggaccgatcaggacttctattcgctcttgggtgtgagcaagaccgcctcatcaagggaaatcagacaggccttcaagaaattggctctcaaactgcaccctgacaagaatcctaacaatcccaacgcccacggagacttcttgaaaatcaacagggcttatgaggtgttgaaagacgaagaccttcgaaagaaatacgacaaatacggagaaaagggcctcgaggacaaccagggtggtcagtacgagtcatggaactactaccgatacgacttcggtatctatgacgatgatcctgagattatcaccctggaacggagagaattcgatgctgcagtaaattctggcgaattgtggtttgtcaacttctactctcctggttgtagtcactgccacgacttagcccccacctggcgggacttcgccaaggaagtggacggacttcttcgcatcggtgccgtgaactgcggggatgatcggatgctctgtaggatgaagggcgtgaactcatatccttcactgtttatcttcaggtcagggatggctcctgtaaaatatcacggagacagatccaaggagagcctggtatcctttgccatgcaacatgtacgctcaacagtaactgaactgtggactggcaatttcgttaacagcatccagactgcctttgccgcgggcatagggtggctaatcacattctgttctaaagggggcgattgtctgacgtcacagactcgcctgagactctctggaatgctggatggcctggtcaatgtggggtggatggattgtgccacacaggataacctctgcaaaagtctggacatcacaaccagcaccaccgcctacttcccccccggcgcaaccctcaacaataaagagaagaactcaatcttactgttacactag

SEQ ID NO: 114919 - DNA, 6732 bp, synthetic construct
  misc_feature 1..6732: note = Description of Artificial Sequence: Synthetic coding sequence
  source 1..6732: mol_type = other DNA
atgaatatcattcgggagaacaaagatcttgcctgcttctatacaaccaagcactcctggagaggcaaatacaaaagggttttctccgttggcacacacgctattaccacctacaatccaaatactcttgaagtcaccaaccagtggccctatggggatatttgttccatatcacccgtgggcaaggggcaagggactgagttcaatttgacttttagaaagggatcaggcaaaaaatctgagacattaaaattttccaccgaacaccggactgagttacttactgaagcattgcgttttcggactgacttctcggaggggaaaataacaggcagaaggtacaactgctataaacaccattggtcagacagtagaaaaccagtcattctcgaggtcacccccggaggcttcgatcagattaaccccgctacgaatagagtactgtgttcatacgactaccggaacattgaagggtttgtggatctgtctgattatcagggaggtttctgtattctatatggaggattttcccggctgcacctttttgccagcgagcagcgagaagaaattatcaagtcagcaatagaccacgctggcaattatatcggcatttctctccgtattcggaaggagccgctggagttcgagcagtatcttaatctccgcttcggaaagtacagcacggacgaaagtattactagcctggcggagtttgttgtgcaaaaaatcagccctaggcattcagaacctgtcaagcgggttctagccctaaccgaaacgtgtctggtcgaacgcgatcctgctacgtacaatattgccaccctgaagcccctcggggaggtcttcgccctggtgtgtgactccgagaacccgcagctgttcactattgaattcataaagggccaggtccggaagtattcatctaccgagcgggattcactcctcgcttctctcctcgacggagtgagagcctcagggaaccgggacgtctgtgtgaagatgacccctactcacaagggtcagagatggggacttttgagtatgcccgtggatgaagaggtcgagagccttcacctacgatttctcgccacgcccccaaacggcaatttcgctgacgccgtgttcagatttaacgccaacatatcttattctggagtgctgcacgctgtaacacaggacggcctgttctctgagaacaaggagaaattgataaataacgctataacagctctgctgtcccaagagggtgacgtagtcgcctccaatgcagaactagagagccagtttcaggctgtgaggaggctggtggcctccaaagccgggtttctggccttcactcagctcccgaagtttagggaacggctgggcgtgaaggtggtgaaggcgttaaagagatctaataatggcatcatacatgctgcggttgacatgctgtgcgccctgatgtgcccgatgcacgacgattacgacctgcggcaggagcagcttaacaaggcttcactgctgtcaagcaagaagttcctagaaaatctgcttgagaagtttaactcacatgttgatcacggtactggcgctctggtcataagcagcctgctcgattttctgaccttcgctctgtgcgctccatactctgaaaccactgagggccaacagttcgatatgttactcgaaatggtggccagcaatggccgcaccctctttaaactgtttcagcatccctccatggctattataaagggtgctggcctcgtcatgaaggctataatcgaagagggagacaaagagatagcaaccaagatgcaggaactcgcacttagcgagggagcgctaccccgccatttacacacagcaatgtttacaatttcatcagaccagcgcatgctaaccaaccggcaattgtctcgccacctggtcggactctggacagccgacaatgccactgctacaaacctgctgaagaggattcttccccctggactgcttgcgtacctcgagtcgtccgatttggtcccagagaaagatgcagatcggatgcacgtgcgtgacaacgtgaaaatcgctatggaccagtacgggaagttcaacaaggtgccagagtggcagcgactcgcaggcaaggctgccaaagaggttgaaaaattcgcaaaagaaaaggtcgatcttgtgttgatgcactggcgggacagaatgggcattgcccagaaggaaaatataaaccagaaaccagtggttttacgaaagcgaagacagaggattaagatcgaggctaattgggacctcttctactatcggttcggacaagatcatgcccgaagcaacctcatctggaatttcaaaactagggaagagctgaaggacacacttgagtctgagatgagagctttcaacattgatagggagctcgggtctgcaaatgtaatctcctggaatcaccacgagtttgaggtcaagtacgaatgcttagcagaggaaattaaaatcggtgattactatctgcgtctcttgctagaggaggacgagaatgaagagagtgggtcgattaagcgctcatacgagttcttcaatgagctgtatcacaggtttctgttgacccccaaggtgaacatgaagtgcttgtgcttacaggctcttgctatagtgtacggcagatgccatgaggagatcggcccttttactgacacgcggtatatcattggaatgctggagaggtgtaccgataaactcgaacgcgaccgcctgatcctgtttctaaacaagcttattctgaacaagaagaatgtgaaggatcttatggattcaaatggaatccgcatcctggtcgatctgctgaccctggcgcacctgcacgtaagcagggccacagtaccgctgcagtcaaatgtaattgaggctgcaccagacatgaaacgcgaatccgagaaggagtggtatttcgggaatgcagacaaagagaggtcgggtccctatggtttccacgaaatgcaagaactgtggaccaaaggaatgctcaacgccaaaaccaggtgttgggcgcagggcatggacggatggaggccattacagagcatccctcagctgaagtggtgtcttcttgcctctggacaggccgtcttgaatgaaaccgacttagctactttgatcctcaatatgcttatcacaatgtgtggttatttcccaagccgggaccaagataatgcaatcatccgccctctgcccaaggtaaaaaggctcctgagtgacagcacctgtttgcctcacattattcagctgctcctgacctttgatccgatcctggttgaaaaagtcgccatcctgctgtatcacatcatgcaggacaaccctcagctgcctcgcctgtatttaagcggcgtatttttttttataatgatgtataccggctctaatgtcctgcctgtcgcaaggtttctgaagtatactcataccaagcaggcattcaagagcgaggaaacaaaaggtcaagacatattccaacgttccatactggggcatatactgcctgaggccatggtttgttacctggagaattacgagcccgaaaaatttagtgagatctttctcggggaatttgacacaccagaagccatctggtctagtgagatgcgtcgcctcatgatcgagaagatcgctgctcatcttgccgactttaccccccggctgcagtcaaatacccgggctctgtaccagtattgcccaattcccatcatcaattatccacagttggagaatgaattattttgcaatatctattacctgaaacagctctgcgatactctaaggttccctgattggccaatcaaagaccccgtaaaactgttgaaggacaccctggacgcatggaagaaggaggtcgagaagaaaccccctatgatgtccatcgacgacgcatacgaagtgctgaatttgccacaaggacaagggcctcacgacgagtccaaaatccgaaaagcatattttcgattagctcagaagtaccatcccgataaaaacccagaagggcgtgacatgtttgaaaaggtcaacaaagcatacgagtttctgtgcacgaaaagtgcaaagatagtggatggccctgaccctgagaacatcatcctgattcttaagacacagtctattttgttcaataggcataaggaagatctgcaaccatacaaatatgctggctaccccatgctaatcagaacaatcacaatggaaacgtctgatgatcttctgttcagcaaagagtctcctttgctccccgcagcgacagagctcgcctttcacacagtcaactgtagtgctctcaatgccgaggaactccggcgtgagaacggcctggaggtgctgcaggaggctttctctcggtgcgtcgctgttctgacaagagcctccaagccttctgatatgtcagtccaagtgtgcggttacatttctaaatgctactccgtagccgcacaatttgaggagtgtcgggagaagattacagagatgccgtctatcataaaggacctgtgtcgtgttctctatttcggcaagagcatacctagggtggccgctttgggcgtcgagtgcgtatcaagcttcgccgtcgatttctggttacagactcatctcttccaagccgggatcctatggtatctgctcgggttcctgtttaactacgactacacgctcgaagaaagcggcatccagaagtctgaggagacaaatcagcaggaagtggcgaattcgctggcaaagctttctgtacacgccctatccagactcgggggatacctggcagaagagcaggccacacctgaaaacccgaccatcagaaagagtctagcggggatgctgaccccctatgttgcgcgtaagctggccgttgcatcagttaccgagattctcaaaatgctgaatagcaatactgagtccccatatcttatctggaataactccacacgtgctgagctattggaattcttggagagccaacaagagaacatgatcaagaagggcgattgtgataagacttacggatccgagtttgtttacagcgaccatgcaaaggagctcattgtcggggagatcttcgtccgcgtgtataatgaggtgcccaccttccagctcgaggtgccgaaggcatttgcggcctctctcctcgactatataggctctcaagcccagtacttacacacgttcatggcaataacgcacgccgccaaggttgagtctgagcaacacggcgacagactgccacgggtagagatggcactagaggcgttacgcaacgtgatcaaatataatcctgggagtgagtcggaatgcattggtcatttcaaactgatatttagcctcctgagagttcacggcgccggtcaggtccagcagctggccttagaagttgtcaatatagtaacctcaaaccaggactgcgttaacaacatcgcggagtccatggtgctgtcaagcctccttgccctacttcattcactgccaagtagccgccagttagtgcttgagactctctacgcactgactagcagcacaaaaattattaaggaggccatggccaaaggagctctcatctatctactcgacatgttctgtaattccactcatccccaggtccgagctcagacagccgagctgtttgcgaagatgactgccgacaagctaatcggacccaaagtgcgcattacgctcatgaaattcctcccctctgtgttcatggatgcgatgagggacaatcccgaggcagccgttcatatcttcgagggtacccatgagaacccagagctgatttggaacgacaactccagggataaagtgtctactaccgtccgagagatgatgctggaacatttcaaaaatcagcaagataatcctgaagcaaattggaaactgcccgaggactttgcggtggtttttggggaggccgaaggagagctcgcggttgggggcgtttttttacgtatattcatcgcacagcccgcttgggtcttaaggaagccacgcgaattcctgatagcactgctggagaagttgacagagttactggagaaaaacaatccacacggtgagactctcgaaacactcacaatggcaaccgtgtgcttattcagtgctcagccacaactcgctgaccaagttcctcccctgggccacctcccaaaggtaattcaagccatgaatcatcgcaacaatgcgattccaaagagtgctattagggtgattcacgcactctctgagaacgagttgtgcgtgcgagctatggcctcccttgagaccatcggcccgctcatgaacggcatgaaaaaacgagccgacacagtaggcttagcctgcgaggctattaatcggatgtttcaaaaggagcaatcagagctggttgcacaggcactcaaagcggatctagtaccatatctgttaaagctcctggagggcatcggtctggagaacctggatagccccgctgcaacaaaagcccagattgttaaggctctgaaagccatgactcggtcgctacagtacggcgaacaggtcaacgaaattctctgtaggtcctccgtgtggtctgccttcaaggaccaaaagcatgacctctttatttctgagtctcagaccgcaggctacctgaccggtcctggcgtcgcagggtatctgacggctgggacaagtacctcagtgatgtcgaacttaccaccaccagtagaccatgaggctggcgacctcggataccagacttag

SEQ ID NO: 114920 - DNA, 2673 bp, synthetic construct
  misc_feature 1..2673: note = Description of Artificial Sequence: Synthetic coding sequence
  source 1..2673: mol_type = other DNA
atgtatcagatatcaaagaactccgggtgggcaaggagcagagaatataacttcaatctgaagacgcaatccatactgtttaaccgacataaggaggatctacagccttataagtatgccggatatccgatgttgatccgcaccattacaatggaaaccagcgatgaccttctattttcaaaggaatctcctttactgccagcggctacggagctggcattccatacagtgaattgttctgcattgaacgcagaggagctgcggcgtgaaaatggcctcgaggtgcttcaggaggcctttagtagatgcgtagctgtgctcacacgggcaagtaagccatcggacatgagtgtgcaagtatgcgggtatatctccaaatgctactccgtcgcagctcaattcgaagagtgccgggaaaagattactgagatgcctagcataattaaggatctgtgcagagttctctatttcggcaagtcaatcccccgcgtagcggcacttggagttgaatgcgtgtcatcctttgccgtcgatttttggctccagactcatctattccaggcgggcatcctttggtatctgctcggctttctgtttaactatgattacacccttgaagagtcaggcattcaaaagagtgaggagacaaatcagcaggaagtggccaactccctcgctaagctcagcgttcatgcccttagtagactgggcgggtatctcgctgaagagcaggcgactccagagaaccctactattaggaagagtctggccggcatgttgaccccctacgtcgccaggaagttggccgtcgcatctgtaaccgagatcctcaaaatgctcaattcaaacacagagtctccttacctcatctggaataatagcaccagagctgagctcctggaatttctggaatctcagcaagagaatatgatcaaaaagggagactgtgacaaaacatacgggagcgaatttgtatacagcgaccacgcgaaggaattgatcgtgggagagattttcgtgagagtctacaatgaagtcccaacctttcagctggaagtaccaaaagctttcgccgcctctctgcttgactacattgggagccaggcccagtatctgcacacttttatggccatcacacacgcagccaaagtggagagtgagcagcatggggatagactccctagggtggagatggctctggaagccctccggaatgtgataaagtacaaccccggctctgagtccgaatgtattggccatttcaaactaattttcagtctcctgcgggtgcatggagctggtcaggtgcaacagctggccttagaggtcgtgaatatcgtcacaagcaatcaggattgtgtcaataacattgccgaatccatggtcctgtctagtcttctcgccctgctgcactcacttccaagctctcgccaattagtgctagagacactgtatgcgctaacctcctccactaagatcattaaagaggcgatggcaaaaggggccttaatctacctcctcgatatgttttgcaacagcacccaccctcaggtacgtgcccagacggccgaactatttgccaagatgacggccgataaactgatcggccctaaggtgcgcattactcttatgaagtttctgccatccgtgttcatggatgcaatgcgggataatcccgaagcagctgtccacatttttgagggcactcatgagaatccggaactgatctggaatgataactcgagagacaaggttagcacaaccgtgcgagagatgatgctggagcatttcaagaatcaacaggacaatcccgaagccaactggaaacttcctgaagatttcgcagtcgtatttggggaggctgagggcgagctcgccgtgggcggagtcttcctgaggatcttcatcgcccaaccagcctgggtgctgcggaagccccgggagtttttaatcgccctgctggaaaagctgacagagcttctcgagaaaaataatccacatggggagactctggaaaccctcaccatggctactgtgtgcctcttctcggcccaaccacagctggctgaccaggtaccccctctgggtcacctgcctaaggtcattcaggccatgaaccacaggaataacgccatccccaaaagtgcgattagggtcatccatgcactcagtgagaatgagctatgcgtgcgcgctatggcttcccttgagacaatcggaccactgatgaatgggatgaaaaagcgagccgatactgtggggctagcctgcgaggccataaatcggatgttccagaaagagcagtctgagctcgtcgcgcaagccctcaaggccgaccttgtaccctacctgctgaagttgcttgagggcattggactcgaaaacttggattcccccgcagccacaaaagcccaaattgtgaaagctctgaaggccatgacccggagtttgcaatacggggagcaggtgaacgaaatcttgtgcagatcaagcgtgtggagtgcgtttaaggatcagaagcacgacctgttcatatctgaaagccaaacggctggctacctcacagggcccggcgtcgccggctatctcacggcgggaacttcaacctcagtaatgtctaatctgccaccacctgtggaccatgaggcgggagacctcggctaccagacatag

SEQ ID NO: 114921 - DNA, 351 bp, synthetic construct
  misc_feature 1..351: note = Description of Artificial Sequence: Synthetic coding sequence
  source 1..351: mol_type = other DNA
atggcttctacagtggtcgcagtgggacttacaatagctgctgccggctttgccggacgttacgtgctgcaagctatgaaacacatggaaccacaagtcaagcaagtctttcagtctttaccaaagtccgcttttagcggcggctactatcggggaggtttcgaacccaaaatgaccaagcgggaggcggctctgattctgggtgtttcaccaacagccaataaagggaagatccgagacgctcacagacggattatgctcctcaaccacccagacaagggaggtagcccttatatcgcagccaaaattaatgaggcaaaagatctccttgagggacaagccaaaaaatag

SEQ ID NO: 114922 - DNA, 1707 bp, synthetic construct
  misc_feature 1..1707: note = Description of Artificial Sequence: Synthetic coding sequence
  source 1..1707: mol_type = other DNA
atgttgctgttgccttcagctgcggacggtaggggcaccgcaattacccatgctcttacatccgcctctactctttgtcaggtggaaccagtcggtcgttggttcgaagcctttgtaaagcgccgcaacagaaacgccagtgcctcctttcaggaactggaggacaagaaggaactgtccgaggagagcgaagatgaagagctgcagcttgaagagttcccaatgctaaaaaccttagatccaaaagactggaaaaaccaggatcactacgctgtgttgggactaggccacgttaggtacaaagcgacccagaggcaaatcaaagccgcccacaaagcaatggtcctgaaacaccatcctgacaaaagaaaagctgccggtgaacctattaaggagggcgacaatgactatttcacctgcataactaaagcctacgagatgctgagtgaccctgtgaagcgccgggccttcaactcagtcgacccaaccttcgacaacagcgtcccatctaaaagtgaagccaaagacaatttctttgaggttttcacccccgtctttgaaagaaacagccggtggagcaataagaaaaatgttcccaagctcggtgacatgaatagtagctttgaagacgtggatattttttatagcttttggtataacttcgacagctggcgcgaattttcttacctggacgaggaggagaaagaaaaagctgagtgcagggacgaaaggcgatggattgagaagcaaaacagagccaccagagctcagagaaagaaggaggagatgaacagaatccggacattggtggacaatgcttattcttgcgatccccggatcaaaaaatttaaggaagaagagaaagccaagaaagaggcagaaaaaaaggcgaaggctgaggccaagcgcaaagaacaggaagctaaggaaaagcaacgacaagcggaactcgaagcagcacggctggccaaagagaaggaggaggaggaagttcgacaacaggccctgttagcaaagaaagaaaaggatatccagaaaaaggctatcaaaaaggagcggcaaaaactgcggaattcctgcaaaatcgaggaaataaatgaacagattagaaaagagaaggaggaggccgaggcccgcatgaggcaagccagtaaaaacacagaaaaaagcacgggtggagggggcaatggcagcaagaattggtcagaagatgatctccaactgttaatcaaagcagtgaatctgtttcctgccgggaccaactctcgttgggaagtgatagctaactatatgaacatccattccagctccggcgtgaagaggacagccaaggatgtcattggcaaggcaaagtctttgcaaaagttggacccccaccagaaggacgatatcaataaaaaggcctttgacaaattcaaaaaggaacatggagttgtcccacaggcagacaacgcgaccccatctgaacgtttcgagggtccctacacagactttacaccctggaccacagaagaacaaaagctgcttgaacaagcactgaagacctaccctgtaaacactcctgaacgctgggagaaaatcgccgaagctgttcccggacgtaccaagaaggactgcatgaaaagatataaagaactggtggagatggtcaaggctaagaaagccgcccaagagcaagtacttaacgccagtagggcgaagaagtag

SEQ ID NO: 114923 - DNA, 1866 bp, synthetic construct
  misc_feature 1..1866: note = Description of Artificial Sequence: Synthetic coding sequence
  source 1..1866: mol_type = other DNA
atgttgctgttacccagtgccgctgacggacgcggcacagcgattacgcatgccctgactagcgctagtactctatgccaggtagagcccgttggccggtggtttgaagccttcgtgaaacgaagaaataggaatgcttctgctagtttccaggagctggaggacaagaaggaattgtccgaagagagcgaggatgaggagctgcagctggaagaattccctatgctgaaaaccctcgatcctaaagactggaaaaatcaggaccactatgcggttctaggcctgggtcatgttaggtataaagccactcagcgtcaaattaaggccgctcataaggccatggtcctgaagcatcatccagacaagcgcaaagccgcgggagagccaattaaggagggcgacaacgactacttcacctgcatcactaaggcgtacgagatgcttagcgaccctgtgaagcgtcgtgcctttaactctgttgatcccacattcgataattccgtcccatccaaatccgaagctaaagacaatttcttcgaagtgttcacccctgtcttcgaaagaaactcaagatggtctaacaagaagaacgtccccaaactgggagatatgaacagtagctttgaggacgtggatatcttctattcattctggtacaattttgactcatggcgggaattttcgtaccttgatgaggaggagaaagagaaggccgaatgccgcgatgagcgccgctggattgaaaagcagaatcgggctactcgtgcccagagaaaaaaagaagaaatgaatcgaattaggactctggttgataatgcttatagttgcgatccaaggattaaaaagtttaaggaggaggaaaaggccaagaaagaagccgaaaaaaaagcaaaggccgaggctaaacgcaaggagcaggaggccaaagagaaacagaggcaggccgagctcgaggcggcaagactggctaaggagaaggaagaggaggaagtgagacagcaagctctcctcgcaaagaaggagaaagacatacaaaaaaaagctatcaaaaaagagaggcagaagctaaggaactcatgtaagacctggaatcacttttccgacaacgaggctgagagagtgaagatgatggaagaggtagagaagctctgcgacaggctcgaacttgcatcgctgcagtgtctgaatgaaacgctcactagttgcaccaaagaggtgggcaaggcagccctggagaaacagatcgaggagattaatgaacaaattagaaaggaaaaagaggaggccgaagctcgaatgcggcaggcatctaaaaacaccgagaagtccactgggggaggcgggaacggctcgaagaactggtctgaagatgacctgcaacttctgatcaaggctgttaatctgttccccgccggaactaactcgcgatgggaggtgatagctaactacatgaatatccactcctccagtggtgtgaagagaaccgccaaagacgtcataggcaaggccaagtctcttcagaagctggacccccaccagaaggacgacataaataagaaagctttcgacaagttcaagaaagaacatggtgtcgtcccacaggccgacaacgccacaccatcagagcggttcgaaggcccctacacagactttaccccatggacgaccgaggaacagaagctgcttgagcaagccctcaaaacttaccccgtcaacactccagaacgctgggaaaagattgcagaagccgtccctgggcgcacgaagaaggattgcatgaagagatataaggagctggtagagatggtcaaggctaagaaagcggcccaggaacaggtgttgaacgcttcgagggccaagaagtag

SEQ ID NO: 114924 - DNA, 609 bp, synthetic construct
  misc_feature 1..609: note = Description of Artificial Sequence: Synthetic coding sequence
  source 1..609: mol_type = other DNA
atgctactgctgccctcagcagctgatggccgggggaccgccattacacacgccttgacgtccgcaagcacgctgtgtcaagtggagccagtcggcaggtggttcgaggctttcgtgaaacgccgcaacaggaatgcctccgcttcttttcaggaactggaagataagaaggaactgagtgaagagtctgaggatgaggaactccagctggaagagttccccatgctcaaaacactcgaccctaaagattggaaaaaccaggatcactacgccgtgttaggcctgggccatgtgcggtataaggcaacccagcgtcagatcaaggccgctcataaagccatggtgcttaagcatcatccagataaaagaaaggcagccggcgagcctataaaggagggggacaacgattacttcacctgcatcactaaggcctacgaaatgttaagcgatccagtcaaaaggagagcattcaactccgtggaccctactttcgacaactccgttccctcaaaaagtgaagcaaaggacaatttcttcgaggttttcacgcccgtgtttgagaggaactcaagagtttccatcagtaaaaagaagaagaagaaaagatag

SEQ ID NO: 114925 - DNA, 822 bp, synthetic construct
  misc_feature 1..822: note = Description of Artificial Sequence: Synthetic coding sequence
  source 1..822: mol_type = other DNA
atggaggcgaacatgcccaagcggaaggaaccgggaagaagcttgagaataaaagtcatcagcatgggcaacgctgaagtgggcaagtcttgtattataaaacgctattgcgaaaaacgatttgttagcaaatatctagcaactattggaatcgattacggcgtgactaaggtacacgtgagagacagggagattaaggtgaacatctttgacatggcaggtcatccttttttctacgaggtgcgtaacgaattctacaaagacacccagggagtcatattggtatatgatgtggggcagaaggacagtttcgacgcactcgacgcatggctcgccgagatgaaacaagaactcggcccacacgggaacatggaaaacattatttttgtagtgtgcgccaataaaattgattgtaccaagcatcggtgcgttgatgagagcgaaggaaggctgtgggctgaaagtaaggggtttctgtatttcgagacttctgcccagaccggcgagggtatcaatgaaatgttccagaccttttacataagcattgtcgacctatgcgagaacggaggcaagcgccctacaacgaacagcagtgcctcgtttacgaaagaacaggctgacgccatccgccggattaggaactccaaagatagctgggatatgttgggcgtgaaaccgggggcctcacgcgacgaggtcaacaaggcttatcggaagctggctgtgctactccatcccgataaatgtgtggctcctggatctgaggacgccttcaaggctgtcgtgaacgcccgaacagccttgctgaaaaatattaagtag

SEQ ID NO: 114926 - DNA, 609 bp, synthetic construct
  misc_feature 1..609: note = Description of Artificial Sequence: Synthetic coding sequence
  source 1..609: mol_type = other DNA
atggccggccatccgttcttttacgaagtgagaaacgaattttataaagacactcaaggtgtgatcctcgtttatgacgtaggtcagaaggatagttttgacgccctcgacgcctggttggccgagatgaaacaggagttgggacctcacgggaacatggaaaatatcatctttgtcgtctgcgcaaacaagatagactgcactaagcacaggtgcgtggacgagagtgaagggaggctgtgggctgagtctaaagggttcttgtacttcgagacaagcgctcagaccggggagggcatcaacgagatgtttcaaactttttacatctctatcgtcgacctgtgcgaaaacggcggcaagagaccaacaacgaacagctctgcgtcttttactaaggagcaagccgacgcaataaggagaatacggaacagtaaggactcctgggacatgctcggggtgaagccgggcgcctctcgcgacgaggtaaataaggcttataggaagttggctgtgttactccaccccgacaagtgcgttgcacctggcagtgaagacgcctttaaggctgttgtgaacgcccgaactgcccttttgaagaatattaaatag

SEQ ID NO: 114927 - DNA, 1515 bp, synthetic construct
  misc_feature 1..1515: note = Description of Artificial Sequence: Synthetic coding sequence
  source 1..1515: mol_type = other DNA
atggtggccccaggcagcgtcacatctcggcttgggtctgtgttccccttcctgttagtgctggtggacttacagtacgagggcgctgaatgtggcgtaaatgcagacgtcgaaaagcacctagaactggggaagaaactgcttgccgctggacagctcgccgacgcactgagtcagtttcatgccgccgtagatggcgatccagataactacatcgcttactaccgccgcgccaccgtgtttctggctatgggcaaatcaaaagccgcactgcccgaccttacaaaagtcatccagcttaaaatggactttacagccgcccgcctacagcgggggcacctgctacttaagcagggcaaactggacgaagctgaggatgattttaagaaagtactgaagtctaacccatccgaaaacgaagagaaggaggcgcagtctcagttgatcaagagtgatgagatgcaacgcttacgctcacaagccctgaacgcattcgggtccggggattacaccgcggccatcgcatttctggataagattcttgaagtttgcgtctgggacgccgagctgcgcgagttaagagccgagtgcttcatcaaggaaggagaacccaggaaagctatcagcgacctgaaggcagccagcaaattaaagaatgacaatactgaagccttttacaagatctccacactctactatcagcttggggaccacgaattgagcctctctgaggtgcgggagtgcctcaagctggaccaggatcacaagagatgctttgcacactacaaacaggtcaaaaaactgaacaaactcatcgaatcagcggaagagctgatcagagacggcagatatactgatgctacatctaagtatgaaagtgtaatgaaaacagaaccgagcatcgcagaatatacagtgcgctccaaagaaaggatttgccactgcttcagcaaggacgagaagcccgtggaggctattcgggtgtgctcagaggtgttgcaaatggagccagacaatgttaacgccctgaaagatagagccgaggcttatttaatcgaagagatgtatgacgaagcaatacaggattacgagaccgctcaagaacacaacgaaaatgatcagcaaatccgagaggggctggaaaaagcacaacggctgctgaaacagtcccagaagagggactactataaaatcttgggcgtgaagaggaacgccaaaaaacaggaaatcataaaagcatatcgcaagttagccctgcagtggcaccctgacaactttcaaaatgaggaagagaaaaagaaagcagaaaaaaaatttatcgatatcgctgccgccaaagaggtgctttccgatccagagatgcgcaaaaaattcgatgatggggaggacccgctggacgccgagagccaacagggagggggcggtaacccattccatcggtcctggaacagttggcagggattcaacccattcagttccggaggtccattcaggttcaagtttcacttcaactag

SEQ ID NO: 114928 - DNA, 597 bp, synthetic construct
  misc_feature 1..597: note = Description of Artificial Sequence: Synthetic coding sequence
  source 1..597: mol_type = other DNA
atggctgatcagagacagagatcactgtcaacatctggcgaaagcctttaccacgtgttgggcctagataaaaacgccactagtgacgatattaagaagtcttatcgaaaactagccctgaaataccaccctgacaaaaatcctgacaacccagaggccgctgacaagtttaaggagatcaataatgcacacgctatattgaccgatgctactaagcgtaacatctacgacaagtacggcagtttgggattatacgtcgctgagcaatttggcgaggagaacgtgaacacctatttcgtgcttagttcatggtgggccaaggctttatttgtgttttgtggcctgttgacatgctgttactgctgctgctgcctctgttgctgttttaactgttgctgcggcaagtgcaagcccaaggctccagaaggagaggagactgagttttatgtgtccccggaagatttggaagctcagctgcagagtgatgaacgagaggcaaccgacacaccgattgtaatccaacccgcgagcgctaccgaaactacacagttgactgcagactcccatccatcctatcacacagacgggttcaactag

SEQ ID NO: 114929 - DNA, 504 bp, synthetic construct
  misc_feature 1..504: note = Description of Artificial Sequence: Synthetic coding sequence
  source 1..504: mol_type = other DNA
atggctgaccagcgccaacggtcactgagcacctccggggaaagcctatatcacgttcttgggttagacaagaatgccacttctgacgatatcaagaaatcttaccgcaagttagcactgaaatatcatcctgataaaaatccggacaaccccgaggctgctgataaattcaaggaaattaacaacgctcatgctattctgacagacgcaacaaagcggaacatatatgataagtatgggtcacttggactatacgtggctgagcagtttggggaggagaatgtcaatacttattttgtcttgtcttcctggtgggcgaaagctctgttcgtgttctgcggactgttgacttgttgctattgttgttgttgcctgtgttgctgtttcaattgttgctgcgggaaatgcaagccaaaagccccagagggggaagagaccgagttttatgtctcacccgaagatttggaggctcagcttcagtcagacgaaaggggcggacactag

SEQ ID NO: 114930 - DNA, 600 bp, synthetic construct
  misc_feature 1..600: note = Description of Artificial Sequence: Synthetic coding sequence
  source 1..600: mol_type = other DNA
atggcgtgcaacatccctaaccaacggcagaggactctgtctactaccggcgaagccctgtacgagattctgggccttcacaaaggtgctagcaacgaggaaatcaagaagacctatcgcaagctggccttaaagcaccatccagacaaaaaccccgacgatcctgcagctactgagaagtttaaggagatcaacaatgctcatgcgatcctgacagacatttccaaaagatcaatctacgataagtatggctctttaggactgtacgtcgctgaacaatttggcgatgagaatgtaaacacgtacttcatgctgagctcctggtgggccaaggcgctgttcgttatcgtcggtctgctaactggatgttatttttgttgttgtctgtgctgctgctgcaactgctgctgtggccactgccgacccgagtcctccgttcctgaggaagacttctatgtgtcacccgaggacttggaagaacagatcaagtccgatatggagaaggatgtcgactttcctgtctttttgcagccaactaatgcaaatgagaagacgcagttgatcaaagaaggaagccgatcgtattgcactgatagctag

SEQ ID NO: 114931 - DNA, 570 bp, synthetic construct
  misc_feature 1..570: note = Description of Artificial Sequence: Synthetic coding sequence
  source 1..570: mol_type = other DNA
atgtcaaccgttaaagaggccgcccaccgcctctcaaaatcagaaatgtctttgtatgctgtgcttgatttaaagaaaggagccagtcctgaggattttaaaaaatcatattcccatagcgctcttttacctcatcccccgttcgagtaccaccttggacgcaaactggcactcagataccatcccgacaagaacccaggaaacgctcaagctgccgaaatcttcaaagagataaacgccgcgcacgcgatattgtccgatagcaagaagcgtaaaatctatgatcagcatggctctttaggcatctatttatatgatcattttggcgaagaaggcgtgcgctattactttatcctgaatagctgttggtttaaaactctcgtaattctctgtacattacttacttgctgttgcttctgttgttgttgttgcttttgctgtggagccctcaaaccccccccggaacaggattctgggcggaagtatcaacaaaacgtacagtctcaacccccccggtctggagccaagtgcgattttcgctccgaggaaaattcggaggacgatttctag

SEQ ID NO: 114932 - DNA, 570 bp, synthetic construct
  misc_feature 1..570: note = Description of Artificial Sequence: Synthetic coding sequence
  source 1..570: mol_type = other DNA
atgagtacagtgaaggaagccgcccacaggttatctaaatctgagatgtccctttacgctgtcctggacctgaagaaaggcgcctcaccagaggattttaagaaatcatattcccactccgccctgctgccccacccgcccttcgagtatcacctgggtagaaagcttgccctgcggtaccaccccgacaaaaacccgggaaatgcccaggccgccgaaatttttaaagaaatcaacgctgcacacgcaatcctaagtgattcgaagaagcgcaagatctatgaccagcacgggtcgctggggatttacctgtacgatcacttcggcgaggaaggcgtgaggtactatttcattctgaattcttgctggttcaaaacactggtcattctgtgcacgttgctcacatgttgttgcttctgctgctgctgctgcttttgctgcggagcgcttaagccgccgcccgagcaggactccggacgcaagtatcagcaaaatgtgcagagtcagcccccacggtccggcgccaaatgcgattttcgatcagaagagaacagcgaagacgacttctag

SEQ ID NO: 114933 - DNA, 2703 bp, synthetic construct
  misc_feature 1..2703: note = Description of Artificial Sequence: Synthetic coding sequence
  source 1..2703: mol_type = other DNA
atggagccctcctatgggggaggtttgttcgacatggttaagggcggggccgggagattgttttctaatcttaaggataatctgaaggacaccctaaaggacacatcttcccgggtaattcaatctgtcacgtcatatacaaaaggagacctcgacttcacttatgttacttctaggataatagtgatgtcattccccctcgacaatgttgatattggtttccggaaccaagtggatgatatacgtagtttcttagactcgcggcacctcgaccattacactgtttataacttaagccccaaatcatacaggactgcaaaattccactcaagagtttcagaatgcagctggcccattaggcaagcgcctagccttcataatttgtttgccgtctgccgaaatatgtacaactggctcctgcagaaccctaagaatgtctgtgtggtgcactgtctcgacggcagggctgcaagctcaatccttgttggggccatgttcattttttgcaatctctactccacaccaggccctgccatcagactgctgtatgctaagaggccaggcattgggctctctccctcacaccgacggtatctcggctatatgtgtgacctcctagcagacaagccctacaggcctcacttcaagcccctgactatcaagtccataaccgttagtccaatcccttttttcaataaacaacgaaatggttgccgtccttattgtgacgtgctcattggcgaaactaagatctacagtacgtgtaccgatttcgagcgcatgaaggagtatagagtacaggacggtaagatctttatcccattaaacatcactgtgcagggtgacgtcgtcgtcagcatgtaccacctgcgctcaaccatcgggtcacggctgcaagccaaagttacaaatacccagattttccagctgcagtttcacactggcttcattccactcgacaccaccgtcctcaagttcactaaaccagagctcgacgcttgcgacgtgcccgagaagtatccacagctatttcaggtgaccctcgatgtggagctgcagccccatgacaaggtgatagatctgacccctccttgggaacactattgtaccaaagatgtgaatccatctattctcttttcgagtcaccaggagcatcaggatactcttgctctggggggacaagcaccaatcgatattccccctgacaaccccagacactatggccagagtggatttttcgccagtctgtgctggcaggatcagaaatctgagaagtcgttttgcgaagaagaccatgcggcacttgttaaccaagagtcagaacaatcagacgacgaactccttactttatctagcccccatggaaatgctaatggcgacaaaccccacggggtcaagaagccatcaaaaaaacaacaagagccggcggcaccccccccgcccgaggatgtcgacctgcttggattggaggggagcgcaatgtcaaattcattctctccccccgccgctcctcctaccaattccgagctacttagcgacctctttggcgggggtggagccgcgggtcctacacaggcaggccagtccggagtcgaggacgtgttccacccatcaggtcctgcttctacccagagcactccacgcaggagcgcaactagcacttcggcctccccgaccttgcgggtgggcgagggggccaccttcgatcccttcggcgcaccctccaaaccctccggacaggatctgctgggcagcttcctcaacacctccagtgcaagctcagatcctttcctgcagcctaccagatcccccagtcccacagttcacgcaagcagtacccccgccgtgaacatccagcccgatgtgtctggaggatgggattggcacgccaagccgggtggctttggcatggggtctaagtcagccgcaacaagccccacaggcagcagtcacgggacccccacacaccagtccaagccacaaactttggacccatttgcggatctgggtactctgggatccagctccttcgcctcaaagccgacgacgcccactgggctcggggggggctttccaccgctctcttctccacagaaggcaagtccccagccaatgggaggaggatggcagcagggaggagcctacaattggcaacagccccaacctaagccccagcctagtatgccccattctagtccacaaaaccggccaaactacaacgtgtccttctcagctatgccaggtggtcagaacgagaggggcaaaggttcttcaaacctggagggcaagcagaaagccgccgattttgaggatttgctgagcggtcagggttttaacgcccataaggacaagaaaggaccccgcaccatcgctgagatgaggaaggaggagatggccaaggaaatggaccctgagaaactgaaaatcctcgagtggatcgagggaaaggagagaaatattagggctttgctgtccactatgcacactgtgctctgggcaggagagactaaatggaagccagttgggatggctgacctcgtcaccccagagcaggtgaaaaaagtgtatagaaaagcggtcctcgtagtccatcctgataaggctaccggccaaccttatgagcagtacgctaagatgatcttcatggaactcaacgacgcttggtccgaatttgagaatcaggggcagaagcccctgtattag

SEQ ID NO: 114934 - DNA, 2913 bp, synthetic construct
  misc_feature 1..2913: note = Description of Artificial Sequence: Synthetic coding sequence
  source 1..2913: mol_type = other DNA
atgagtcttttgggctcttataggaagaaaactagcaatgacggctacgagagcctccagttggtcgatagcaatggagatctctctgcgggaagtggtggagtgggcgggaaacagcgcgttaacgccggggcggcggctcgtagcccggctaggcaaccgccggatcgcgcatccacaatggacagctccggcgcctccagtcctgatatggaaccctcctacggcggcggactgtttgatatggtgaaaggaggggccggtagattgttctccaatctgaaggataatttgaaagacaccttgaaggatacatcgtctagggtgatccaatccgtcacgagttacactaaaggtgaccttgactttacctatgtgacctcccgtatcatagttatgagctttccgttagataacgtcgatatcggcttcagaaatcaggttgatgacataaggtcatttttggacagcaggcacttggaccactatacagtctacaatttaagcccaaagtcatatcgcaccgccaaatttcactctcgggtttctgagtgttcctggccgattcgccaggccccctcattgcacaatctgttcgccgtatgccgaaacatgtataattggctattacagaatccgaagaacgtgtgtgtggttcattgcttagacgggcgggccgcttctagcattctggtaggtgcaatgttcatcttttgcaatctgtacagtactcctgggccagccatacgcctgctgtacgctaagagacccggcatagggctaagtccgagtcatcggcgctacctgggctacatgtgtgatttactggctgataagccgtaccggccccacttcaaacccctaaccattaaatctatcacagtgagccctattccatttttcaataagcagcggaacggctgtcgaccctactgtgacgtactcatcggagagactaagatctattcaacatgtacagatttcgagcgcatgaaggagtatcgcgtgcaagatggcaaaattttcatacccctcaatattacagtgcagggcgacgtcgtcgtgtcaatgtatcacctaagatccacaatcggtagccgcctgcaggccaaagtgacaaatacgcagatttttcaactacagttccacacagggttcatcccccttgacacgaccgtgcttaagttcaccaaaccagagctggatgcatgtgatgtgccagagaagtaccctcagctgtttcaagtgacgctggacgtggagttacagcctcacgacaaggtgatagatctgactccaccatgggaacactactgtaccaaagacgtgaacccctccatactattttcatcccatcaggagcaccaggatacactggctctgggcggccaggcccctatcgacattcctccagataatcctcggcactacggtcaaagcggctttttcgcctcgctgtgttggcaggatcaaaagagtgagaagtctttctgtgaagaagaccatgccgctctcgtgaatcaggagtcagagcaaagcgacgatgaacttctcaccttgtcaagtccacacggcaacgctaatggggacaaaccgcatggggtgaagaaaccatccaaaaaacaacaggagccagctgcaccaccacctcctgaggacgttgatttgttagggctcgaaggctccgccatgtctaactcctttagcccccctgcagcacctccaacaaacagcgaacttctctcagatctgttcggtggtggcggggcagccgggccgacacaggccggtcagagcggggtggaagatgtttttcacccctcggggcctgcatccactcagtcaacaccccggcggtccgcgacctctaccagcgcttctccaactcttcgcgtgggagaaggagccacctttgacccctttggggctccttccaaaccatcaggtcaggacctcctcggctcattcctgaacacgtcctctgcctctagcgatcccttcttacagccaacccggtccccatcacccactgtccacgcaagctcaacaccagccgttaatattcagcccgatgtctcaggcgggtgggactggcacgctaagcccggtggatttggcatgggtagcaaatctgctgcgacctcacctaccggatcatcccatggaacgcccacgcatcagtctaagcctcagactcttgatccttttgccgatctggggaccctgggcagtagtagctttgcttctaagcccaccaccccgactggactgggcggaggtttccctccactgtcttccccacagaaggcttcccctcagccaatgggcggtggctggcaacagggcggcgcgtacaattggcagcagccccagccaaagccgcagccatctatgccgcattcatccccccagaaccgtcctaactataacgtgagtttttctgctatgcctggtggtcagaatgaacgtgggaaaggaagctccaatctggaaggtaaacagaaggcggcagatttcgaagatttattaagcggacaaggattcaacgcccataaggataaaaagggcccccgcaccattgccgagatgcgtaaggaggagatggctaaagaaatggatccagagaaactgaaaattcttgagtggatcgaaggcaaagaacgcaacataagggcactgctctccactatgcatacagttctttgggccggagaaaccaagtggaagcctgtcggcatggctgacttagtgacccctgagcaggtgaagaaggtgtaccgcaaggccgttctggtcgtccatccagataaagctaccggtcaaccgtacgagcagtatgccaagatgattttcatggagctgaatgacgcttggagcgaatttgaaaaccagggacaaaagccgctatactag

SEQ ID NO: 114935 - DNA, 2742 bp, synthetic construct
  misc_feature 1..2742: note = Description of Artificial Sequence: Synthetic coding sequence
  source 1..2742: mol_type = other DNA
atgaaggattccgagaataagggcgcgagcagtccagatatggaaccatcctatggaggtggcctgttcgacatggtgaaagggggggctgggcgcttgttcagcaacctcaaggacaaccttaaagacacgctgaaggacacctctagccgggtcatccagtctgtcacaagctacacgaaaggggatttggattttacctatgtgacgagtcggattatagtaatgtcattccccttggacaacgtagacatcgggtttagaaatcaggtggacgacatacggagtttcctcgacagccggcacctagatcactacactgtctacaacctgtctcctaaatcgtaccgcacagcaaagttccattctcgcgtctccgaatgctcctggccaatcaggcaggccccgtcactgcataacctgtttgccgtgtgtcggaatatgtacaactggttacttcagaaccctaaaaacgtttgtgtggtgcactgtctggatgggcgcgcagcaagctccatcctcgtaggggctatgtttattttttgtaacttgtactctacccccgggccggcgatacgtctgctgtacgcgaaacggcctggcattgggttgtctccttcgcacaggcgctatcttggttatatgtgcgacttgttagctgataagccgtatagaccccacttcaaacccctgaccatcaagagcatcactgtttcccccatcccttttttcaacaagcagagaaacggctgcaggccttactgcgatgtactcatcggggagacaaaaatatactcaacttgcaccgacttcgaacggatgaaagaatacagagtgcaggacggcaagattttcattccattgaacattactgttcagggagatgtggtagtgagcatgtaccacctgcgctcaaccatcggatcacgcctccaagctaaggttaccaacactcagattttccagctccaattccacacaggctttatccccctcgacaccaccgttctcaagttcaccaagccagagctggacgcctgcgatgttccagagaagtatccgcagcttttccaggtcaccctggatgtggagttacagccacacgacaaggtcattgacctcacccctccttgggagcactactgcactaaggacgtcaatccatccattttattttcctcccatcaggagcatcaggataccctggctctaggcggacaggcacccattgacattccccctgacaatcccaggcactacggacagagtggcttcttcgcatctctgtgttggcaggatcagaagtcggagaaaagtttctgcgaggaggaccacgccgctctcgtaaaccaagagagcgagcagtcagatgatgagctcctaacattgtcctccccacatggcaatgcaaacggagataagccccatggagtcaagaagccgtcaaagaagcaacaggaacctgcagcccctccaccacccgaagatgttgatttgctgggcctcgaaggttccgcaatgagcaacagtttctccccccctgctgcaccaccaacaaacagtgaactgctctctgacctcttcggtggaggaggggcagctggtccaacacaggcaggacagagcggagtggaagacgttttccatccaagcgggccagcgagcacccagagcaccccccgccggagcgcaacaagtacatctgccagtcccacactccgagtcggggagggcgcaaccttcgacccgtttggggcaccaagcaaacccagtggccaggacttactcggatcattcctgaatacctcttccgcttcctccgacccttttttgcaacctaccagatcaccatcaccgacagtgcacgcgtcctctacccctgcggtaaatatacagcctgatgtttccggggggtgggactggcatgccaaaccaggcggttttggaatgggctctaagtccgcagccactagccctactgggagctcccacggtacaccgacgcatcagagcaagcctcagaccctggacccattcgcagatcttggcaccctgggcagttcgtcttttgcttctaagccaacaacacccacagggttgggaggtggcttccctccactgtctagccctcagaaagcctcaccacagccaatgggcggcggttggcagcagggcggagcctataactggcaacaaccacagcccaagccacaaccgtccatgcctcattcctccccacaaaatcggcccaattataacgtatcgttttcggctatgcccggtggtcagaacgaaagggggaaaggatctagcaaccttgaaggcaagcaaaaggcagctgatttcgaagacctcctaagcggccagggcttcaatgcgcataaagataagaagggacccaggacaatagccgaaatgcgcaaggaagaaatggcaaaggagatggacccagaaaagctgaaaatcttggaatggatcgagggaaaggagcggaatatcagagcactgcttagcacgatgcacaccgtcctgtgggcgggtgaaactaaatggaagcctgttggaatggccgatctggtgacaccggagcaggtgaagaaagtgtacagaaaggcggtgctggtcgttcatcccgataaagcaacaggccagccatatgaacagtacgctaagatgatattcatggaactcaacgatgcctggagtgaattcgagaatcagggccagaagcctctgtactag

SEQ ID NO: 114936 - DNA, 783 bp, synthetic construct
  misc_feature 1..783: note = Description of Artificial Sequence: Synthetic coding sequence
  source 1..783: mol_type = other DNA
atgggactgctggacctctgtgaggaggtgttcggaactgcagatctctatcgtgtgcttggggttcgccgcgaggcctccgatggggaagtcaggcgcggctaccataaagtgtccctccaagtgcacccagacagggtgggcgaaggggataaggaagacgccacaagaagattccaaatcctgggcaaggtgtactcagtgctgtccgatagggagcaaagagccgtgtatgacgaacaggggactgtcgacgaagactcgccggtcctcacgcaggatcgcgattgggaggcatattggcgcttgctgttcaagaagatctcactggaggatatacaggccttcgagaagacctataaaggctctgaagaggagctggccgatataaagcaagcatacctggactttaagggcgatatggaccagatcatggagtccgtgctgtgcgtgcagtacacagaagagcccagaattcgcaacattatacaacaagcgatcgatgccggagaagtgcccagctacaacgctttcgtcaaggaaagtaagcaaaaaatgaatgctcgaaagagaagagctcaggaagaggcaaaagaggccgagatgtccagaaaagaattaggcctggatgagggggtggatagcctaaaggctgccattcagagcaggcagaaggaccggcagaaagaaatggataatttccttgctcagatggaagcgaaatactgtaaatcaagcaaaggcggtggaaagaaatctgcgcttaaaaaagaaaaaaagtag

SEQ ID NO: 114937 - DNA, 1029 bp, synthetic construct
  misc_feature 1..1029: note = Description of Artificial Sequence: Synthetic coding sequence
  source 1..1029: mol_type = other DNA
atgctggaaaattcgctttactcgccgacttgggaggggagtcagttttgggttaccgtccagagaaccgaagcagctgagaggtgcggactgcacggcagttacgttctcagggtcgaggctgaaagactaaccctactgaccgtgggtgcacagagccagatactcgagcccctcctcagttggccctacactctcctgaggcgctacggcagggacaaggttatgttttccttcgaggcgggtaggagatgcccaagcggcccgggaacattcacctttcaaaccgcccagggaaatgacatctttcaagcagtcgaaactgccatccatagacagaaagcccaaggcaaagccggccaaggccatgacgtactgagagcggattcccacgagggtgaggtcgctgaaggaaaactgcccagcccccctggtccacaggagctgctggacagcccccccgccctgtacgccgagcccctggatagccttcgcattgccccttgccctagccaggacagcctctattctgaccctctggattctacctccgctcaggccggcgagggggtgcagagaaaaaagccattgtattgggatttatacgagcatgcccagcagcagttgctgaaggccaagcttactgaccctaaagaggatcccatatatgacgagccagaaggtcttgccccggtccctccgcaaggactgtacgatctgcccagggagccaaaggatgcgtggtggtgccaggcacgcgttaaggaggaaggatatgaactgccatataatcccgctactgacgattacgccgtgccgcccccccgcagtaccaagcctctactagccccaaagccccaggggccggcatttcccgagcctggaactgcaactgggagtgggatcaagagccataactccgccctgtattcccaggttcaaaaatccggcgcatcagggtcatgggattgcggactctcccgggtgggcacagataagactggggtcaagagtgagggatcaacttag

SEQ ID NO: 114938 - DNA, 855 bp, synthetic construct
  misc_feature 1..855: note = Description of Artificial Sequence: Synthetic coding sequence
  source 1..855: mol_type = other DNA
atggagcctggtatgctggggccacacaatttgccccatcatgagcccatctcttttgggatcgatcagattctctccgggcccgagaccccgggagggggcctgggactcgggagagggggtcagggccatggtgaaaacggagcctttagtggcgggtaccatggcgcaagcggttacggacctgcaggctctttggccccgttacccggaagttctggggttggtccggggggagtcatccgcgtcccggcccacagacccctacccgtgcccccgcctgccggcggtgcacccgccgtgcccgggcctagtggcctggggggagccggtggtctggccggtcttaccttcccctggatggactccgggaggagattcgcgaaagaccggctgacagccgctctgtctcccttctcagggactaggcggatcggccacccataccagaatcgtacaccacccaagagaaagaaaccacgcacatcattctctaggtcacaagtcttggagctcgagagaagattcctgcgccaaaagtatctggcgtctgccgagcgcgccgctctggcaaaggctctcaggatgactgacgcccaagtgaagacctggttccagaataggcgcacaaagtggaggaggcagacagcagaggaacgcgaagccgagcggcacagggctggcaggttattgctgcacctgcagcaggacgccctgcctagacccttgcgaccaccactaccaccagatccgctgtgccttcacaatagctccctctttgccttacagaatttacagccatgggcggaggataacaaggttgcctctgtttctgggctcgcatctgtggtctag

SEQ ID NO: 114939 - DNA, 1239 bp, synthetic construct
  misc_feature 1..1239: note = Description of Artificial Sequence: Synthetic coding sequence
  source 1..1239: mol_type = other DNA
atgggagatggagctgtgaagcaggggtttctatacctgcagcagcagcagacgttcggtaagaagtggcgccggtttggagcttcactgtacggcggcagtgactgtgccctggctagactagaactccaagaaggcccggagaaacctcgccggtgcgaggccgcacggaaggtcatcagattatccgattgtcttcgcgtagccgaggccgggggcgaagcgtcaagtcctagagatactagcgctttcttcctagagaccaaagaaaggttatatctcctggccgctccagctgcggagcggggtgattgggtacaagccatctgtctgctggcctttcccggccagcgtaaagagctttcaggcccggaggggaagcaatcacgtccatgcatggaggaaaatgaactgtatagttctgctgtcacagtcggccctcataaagagttcgcagtgaccatgcgccctactgaagcttccgagcgatgtcacttaagaggctcttatactctgcgcgcgggtgaatctgccctcgaactctggggcggcccagaaccaggaactcagctgtacgactggccttatcgtttcctccgacggttcggtagagacaaagtgactttcagctttgaagctggacggagatgtgtgtcgggcgagggcaattttgagtttgaaacccggcagggcaatgagatcttcctcgcccttgaagaagctatttccgctcagaaaaatgccgccccagcgaccccccagcctcaacccgcaacaatccccgccagcttgccccgcccagacagcccttacagccgacctcacgactccctgcctcccccgtccccaacaacccctgtgcccgcccctaggccccgaggtcaagagggcgagtacgctgtaccatttgacgcggtggcaagatcactggggaaaaactttcgcggcatcttggccgtcccaccgcagctcctggccgatccactctatgatagtatcgaagagacacttcccccacgacctgatcacatttatgatgaacccgagggggttgcggctctttctttgtacgattcaccccaagagcctcggggggaggcttggcggcggcaggccaccgcagaccgggaccccgccggccttcagcacgtacagcctgccggacaagacttttccgcgtccggctggcaacctggcacagagtacgacaacgtcgtcctgaaaaagggcccaaagtag

SEQ ID NO: 114940 - DNA, 777 bp, synthetic construct
  misc_feature 1..777: note = Description of Artificial Sequence: Synthetic coding sequence
  source 1..777: mol_type = other DNA
atgaggcccacggaagcgtccgaaagatgtcatctccgggggagctacactctcagagccggcgagagcgccctggagttgtgggggggccctgaacccgggactcaattatatgactggccatatcgcttcctgaggcggttcggccgagacaaggtcaccttttcattcgaggccgggcgtaggtgcgtgtccggcgagggcaacttcgagttcgagacacgacagggtaatgaaattttcttagccctggaggaggcgatctcggcccagaagaatgccgcacctgccactccccagcctcaaccggcgactattccagctagcctgcctagacccgatagcccttattctaggccacatgactcgcttcctcctccgagccctacaactcccgttcccgcccctagacccaggggtcaagagggtgagtacgccgtgccttttgacgcagtggctcgctcgctaggtaagaacttcagagggatattggcagtccctcctcaattactcgccgatcctctctatgacagcatcgaggagacgctcccaccaaggccagaccatatttatgatgaacccgagggcgtcgctgctctgtcactgtatgacagtccccaggagccaaggggggaagcatggagaaggcaagcaacagcagacagggatcccgcaggccttcaacacgttcaacctgcaggacaggacttttcggcctcgggatggcagccgggcacggaatatgacaacgtagtactgaagaaaggtcccaagtag

SEQ ID NO: 114941 - DNA, 993 bp, synthetic construct
  misc_feature 1..993: note = Description of Artificial Sequence: Synthetic coding sequence
  source 1..993: mol_type = other DNA
atggatccattagaaacccctattaaagacggcatcctttatcagcaacacgttaaattcggcaagaaatgctggagaaaggtgtgggccttgctctacgcaggggggccttccggggttgcaaggttagaaagctgggaggtgagggatgggggtttgggggccgctggagatcgctcagctggacccggaagacgaggagagcggcgcgtcatacgactggcagactgtgtctctgtgctgccagctgacggggagagctgccctagagatactggggcattcctccttactacgacagaacgatcccacctccttgccgcccagcacaggcaggcctggatgggccccatttgccagctggcctttccaggcacaggagaggcttccagtgggtccacagatgcccagagcccaaagagaggacttgtacctatggaagagaactctatctattcttcctggcaggaggtgggagaattccctgttgtcgtgcagagaactgaggctgccacaagatgtcagctcaaaggacctgccctcctggtgctgggccctgatgcaattcagctccgtgaggcaaaggggactcaggctctctacagctggccgtaccatttcctgcgtaaatttgggtctgataagatcttgctcggtaccccaggtgtaagcttacttatttgtaaaggagagcgtaccgatgacgtgtcaggcataatcctcgacgaatcgctgctacgagcgtactccgtgccaggggccggcggacattccagggtgcaagattcattaggcccagtgctccgggaacctacattccagggtgagaggtcctttctgaagactagcatgctgcgatccctactctgttcttgttcatggcgccaccctcgatcccaaccaagaacacaagcgtcctgcctgcaagggtccgactgtccagcacctcatagaaattctacatctgcagcccacaccctgggaacctcttag

SEQ ID NO: 114942 - DNA, 1491 bp, synthetic construct
  misc_feature 1..1491: note = Description of Artificial Sequence: Synthetic coding sequence
  source 1..1491: mol_type = other DNA
atgaccaggggcgctagactgaggagtgacgcccgagcccagctaaaccagctctcactggatggtgggacgggaagcggtcagaagggtaagtgtgaagaattcccttctagtctcagtagcgtcagccccggactcgaagccgccgccctactgctcgcggtgactatggacccgttggagacgccaatcaaagatggaattttgtaccaacagcatgtcaagtttggtaagaagtgctggcgcaaggtatgggcactgttgtatgccgggggcccatcaggtgtcgctcgtctggaatcatgggaagtgagggacggcggcctgggcgccgcaggggatcgatcagccgggcctggtcggaggggcgagcggcgcgtgatccgcctcgccgactgcgtgagtgtgctgcccgccgacggcgaatcttgtccacgggataccggagcgttccttttaaccacgacagaacgcagtcatctccttgccgcccagcaccgacaggcctggatgggtcccatatgccagttagcatttcccgggacaggcgaggctagctcaggctctactgatgcccagtcccccaaaagaggcctcgtccctatggaggaaaactccatatatagctcttggcaagaagtgggcgaattccctgtcgtggtccaaagaactgaagccgccactcgttgtcagctgaaaggccccgcgctcctggtacttggacctgacgcaattcagctcagggaggcaaaaggcactcaggcactctactcctggccctaccattttttacgcaagttcggctccgacaaaggtgtgttcagtttcgaggcggggaggcgatgccactccggtgaggggctcttcgctttttcaacgccttgcgcacctgatttatgccgggccgttgccggcgcaattgccaggcagagagagaggctgcccgagctgacaaggccccagccctgtccactgcccagagctacaagtttaccttcgttggacacccccggagaattacgcgaaatgcctcccggccctgaaccacccacatcacgaaaaatgcacctggcagaacctggaccccagtccctgcccctgctgctgggaccggagccgaatgacctagcctctggcctgtatgcgagcgtatgcaaaagagccagcggtccgcctggaaacgagcacctctacgaaaatctgtgtgttctggaggccagtcccaccttgcacggcggggagcctgaaccccatgagggaccaggatcgcggtcccccacaactagtcccatctaccacaacggccaggatctttcttggccgggacctgccaacgactctaccctggaagctcagtatcgccgtcttctggagcttgaccaagtggagggcactggcagaccggaccctcaagctggatttaaagcgaaactggtgaccctgctgagtcgagaacggaggaagggacccgcaccttgcgacagaccgtag

SEQ ID NO: 114943 - DNA, 687 bp, synthetic construct
  misc_feature 1..687: note = Description of Artificial Sequence: Synthetic coding sequence
  source 1..687: mol_type = other DNA
atggaccctctcgagacccccataaaggacggcattctgtaccagcagcacgttaagttcggaaagggcaccggggaggccagctcgggctccaccgacgctcagtccccaaaacgcggtcttgttccgatggaggagaacagtatctacagcagctggcaggaagtcggtgagtttcctgtggtggtgcagaggactgaagctgccacaaggtgccagctgaaggggcctgcactgctggtcctggggccagatgccatacagctgagagaagccaagggaacacaagccttatactcctggccttaccacttcctgaggaagtttggatctgacaagatattgcttggcacaccgggagtatcattgttaatttgcaaaggggaacggactgacgatgtttccgggattattctggatgaaagtcttctgcgcgcctactcagtgcccggtgcgggcggccatagccgcgtgcaggactccttgggccccgtgctgcgggaacctacttttcaaggtgaacgatcatttctgaagacaagcatgcttcggtcattattgtgctcgtgttcctggcgtcaccctcggagccagccacggactcaggcctcatgcctccagggttcagattgtccagccccgcatcggaacagcacgtccgccgcccacaccctcggcacctcatag

SEQ ID NO: 114944 - DNA, 435 bp, synthetic construct
  misc_feature 1..435: note = Description of Artificial Sequence: Synthetic coding sequence
  source 1..435: mol_type = other DNA
atggatcccctggaaacacctatcaaagatggcatcctttaccagcaacacgtcaagtttgggaagaaatgctggcgtaaggtgtgggctctgctgtatgcaggggggccaagtggggtcgcgcggctggaaagctgggaggtacgggatggggggcttggtgctgccggagaccgcagcgctgggcccggaaggaggggtgaacggcgggttatcaggttggcagattgtgtgtccgtcctgcctgctgatggggagtcttgtccacgtgatactggtgcattcctcctaacaacaactgaaaggtcgcacctcctcgcagcccagcaccgccaggcctggatgggtccaatctgccagcttgcctttcccgggaccggagaggcatcaagtggttccaccgacgcgcagagcccaaagcgagggctggtctag

SEQ ID NO: 114945 - DNA, 471 bp, synthetic construct
  misc_feature 1..471: note = Description of Artificial Sequence: Synthetic coding sequence
  source 1..471: mol_type = other DNA
atggaccctctcgaaacgccgattaaggacggcatcttgtatcaacagcatgttaaatttggcaaaaagtgttggcgcaaggtctgggctctgttgtacgcgggggggccgagcggagttgctcgccttgagtcctgggaagtgcgagacggcgggcttggtgccgccggcgatcgcagcgccggtcccggcagaagaggtgaacggcgagtcatacgccttgcagattgcgtctccgtgctccccgcagacggggaatcttgtcctcgtgataccggtgcattcctgctgaccacaaccgaacggtcgcacttgctggcggcacagcataggcaggcctggatggggcctatctgtcagctcgcgtttccaggtacaggtgaggcctctagtggatccaccgacgcccagtcccccaaacgcggcctcgtcccaatggaggagaatagtatttactcatcctggcagtag

SEQ ID NO: 114946 - DNA, 132 bp, synthetic construct
  misc_feature 1..132: note = Description of Artificial Sequence: Synthetic coding sequence
  source 1..132: mol_type = other DNA
atggatccactagaaacccctatcaaggatggcatcctttatcagcagcacgtgaagtttggcaaaaagtgctggcgaaaagtgtgggcgttgctgtacgcaggaggcccctccggagtggcacggttgtag

SEQ ID NO: 114947 - DNA, 642 bp, synthetic construct
  misc_feature 1..642: note = Description of Artificial Sequence: Synthetic coding sequence
  source 1..642: mol_type = other DNA
atggaccctctggagacccccattaaagatggaatcctttaccagcaacacgttaagttcgggaagaaatgttggagaaaagtgtgggccttactgtacgcgggtggccctagcggcgtcgcccgcctggaatcctgggaggtgcgggatggtggcctgggcgccgccggagatcggagcgcagggcccgggaggcgaggcgagaggcgcgtgattaggctcgcagattgtgtttcagtgctgccggcagatggggagtcatgccctagggatacaggagcctttctccttacaactacagagagatctcatttactggccgcccagcaccggcaggcttggatggggccgatctgccagctcgcattcccaggaaccggcgaggcttcgtccgggtccacagacgcccagtctcccaaaagaggcttagtgcccatggaagaaaattccatatacagctcctggcaagaagtgggtgaatttcctgttgtggtgcagcgaactgaggctgcaaccaggtgccagcttaaaggccctgcccttctcgtcctgggtccagacgctattcagttgcgagaggccaagggtacccaggccctgtattcatggccataccatttcctcagaaaattcgggtcgtag

SEQ ID NO: 114948 - DNA, 42 bp, synthetic construct
  misc_feature 1..42: note = Description of Artificial Sequence: Synthetic coding sequence
  source 1..42: mol_type = other DNA
atggatcctctcgagactccaatcaaggatggaatattgtag

SEQ ID NO: 114949 - DNA, 258 bp, synthetic construct
  misc_feature 1..258: note = Description of Artificial Sequence: Synthetic coding sequence
  source 1..258: mol_type = other DNA
atggacccgcttgaaacacctattaaagatgggattttgtatcagcagcatgtcaagttcggcaagaagtgctggagaaaggtctgggctctattgtatgccggtggtccctcaggagtcgcccggctagagtcctgggaggttcgcgatggcggcttaggggccgcgggcgatcggagcgcaggcccaggccgccggggcgagagacgagtgatacgcctggctgattgtgtgagcgttctgcccgccgacggctag

SEQ ID NO: 114950 - DNA, 981 bp, synthetic construct
  misc_feature 1..981: note = Description of Artificial Sequence: Synthetic coding sequence
  source 1..981: mol_type = other DNA
atggccactaatttcagcgacattgtgaaacagggctacgttaaaatgaaatctaggaagttagggatctaccgtagatgttggttggtgttccggaagtcctcatcaaaaggcccccagagactcgagaagtaccctgatgagaagagtgtgtgtttgcggggatgtcccaaggtgactgaaatttcgaacgtgaaatgcgtgacacgcttgccaaaagagacaaaacggcaggctgtggcgattatttttaccgatgatagcgctcgtactttcacctgtgattcagaattagaagcagaggaatggtataaaacgctttcagtggagtgcctgggcagtcgcctcaatgacatatctctgggagagcctgacttattggcgcccggagtgcagtgcgaacagaccgacagatttaacgtttttctgctgccttgtccaaatctggatgtatatggagagtgcaagctccagattacgcacgagaatatctacctgtgggacatacataacccccgggttaaattggtgtcttggcctctttgttcgctgcgacggtacggccgggacgccacgcggttcactttcgaggcagggcggatgtgcgacgcaggagaggggctctacacgttccagacccaagagggagaacaaatctatcagcgagttcacagcgcaactctagcaattgccgagcagcacaaacgggtcctattagaaatggaaaagaatgttcggctattgaacaagggtacggaacactactcctacccctgtactcccaccacaatgctgcctcgatccgcctactggcaccatattaccggctctcagaacattgcagaagcgtcgtcctacgcaggggagggatatggagcggcccaggccagctcagaaaccgatctgctgaatcgcttcattttgctgaagccaaaaccgagccaaggcgactcctcagaagccaaaacgccctcccagtag

SEQ ID NO: 114951 - DNA, 921 bp, synthetic construct
  misc_feature 1..921: note = Description of Artificial Sequence: Synthetic coding sequence
  source 1..921: mol_type = other DNA
atggcctcaaattttaatgatatagtgaaacaggggtatgtcaggatccgtagccgcagattaggaatctaccagaggtgctggctggtgttcaaaaaagctagttccaagggcccaaaaaggctggaaaaattcagtgatgagcgcgccgcgtactttagatgttaccacaaggtgacggagctcaacaacgttaagaatgtagcaaggctgcctaaaagcaccaaaaagcacgccatcgggatctattttaacgatgacacaagcaaaaccttcgcctgcgaatccgacctggaagctgacgagtggtgtaaggtgcttcaaatggagtgcgtgggcacaaggattaacgatatatccctgggggaacccgaccttctggctactggagtggagcgtgaacagagtgagcgattcaatgtctatctgatgccctctccgaacctggacgtccatggagagtgcgctctgcagatcacctacgaatacatctgcctgtgggatgtacaaaatcctagggtaaaacttatctcctggccactctccgctctgaggcgttatggaagggatactacgtggtttacgttcgaggccgggaggatgtgtgagaccggtgaggggctattcatcttccaaacacgcgatggagaagccatttatcaaaaggtgcactcagcagctcttgccatcgcagagcaacatgagaggctgttgcagtccgtgaaaaactccatgcttcagatgaaaatgagcgaacgggccgcttctctctctaccatggtcccactgccacggtctgcctattggcagcacatcaccaggcagcatagcaccggccagctctaccgcctgcaagatgtgtccagcccattgaaattgcacaggacggagacgttccccgcctaccggtccgagcattag

SEQ ID NO: 114952 - DNA, 1515 bp, synthetic construct
  misc_feature 1..1515: note = Description of Artificial Sequence: Synthetic coding sequence
  source 1..1515: mol_type = other DNA
atgaccgaagctgcactggtggagggacaggtaaagttgcgggatggaaagaagtggaaatctcggtggctggtgctaaggaagccctcccccgttgccgattgcctcctgatgctggtgtataaagataagtccgagagaattaaaggactgcgcgaacgctcgagcctgaccctggaggatatatgtggccttgaaccaggactcccctacgagggcctagtgcacaccctggctatcgtgtgcctttcacaggccatcatgctgggttttgacagtcacgaagccatgtgcgcttgggatgcacgaatacggtacgcactgggcgaagtgcatagatttcacgtgaccgtggcaccggggaccaagctcgaatctggtcccgcaaccctgcatctctgtaacgacgtattggtgctcgccagggacatccccccagctgtgaccggtcaatggaagttatcagatctgaggcggtacggggcggtgcccagcggcttcatcttcgagggcggtacacgctgcggctattgggcgggagtcttttttctttcgagcgcggagggggaacaaattagtttcttatttgactgtatagtcagggggatttcgccaacaaagggtcctttcggcctgaggccagtgctacctgatccttctcctccaggaccatcgaccgtcgaagagagagtagctcaggaggccttagagaccctccagctggagaagcgcctgtctcttctgagtcacgccggcaggcccggaagtggtggggatgaccgatccctgagctcaagttcttccgaggcatcccatctcgatgtgtctgcaagttcacgcctgacagcctggcctgaacagagttcgagtagcgcatccactagccaagagggaccccgccctgctgctgctcaggccgccggtgaggcaatggtgggtgccagcagaccaccacctaaaccactgcgccccagacagctgcaggaagttgggcggcagagttcttctgattccggaatcgcaacagggagccactcaagctactcatcatccttgtcaagctacgcgggcagctcactggacgtatggcgcgcaaccgatgagctcggctccttgttgagtctgccagcagctggagctccagagccgagcctgtgtacatgcttacctggaactgtggagtatcaagtccctacttccctgcgggcccactacgacactcctcgatccctgtgcctcgcaccaagagatcattccccaccttctcaggggagccccggcaactctgctgccagggactcgggcggccaaacttcagccggctgcccttctgggtggctgggtaccagacggcggggtctggttatggaggcccctcaaggctctgaagccactctgcctggacccgcgcccggcgagccctgggaagctgggggacctcatgcagggccacctcctgcctttttttcagcttgcccagtctgcgggggactcaaggtcaatccccccccctag

SEQ ID NO: 114953 - DNA, 1827 bp, synthetic construct
  misc_feature 1..1827: note = Description of Artificial Sequence: Synthetic coding sequence
  source 1..1827: mol_type = other DNA
atgacagaggcggccctcgtggaaggacaggtcaagctaagggacggcaaaaagtggaagagccggtggctggttctccgcaagccctctccagtggcggattgcttacttatgctggtctataaagataaatccgagcgcattaagggtttgcgtgagcgcagttctctcacgcttgaggacatttgtgggcttgagccagggctgccatacgagggtttagtccacactctcgcaatcgtctgcctgagccaggccataatgctgggctttgactcccatgaggcgatgtgtgcttgggatgccaggattcgatacgccttgggagaagtgcacagattccacgtcaccgtggctcccggaaccaaactggagtccggcccagcaactctccacttgtgcaacgatgtattggtgctcgcaagagatatcccacccgctgtgacgggccaatggaaactgtcagacctgcggagatatggggccgtcccttcaggattcatcttcgagggaggcacacggtgcggctactgggccggggtctttttcctaagtagtgcagaaggagagcagatctcatttcttttcgattgcattgttaggggcatttctcccaccaagggaccattcggtcttcggcccgttctgcctgaccccagcccccccgggccatccacagttgaggaaagagtagcgcaggaagctctggagacacttcagctggagaagaggctgtcccttctatctcacgccggccggcccgggagtggtggagatgacaggagccttagctcatcatcatcagaggccagccacctagatgtatctgcatcctcccgtctcactgcctggccagagcagtcatcctcctccgcatccaccagccaagaaggccccaggcctgccgctgctcaagctgcgggcgaggccatggttggtgcctctaggcccccacctaagccgcttagaccccgtcaactccaagaagtaggtagacagagtagcagcgatagtggcattgcgacagggtcccattcatcatacagctcttcactgtcctcatacgccgggtcctcgctcgacgtgtggcgagctactgacgaactcggctctctgctatctctcccagccgctggagcacctgaaccatctctgtgcacgtgtctgccaggaaccgtagaataccaggtgcccacttctctgagggctcactacgatactccaaggagtttgtgtctcgcaccccgggaccactctcccccaagccaaggatcacctggaaacagtgccgccagagacagcggtgggcagacgtcagccggatgtccaagtggctggttagggaccaggaggaggggcctggtaatggaagccccccagggatccgaggccaccttaccagggccagcccccggggaaccctgggaggcaggcgggccccacgctggcccgccaccagctttcttcagcgcctgccccgtctgtggcggtctgaaaggcgcagccgcaagcgcccctggacccgccactgcacatagcggctctcctgggcccgttgccgtggacagccctggccccgagaggccccgcggcgagagtcccacatatgtcaacatacccgttagtccctcttctaggaaacagcttcactatatggggctcgagctgcaggaggcgtcagagggcgtgcgaggtgcaggcgctagtctatatgcccagatcgatattatggcaactgaaacggcccatcgggtaggtgtccggcacgctagggccagggaagaacagctgagcgagcttgagcagagaaaagctgccccacagtag

SEQ ID NO: 114954 - DNA, 768 bp, synthetic construct
  misc_feature 1..768: note = Description of Artificial Sequence: Synthetic coding sequence
  source 1..768: mol_type = other DNA
atgacggaagcagccctggttgagggacaggtgaaacttagagacggaaagaagtggaagagtaggtggcttgtcctccgcaaaccatcacccgtggctgactgtctcttaatgctggtctataaggacaaatccgaacggattaaaggactgagggagaggagctcactcaccctggaagacatttgcggactggagccaggcctgccttatgagggtttagtgcacacccttgctatcgtgtgcctcagtcaagccattatgctggggttcgacagtcacgaggcgatgtgcgcctgggacgcacgaattaggtacgccctgggggaagtgcataggttccatgtcacagtggcacccggcaccaaacttgaaagtggaccggccacgcttcatctgtgtaatgacgtacttgtcctggcgcgggacatccctcccgcggtcacaggccagtggaaactgagcgaccttagacggtatggggccgtgccctcaggcttcatcttcgaaggcggtaccaggggctggcggcttctgcctgtgctgggaaggggcggggcggatcagctgccagttagactgcataggcctaggcatttgccacaccagggtcccctgtgggcggccgcaggctctacgcggcctaagtctcccggaacactcgactgtggtggtgcctgtggcccgggaagtcccggaaatcccactgccggagaggccgctgaaccccctctaacctgcggacaagctgggcagtggaggggctag

SEQ ID NO: 114955 - DNA, 1371 bp, synthetic construct
  misc_feature 1..1371: note = Description of Artificial Sequence: Synthetic coding sequence
  source 1..1371: mol_type = other DNA
atgggctatttccgttgcgcccgagctggcagcttcggacgccggaggaagatggagccctccaccgccgcccgcgcttgggcgctcttttggctgctcctgcccctgcttggggcggtgtgcgcgagcggacctaggacgctggtgctgttagacaatctaaatgtcagggagacccactcattattctttcgaagcctaaaagataggggtttcgagctgacattcaaaaccgctgatgatccttcgttgtcactcatcaagtacggcgaattcctgtacgacaacttaatcattttcagtccttccgtcgaggactttggtggaaacattaacgtagaaactattagtgcctttatcgatgggggcggttcggtcctcgtcgccgccagcagtgacattggagatccccttagagaactaggttcagagtgtggtattgagtttgacgaggagaagacagccgtgatcgaccaccataactacgatatcagtgacctgggacagcatactctcattgtcgcggacaccgagaatctgttgaaggcccccacaattgttggaaaatcatcacttaatcctattttattccggggtgtgggaatggtggcggaccctgacaatcctttggtactcgatattctcactggtagctcaacttcctattctttcttccccgacaaacctatcacacaatacccacacgccgtgggcaaaaacacccttctcattgccggcctccaggcccgcaacaacgctcgcgttatctttagcgggtcgctcgatttcttttctgatagtttttttaactctgctgtacagaaggcagcgcccggatcacagcggtactctcaaacaggaaattatgagctggcagtggccctgtcacgctgggtgttcaaggaggaaggggtgctccgggttgggcccgtttctcaccacagggtgggtgagaccgcgccccctaacgcatacactgtcaccgacctggtcgagtattccattgtcatccagcagctttctaatggaaagtgggtgcccttcgatggtgacgatatacagttagaatttgttagaatcgaccccttcgttcgcactttccttaaaaagaagggcggtaaatactccgttcagttcaagctgcccgacgtgtacggcgtattccagtttaaagtggactataatagactggggtatacccacctctatagcagcacgcaagtgtccgtcagacctctacaacacacccaatatgagagattcatccctagtgcgtacccttattacgcatcagcctttagtatgatgctgggcttattcatcttcagtatcgtttttctgcacatgaaggagaaagagaagagtgactag

SEQ ID NO: 114956 - DNA, 1260 bp, synthetic construct
  misc_feature 1..1260: note = Description of Artificial Sequence: Synthetic coding sequence
  source 1..1260: mol_type = other DNA
atgggttacttcaggtgcgcaagggccgggtcgtttggacgccggcggaagatggagccaagcaccgcagcccgagcctgggcactgttttggctccttcttccgctgctgggagctgtttgcgccagtggaccccggactttggtgctcctggataacctcaacgtgagagagacacacagcctgtttttcaggtcactgaaagattttgggggaaacatcaatgtagagacaatttcagcgtttattgatggtggcgggagcgttctggtcgctgcttcgagcgacattggcgatccactcagggagctaggaagtgaatgcggtatagagttcgatgaggaaaaaactgctgttatcgaccaccacaattacgacatttccgatttaggtcagcatacgctcattgtggcagatacagagaatctcctgaaagcacctacaatcgttggaaaaagcagcctgaaccctatactgtttcgtggcgtcgggatggtggcggaccccgataatccgctcgtcctggatatattgaccggcagctcaacctcttacagcttcttccccgataagccaattactcaatacccccacgcggtagggaaaaatactctgttaatagccgggctgcaggccagaaacaatgcacgcgttatattcagtggttctctggatttcttctccgactcttttttcaatagtgccgttcaaaaggccgcgcccggatcccagcggtatagccagaccggcaattacgagctcgctgtcgcactgagtagatgggtgtttaaagaagagggggtgttgagagtggggccggtgtcacaccacagagtcggggaaacagccccacccaatgcatataccgtaacggacctcgttgaatactccatcgtgattcagcagttatcaaatgggaaatgggtgccgttcgatggggacgatattcagctggagttcgtccggatcgatcctttcgtgcgtacttttttaaagaaaaagggcggcaaatactccgttcagtttaagctgccggatgtctatggggtatttcaatttaaggttgattacaaccgactcgggtacacacacttgtattcctcaacacaagtttcggtcagacccctgcaacacactcaatatgagaggttcatcccatccgcctacccttattatgcctcggccttctcaatgatgctgggcctttttatctttagtatcgtcttcctgcacatgaaggaaaaggagaaaagcgactag

SEQ ID NO: 114957 - DNA, 279 bp, synthetic construct
  misc_feature 1..279: note = Description of Artificial Sequence: Synthetic coding sequence
  source 1..279: mol_type = other DNA
atgacgaagctggcccaatggttatgggggctggccatactgggatcaacttgggtagccctcacaacaggtgcattagggctcgagctacctctttcatgccaggaggttctgtggcctctccccgcttacttgctggtgtccgccggctgctatgcgcttggcaccgtggggtaccgggtcgctacatttcacgattgcgaggacgccgcccgcgaactgcagagtcaaattcaagaggcaagagcagatctggcccgccgaggcctcaggttttag

SEQ ID NO: 114958 - DNA, 369 bp, synthetic construct
  misc_feature 1..369: note = Description of Artificial Sequence: Synthetic coding sequence
  source 1..369: mol_type = other DNA
atgcttagtgtgggcggattacgactaagccttgtccggttctcgtttctcctgcttagaggcgctttattaccctctttagccgtcacaatgactaaattggcccagtggctttggggcctggctattctgggctctacgtgggtggccctgaccacaggcgctctcggattagagttgccactgagttgtcaagaggtgttatggccactgcctgcctatctgctggtatccgctggctgttatgcactgggcaccgtagggtatagggttgcgacttttcatgactgtgaggatgctgcgcgcgaattgcagagtcagatacaagaagctcgcgcggacctcgccagaaggggactgagattctag

SEQ ID NO: 114959 - DNA, 279 bp, synthetic construct
  misc_feature 1..279: note = Description of Artificial Sequence: Synthetic coding sequence
  source 1..279: mol_type = other DNA
atgactaagttagcccagtggctctggggcttagcgattctcggtagcacatgggtcgcactgaccaccggagccttgggattagagcttcccttatcgtgtcaggaggtcctgtggcctctgccggcttaccttctcgtttccgctggctgttacgcactcggtaccgtaggttacagagttgctaccttccacgattgtgaagatgccgctcgggaactccagtcgcagatacaggaagctagagcagatctggcacgaaggggtctgcgcttttag

SEQ ID NO: 114960 - DNA, 1191 bp, synthetic construct
  misc_feature 1..1191: note = Description of Artificial Sequence: Synthetic coding sequence
  source 1..1191: mol_type = other DNA
atggaccccagggggacgaaacgcggtgccgaaaagactgaggtcgcggagccacggaacaaactgcctcggcctgccccgagtctgccgactgaccctgcactgtatagcgggccctttcctttctaccgacggccttcggagttgggctgcttcagcttggatgcacagcggcagtatcacggcgacgctcgcgctcttcgctattatagccccccccccacaaacggtccaggcccaaatttcgacttgcgagacgggtaccctgacagatatcaaccccgcgatgaggaagttcaggagcggctggaccacttactgtgttggctgctggaacacagagggcggctggaggggggacctggctggttggctgaggctatcgtcacttggaggggtcacctaactaaactcctaaccaccccatacgagagacaggaggggtggcaactagccgcatccagatttcaggggactctctacctgagcgaggtggaaaccccgaatgcacgggctcagagactggcccggccacctctgctgcgtgaattgatgtatatgggctacaaattcgagcagtatatgtgcgccgacaagccaggaagtagcccggatccatctggggaggtcaatactaatgtggccttctgctctgtgctgaggtcaaggctggggtcacacccgctgctgtttagtggagaggtggactgtacagatccacaagccccaagcacacagccgccgacatgttatgttgagctaaagacatcaaaggagatgcactcccctgggcaatggaggagcttttacagacacaagttgctgaaatggtgggcccagagttttttgcctggggttccaaacgtcgtcgctggcttccgtaacccagatggttttgtgagttccctgaagacttttccgacaatgaagatgttcgagtatgtccgcaatgatagggacgggtggaatccaagtgtctgcatgaacttctgtgccgcttttcttagcttcgcacagtcgacagtcgtccaggatgatccgcgacttgttcaccttttcagttgggaaccaggtggacctgtgacagtgagtgtacaccaggacgccccttatgctttcctgccgatctggtatgtcgaggccatgacccaggatctgccctcccctcccaaaaccccatccccaaagtag

SEQ ID NO: 114961 - DNA, 1191 bp, synthetic construct
  misc_feature 1..1191: note = Description of Artificial Sequence: Synthetic coding sequence
  source 1..1191: mol_type = other DNA
atggatccgaggggaacaaagagaggtgccgagaaaacagaggtcgcagagcctagaaacaaactgcctcggccggccccatctcttcctacagaccctgccttgtactctgggccattccctttctatcgacggccgtcagagctcggctgtttttctttggatgcgcagcgacagtaccatggagacgcccgggcccttaggtactactcgccaccacccacgaatggcccgggaccgaactttgatcttcgagacggctaccccgaccgttaccagccccgtgacgaagaagtacaagaaagactggaccacctgctgtgctggttactcgagcaccggggcaggttggaggggggccctggctggctagctgaggcaatagttacctggagaggccacttgactaaactgttgaccacaccctacgagaggcaggagggttggcagcttgccgcctcccggttccaaggaactctgtacctgtccgaggtggagacgccaaacgccagggctcagagactcgcacgtcccccattgctcagggagctcatgtatatgggttacaagtttgaacagtacatgtgcgccgataagcctggcagcagtcccgatccatctggggaggtgaataccaacgtggctttttgttccgtactgagaagcagattagggtctcatccactccttttcagcggtgaggtcgattgcacagatcctcaggcccctagtacacaacctccaacgtgctacgtggagttgaaaacctctaaagaaatgcatagccccggccagtggcggagtttttatagacacaaactccttaaatggtgggcccagtccttcctgcccggagtgcccaacgtcgtggcaggatttcgcaaccctgacggatttgtgagcagcctcaaaactttcccaaccatgaaaatgttcgaatacgtccgtaacgaccgggacggctggaatccttcagtgtgcatgaacttttgtgctgccttcctaagttttgcccaatctactgttgtgcaagatgacccccgtctggtgcatctgttttcctgggagcccggtggaccagttactgtgagtgtgcaccaggacgccccatacgcttttctgccgatttggtatgtggaggccatgacacaggaccttccctcgccccctaagactccatccccgaagtag

SEQ ID NO: 114962 - DNA, 1191 bp, synthetic construct
  misc_feature 1..1191: note = Description of Artificial Sequence: Synthetic coding sequence
  source 1..1191: mol_type = other DNA
atggaccccaggggaactaaacgaggagcagagaagacagaggtcgctgagcctagaaacaagctcccacgtccagccccaagcttacctacagaccctgccctgtattccggcccatttccattttaccgcagaccctcagaacttggatgtttcagcctggacgcccagcggcagtatcacggcgatgctcgcgctctgcggtattactcaccacctccaacaaatgggccaggccccaacttcgacctgagagatggataccccgatcggtaccaaccccgtgacgaggaagttcaggaacgccttgatcatctcttatgttggttgctcgaacacagggggcgcctggaaggaggccccgggtggctggccgaggccatcgtgacttggagaggacatcttactaaattgttgacaaccccctacgagagacaggagggctggcaactggcagcatccagatttcagggcaccctgtatctgtccgaagtcgaaacacccaatgccagggcgcagcgcctggcccggccaccgttgctccgcgagttgatgtatatggggtataaattcgaacagtatatgtgcgccgataaaccaggatcaagccctgacccgagtggcgaagtgaacacgaacgtggcattttgctccgttctccggtccaggctcgggtcccatcctctgctgtttagcggtgaggtcgattgtaccgatcctcaggcgcccagcacccagcctccaacatgttacgtcgaacttaaaaccagtaaggagatgcactcacccgggcaatggcgtagtttttatcgacataagttgttgaagtggtgggctcaaagctttctgcctggagtccccaacgtggtggctggcttcaggaatcccgacggttttgtgtcctcgttgaaaacgtttcctacaatgaaaatgttcgagtacgtccggaatgaccgggacggatggaacccttcggtgtgcatgaacttctgcgccgcattcctcagttttgcacagtccaccgtggttcaggacgatccacggttggtgcatttgtttagctgggaacccggcggtcccgttaccgtgtcggttcaccaggacgccccttacgctttcttgcccatctggtatgtcgaggccatgacacaggacctcccgtccccaccaaagactccatctcctaagtag

SEQ ID NO: 114963 - DNA, 1191 bp, synthetic construct
  misc_feature 1..1191: note = Description of Artificial Sequence: Synthetic coding sequence
  source 1..1191: mol_type = other DNA
atggacccgcggggtactaagcgtggcgccgagaagaccgaggtcgcggaaccgcgaaacaaactcccgagaccagctccaagcctgccaactgatcctgcgctctacagcgggccctttccattctacaggcgcccctccgagctaggatgtttcagtctcgatgcgcaaaggcaataccacggggacgctcgggcgttaagatattattcccccccacctaccaacggcccgggtcccaattttgacctccgagatgggtacccagaccggtatcaacctagagacgaggaagtacaagagcgactggaccaccttctgtgctggctcttggaacatcgtggtagactggagggcgggcccggctggctggcagaggccatcgtgacctggcgggggcatctcacaaaactgttaaccacgccatacgagagacaggaaggatggcagttggcagccagcaggtttcagggtaccctttatcttagcgaggttgaaacgcctaatgctcgggcgcagcggctcgctaggccacctctcctgcgggagttgatgtacatgggatataagtttgagcagtacatgtgtgctgacaagccgggttctagtcctgacccttcaggagaagtgaataccaacgtcgcgttctgctccgtgctgaggtccaggcttggctcgcatccactgctgtttagcggtgaagtagactgtacagatccccaggctccctccacccagccaccaacctgctacgtcgagctgaaaaccagtaaggaaatgcattcccctggacaatggcggtcgttctatcgacataaactgctcaaatggtgggcacagtcattcctgcccggtgtcccaaatgtggtggccggcttccgtaatcccgacgggtttgtgtctagtcttaagactttcccaaccatgaaaatgttcgagtatgtgcggaatgaccgcgacgggtggaatccttcagtctgtatgaatttctgtgccgctttcttaagttttgctcagagcaccgtggtgcaggatgacccccggttagtacatcttttcagttgggaacctggtggcccagtgaccgtgtcagttcatcaggacgccccctatgccttcctgccaatatggtacgtggaggctatgacacaggatctgccctccccacccaagaccccgagccctaagtag

SEQ ID NO: 114964 - DNA, 1191 bp, synthetic construct
  misc_feature 1..1191: note = Description of Artificial Sequence: Synthetic coding sequence
  source 1..1191: mol_type = other DNA
atggatcctagagggactaaaaggggcgccgagaagaccgaggtggccgaaccaagaaataagttacccaggccagccccaagtctcccaactgaccctgctttgtactcagggcctttccctttttatagacggccatccgagctgggctgcttctcactggacgcccagaggcagtaccacggggatgctcgagcactgcggtattattctcccccaccaaccaacgggccgggccccaacttcgatttgagagacgggtatcccgatcggtatcagccccgggatgaggaagtccaagagcgtctggatcacttgctgtgttggctgctggagcatcgtgggaggttggaagggggtccaggatggctggccgaggctatagtgacctggcggggtcacctgacaaagctcctgacaacgccgtacgagaggcaggagggttggcagttagcagcctccagatttcagggtactctgtatctgtcggaagttgaaacacccaatgcccgtgcccaaaggctcgctcggcctcccctgctgcgtgagctgatgtacatgggatacaagttcgagcaatacatgtgcgcagacaagcctgggagctcccccgatccctccggagaggtgaataccaatgttgctttctgttcggtactgcgcagtagattgggatcacatcctcttcttttctcaggggaagtggattgtacagacccgcaagctccgagcacccagcctcctacgtgttacgtcgaactcaagacttctaaggaaatgcattcaccaggacagtggcgctctttttacagacacaagctactcaaatggtgggcccaaagcttccttcccggcgttcctaacgttgttgccggttttcggaatccagacgggttcgtttcatctctcaaaaccttccccactatgaagatgtttgagtatgttcggaatgatcgagacggatggaaccccagtgtctgcatgaacttttgtgccgcttttctgagttttgcccagtcaactgtggttcaggacgatcctcggctggtccaccttttcagctgggagcccggaggccctgtgaccgtctccgtccaccaggatgcaccctatgcctttctgccgatttggtacgtagaggcgatgacccaggacctgccttctccccctaaaacacctagcccaaaatag

SEQ ID NO: 114965 - DNA, 1191 bp, synthetic construct
  misc_feature 1..1191: note = Description of Artificial Sequence: Synthetic coding sequence
  source 1..1191: mol_type = other DNA
atggatccacggggaactaaacgcggggccgagaagactgaagtcgcagagccaagaaataagttgcctcgccccgccccgtccttgcccaccgatccagctctgtacagcggcccattccccttttatcggcgaccttccgaattggggtgtttctctctggatgcccaacgacagtaccatggggacgcccgtgctctccgatattactcacccccacctacgaatgggcccggccccaattttgatctgcgtgacggttacccagacaggtaccagccgagggatgaagaagtgcaagagcggctcgatcatctgctgtgctggctgctggaacaccggggccggctcgagggcggacccggttggcttgctgaggccatcgtaacctggcggggccatctgaccaagctactcactacaccttacgaaagacaggagggctggcagctagcggcatccaggttccagggaaccctctacctctccgaggtggagacaccaaacgcccgagcccaacgtctcgcccggcctccgcttttgcgggaactgatgtatatgggctacaagttcgagcagtacatgtgcgccgacaagccagggagcagcccagatccatcaggagaggtcaatactaatgtcgcattttgttctgtcctgcggagccgtctgggaagccacccactcctattcagcggagaggttgattgtacagaccctcaggcaccttccactcagccgccaacctgttacgttgagcttaaaacctccaaggagatgcatagtccgggacagtggcggtctttctatcgtcacaagctccttaaatggtgggcccagagttttctgcccggcgtgccgaacgtggttgctgggttcaggaaccccgatggcttcgtgtcctcactcaaaacctttcccaccatgaaaatgtttgagtacgttcgaaatgacagagacggctggaacccatccgtctgtatgaacttttgcgctgcctttctgtcattcgctcagtctacagtggtgcaagacgatccccggctagttcacctgttttcttgggagcccgggggacccgtaacagtcagcgttcatcaggacgccccctatgcctttttacccatttggtacgtggaagcaatgacacaagacctgccatctcctccaaagactccgtctcctaaatag

SEQ ID NO: 114966 - DNA, 1191 bp, synthetic construct
  misc_feature 1..1191: note = Description of Artificial Sequence: Synthetic coding sequence
  source 1..1191: mol_type = other DNA
atggatccgcgtgggacaaagcggggcgcagagaaaactgaggtggctgagccacgcaataagttgccacggcctgcaccatctctgccaacggacccagctctttacagtgggccattcccgttttaccgccgcccatctgagcttgggtgtttttcattggacgcccagcgccagtatcacggggatgcccgggctctccgctactattccccaccccccactaacggccctggcccgaacttcgatctgagagacggctacccagacagataccagccaagggacgaggaggtccaggagagactggaccatctattgtgttggttgctggagcatcggggtcgactggaaggggggccaggctggctcgctgaggcgattgtaacctggcggggacacctgactaagcttctcactacaccctacgaaaggcaagagggatggcagttagcagctagccgatttcagggcaccctgtacctgtcagaggttgaaacgcccaatgcacgtgcacagaggcttgcgcggcccccacttttgagggagctcatgtatatgggctataagtttgagcagtacatgtgcgctgataaaccgggatcctcacccgatccctccggcgaagtcaacacgaacgttgccttttgtagcgtgctcagatctcggttgggctctcatccactgttgttttccggtgaagtggactgcactgaccctcaggcacccagcacccagcctcctacatgctacgtggaactgaagacgagcaaggaaatgcagagcccgggccagtggcggtccttctaccgacacaaattgttgaaatggtgggcccagtcctttctgcctggagtccctaacgttgttgctgggttccgaaacccagacggatttgtgagcagtctcaaaaccttccctactatgaaaatgttcgaatacgtgaggaatgaccgcgatggctggaacccttctgtgtgcatgaacttctgtgctgcattcttatccttcgcacaatctactgtcgtccaggacgatccgcgattggttcacctcttttcctgggaaccgggggggcctgtcaccgtgagtgtgcatcaggacgccccctacgccttcctgccaatatggtacgtcgaggccatgacacaagacttacctagtcccccgaagaccccatcccccaaatag

SEQ ID NO: 114967 - DNA, 1191 bp, synthetic construct
  misc_feature 1..1191: note = Description of Artificial Sequence: Synthetic coding sequence
  source 1..1191: mol_type = other DNA
atggatccacgaggaaccaagagaggcgcagaaaaaaccgaagtggccgaaccgcggaataagttaccaagaccagctccctctctgcccacagaccccgcgctgtatagtggcccatttcctttctaccgtcgaccgtcagagctaggctgcttttccctcgacgcacagagacagtaccatggagacgccagggccttaaggtactatagcccaccgccgacaaatggcccagggcctaattttgatttgagggatggatacccggaccgttaccaaccccgcgatgaagaggttcaagaaagactcgaccatctgctttgctggctcctggagcataggggcaggttggagggcggccccgggtggttggcagaggcaatcgtgacatggaggggtcacctgactaagctgctcactactccttacgagcgccaagagggttggcagctcgccgcaagtaggtttcaagggaccctatacctctctgaggtggaaacccccaacgcccgcgcgcagaggctggcgagacctcccctcctgcgggagctgatgtacatgggctacaagttcgaacagtatatgtgcgcggacaagcccggatcttcacccgatccttctggcgaggtgaacacaaacgtagccttctgctctgtactgcgatccaggttgggatcccaccctctgctgttcagtggggaggtcgattgcacagatccgcaggcaccatccacacagccccccacttgctatgttgaattgaagaccagcaaggaaatgcacagtcctggccaatggcgcagcttctaccgccataagcttcttaagtggtgggcccagtccttccttcccggcgtacctaacgtggttgccggattccggaaccctgacggcttcgtgtctagcctgaagaccttcccaaccatgaaaatgtttgagtacgttcgcaatgatagagacgggtggaacccatctgtctgcatgaacttctgcgctgcattcctcagtttcgcacagtcgaccgtggtgcaggacgacccaaggctggttcaccttttttcgtgggaaccaggcggcccagtgaccgtgtccgtgcatcaagatgcgccttacgcttttctgccgatctggtatgtcgaggccatgactcaggacctgccttcccctccaaaaactccgagtccaaaatag

SEQ ID NO: 114968 - DNA, 1191 bp, synthetic construct
  misc_feature 1..1191: note = Description of Artificial Sequence: Synthetic coding sequence
  source 1..1191: mol_type = other DNA
atggatccgaggggtactaagcgcggggcagagaaaacagaggtggctgagcctcgtaataagctaccacggcctgccccgtccctcccaaccgatcccgccttatatagcgggccgtttcccttctatcgaaggccatccgaattgggctgcttctctctggatgcgcaaaggcagtaccatggggacgcccgagctctgcggtattattctcctccaccaacgaatgggcctggccccaattttgacttgcgcgacgggtaccctgacagataccagcctagagacgaagaggtccaggagcgactggaccatcttctctgttggctgctggagcatcggggcagactggaggggggcccggggtggcttgccgaggccattgttacttggcggggccaccttacaaagctgctcaccacaccttacgagaggcaggaaggatggcagttggccgccagccgcttccaggggacactttatttgtccgaggtggagacacctaatgccagagctcagcggctcgcgagacccccgctcttgcgtgagctcatgtatatgggctacaaatttgaacagtacatgtgtgcagacaagccaggatctagtcccgacccttctggggaagtgaacacgaatgtcgccttttgcagcgtattgagatctcgcctgggctcacacccgcttctctttagcggtgaggtagactgtactgaccctcaggctccgtccacacagccacctacttgctacgtcgaactgaaaacttctaaggaaatgcactcgcccggtcaatggcgtagtttctatagacacaaactcctgaagtggtgggcccaaagtttcctgcctggggtacccaatgtggtggctggattcagaaatcctgacggctttgtgagctccctgaaaaccttccccacgatgaagatgttcgagtatgtcagaaacgatagagacggatggaacccatcagtctgtatgaacttttgtgccgctttcctttcatttgcgcagtcgactgttgtgcaggacgaccctcgcttagtgcatttgttctcttgggagcccggggggcccgtgaccgtttcagtgcaccaggatgcaccatacgcctttctccccatttggtatgtcgaggctatgacgcaggatctgccaagcccccccaaaactccatcacccaagtag

SEQ ID NO: 114969 - DNA, 1191 bp, synthetic construct
  misc_feature 1..1191: note = Description of Artificial Sequence: Synthetic coding sequence
  source 1..1191: mol_type = other DNA
atggaccctcgagggacaaagcgcggtgccgagaagacagaggtggccgagcccaggaataagcttccaagacccgccccaagccttcccaccgatcctgcactgtacagcggccctttcccgttttacaggaggcccagtgagctgggctgtttcagcctggatgctcagagacagtaccacggggacgcccgggctctacgctactactctcctccgccaacgaacggacctggtccgaatttcgatctgcgggatggctatccagacagataccagccgagggatgaggaagtgcaggagagactggatcacctcctgtgttggctgctggagcatcggggccgattggaaggaggaccaggatggctcgccgaggctatcgtcacatggcgggggcatttgaccaagcttctgacaactccgtatgagcggcaggaggggtggcagttggctgcctcgagattccaaggaaccctctacctgtcagaggtcgaaactcccaatgcacgggctcagcgactggcgagaccacctctgcttcgcgagttaatgtacatgggctacaaattcgagcagtatatgtgcgccgataaacccggatcatctcctgatccgtctggcgaggtgaatacaaacgtagccttctgctctgtgctgcgttctcggctgggctcacaccccctgctgttctcaggcgaagttgactgcactgacccccaagcgccaagcacccagcctccgacctgctacgtggagctcaaaacatcaaaagagatgcactctcccggacagtggaggagtttctataggcacaagttacttaagtggtgggcccaatcgtttctccccggcgtgcctaatgtagtcgcaggcttcaggaaccctgatggatttgtgtcatctctgaagactttccccacaatgaagatgttcgagtatgtgcgtaatgatagagacggttggaatccaagtgtgtgtatgaatttttgtgcggcttttctttcttttgctcagagtacagtggtgcaggacgatccgagactggtacacttgttttcgtgggaacctggcggccctgtcactgtctccgtccaccaagatgccccctatgcgttcctcccaatttggtatgtggaagctatgacccaggacttaccttccccgccaaagactccctctccgaagtag

SEQ ID NO: 114970 - DNA, 1191 bp, synthetic construct
  misc_feature 1..1191: note = Description of Artificial Sequence: Synthetic coding sequence
  source 1..1191: mol_type = other DNA
atggacccccgaggtacaaagaggggggccgagaaaacagaggtggcagaaccaagaaataaactgccaagaccagccccaagcctccctaccgatcccgcgctttactctggccctttccccttctacagaagaccatcggagctaggctgcttctccctagacgctcaacggcagtatcacggggacgctcgcgctctcagatattatagtcccccccccaccaatgggccagggccgaacttcgatttacgtgatggctatccggatcgctaccaacctagagacgaagaggttcaagaaaggctggatcatttgctgtgctggctcctggagcaccgcggccgactggagggcggacctggctggcttgctgaggctattgtgacatggcggggtcatttaactaagttgctcacaaccccatacgagaggcaggaagggtggcagttggctgcgagccgattccagggcaccctatacctgtccgaagttgagacccccaacgcccgggcccagcggctggcaaggccacccctcctgcgcgaacttatgtacatgggctataagtttgaacagtacatgtgtgctgataagcccgggtcctcgcctgatcctagcggagaggtcaacactaatgtggctttctgttcggtgctgcgatcacgactaggctcccacccactgttgttttctggagaagtagactgcacagacccacaggccccttctactcagccccctacatgttatgtcgaactgaagactagcaaggaaatgcattcccctggccagtggcgttcattttaccgacataagctgctgaaatggtgggctcagtctttcctgcctggcgttccaaacgtggtggctggctttagaaatccggacgggttcgtcagttcattgaagacatttcctactatgaaaatgttcgagtacgtccgcaacgacagagatggctggaacccaagtgtctgcatgaacttctgtgctgcttttcttagtttcgcacagtctacagttgtgcaggacgacccgcgcctggtgcacctatttagctgggagcctggagggccagtcacagtatccgtgcaccaagatgccccttatgccttcctacctatctggtatgtggaggcaatgacccaagatctgccgtcaccacctaagacaccctctccaaagtag

SEQ ID NO: 114971 - DNA, 1191 bp, synthetic construct
  misc_feature 1..1191: note = Description of Artificial Sequence: Synthetic coding sequence
  source 1..1191: mol_type = other DNA
atggacccgcggggcacaaagcgcggagcagaaaagaccgaggtggcagaacctcgcaataaactgcctaggccggctccttctctgcctactgatcccgctctctacagcgggcccttcccattttaccgcagacctagcgaactcggctgtttttcactcgatgcgcaaaggcagtaccatggagatgccagggcactgcgctactacagccctcccccgaccaatgggcccggccccaactttgatctgcgggatggataccccgaccgctaccagcctcgagacgaagaggttcaagagcggctggaccacctcttgtgctggctccttgaacaccgggggcgcttggaggggggacccggctggctggcagaagccatcgtcacatggagaggacaccttaccaagctactgacaacaccatatgagcggcaagagggctggcaactcgccgcctccaggttccagggaaccctttacctgtcagaagtagagacccctaatgccagggcccagcgcctggcccgcccaccacttctgcgagaactgatgtacatgggatataaattcgagcaatatatgtgcgcggacaagcctggcagcagccctgacccatctggagaggtgaatacgaacgtcgcattttgttcagtactgcggagcagattggggtcacaccccctgctgtttagtggcgaggttgactgtaccgacccccaggctcctagtactcagccccccacttgctacgtggaactgaaaacttccaaagagatgcaaagccccggacagtggcgcagtttctaccgccacaaattgctgaagtggtgggctcagtccttccttccgggtgttcccaacgtcgtggccgggttccgcaacccagacggtttcgtgagcagtctaaagaccttcccgaccatgaagatgtttgaatacgtgcgcaacgatagggatgggtggaacccatctgtgtgcatgaatttctgtgccgcttttctgtcctttgctcagagcaccgttgtacaggacgacccaaggcttgtccacctgttctcctgggagccgggtgggccagtgaccgtgagtgtccatcaggatgctccttatgcgttcttgcccatttggtacgtggaagccatgactcaagacctgccatcccctccaaaaactccaagtcccaagtag

SEQ ID NO: 114972 - DNA, 1191 bp, synthetic construct
  misc_feature 1..1191: note = Description of Artificial Sequence: Synthetic coding sequence
  source 1..1191: mol_type = other DNA
atggatccgcggggcactaaacggggcgcagagaagacagaggtggccgagccacggaataaactccctcgtcctgccccatctctgccaacggacccagccttatatagtggcccctttcccttttacagacggcctagtgaattgggatgtttttcactggacgctcagcgtcaataccacggcgacgcaagggcactaagatactacagccctccccccaccaatggacccggccccaactttgacctcagagacgggtatccggatcgttaccaaccgagagatgaggaggtgcaagaaaggctggatcacctgttgtgctggctcctagagcataggggccggctggagggggggccaggttggcttgcagaagccatcgttacctggaggggacatctgacgaaactgctaacaactccatacgagcgccaggaagggtggcagcttgcagccagtcgctttcagggaacattgtatctcagcgaagtcgagactcctaacgccagggcccagcgactggcccggcccccattgctccgagagcttatgtacatggggtacaaattcgagcaatacatgtgcgccgacaaacctggatcctcccctgatccttccggggaggtgaataccaatgtggcattttgcagcgtgttgcgctcgagactcggcagccatcctttgctattcagcggtgaggtggattgtacagatccacaggctcctagtacccagccgcccacatgctacgtggagctgaagactagtaaggagatgcacagccccggccaatggagatctttctaccggcacaaactgctcaagtggtgggcccaaagtttcctgcccggcgtgccaaacgtcgtcgctggatttaggaatcctgatggctttgtgtcaagcctcaaaacattccccacaatgaaaatgtttgaatacgtccgcaacgatagagacgggtggaatccgtcagtgtgcatgaacttttgtgcagcctttctttcgttcgctcagagcaccgtggtccaggacgacccccgcctcgtgcatctgtttagttgggagcccggtggccccgtcacagtctcggtgcaccaggacgcaccctacgcctttcttcccatttggtacgtggaggccatgacccaggaccttcctagcccaccaaagactccaagcccaaaatag

SEQ ID NO: 114973 - DNA, 1191 bp, synthetic construct
  misc_feature 1..1191: note = Description of Artificial Sequence: Synthetic coding sequence
  source 1..1191: mol_type = other DNA
atggacccgagggggaccaagcgaggagcagagaaaactgaagtcgccgagcctcgtaacaagctgccgcggcccgcaccaagcctccctacggaccccgctctatacagtggccccttcccattctaccgtagaccgagtgaacttgggtgctttagtctcgacgcgcagaggcagtatcatggcgacgccagagccctgagatattatagtccacctccaaccaatggccccgggcctaactttgacttgagggatggatacccagataggtatcaaccacgggatgaggaagtgcaagagcggctggatcacctcctttgctggttgctggagcataggggccgactggaaggggggcctggttggctggcagaagccattgtgacttggagagggcacttgacgaaactgctgactacgccatacgaacgtcaagaaggttggcagctggccgccagccggtttcaggggactctgtacctttcagaggttgagacaccaaacgccagggcccaaaggctggcgcggccacccctgcttagagaactgatgtatatggggtataagttcgagcagtatatgtgcgccgacaagccaggttcttccccggacccatccggcgaggtaaacactaacgtagctttctgttcggtcctccgatccagacttggctcacatccacttctctttagcggtgaagtggattgcactgatcctcaggccccgagtacgcagccgccgacctgttacgttgaattgaagacatccaaagagatgcactcccctggccaatggaggtcattctacagacacaagctgctgaagtggtgggcgcaaagctttctgccgggagtgcctaacgtcgtcgcggggtttcggaatccagatgggttcgttagcagcttgaaaacattccctacaatgaaaatgtttgaatacgtgagaaatgatagggatggttggaaccccagcgtgtgtatgaacttctgtgcggcgttcctgagctttgcccaatcaactgtggtccaggatgaccctaggttagtgcacctgttcagctgggaaccaggcggacctgtgactgtatcagtgcatcaagacgccccctatgcattcctcccaatttggtatgtcgaggccatgacgcaggatctgccctcccctccaaaaacgccgtcccccaaatag

SEQ ID NO: 114974 - DNA, 1191 bp, synthetic construct
  misc_feature 1..1191: note = Description of Artificial Sequence: Synthetic coding sequence
  source 1..1191: mol_type = other DNA
atggatcccaggggcacaaagcgcggcgcggagaagacagaagtggcagaacccagaaataaactaccacgccccgcacccagcctccccacagatcctgccttgtatagtggtccgttccctttctatcgacgccccagcgaactcgggtgtttctcactggacgctcagcgtcagtatcatggggacgcccgggctctgagatactacagccctccaccaacaaacggcccagggcccaatttcgacctccgcgacggttacccagatcggtaccagccaagggatgaggaagtgcaggagcgccttgatcatctcctctgctggctcctcgagcataggggacgcttggagggaggtccaggatggctcgccgaggccattgtaacttggaggggccaccttaccaagttgttgaccacgccctacgagcgacaggaaggatggcagcttgctgccagtcggttccaaggcacgctttatcttagcgaagtggaaacgccgaatgcccgggcacagcgactcgcaagaccaccactgctgagggaacttatgtacatgggttataagtttgagcagtacatgtgtgcagataaacccggtagcagtccggatcctagcggagaagttaacacaaatgtggctttctgcagcgtcttacgctccagattaggctcacatcccctgctgttttctggggaggtggactgcaccgacccacaggcccccagcactcagccaccgacctgctatgttgagctgaagacctcaaaagagatgcactcaccaggacagtggcgtagtttctacaggcacaagctgctgaagtggtgggcccagtcgtttctgccaggagtccctaacgtggtcgccgggtttaggaatcctgacggttttgtgtccagccttaaaacttttcctaccatgaaaatgtttgagtacgtgagaaacgacagggacggatggaacccctctgtctgcatgaacttttgcgccgccttcctgagctttgcccaatctacagttgtgcaggacgaccccaggctcgtgcatttgttctcctgggaacccggcgggcctgtcaccgtgtccgtacaccaggatgctccctatgctttcttgccaatttggtacgttgaagctatgactcaggatcttccatcacccccaaagaccccgtctcccaagtag

SEQ ID NO: 114975 - DNA, 1191 bp, synthetic construct
  misc_feature 1..1191: note = Description of Artificial Sequence: Synthetic coding sequence
  source 1..1191: mol_type = other DNA
atggaccctcggggcacgaaacggggtgccgaaaaaactgaagtggcagagcctagaaacaagttaccgcgacccgctccgagcttgcccacggatcccgccctgtacagcggacctttcccattttataggagaccctcagaattgggatgttttagcctcgatgcacaaaggcagtatcatggggatgcccgtgccctcaggtattatagccctccacctactaatggcccgggacctaatttcgacctgcgggacggataccccgaccgctaccagcctcgtgacgaggaggtccaagaacggctggaccacctgctttgttggctgctggagcatcggggccgactggagggaggaccgggatggttggctgaggctattgtcacctggcggggccatcttactaagttgctgactactccatacgaaaggcaggaggggtggcagcttgccgcgtctcggtttcagggcaccctgtacctgtctgaggtggagacccccaatgccagggcgcagaggcttgccaggcccccgcttctccgcgagcttatgtatatggggtacaagtttgagcagtacatgtgtgccgacaagccggggagcagcccagatccatctggggaagtgaacactaatgtggccttctgcagcgtgttgagatctagattaggctcacaccccctgctgttttccggcgaggtggactgtactgacccccaggcccctagcacccagcccccaacctgctacgtggagctgaagactagcaaagagatgcacagcccgggccagtggagatctttctatagacacaagctcctgaagtggtgggcccagtcttttctgccaggcgtccccaatgttgtcgccgggttccggaatcctgacgggttcgtcagcagtttgaaaaccttccctacaatgaaaatgtttgagtacgtccggaatgaccgggacggatggaatcccagcgtgtgtatgaatttctgtgctgctttcttgtccttcgcacagtcaacagtggtccaggatgacccgcggctggtgcaccttttttcctgggagccaggaggccctgttaccgtctctgtccatcaggacgctccctacgccttcttaccgatctggtacgtcgaggcgatgacccaggatcttccaagcccacccaagactccaagcccaaagtag

SEQ ID NO: 114976 - DNA, 1191 bp, synthetic construct
  misc_feature 1..1191: note = Description of Artificial Sequence: Synthetic coding sequence
  source 1..1191: mol_type = other DNA
atggacccccgcgggaccaagcgtggcgccgagaaaaccgaggtggcagagcctcggaacaagctccccaggccagcaccgtccctgccaaccgatccggccctctactccggacccttccctttctaccggaggcccagtgagcttgggtgttttagcctggatgcccagcgacagtaccacggtgacgctagggccctgagatactacagtcccccacccactaatgggcccggccccaattttgacttacgagacggatatccagaccgttatcagcctagagatgaagaggtgcaggaaagattggaccacctcctctgctggctcctggagcaccgaggccgtctggagggaggccccggatggctggccgaggccatcgttacctggcgtgggcacttgaccaaactcctcactactccttacgagcgccaagagggctggcagctggccgcttctcgatttcagggtactctgtatctgtccgaggttgagacccctaatgccagggctcaacggttggctcgacccccacttctgagagagctcatgtatatgggatataagttcgaacagtatatgtgcgctgataagcctggatcttcacctgatcccagtggggaagtgaacactaacgtggccttttgcagcgtgttaaggtccaggctcggtagccatccattattgtttagcggagaggtcgattgcaccgacccacaagcccccagtacccagcctcccacgtgctatgtggagctcaagacatcaaaggagatgcactccccaggccagtggcggagcttctatagacacaagctgctgaagtggtgggcccagagtttcctgcctggagtgcctaacgttgtggccggcttccggaaccccgacggctttgtcagttctctgaagaccttccctacaatgaagatgtttgaatacgtgaggaacgatcgcgatggttggaatcccagcgtctgcatgaacttttgcgccgcctttctgagcttcgcccagagtaccgtcgtgcaggacgaccctcgattagtgcacctgttctcctgggaacccggggggcccgttactgtttctgtgcatcaggacgcaccatacgcctttctgcctatctggtatgtagaggccatgacacaggaccttccttctccccctaaaaccccttctcctaaatag

SEQ ID NO: 114977 - DNA, 1191 bp, synthetic construct
  misc_feature 1..1191: note = Description of Artificial Sequence: Synthetic coding sequence
  source 1..1191: mol_type = other DNA
atggacccgcggggaacaaaacgcggtgcagagaagactgaggttgctgaaccccgaaataagctacctaggcccgctccctcactcccaacagaccccgccctatactctggcccattccccttctatcgcaggccctctgaacttggttgcttctcactagacgcccagagacagtaccacggcgatgcgcgggctctgcgctattattctcctccacctacgaacgggccgggcccaaattttgatctgagagatggataccccgatcggtaccaacctcgggatgaggaggtgcaggagagactcgatcacctgttgtgttggctgctcgaacataggggacggcttgaggggggcccaggttggctcgccgaggcaatcgtgacctggcgcggtcatctgacaaagcttttgacaaccccatacgagagacaagaaggatggcagcttgccgcctccaggttccagggaacgttatacctgtctgaggtcgagacacctaacgcacgtgcccaaaggctggcacgccccccgctcctgcgagaactgatgtacatgggatacaagttcgagcagtatatgtgtgccgacaagccgggctcgtccccagacccttctggagaagttaatacaaatgtggctttttgtagtgtgctgcgctctaggcttggctcccatccgctgcttttctccggcgaggtggactgcactgacccccaggccccaagcactcagcccccaacctgttacgtggagcttaagaccagcaaggagatgcagtccccgggccagtggagaagtttctatcgccataaactgctgaaatggtgggcacagagctttctgcctggagtccccaatgtggtggctggctttaggaaccccgatgggttcgtgagctccctgaaaacctttcccaccatgaagatgtttgaatatgtcagaaacgaccgggatggatggaacccatccgtgtgtatgaatttctgcgccgcctttctgtcttttgcccagtcgacagtcgtacaggatgacccccgcctggtccaccttttcagctgggagcctgggggacccgtcaccgtgagcgtacaccaagacgcgccatatgcgttcctaccaatctggtacgtggaagcaatgactcaggatttgccctcaccacccaaaaccccttcacccaaatag

SEQ ID NO: 114978 - DNA, 1443 bp, synthetic construct
  misc_feature 1..1443: note = Description of Artificial Sequence: Synthetic coding sequence
  source 1..1443: mol_type = other DNA
atgaacgcctccgaattccgacggagaggtaaagagatggtggactacatggccaattatatggaagggatcgaagggcgccaggtgtatcccgatgtggagcctggctatctgaggcccttaataccggcagcagcaccccaggaacctgacacctttgaggacatcatcaacgacgtggaaaagatcatcatgcctggggtgacccactggcatagcccatacttctttgcttactttccgactgccagttcgtatcccgcgatgctggctgacatgctgtgtggggcaatcgggtgtatcggctttagctgggcggccagtcccgcgtgcacagaactggaaacagttatgatggattggttggggaaaatgttagagctgcctaaggccttcctcaacgagaaggcaggggaaggaggcggtgtgatacagggctccgctagcgaggccacgctcgtagccttgctcgcagctagaacgaaagttattcatcgcctgcaagcagcctcccctgagctaacccaggccgccatcatggaaaagctagttgcatattctagtgatcaggctcactcttcggtcgaacgggccggactcataggcggtgtgaagcttaaggcgataccatcggacggaaactttgccatgagggcaagcgcattgcaagaggccttggagcgggacaaagccgcgggcctgattccattttttatggtcgccaccctgggtactaccacttgttgctctttcgacaatcttcttgaagtggggccaatttgcaataaggaagacatctggctgcatgtggacgccgcctatgccggtagcgctttcatatgccctgagtttcgtcaccttctgaacggagtcgaatttgctgacagttttaatttcaacccacacaagtggctgttagtgaatttcgattgctccgctatgtgggtgaaaaagagaaccgatctaactggagccttccggctggatcctacctacctcaaacactctcaccaggatagtggactgatcaccgactatcggcactggcaaatcccccttgggcggcggtttcggagcctaaagatgtggttcgttttccgcatgtatggtgttaaggggctgcaggcatatattagaaaacatgtccagctgtctcacgaatttgagtccttagtcaggcaggaccccaggttcgagatctgtgtagaagtgatccttggccttgtctgttttcggctgaagggatctaacaaagtaaacgaagctctattgcagcggattaactctgccaaaaagattcatctcgtgccctgccacctgcgcgataagttcgtgttacggttcgccatctgctcccgtactgttgagtctgcgcatgtccagagagcttgggagcacataaaagaacttgcagctgatgtcttgagagctgagcgagagtag

SEQ ID NO: 114979 - DNA, 96 bp, synthetic construct
  misc_feature 1..96: note = Description of Artificial Sequence: Synthetic coding sequence
  source 1..96: mol_type = other DNA
atgaacgctagtgagtttcggaggaggggcaaggagatggtggactatatggctaactacatggagggcatagaggggcggcaggtctatccgtag

SEQ ID NO: 114980 - DNA, 51 bp, synthetic construct
  misc_feature 1..51: note = Description of Artificial Sequence: Synthetic coding sequence
  source 1..51: mol_type = other DNA
atgaacgcgagcgagtttaggagacgaggtaaggaaatggtggattactag

SEQ ID NO: 114981 - DNA, 1443 bp, synthetic construct
  misc_feature 1..1443: note = Description of Artificial Sequence: Synthetic coding sequence
  source 1..1443: mol_type = other DNA
atgaatgcttctgaattccggaggagaggcaaggagatggttgactatatggccaactatatggagggtattgagggccggcaggtctaccctgacgtggagccaggctatctccgtcctctaattccagctgccgccccccaggaaccagacacattcgaggacatcattaacgatgtggagaagatcattatgccaggagtcacccactggcatagtccatactttttcgcttacttccccacagcctcatcttaccctgcaatgctagccgatatgctttgtggagccattggatgcatcgggtttagctgggctgcctctccagcgtgtaccgaattggagactgtgatgatggactggctgggaaagatgttagagcttccaaaagctttcctgaacgaaaaggcgggggaaggcgggggagttatccagggtagtgcatccgaggctactctggttgccctcttagctgcacgtactaaagtcatacatcggctgcaggcagcgtcacccgaattaacgcaggccgcaatcatggagaagttggttgcgtatagttccgatcaagcgcattcatccgtggagagagctgggctcatcggtggcgtcaaactgaaagcgatacctagcgatgggaatttcgctatgcgtgcatctgcactgcaagaggcactggaacgggacaaagctgctggcttgataccttttttcatggtggccacattgggaacaaccacgtgttgctccttcgataacctgctggaggtaggacctatatgtaacaaagaggatatctggctgcacgtggatgctgcctacgccgggtccgcatttatttgtccagagttccggcatctcctcaatggcgtggagttcgcagattccttcaactttaatccacataagtggttgttggtgaattttgattgcagcgcaatgtgggtcaagaagcgcactgacctgacaggagcatttagactggatcctacttatctaaagcactcccatcaggattctggactcataactgattaccggcactggcagatccctcttggacgtcggttccgatccttaaagatgtggtttgttttccgcatgtatggcgtcaaagggcttcaggcttatattaggaagcacgtgcagctctctcacgagttcgagagccttgtgaggcaggatccccggttcgaaatatgtgtggaggtgatactgggattagtgtgctttaggctcaagggttcaaataaagtcaacgaggctctgcttcagcgtattaacagcgcaaaaaaaatccacctcgttccatgccacctgcgcgacaagtttgtgctgcgttttgccatttgtagccggactgtcgagtctgcacatgtacagcgggcgtgggagcatatcaaagaacttgctgctgacgttctgcgggctgaacgcgaatag

SEQ ID NO: 114982 - DNA, 1017 bp, synthetic construct
  misc_feature 1..1017: note = Description of Artificial Sequence: Synthetic coding sequence
  source 1..1017: mol_type = other DNA
atgaatgcttccgaattccgccgaagaggaaaagaaatggtcgactacatggccaactacatggaagggatagaggggcggcaagtgtaccctgatgttgagccaggataccttcgcccgctgatcccagccgcagccccacaggagccagacactttcgaagacatcatcaatgatgtcgaaaaaatcatcatgcccggcgtaacacattggcattctccctacttcttcgcctactttcctactgcatccagctaccctgccatgttagccgacatgctttgcggagctattggttgcatcggcttttcgtgggcagctagtcctgcctgcactgagttagaaaccgtcatgatggactggctgggcaagatgttggagctacctaaagcttttctgaatgagaaggctggagaaggcgggggcgtgatacagggctccgcctcagaagctaccctggtggccctgttggccgcacgaaccaaggtcattcatcgcctacaggccgccagtcctgaattaacccaggccgcaatcatggagaagctcgttgcttattcatctgatcaggctcacagctccgtcgaacgggctgggcttattggcggcgtcaagctgaaagcgatcccctctgatggcaatttcgctatgagggcctctgccctgcaggaggcactcgaaagagataaggctgccgggctcataccctttttcatggttgccacattaggcacaactacttgctgctcctttgataatttgttagaggtcggacccatttgtaataaagaggatatttggttacacgtggatgctgcatacgccggatctgcctttatttgtccagaatttcgtcatctgttgaacggtgtggagtttgcggactctttcaatttcaatccccataagtggctcctagtgaacttcgattgtagtgcaatgtggtcccggcagccagtgagaatgctgcgtctaaagaagacctgcctggtgagtgcagtcgtccgccggtcctag

SEQ ID NO: 114983 - DNA, 1209 bp, synthetic construct
  misc_feature 1..1209: note = Description of Artificial Sequence: Synthetic coding sequence
  source 1..1209: mol_type = other DNA
atgaacgcaagcgagtttaggagaaggggtaaagagatggttgattacatggccaattatatggaaggaattgaggggagacaagtataccctgatgtggaaccgggctacctgcgtccgctcatcccggcagccgcccctcaggagcccgatactttcgaggacattatcaatgatgtggagaagatcattatgcctgggggatctgcctcggaagccacccttgtggcactcttagcggccaggaccaaggtgatacacagacttcaggcagcttcccccgagttgacacaggccgctataatggagaaacttgttgcttactcctccgatcaggcccacagtagcgtcgaacgggcaggcctcataggaggtgttaaactgaaggctattccctctgacggcaactttgccatgcgcgctagcgctctgcaggaggctcttgaaagggacaaggcggccgggttgattcccttcttcatggtcgctaccctggggacaaccacttgttgttccttcgataatctattagaggtaggcccgatatgtaataaagaagatatctggctccacgtggacgccgcgtatgcgggctctgccttcatctgcccagagttcaggcacctgctgaacggagtggagtttgcggattctttcaatttcaaccctcataaatggcttctagtgaacttcgattgctccgcgatgtgggtgaaaaaaaggacagacttgaccggcgcctttcgactggacccaacatatctgaagcattcccaccaagatagcggcctgatcacagattacaggcactggcagatccccctggggcgccgatttagaagcttgaaaatgtggtttgtgttcaggatgtatggagtgaaaggactgcaggcctatattaggaagcatgtccaactgtcccacgagtttgagtctctggtgagacaagatccacgatttgagatctgtgtggaagtgatcctggggttagtgtgttttcgacttaaagggtccaataaagttaacgaagcactcctccagaggatcaatagcgccaaaaagatccatttagttccctgtcatttgagggacaaattcgtcctacgctttgcaatctgcagtagaacagtggagtcagcgcacgtgcagcgggcctgggaacacataaaagagctggcggcagacgttctgagagcagagcgggaatag

SEQ ID NO: 114984 - DNA, 1164 bp, synthetic construct
  misc_feature 1..1164: note = Description of Artificial Sequence: Synthetic coding sequence
  source 1..1164: mol_type = other DNA
atgaatgcgagcgaattccgccgcaggggcaaggagatggtggactacatggctaactacatggagggcatcgagggccgtcaagtttacccagatgtggaaccaggttacctaaggcctttaattccggcagccgcaccccaggaacccgacaccttcgaggacattatcaatgacgttgagaaaatcattatgcccggagtaacacactggcactcaccttacttttttgcctacttccctaccgcctcctcctaccccgccatgttagctgacatgctgtgtggcgccatcggctgcattggattttcttgggcagcctccccagcatgcacagagctagagaccgtaatgatggattggctggggaaaatgttggaacttcctaaggcctttctcaacgagaaggccggtgaggggggcggtgttatccagatggttgccaccctggggactacaacatgctgcagctttgacaatctgctcgaggtgggccccatctgtaataaggaagatatttggctgcatgtggacgccgcctacgctggaagtgccttcatatgccccgagttccgtcacctgctgaatggagtagagttcgcagactcatttaattttaatccacataagtggctgttggtcaactttgactgctccgccatgtgggtgaagaagcgcacagacctcaccggagcctttagactagacccaacatatctcaaacacagccatcaagactctggcctgatcactgattataggcactggcagatccccctcggacggaggttcagatcactaaagatgtggtttgtgtttcgcatgtatggcgttaagggtttgcaggcctacatcagaaagcatgtgcagctgtcccatgagtttgagtctctggttcggcaggaccccagattcgagatttgtgtcgaggtcatcctggggctagtgtgcttcagattgaagggtagcaacaaagtgaacgaggctctcctgcaaagaataaactcagctaaaaaaattcatttagtcccttgtcatttaagggacaaattcgtgctgcggtttgctatctgttcgcgcaccgtggaatccgcacacgtgcagagggcatgggagcatatcaaagagctggctgccgacgtactgcgcgccgagagagagtag

SEQ ID NO: 114985 - DNA, 735 bp, synthetic construct
  misc_feature 1..735: note = Description of Artificial Sequence: Synthetic coding sequence
  source 1..735: mol_type = other DNA
atgcgggaggccgccttcatgtattccactgctgttgctatcttcttagtcatcctggttgcggcactacagggatccgccccaagggaatctcctttgccttaccatattccgctagaccctgagggtagtctggaattgtcatggaacgtgagttacactcaggaggctatccatttccaactacttgtgaggcgacttaaggctggtgtgctgttcggtatgtctgacaggggcgagctagaaaacgccgacctggtagtgctgtggaccgatggcgacactgcctacttcgctgacggcacagttcatctggtgtacggcatcctcgaagagcctttcagatcacttgaggctattaacgggtccggcctccagatgggactgcagagggttcagctgctgaaacccaacattccggagccagaactgcccagcgatgcctgtacaatggaagtgcaggcacctaatatccagattccctcccaggaaaccacatactggtgttatatcaaggagctccccaaaggcttctcacgccaccacatcatcaaatatgaacctattgtcaccaaggggaacgaggccctcgtccaccatatggaggtgtttcagtgtgcacccgagatggattctgtgcctcattttagtggtccgtgcgactctaaaatgaaacctgacaggcttaattactgtagacatgtgctggctgcctgggccctgggggccaagtag

SEQ ID NO: 114986 - DNA, 1854 bp, synthetic construct
  misc_feature 1..1854: note = Description of Artificial Sequence: Synthetic coding sequence
  source 1..1854: mol_type = other DNA
atgcccgctctgtctcggtgggcttcacttccggggccatcaatgcgcgaggctgcatttatgtattccacagcagtcgctatattcctggttatcctcgtggcagctctccaaggtagcgcaccccgcgaaagccccctcccttatcatatcccactggaccccgagggttccctagagctgagctggaatgtctcctacacacaggaagcaatccactttcagctacttgttcggcggcttaaggccggggtgctgttcggcatgtccgataggggggagctggagaatgctgacctggtagtgctctggacagatggagatactgcttactttgcagacgcctggagcgatcagaagggtcaaatccacctggatccccagcaggattaccagctgctccaagtgcagagaactcccgagggactgactttgctgttcaaaagaccatttggtacttgcgaccctaaggactacctgatagaagatggcactgttcacctggtgtatggtatcctcgaggaacctttcagatcgcttgaagctatcaatggctctggcctgcagatgggtcttcagcgagtgcaattgctgaagccgaatatacccgagcctgagcttccaagtgatgcatgtaccatggaggtccaagcgcccaacatccagataccatcccaggaaaccacttactggtgctacattaaggagctcccaaaagggttctctcggcatcatattattaaatatgaacccatagtgactaaaggcaacgaagccctggtacaccatatggaggtgtttcaatgtgcacccgaaatggattcagtcccccattttagtggaccatgcgatagcaaaatgaagcctgacaggctcaactactgtaggcatgtcctggccgcatgggcgctaggagcaaaggctttttactacccagaggaagcggggctggcattcggaggtccgggctcttctcgttacttgcgattggaggtgcattaccacaatccactggtcattgaaggaagaaacgactcctctggtataaggctctattatacggctaaactcagaagattcaacgcaggaattatggagctggggctagtttacactccagtcatggcaatccctccacgagaaactgcttttatccttactggttattgcaccgataaatgcacacaattggccttacccccctctggaattcatatctttgcatcccagttacacactcatctgacaggcagaaaggtggtgacggtgctcgtcagagatggcagagagtgggagattgttaatcaggataaccattatagtccgcattttcaggaaataaggatgttgaagaaggtggtgagtgtacacccaggagacgttctgatcacctcatgtacctataacacagaggatcgagagcttgctaccgtcggggggttcggaatcctggaggagatgtgcgtgaactatgtgcattactacccacagactcagctcgagctctgcaaatctgctgtcgacgccggatttctccagaaatactttcacctgataaatagatttaataacgaagacgtctgtacttgcccccaggcatctgtgagccagcagtttacttctgttccttggaattccttcaatcgcgacgttcttaaagcgctgtactcattcgcaccaattagcatgcactgtaataagagttccgcagttcgcttccagggggaatggaatttgcaacctctgcctaaggtgatatcaaccctggaagaacccactccccaatgtcccacttcgcaggggaggtctcctgctggacccacggttgtgagtatcggcgggggaaaaggctag

SEQ ID NO: 114987 - DNA, 1341 bp, synthetic construct
  misc_feature 1..1341: note = Description of Artificial Sequence: Synthetic coding sequence
  source 1..1341: mol_type = other DNA
atgaggaccttaaacacgagcgccatggatggaacagggctggtggtggaacgtgacttttctgttcgaatattgactgcctgtttcttgtccctgcttatactgagtacgttgctgggcaatacactggtttgcgctgccgtcattagattccgacaccttaggagcaaggtgaccaacttttttgtcataagcctggcggtctccgacctgttagtcgctgtgcttgttatgccatggaaagctgtagcagagatagctggcttttggcccttcggaagcttttgcaatatatgggtggcattcgatatcatgtgctccactgcttcgatcctcaatttgtgtgttatttctgtggaccgctactgggctatttcctctccttttcgctatgaacgaaagatgactcctaaggccgcattcatactaatctccgtggcctggaccttgtccgtccttatcagtttcattcctgtgcaactttcctggcacaaagcgaagcccacatctccctccgacgggaacgccaccagcctggccgagacaatcgacaactgtgacagcagcctgagtcggacctacgccatctctagtagcgtgatttcattttatatccctgtcgcaatcatgatagttacgtacaccaggatctaccgaatcgcccagaagcagataagacggatcgctgcattggagcgcgccgctgtgcatgcaaagaactgccagacgacaactggcaacggaaaaccagtggaatgtagtcagcctgagtcatccttcaagatgtccttcaagcgtgagaccaaggtgctcaaaacactcagcgtgatcatgggagtgtttgtttgctgctggttgccgttctttatccttaattgtatcctgccattctgcgggtcaggcgagacccagccattttgcatcgactcaaatacattcgatgtgttcgtctggttcggatgggcaaactcgtccctaaacccgatcatttacgctttcaatgccgattttagaaaagcctttagcactctcctgggatgctaccggctctgtcctgctaccaataacgccattgagacagtttccattaacaataatggcgccgcaatgttctcctctcatcatgagccgagaggctccatctcaaaagagtgtaatctggtctacctgatccctcacgctgttggttcgtctgaggaccttaaaaaagaagaagccgccgggatcgctcgacccctggagaaactctctcccgcactgtctgtgattttggactacgacacagatgtctccctcgagaagattcaaccaattacccaaaacggccagcaccccacgtag

SEQ ID NO: 114988 - DNA, 1341 bp, synthetic construct
  misc_feature 1..1341: note = Description of Artificial Sequence: Synthetic coding sequence
  source 1..1341: mol_type = other DNA
atgagaaccctaaatacaagtgccatggacggcacagggcttgttgtggaacgggatttttcagtgagaatcctcacagcttgttttctgagtctgcttatcctatccactctcctgggaaacactctggtttgcgccgccgtgataaggttcaggcacctgaggtctaaagtgacaaactttttcgtgatttcccttgctgtgagcgatttgctggtggccgtgctcgtaatgccctggaaagcagtggccgaaatcgctggcttttggccatttggcagtttttgcaatatttgggttgcattcgacataatgtgttctacagcctccatattgaatctgtgtgtgatcagtgttgacagatattgggctatctcgtcaccttttaggtacgaacgcaagatgacacccaaggcagcttttatccttatatctgtggcttggacactatcagtgttgatctcttttattccagtccagctgtcgtggcataaggcaaagccaacgtcgccaagtgacggcaatgccacttcacttgccgagacgatcgataattgtgacagttcgctatccaggacctacgcgatctcaagctcagttatctccttttacatacctgtagcaatcatgatcgtcacctacactaggatctatcggatagcccagaagcaaattcgccggatcgctgccctggagcgcgcagcggtgcatgcgaagaactgccaaactacaactggcaacggcaagcccgtggagtgcagccagcctgagtcatccttcaagatgtccttcaagagggagacgaaggttctgaagacactcagcgtgatcatgggtgtattcgtgtgctgctggctgccattcttcattctcaattgcattctgcctttttgcggaagtggcgagactcagcctttttgcatagattccaacactttcgatgtgtttgtgtggttcggctgggcaaactcctctctcaatccaatcatatatgcttttaacgctgactttcgtaaagctttttcgactctcctaggctgctatcggctttgccccgcaacaaataacgccattgagacggtttccatcaataataacggcgcggcaatgttcagttctcaccatgagccgaggggttcaatatcaaaggagtgtaacctcgtttatttgattcctcacgccgtgggctcttcagaagaccttaagaaagaggaagcggcgggaatcgcccggcccttggaaaaactgtccccggcactatccgtgattttggattatgatacagatgtgagtctcgagaaaatccagcccataactcagaacggccaacacccaacgtag

SEQ ID NO: 114989 - DNA, 1245 bp, synthetic construct
  misc_feature 1..1245: note = Description of Artificial Sequence: Synthetic coding sequence
  source 1..1245: mol_type = other DNA
atggatcctctgaatcttagctggtacgatgatgatctggagcgacagaattggagccgcccattcaatgggtccgacggaaaagctgaccgaccacattataactactacgcaaccctcctgacactactgattgccgtgattgtctttggaaatgtcctcgtgtgtatggccgtgagcagggagaaggcgctccagacaaccacgaactatctgattgtatctctggccgtagctgatttacttgtggccactctggtcatgccttgggtagtgtatttggaggtcgttggggagtggaaattcagccgaatccactgcgatatctttgtgactcttgatgtgatgatgtgcactgccagtatcctgaatctgtgcgctatcagcattgaccgctatacagctgttgccatgccgatgctctataacacaaggtactcctccaagcggagggttaccgtgatgatttcgatcgtctgggtactgtcatttacaatctcatgtcccctgctgttcgggctgaataacgcagatcagaatgaatgcattatcgctaatccagcgttcgtcgtctacagtagtatcgtcagtttttacgtgccattcattgtgacacttctcgtgtacatcaaaatttacatcgtgttgagacggagacgcaaacgggtcaacacaaagagaagttcaagggccttcagagcacacttaagagctccccttaaagaagcagcccggcgtgctcaagagctggagatggaaatgctgagttccacatcaccaccagaaagaactcgctactctccaatccccccttcccaccaccagttaacactgcctgacccatctcaccacggattacattctactcctgactcccccgctaagcctgagaaaaacgggcatgccaaggatcatcctaaaattgccaagattttcgagatccagacaatgcccaacggcaaaacaagaacatctctgaagaccatgagccggcgtaagttgtcacaacagaaggaaaagaaagcaactcagatgctggccatagtactgggcgtgtttataatatgttggctgcccttcttcattacccacattctcaacatccactgcgactgtaacatccctccggttctgtattcagcctttacctggctcgggtatgtgaattcagccgtgaacccgattatatacaccacatttaatatcgaatttaggaaggcattcctgaaaatcttgcattgctag

SEQ ID NO: 114990 - DNA, 1338 bp, synthetic construct
  misc_feature 1..1338: note = Description of Artificial Sequence: Synthetic coding sequence
  source 1..1338: mol_type = other DNA
atggacccattaaacctaagctggtatgatgacgatcttgagaggcagaattggtccagaccctttaacgggagtgacggaaaggcagaccgccctcactacaactattacgccacactgctgacgctgctgatcgcggtgatcgtcttcgggaatgtgctggtgtgtatggcagtgtctagggaaaaagccttgcagacaaccacaaactacctgatcgtctcattagccgtggcagacctgctggtggctacattagtgatgccctgggtcgtttatctggaggtggttggggaatggaaattctccaggattcactgtgacatttttgttacacttgacgtaatgatgtgcacagcgagcatcttgaatctatgtgcgatatcaatcgatcgctacacagcagttgcaatgcccatgttatataacacacgatattctagcaaaagacgtgtcactgtgatgatttcaattgtgtgggttctcagcttcacgatcagctgtccactgctgttcggcctgaacaatgccgatcaaaatgagtgcatcatcgcaaatccagcctttgtggtctactcctcaatcgtgtcattttacgtccccttcatcgtcacgttgctggtttacatcaagatttatatcgtccttcggaggagacggaaacgcgtgaataccaaacggagcagccgagcatttcgcgcccacctgcgcgctcctcttaaaggcaactgtactcaccccgaagatatgaaactttgcactgtaattatgaagtcaaacggaagcttcccggttaatcgcagaagggttgtgcaagaggccgccagaagagcacaggagctagagatggagatgcttagttcaacttcgccacccgagagaacacggtattcaccgatccccccatcacatcaccagctgacactgccagacccatcccaccacggtttgcactcaaccccagacagccccgccaagccagaaaaaaatggacatgccaaagatcacccgaaaattgcaaagatctttgagatacagactatgcccaacggaaagacacgaacgagcctgaaaactatgtccagacggaaactgtcacagcagaaggaaaagaaagcaacccagatgctggccattgttctgggagtgtttatcatctgctggttgccattcttcatcacgcatattctcaacatccactgtgactgtaatattccaccagtcctttacagcgcatttacttggcttggctatgtgaattccgcggtcaaccccatcatctacactaccttcaacattgagttccgcaaagcctttctgaaaatcctgcattgttag

SEQ ID NO: 114991 - DNA, 1332 bp, synthetic construct
  misc_feature 1..1332: note = Description of Artificial Sequence: Synthetic coding sequence
  source 1..1332: mol_type = other DNA
atggatcctctgaacctgagctggtacgatgatgatctagagaggcagaactggtcacggccctttaacggctctgatggcaaggcggaccgaccgcactacaattattacgccaccctgctcaccttactcatcgctgttatcgtcttcggcaacgtcctggtgtgtatggccgtaagtcgtgaaaaggctctgcagaccaccactaattacctgatcgtaagccttgcagttgccgatttgctcgtggctacgcttgtgatgccctgggtggtgtatctcgaagtagtcggggagtggaagttctccagaattcactgcgacatttttgtgactctcgacgtcatgatgtgtacagcgtccattctgaatctgtgtgccatcagtattgacagatacaccgctgtcgccatgccaatgctgtataatacgaggtactcttcaaagagaagagtcacagtgatgatctctatcgtgtgggtcctttcattcacaatttcttgccccctgctgttcgggttgaataatgccgaccagaacgagtgcatcatagccaaccctgccttcgtggtgtactcttccatcgttagcttttatgtcccgttcatcgtaacattattggtctacatcaaaatttatatcgtgctacggcggaggagaaagagggtcaacacaaagaggagtagtagagcctttagggcccatttaagggctcctttaaagggcaattgtacccaccccgaggatatgaagctctgtacggtaataatgaaaagcaatggttccttcccagtgaacaggcgacgcgtcgaggctgcaagaagagctcaggaactggagatggaaatgctgagctctacgtcaccccctgaaaggacgagatacagccccattcccccatctcaccaccagttgactctccccgaccccagtcatcatggccttcatagcactcccgacagcccggcaaaacctgaaaagaatggacacgccaaggaccatcccaaaatagccaaaattttcgaaattcaaacaatgcccaatggaaaaactcggacaagtctgaagaccatgagtcgcagaaaactgtctcagcaaaaagaaaagaaggctacacagatgctagcgatcgttctgggggtgttcattatctgttggcttccattcttcattacccatatcctgaacattcactgcgactgtaacataccacccgtgttgtatagcgccttcacctggctcggatacgtaaattctgccgtgaaccccatcatttacaccacatttaatattgagtttcgtaaggctttcctgaaaattctgcactgttag

SEQ ID NO: 114992 - DNA, 1338 bp, synthetic construct
  misc_feature 1..1338: note = Description of Artificial Sequence: Synthetic coding sequence
  source 1..1338: mol_type = other DNA
atggaccccttgaatttatcgtggtacgatgacgacttagagcggcagaattggtctcgcccatttaatggatccgacggcaaggccgataggccacattacaattactatgctactttgttgaccctgctgatcgccgtgattgtctttgggaatgttctggtctgtatggcagtcagtagggagaaggcgctccagacaacaaccaattaccttatcgtgagtctcgcagtcgccgacttgctcgtcgccacgcttgttatgccatgggtcgtttatctcgaagtggtcggagaatggaaattctcacgcattcattgtgacatattcgtcactcttgatgttatgatgtgcactgcttctatcttaaacctttgcgcgattagcatcgataggtataccgccgtagctatgccaatgctgtacaacacccgatatagctctaaacgacgcgttacggttatgattagcatcgtctgggtgctgtcgtttacgatttcttgtcccctgctgttcggactgaataacgcggaccagaatgagtgcattattgctaatcctgcgtttgtagtatattcgagcattgtgtctttctatgtccccttcatcgtgacactgttagtgtacatcaagatatatatcgtgttgagacgccgccgtaagcgggtgaataccaaacggagcagccgggccttccgagcgcaccttagagccccgcttaagggcaactgtacgcatcctgaggatatgaaactatgcacagtgatcatgaagagcaatggcagctttcccgtaaaccgtaggagagtagtgcaagaagccgctcgcagggcccaggaattggagatggagatgctgagcagcacctctccacccgaaagaacccgatactcccctattccgcctagtcatcaccagctcaccttgccagacccttctcaccacggactgcacagcaccccggactcacccgcgaaacctgaaaaaaacggtcacgccaaagaccacccaaaaatcgcgaagatctttgagatccaaactatgccgaatggcaagacacgaaccagcctgaagacaatgagcaggcgcaagctaagccagcagaaggagaaaaaggctacgcaaatgctggctatcgtgctcggcgtatttattatctgttggctgccctttttcataactcacattctgaacatccactgcgactgcaacattcccccagtcctctattctgcattcacgtggctgggttacgttaactcagccgtgaaccccatcatctacactacattcaacatcgagtttcgaaaggcttttctgaagattcttcactgctag

SEQ ID NO: 114993 - DNA, 24 bp, synthetic construct
  misc_feature 1..24: note = Description of Artificial Sequence: Synthetic coding sequence
  source 1..24: mol_type = other DNA
atggatcccctgaaccttagctag

SEQ ID NO: 114994 - DNA, 1332 bp, synthetic construct
  misc_feature 1..1332: note = Description of Artificial Sequence: Synthetic coding sequence
  source 1..1332: mol_type = other DNA
atggaccccctgaacctgtcctggtatgacgacgacctggagaggcagaattggtccaggccctttaatggatcggatggcaaagccgatcgcccccattataattactatgccactctgctgaccctcctgattgccgtgatcgttttcggtaacgtgctcgtgtgtatggcagtttcacgtgagaaggcactccagacgacaacaaattacttaattgtgtccctcgctgtggccgatttactcgtcgcgacactggtcatgccgtgggtcgtgtacctggaagtggtcggcgaatggaaatttagccgcattcactgcgacatatttgtgacgctggacgtcatgatgtgcaccgcaagcatcttgaacctgtgcgccatctcaatagatcgctacacggcagtggccatgccgatgctgtacaatacccggtattcttcaaaaaggagagtgacagtgatgatctccattgtttgggtcttatccttcactattagctgtcctctgctgtttggtctgaacaacgctgaccagaatgaatgtatcatcgcaaaccccgcgtttgttgtatattccagtatcgtgtcgttctacgtgccctttattgtgaccttattagtgtatattaagatttacatcgttctgcgcagaaggcgcaagagggtgaacactaaaaggtccagccgggcctttcgcgcccatttgagagcacctctgaagggaaattgcacccaccccgaggatatgaaactctgcaccgtcatcatgaagagcaatggaagctttcccgtcaatcgacgaagagttgaggccgcacggagagctcaggagttggagatggaaatgctttcttcaacttcccctcctgaaagaactcgctatagcccaatccctccaagccaccatcagttgactctacctgatccatcccaccatggcttacatagtacacccgattcaccggcgaagccagagaagaacggccacgcaaaagaccatccaaagatcgcaaagatctttgagatccagactatgcccaacggcaaaactagaacatctctgaagacaatgagcagacggaagctcagccaacagaaagaaaagaaagccacccagatgctggccatcgttcttggagtgtttattatctgctggttacccttcttcattacccacattcttaatattcactgcgattgcaacattccccccgtgctctactccgcattcacctggctgggctacgtgaactccgccgtgaatccaatcatttacacaaccttcaatatcgaattccgcaaagcctttctgaagattctgcactgttag

SEQ ID NO: 114995 - DNA, 534 bp, synthetic construct
  misc_feature 1..534: note = Description of Artificial Sequence: Synthetic coding sequence
  source 1..534: mol_type = other DNA
atggatcctctcaatttgtcttggtatgatgacgacctagagaggcagaattggtccagaccgtttaatgggagcgacgggaaggctgacagaccacactataactactacgccaccttgctcacgctgctcattgcagttattgtgtttgggaatgtcctggtatgcatggctgttagtcgtgagaaggccctccagacgacaacgaattacctgatcgtaagtttggcagtggctgatctgcttgttgctacactggtgatgccctgggtagtgtacctcgaagtcgttggagagtggaagttctccaggatacactgcgacatctttgtgacattggacgtgatgatgtgcacagcctcaatcctgaatctgtgtgcgatcagcatcgaccgatacactgccgttgctatgccaatgctctataatacccgctatagctctaaacgacgtgtcacagtcatgatctctattgtctgggtcctgtcttttacaatcagctgcccactgctgtttggcctgaacaatgcatag

SEQ ID NO: 114996 - DNA, 1329 bp, synthetic construct
  misc_feature 1..1329: note = Description of Artificial Sequence: Synthetic coding sequence
  source 1..1329: mol_type = other DNA
atggaccctttaaatctgagctggtatgatgacgatctggagcggcagaactggagccgtccatttaacggcagcgacggaaaagcggataggcctcattacaactactatgctaccttattgacactcctgatagccgtaattgtttttggtaatgtgcttgtgtgtatggcagtctcccgggaaaaagcactacagacaaccaccaattacctgattgtctcactggctgttgcagatctgctagtggctacgctcgtgatgccgtgggtggtgtacttggaagtaggcgagtggaagttcagccggatccattgcgacatcttcgttaccctagacgtgatgatgtgtactgcgtcaattctcaacctctgcgcaatttctatcgaccggtacacggcggtagcaatgcccatgctgtacaacacacgctactctagtaagcgcagagtgaccgtgatgatctctatcgtgtgggtcctcagttttactatcagttgccctctcttatttggactaaataacgctgaccagaatgaatgtatcatagccaacccagctttcgtggtttactcttctatcgtaagtttctatgttccattcatcgtaaccctcctcgtgtatatcaaaatttatatcgttttgagacgaaggcgcaagcgtgtcaatactaaaagaagttcacgcgcattccgagctcacttgagagccccgcttaagggtaactgcacacatccagaggatatgaaactctgcacagtgataatgaagagcaatggttcttttcccgtgaatcgaagaagagtggaagctgcccgacgcgcccaggagctggagatggagatgctcagttcgacctctcctcctgagcggacccggtatagtcccattcctccgagccaccaccagctcaccctgcctgacccttctcatcacggactacattccaccccagattctccagccaagcctgaaaaaaatggacacgccaaagatcacccaaaaatagccaagatcttcgagatccagacaatgcctaacggaaaaacacggaccagcctaaaaaccatgtcaaggaggaaactctcacagcaaaaggagaagaaagccactcagatgctcgcgatcgtactaggcgttttcatcatttgctggctaccatttttcataacacacatcctgaacattcattgcgactgtaacatcccccccgtactgtactccgccttcacttggctgggttatgtgaacagcgctgtcaaccctattatatataccacttttaacatcgagttcagaaaagcttttctgaagattctgcactgctag

SEQ ID NO: 114997 - DNA, 1029 bp, synthetic construct
  misc_feature 1..1029: note = Description of Artificial Sequence: Synthetic coding sequence
  source 1..1029: mol_type = other DNA
atggcatccctgagccagcttagtggccatctcaactatacctgcggtgccgagaactctaccggggcgagccaagcccggcctcacgcatattacgcactgtcttattgcgccctaatcctggccatcgtgtttggaaacggactcgtctgcatggccgtcttgaaagagagagccctacagactaccactaactacctcgtagtgtcccttgcggtggctgatcttctagtcgctaccctcgtaatgccatgggttgtgtatctcgaggtaacaggtggtgtgtggaacttttcaagaatctgctgtgatgtgttcgtgacgctcgacgttatgatgtgtactgcctctatccttaacctctgcgctattagcatcgaccggtacactgcagttgtcatgcctgttcactatcagcacgggaccggacagtcttcttgtcgccgggtagctctgatgattacagccgtttgggtactggccttcgcagtgagctgcccactactcttcgggttcaacacaacaggagaccctactgtctgcagcatctcgaatcctgattttgtgatctattcctcagtggtgtctttctatctgccatttggagtcacggtgcttgtctacgcaagaatttacgttgtcttaaaacaacgccgtcgcaagcggatcttgaccaggcagaactctcagtgtaatagcgtgcgccccggatttcctcagcagaccctgtccccagatcccgcacacctcgagctgaaacgttattactccatctgccaagataccgccctcggcggacccggatttcaggaacgcggcggcgagttaaagcgggaggagaagacgcggaactcgctcagtgctacatcaggggaggagggtaaccccaatgggggacattgcgcttggggcttgcattgcctccttgctgccctcctccttgatccttgcagccagtacccactgcctgacatgcccagagtaccgagggcactgcagtgccacgatatggctggactaagggagtag

SEQ ID NO: 114998 - DNA, 1104 bp, synthetic construct
  misc_feature 1..1104: note = Description of Artificial Sequence: Synthetic coding sequence
  source 1..1104: mol_type = other DNA
atggcaagcttatctcaactgagcgggcacctgaattatacctgcggcgccgagaacagtaccggggctagccaggcccgtcctcatgcttattacgccttaagttattgcgcccttatactcgctattgtctttgggaacggtctggtctgtatggctgtattgaaggaacgcgccctgcagacaaccaccaattatctggttgtatccctagcagttgctgatctgctggtcgcaactttagtgatgccctgggtggtctatttggaggttacaggtggcgtctggaacttcagccgaatctgttgcgatgtattcgtgacactcgatgtgatgatgtgcactgcctccatcctgaatctgtgtgccatctccatcgacaggtatactgctgtggtcatgcctgtgcattaccagcatggaactggccagtcctcatgtcgtagggtggctctgatgatcacagccgtttgggttctggcttttgccgttagctgtccactgctgtttgggttcaacactacgggtgaccctacagtttgttctatctctaacccggatttcgtgatatatagttccgttgtctctttttacctgccatttggcgtaaccgtgttggtgtacgctcgtatctacgtggtcctgaagcagcgccgccggaaacggatccttacaagacagaacagccaatgtaactcagtcaggccagggttcccccaacagaccctgtccccagatcctgctcaccttgagcttaagagatactattcaatttgtcaggacacggccctcggcggccctgggtttcaggagaggggaggagagctgaagagagaagagaagactcggaatagcttgatgcctctgagagagaagaaggcgacacagatggttgccatagtcctcggagcgttcattgtatgttggctcccattcttccttactcacgtactcaatacacattgccagacatgtcatgtgtcccccgagttatattctgctactacttggctgggttacgtcaattctgccctgaatcctgtgatttacaccacttttaatatcgagtttcgcaaagcctttctcaagatcctatcctgctag

SEQ ID NO: 114999 - DNA, 1203 bp, synthetic construct
  misc_feature 1..1203: note = Description of Artificial Sequence: Synthetic coding sequence
  source 1..1203: mol_type = other DNA
atggcttccctcagccagttgagcgggcatctgaactacacgtgtggtgccgagaacagcactggcgcttctcaggccaggccacacgcctactatgctttgtcgtactgtgccttaattctcgcaatcgtcttcgggaacgggcttgtttgcatggctgtcctgaaggaacgcgccctgcaaacaactactaattacctagtggtatctctggccgtggccgatcttcttgtggccaccctggttatgccatgggtggtctatctggaagtgactgggggcgtttggaattttagtcgaatctgctgcgacgttttcgtcaccctggacgttatgatgtgcacagctagcattctcaatctgtgtgcgatcagcatcgaccgctatacggccgttgtgatgcctgtgcactaccagcatggtaccgggcagagcagctgtaggcgcgtggctttgatgatcacagccgtctgggtgctcgccttcgccgtgagctgtcctctgctgtttggctttaacacaactggagaccccactgtgtgttctatttctaaccctgactttgtgatttactcaagtgtcgtgagtttctaccttccttttggcgtgactgtgctggtctatgcgaggatctatgtcgtgctgaaacaaaggcggcggaaacgcattctcacacgccaaaatagtcaatgcaacagtgttcgtcctggcttcccccagcaaacccttagtccagaccccgcccatctggagctgaaacgatactattctatctgccaggatacagcccttggcggccccgggttccaagagaggggtggggaactgaagagagaagagaagactagaaactctctgtccccaaccatcgcaccaaagctcagcctcgaggtacgaaaactcagcaatggtcggctttctacttcactgaagcttggaccgctccagccaaggggcgtgccattgcgggagaagaaggctacccagatggtggccattgtgctgggcgcctttattgtttgttggctaccttttttcctgacgcacgttttgaatacccactgccaaacgtgtcacgtgtctcctgagctctactcagcaacgacttggctcggatatgtgaacagcgccttaaatcccgtgatctatacgacattcaacatcgaatttcgcaaagccttcctcaagatcctgagttgctag

SEQ ID NO: 115000 - DNA, 1203 bp, synthetic construct
  misc_feature 1..1203: note = Description of Artificial Sequence: Synthetic coding sequence
  source 1..1203: mol_type = other DNA
atggctagcctgtcacagttgagcggacaccttaactatacctgcggcgccgaaaatagcactggcgcttcgcaggccagaccgcatgcctactacgcactttcctattgcgcccttattttagccatcgtgtttgggaacggcctggtttgcatggctgttctgaaagaaagggcacttcagactactacaaactacttggtggtaagcctcgcagtagctgacttgctggttgcgactctggtgatgccgtgggtggtgtatttggaggttacaggcggcgtctggaacttctcccgcatctgttgtgatgtgtttgtgaccctagatgttatgatgtgcactgcgtccatcctaaacctctgtgcaatcagcatagaccgatacacggcggtcgtgatgcctgtgcattaccagcacggcacaggtcagagctcgtgtcgtcgagttgcccttatgattaccgccgtctgggttttggctttcgcggtaagttgtccgcttctgtttgggttcaacaccactggagacccaaccgtctgcagtattagcaacccagacttcgtcatctacagttcagtggtgtcattctacttacccttcggcgtcacagtgcttgtctacgcacgcatttatgtggtcctgaagcagaggaggagaaagaggatacttacccgccagaactcccagtgcaacagcgtaaggccagggttcccacagcaaactctaagccctgatcccgcccatttggagcttaagcgttactacagtatatgtcaagatacagctttgggtggaccgggattccaggagaggggaggggaactcaaaagagaggagaagactcgcaactccctgtctcctaccatagcgccaaagctatctctggaggtccggaaactgtctaacggaaggctctctacatcactgaaactggggccactccagcccagaggagtgccactgagggagaagaaagcgacacaaatggtggcgatcgtgctgggggcattcatagtgtgttggctgccttttttcctaacgcatgttctcaatacccattgtcagacctgccatgtatcccctgaattatattccgcaactacctggctcggttatgtcaacagcgcacttaacccagtgatttacactacattcaacattgagttccggaaggcttttctaaaaattctgtcttgttag

SEQ ID NO: 115001 - DNA, 1203 bp, synthetic construct
  misc_feature 1..1203: note = Description of Artificial Sequence: Synthetic coding sequence
  source 1..1203: mol_type = other DNA
atggcctctctgagccagctttcaggtcacctcaattacacatgtggcgcagagaactctaccggcgcctcgcaggctcggccccacgcatactacgccctctcctattgcgcgttgattctggccatcgtgtttgggaacggactcgtctgtatggctgtgttgaaagaacgcgctcttcagaccacaacaaattatttggtggtatctctcgccgtggccgatctgttagtggcaacactcgtcatgccttgggtggtgtatctcgaggtgaccggcggtgtgtggaacttcagtcgcatctgttgtgatgtcttcgtcacactggacgtgatgatgtgtactgcgagcatcctgaacctttgtgcaatatctatcgaccgttacaccgcggttgtgatgcccgtgcactaccagcacgggacagggcaaagtagttgtaggagagtcgcccttatgatcacagccgtgtgggtgctggcttttgctgtttcttgccctctgctgtttggttttaatacaactggcgatccaactgtgtgtagtataagcaaccccgattttgttatttactcttcagtggtgtccttttatctgccttttggagtgacggtgctagtttatgctcgcatatacgtcgtgctcaaacagcgcaggcgaaagagaatcttaaccagacaaaattctcagtgcaatagcgtgaggccaggcttcccgcaacaaacactttccccagatcctgcacatctggagctaaaaagatattattctatatgccaggataccgcattgggggggcccggcttccaggagcggggaggggaattaaagcgcgaggaaaagactcgcaattctctaagtcctacaatcgcccctaaattatctctagaagtcaggaaactctctaacggcaggctctctactagcctgaaactcggacccttacagcctagaggggtgcccttaagagagaagaaagccacacagatggtagctattgtgctgggcgcgtttatagtgtgctggctccctttctttttgacacacgtgttgaacacacattgccagacttgtcacgtgtcacctgagctctattccgccaccacttggctaggctacgtcaattctgcactcaatcctgtaatctacaccacatttaatattgagttccggaaagccttcctgaagatacttagctgctag

SEQ ID NO: 115002 - DNA, 1260 bp, synthetic construct
  misc_feature 1..1260: note = Description of Artificial Sequence: Synthetic coding sequence
  source 1..1260: mol_type = other DNA
atgggtaatcggagtaccgcagatgcagacggcctcctcgcaggccggggccctgctgctggcgcctctgctggtgctagcgctggactcgccgggcagggggcagcggctctggtcgggggtgtcttgctaattggggccgttttggctggcaacagtttagtgtgcgtcagcgtggccaccgaacgcgctctgcaaacccccacaaactctttcatcgtgtcactggcagcagccgatctcctactcgccctgctcgtacttccactctttgtctatagcgaagtgcagggcggcgcgtggttgttgagtccacggctgtgcgatgcgcttatggcaatggatgtgatgttgtgcacagccagcatattcaatttgtgcgctatctccgtagaccgcttcgttgctgtcgcagtgccattaagatataaccggcaggggggctccaggaggcagttgctcctaattggcgccacctggttgctgtccgcggctgttgccgcccccgtactttgtggactcaacgatgtgagagggagggatcctgcggtatgccgtctggaggacagggattacgtagtttactcaagcgtgtgcagttttttcttgccttgtcccctaatgctattgttgtactgggctacatttcgtgggctacagagatgggaagtggctcgaagagctaagctgcacggaagggcccctcggcgaccaagcggacctgggccaccatctcccacaccaccagctcctcggctgccacaagacccttgtgggcccgactgtgcaccacccgcccccggattgcccagagggccctgcggaccagattgtgcccccgcagcaccttcactgcctcaggacccctgtggccctgattgcgccccacctgctccggggctgccccccgatccgtgcgggagcaattgcgccccccccgacgccgtgcgggccgctgctctgccgcctcaaacacctccccagacacgccgtcgacgcagagccaaaatcaccggccgcgagcggaaagccatgcgggtgttaccagtggtcgttggtgcatttcttctttgttggaccccatttttcgttgtgcacatcacccaagccctctgcccagcctgctccgtaccgcctcggttggtgtccgccgtaacatggctgggttacgtgaactcagccttgaacccagtgatctatacggtgtttaacgctgagtttcgcaacgtgtttagaaaagcactgagagcgtgttgttag

SEQ ID NO: 115003 - DNA, 1434 bp, synthetic construct
  misc_feature 1..1434: note = Description of Artificial Sequence: Synthetic coding sequence
  source 1..1434: mol_type = other DNA
atgctgcccccaggctctaacggcacggcatacccaggccaattcgctctgtatcagcagctggcccaggggaatgcagtcggtggtagcgccggggcgcctcctctcggacctagtcaggtcgtgaccgcttgtctgttaacactgttgataatatggaccctgctgggcaatgttctcgtgtgtgccgccatcgtcaggtcaagacacctgagggctaatatgaccaacgtgttcatagttagcctggccgtaagcgatctgtttgtggcactgcttgtcatgccctggaaggccgtggccgaggtggccggctactggccattcggcgcattttgcgatgtgtgggttgcgttcgatatcatgtgcagcaccgcgagtattctgaacctctgtgtcatctcagtcgaccgttactgggcgatctccaggcccttcagatacaagcgaaaaatgactcagcgtatggcactcgtgatggtcgggctagcctggaccttgtcgattctgatttctttcattcccgtgcagctgaattggcacagggatcaggctgctagctggggaggccttgaccttccgaataatttagcgaattggacaccctgggaggaggacttctgggagccggatgtgaatgcagaaaactgcgatagctccttaaaccgtacatacgcgatttccagctctctaataagcttctatatccccgtggccatcatgatcgtcacttacacccggatttatcgtatcgctcaggttcaaatccggcgaatcagttccctcgagagggccgcagagcacgcacaatcctgcaggtcatcggcagcttgtgccccagacaccagcctccgagcgtcaattaagaaggagaccaaggtcctgaagacactctccgtgattatgggagtttttgtgtgctgttggcttcctttctttatcctgaactgtatggttccattctgctccggccaccccgagggcccaccggccggatttccctgcgtgtccgaaaccactttcgacgtgttcgtgtggttcggttgggccaactcttctttgaatccagtaatatacgccttcaatgcagacttccagaaggtatttgcgcagctcctcggttgctcgcacttctgctctcgaactcctgtggagactgttaatattagcaacgaactgatctcatacaaccaagatatcgtattccataaggagattgctgccgcgtacatacatatgatgcctaatgcagtgacacccggtaaccgggaggtcgataatgatgaggaagaaggaccgttcgaccgcatgtttcagatctatcagacatctccggacggcgacccggtggcagagagtgtatgggaactggactgtgagggagagatcagcctggacaaaatcactccatttacgcctaacgggttccactag

SEQ ID NO: 115004 - DNA, 438 bp, synthetic construct
  misc_feature 1..438: note = Description of Artificial Sequence: Synthetic coding sequence
  source 1..438: mol_type = other DNA
atggatccggaggagcaggaactgctcaatgattaccggtatcggtcttacagctcagtgattgagaaggcactgagaaatttcgaatcatccagcgaatgggccgacctgatctccagcctgggcaaacttaacaaagcgctacaaagcaatttaagatacagcctgttgccgcggcggttgctcatctctaagcgcttggcacagtgcctgcaccccgctctgccctccggagtccatttgaaagctcttgagacctatgagattatcttcaagatcgttgggacaaaatggctcgccaaggacctgttcctttactcttgcggactgtttcctctgctggcccatgctgctgtctccgtaagacctgtcttactcactctctacgagaaatacttcctgccgctgcagaaactgctgctgccctcgttgcagtag

SEQ ID NO: 115005 - DNA, 6897 bp, synthetic construct
  misc_feature 1..6897: note = Description of Artificial Sequence: Synthetic coding sequence
  source 1..6897: mol_type = other DNA
atggaccctgaagaacaggagctgttgaatgactatcgttaccgaagctacagcagcgtaatcgaaaaagcactgcgcaatttcgaatccagtagtgagtgggctgatctcatctcatctcttggaaaattgaataaagctcttcagtcaaacctgagatactcactccttcctaggcgcctgctgatttcgaagagattggcacagtgcctgcacccggccttaccatccggggttcatctgaaggccttggagacttatgagatcatcttcaaaatcgtgggaaccaaatggctggccaaggatctatttttgtactcgtgcggcctgttccccttactggcacatgcggctgtgtccgttaggcctgtgctgttaacattatacgaaaaatactttttaccactccagaagttgctcctgccgtctctccaggccttcatcgttgggctgctccccggcctcgaagaaggcagcgaaataagcgataggaccgacgctctacttttgagactctccctggtggtgggaaaagaagtcttttataccgccctctggggcagcgtgctggcctctccttctatccggcttccggccagcgtctttgtcgttggacacattaaccgcgacgccccaggtcgcgagcagaagtatatgctggggaccaatcatcagctgacagttaagtcactgagagcgtccctccttgactctaatgtccttgttcagcggaacaacctagaaattgtactgtttttttttccattctatacctgtctcgattccaacgagagagcaattccattgctgcgaagtgacattgtgaggattctgtcagccgcaactcagactctgctgcgacgcgatatgagcttgaaccgcaggctttatgcgtggttactgggctccgatatcaaaggcaatacagtggtgcctgaatccgaaataagcaactcttatgaagatcagtcctcctactttttcgagaaatacagcaaagatttattagttgaaggccttgccgagattctacatcagaaatttattgatgcggatgttgaggaacgccatcatgcgtatctgaagccatttagagtccttatttcccttctggataagcccgagattggaccacaagtggttggaaacctgtttctggaggtgatccgggctttttattcttactgcagagacgccttagggtctgatttgaagcttagctacactcaaagcggaaattcactgattagcgctattaaggagaataggaacgcttccgagatcgtaaagacagttaatttactgatcacatccctgagcacagacttcctgtgggactacatgactcggtgtttcgaggaatgctttcggcctgtgaaacagcgttattcggtgcggaattctgtgtcaccaccacctaccgtgtccgagctgtgcgcgctgttagtttttctcctggatgtgatacctctggagctctactcagaggtccaaacacagtacttaccacaggtcttgggatgtttggtgcagcctctggccgaggacatggaggctctgagcctcccagaactgacccacgcccttaagacttgctttaaggtcctcagtaaggtgcagatgcctccctcttaccttgacactgagtctaccagcgggactagctctcccgtgaagggtgagaacggcaagataatccttgaaaccaaggcagtgatcccaggggacgaagatgccagtttcccgcccctgaagtccgaggatagtggaattggcctgagcgcttcttccccagagttaagcgaacacctgcgtgtcccccgggtttcactggaacgcgacgatgtctggaaaaaaggcggttctatgcagcggacctttctatgcatccaggagttaattgccaacttcgcctccaaaaatattttcggcgtgcagctgactgcctctggtgaagaatcaaaatccgaggaacctgccggaaaacgagatcgcgatggaacccagtcactggctgctaatgactcatccaggaaaaacagctgggaaccaaagcctataaccgtaccacagtttaaacagatgctctcagacctgttcacggcccgaggatcacctttcaagaccaagtcaagcgaatccccaagctcaagtccctcttccccagcccggaagaacggcggcgagtgggatgtagagaaggtggtgatcgacctaggtggctctagggaggagaggcgagaggccttcgcagctgcatgtcacttgctgcttgattgtgcaactttccctgtttacctttcagaagaggagaccgagcagctttgtgcgaccttgttccaactaccaggcgcgggggactccagcttcccttcgtggcttaaatccctcatgaccatttgctgctgcgtaactgactgctatctgcagaacgtagctatctctaccttactcgaagtcatcaatcactcgcagtcactcgctctcgtgatcgaagataaaatgaaaaggtacaagtctagcggccacaatcccttcttcgggaaactccagatggtgacagtgccaccaattgcacctggcatattaaaagtgatcgctgaaaaaaccgatttttaccagagggtggcccgcgttctgtggaatcaactcaataaggagacgcgtgaacaccacgtcacctgtgtggagctgttttacaggctgcattgcctggccccgactgcaaacatctgcgaagacatcatctgccatgccctgctcgaccccgacaaaggcaccagacttgaagcgctattccgctttagtgttatatggcatctgaccagagagatacagggctcacgcgtgaccagccacaatcggtcattcgacaggtcactgttcgtggtgcttgactccttggcttgcaccgacggggctattggggctgccgcgcagggatggttagttagggccctgagcctcggggatgtggcccggattctggagcctgtccttttactgctgctgcagcccaagacccagcgtacaagcattcactgtctgaagcaggagaactctgcggatgatcttcataggtggttcaacaggaagaaaacatcattccgggaagcgtgcgcagtcccagaaccccaggaatcaggaagtgaggaacatctgcctctctcacagtttaccaccgttgacagggaagcaatttgggcagaagtcgagaaggagccagagaagtatcctctgcggggcgaattgtcagaggaggagctgccctattacgtagagctgcccgaccgcacggcccacggagcccccgactcttctgaacacactgagtcagccgatacaagcagctgccacactgactccgaaaacacctcatctttttcctccccgagccacgatttacaggaactcagcaatgaggaaaattgttgcgcacctattcctatgggcgggcgcgcttatccaaaacgatccgccttacttgccgcctttcagtcagagagctttaaggccggggccaagctctcactcgtcagggtcgactctgataagacacaggccagcgagtctttttctagtgacgaggaagccgatctggaactgcaggctctcacaacaagtagactgttaaagcaacagagggagcggcaggaggcggttgaggcactattcaagcatattctcctgtacctccaaccatacgattccaggcgcgtactatatgcctttagcgtactcgaagcggtgttaaaaaccaatcccaaggaattcatagaagccgtgagcaggaccagcatggacaccagcagtacagctcacctgaacttaattagcaacctccttgccagacatcaagaggctttaataggacagtctttttacggaaagctgcaaacacaagtgcctaacgtttgcccccactcactattactggaattgcttacgtatttgtgcttaagttttctgagaagttactacccctgttatctcaaggtaagccacagagatattctcgggaaccgcgatgttcaggtcaaatcagtcgaggttctgatcaggattatgatgcagctggtttctgtcgccaagagctcggagggcaaaaacgtggaatttattcactcgcttcttcagcgctgcaaagttcaggagtttgtcctgttgtcactgagcgcaagcatgtacacttcacaaaagcgctacggcctggcaacagcccatcatgggcgcgcccttccagaggatagcttgtttgaggagagcctgattaatttggggcaggaccaaatatggtctgaacatcccctccagattgaacttttaaagctcctgcaagtcctgatcgtcctcgagcatcatcttggccgggcacacgaggaggccgagaaccagccagacctcagtagggagtggcagagagctctcaacttccaacaggccatcagcgccctgcagtatgtgcaacctcacccactcacctcccagggcctgcttgtgagtgcagtcgttcggggtctgcagcccgcatacggttatggcatgcatccagcgtgggtatcactggttacacattctctgccctattttgggaaaagtctgggatggaccgtaactccttttgtggtgcaaatctgtaagaacctcgacgacttagttaaacagtacgaaagcgaaagcgtgaaactgagtgtttccaccacgagtaagcgggaaaacattagcccagattacccactgactctgctcgaagggcttactaccatcagtcatttctgcctcctggaacaggcaaaccagaacaagaagacaatggccgcaggcgatcctgccaacctgcgaaacgcacgcaatgccatacttgaagagcttccacgcacagtgaatacaatggcactcctatggaatgtgttgcggaaggaagagacccagaagaggccagtggacctgttgggtgcaacaaagggatccagcagcgtgtattttaaaaccactaaaacaatacgacaaaagatcctcgacttcttgaacccactgaccgcccatctgggcgtccaactcactgccgccgtggccgcagtgtggtctcgtaagaaagcccagcgacactccaagatgaaaatcatccccacggcaagtgccagccagctgacgctggtcgatctggtttgtgctctgtccactctccaaacggacactctcttgcatcttgttaaagaggtcgtcaaaaggccacctcaggtcaaggggggggatgaaaaatccccattagtcgacatcccagtgctgcaattctgctatgcctttcttcagcgactgccagtcccagcgctgcaggaaaactttagttcacttctgggtgtgttaaaggagagtgtgcagctcaacctggcccctccgggttactttctgctcctctcaatgttaaatgatttcgtaacccgcactccaaatctggaaaacaaaaaagaccagaaagatctccaggagattacccaaaaaatactggaggccgtgggaaatatcgccggatcatcactagaacagacaagctggcttagtcgtaacctcgaagtgaaggcccagccgcaggcaagtctcgaagaaagcgacgccgaggaggatctttatgatgcagcagccgcgtccgctatggttagttctagtgctccttccgtgtatagtgttcaagctctgtccctgctggcggaggtcctcgcctcacttcttgatatggtatatcgaagtgacgaaaaagaaaaagccgttcctctgatcagcaggctgctgtattacgttttcccgtacctgcgcaatcattccgcctataatgccccaagtttccgcgcaggggcacagctgcttagctcactgtccggctacgcctataccaagcgggcctggaggaaggaggtcttggagttgtttcttgatcccgctttctttcagatggatacatcctgcgtgcattggaaatctattatagaccacctgctcacgcacgaaaagaccatgttcaaggacctgatgaacatgcagagctcgtccctgaaattgtttagtagcttcgagcaaaaagcaatgctgcttaaacggcaagcctttgcagtcttttcaggggaactcgaccagtatcatctgtatctcccccttatacaggagcgtctgacggataatctgcgcgtgggccagaccagtatcgtggctgctcaaatgttcctattttttcgagtcctcctgcttagaatctccccccagcatcttacaagtctgtggcctatcatggtttcagagctaatccagacatttacccagttggaagaggatctgaaggacgaagatgagagtttgagatctaccaataaagtcaaccgaacaaaagtatctgtgcctgacgctaatgggccttcagtaggcgagattccccagagcgagctaattctgtacttaagcgcttgcaagttcctggatacagctctgagcttccctcctgacaagatgccacttttccagatttaccgatgggctttcatcccggaggtagatacggagggtccggcatttctctctgatgtagaggagaaccaccaggaatgtaaacctcacactgttaggatcctggaacttctaaagctgaaattcggtgagatcagcagtagtgacgaaatcacgatgaagtccgaattcccccttttacggcagcacagtgtgtcttctatccgccagctgatgcctttctttatgactcttaatggagcttttaaaactcagcgccaattgccggctgactccccgggcaccccatttctggacttccctgtcactgactcccccagaatcctcaagcaactggaagagtgcatcgagtacgactttttagagcaccctgagtgttag

SEQ ID NO: 115006 - DNA, 792 bp, synthetic construct
  misc_feature 1..792: note = Description of Artificial Sequence: Synthetic coding sequence
  source 1..792: mol_type = other DNA
atgttctattttcattgtcctccccaactggaaggaaccgccacatttggtaatcactcttccggggactttgacgatggcttcctgcgcagaaagcagcgccggaaccggacgactttcactctccaacaactggaggcattggaggccgtgtttgcacaaacccactaccccgatgtttttacacgggaagaactggccatgaaaatcaatctgacagaggcgagagtccaggtatggtttcagaaccgtagggcaaagtggagaaagactgagagaggagcttcagaccaggagcctggcgcaaaagagcccatggctgaagttacaccaccccctgtgaggaatatcaattctcccccaccaggagaccaagccagatcaaagaaggaggccctggaggctcagcagagtctgggaaggacagtcgggccagccgggcccttttttccttcatgtctacccggaacactactgaatactgcaacttacgctcaggctttaagccatgttgcatctcttaagggcggcccattgtgtagctgctgtgtgccggaccctatggggctgtcattcctgcctacctacggctgccagtcgaatagaacggcttcagttgccacgctccgcatgaaggcacgagagcactctgaggcagtgctgcagagcgcaaacctgctcccttccacatcctcaagccctggcccagtggccaagcccgccccaccagacggatcacaggaaaagaccagcccaaccaaagagcagtccgaagcagagaaaagtgtgtag

SEQ ID NO: 115007 - DNA, 807 bp, synthetic construct
  misc_feature 1..807: note = Description of Artificial Sequence: Synthetic coding sequence
  source 1..807: mol_type = other DNA
atggttttgatgtcctgcgaccaaaggctgatcagccttttactagtgggtactgcaacgtttggtaatcactccagtggagactttgatgacggctttttgcggcggaaacaacgaagaaataggacaacatttaccctgcagcaactggaggctctggaggcagtcttcgctcagacacattaccctgacgttttcactagggaagagcttgccatgaaaatcaatttaaccgaggctcgggtccaggtgtggttccagaaccgccgggccaagtggagaaaaaccgagcggggagcttcagaccaggagcccggggccaaagagcctatggctgaggttacccccccaccagtcaggaatatcaattcgcctccgcccggcgatcaagctcggagtaagaaggaagccctggaggcacagcagagcctcgggcgtaccgttgggcctgcgggccctttctttccttcatgtctgcctggtacacttctgaacacagccacttatgctcaggccctaagccacgtggcctctctgaaggggggtccactgtgcagttgttgcgtgccagaccccatgggactcagcttcttacctacgtacggttgccaatcgaaccgaaccgcatccgtagctacactgcggatgaaagcgcgtgagcactccgaagccgtcttacagtctgccaatctgctgccatccacatcaagtagcccaggcccagttgccaaacctgctccacctgacggcagccaggaaaaaacatccccgaccaaggaacaatccgaggctgagaagtccgtgtag

SEQ ID NO: 115008 - DNA, 384 bp, synthetic construct
  misc_feature 1..384: note = Description of Artificial Sequence: Synthetic coding sequence
  source 1..384: mol_type = other DNA
atgaagctgaacgtggatggcctgttggtctacttcccatacgactatatttatccggagcagttcagctacatgagagaactgaaaaggacactcgatgcaaaagggcatggcgtgctggaaatgccctctggcaccggcaaaactgtctctcttctggccctcattatggcgtatcagagggcctaccccctggaggtaacaaagctgatatactgctcaagaaccgtgccagagatcgaaaaggtcatcgaagaacttagaaagctgctgaatttttatgagaaacaggagggagaaaagctgccatttctagggctcgctctctcttcaagaaaaaatctgtgtattcaccccgaaactacctctgcctctacaccgtag

SEQ ID NO: 115009 - DNA, 4614 bp, synthetic construct
  misc_feature 1..4614: note = Description of Artificial Sequence: Synthetic coding sequence
  source 1..4614: mol_type = other DNA
atgggcgagaagctggagctcaggctgaaatccccagttggggcagagcctgcggtgtacccttggccattgccagtctatgataagcaccacgatgccgcccatgagatcattgagactatccggtgggtctgcgaggagattcccgacctgaagctggcaatggaaaactacgttttgatagattacgacacaaaaagtttcgaatctatgcagcggctctgcgataagtataatcgggccatcgattctatccaccagctctggaaaggcaccacccagcccatgaagctgaacactcgccccagcacaggcctgcttcgccatatcctccagcaggtgtacaatcactccgtgactgatcctgagaaactcaacaactatgagcccttctcacctgaagtgtacggggagacatctttcgacctggtggcgcagatgatagatgaaatcaagatgaccgatgacgatctgttcgtagacctcgggtctggagtgggccaggtggtgctacaagttgcagcagctaccaactgtaaacaccactatggggtggaaaaagccgatattcctgctaaatacgctgagacaatggatagagaatttagaaaatggatgaaatggtacggcaaaaagcatgccgaatacactcttgagcgtggggactttctgagcgaggagtggagggagaggatagcaaacacaagcgttatcttcgtaaacaacttcgctttcggaccggaagtggatcatcagctcaaggaaagattcgccaacatgaaggagggcgggagaatcgtatcctcaaagcccttcgcccctctcaacttcaggatcaactcgcgcaatctgtcagatattggcacaattatgcgcgtggtcgaattaagccctctgaaagggagcgtctcttggaccggtaaacctgtaagctactacttacatactatcgacagaaccatcctggaaaactacttttcctcattgaagaacccgaagctacgggaggaacaggaagccgccaggagaagacagcagcgagagtctaaatcaaatgctgccactcccactaaaggccccgagggcaaggtcgctggacctgctgatgctcctatggactctggcgctgaggaggaaaaagcgggggctgcgactgtcaagaaaccctctcccagcaaagctagaaaaaaaaagcttaataaaaaggggcgcaagatggccggccgcaaacgagggcggcccaagaaaatgaacactgcgaaccccgagaggaaacctaaaaaaaatcagacagccttggacgcactgcacgcccagaccgtctcccagaccgcagcatcttccccgcaggacgcctatcgaagtccccattcccctttctaccagctgccaccgagtgtccaacgccatagtcctaatccacttctggtcgcccctacgcctccagcactgcaaaaactacttgagagcttcaaaattcaatacctacagtttctggcatacacgaagaccccacagtataaagcaagcctgcaggaactattgggtcaggaaaaagagaagaacgcccagctgcttggggcggctcagcagcttctgagccactgtcaggcccaaaaggaggaaattaggcggctgtttcagcagaagctggatgaacttggagttaaggctctgacttacaatgacctgattcaggcgcaaaaagagataagtgcccacaatcagcagctccgcgaacaaagtgaacaactcgagcaggacaatcgtgcactacgagggcagtctctccagctgttgaaagcccgctgcgaggaactgcagctggactgggccaccctgtctctggagaaactgctgaaggagaagcaggctctgaaatctcagatttctgaaaaacagcgacactgcctggagctgcagattagcatagtggagctggagaaatcccagcggcagcaggagcttctgcagttgaagagctgtgtgccaccagatgatgctttaagcttacatcttcggggcaagggcgcacttgggagagagctggagcccgacgcttctcgtttacacctggaactggactgtaccaagttctccctcccgcatctgtcgtctatgagccccgaactgtccatgaacggtcaagccgccggatacgagctctgtggagtgctcagcagaccttcctccaagcagaacacccctcagtaccttgcctccccactcgatcaggaggtggtgccatgcaccccgagccacgtggggcgtccacgcctggagaagctttccggcctggccgcacccgattacactcgactctcacccgcgaagattgtgctgcggcggcatctgagccaggaccatacagtacctgggcgtccagccgcctcagagttacactcccgggccgagcatacaaaggaaaacggactgccctatcagtctccatctgtacctgggagcatgaagttatctcctcaggatccaaggcctctctcccccggcgccctccagttggccggcgagaagtcatcggagaaaggcctgagggagagagcctatggtagcagcggtgagctgattacctcattaccgataagtattcctctgagtacagtgcaacccaataaactgccggtgtccatcccactcgcatccgtggttttgccaagccgggcagaacgggctcgctccactcccagccctgtcctgcaaccacgggacccgagctcaaccttggaaaagcaaatcggcgcgaatgcccatggtgccggatcccgatcgctggctcttgcccctgccggcttcagctatgccggttccgtggccatctctggagcgctggcaggaagtccagcgagtttgaccccaggtgctgagcctgctacattggatgagtctagctcttcaggatctctgtttgccacagtggggagtagatcttcaacgcctcagcaccccctgttgttagcccagcctcgcaattcactgccggccagcccagcacatcagttgagtagttcccctagattaggaggcgccgcccagggtcccctgcccgaggcgagtaagggggatctcccttccgatagcggtttttctgatcccgagtctgaggccaagcgaaggattgtattcacaattactaccggcgcggggagcgccaagcagagtccttcaagcaagcattcccccctcactgcaagtgctcgcggcgactgcgtgccctcacacggtcaagattctcggcgtaggggaagacgtaaaagagcctctgcaggtaccccttcactgtcagcaggagtgtcacctaagcgcagagccctcccaagcgtcgccggtctgtttacgcagccatcgggctctccactgaacctgaactcaatggtgtcgaacataaatcagccactggagatcacggcaatttcctctcccgaaaccagcctgaagagcagtcctgttccttatcaagatcacgaccagcctcccgttttgaaaaaagagcgccccctgtcacagaccaatggtgcgcactacagccctcttaccagtgacgaagaaccaggatctgaggatgaacccagctcagccaggatcgaacgcaaaattgcgactatctccttagagagtaaatcacctcctaaaactctggagaatggaggtgggctagctggcaggaaaccggcacccgcaggggagcctgttaatagctcgaaatggaaaagcaccttctcacccatcagtgacattggacttgccaagtctgccgactcccctctgcaggcctcttccgccctgtctcagaacagccttttcacctttcggccagcattggaggagcctagcgcagatgccaagctcgcagcccacccccgaaaaggtttcccaggaagcctgtctggagccgacggcttatcaccaggcaccaatccggccaacggttgcacttttggagggggccttgccgcggacctgtccctgcactctttctcagacggcgcctctctgccccacaagggcccagaggctgcggggctctcatctccccttagcttcccttcacaacgcggaaaggaggggtccgacgccaacccatttttgtctaagcggcagctagacggcctcgccgggttaaagggcgaagggagccgcggaaaggaagccggcgagggggggctgcctctttgcggccccacagacaaaactcctctcctgtcaggaaaggccgctaaggcaagggacagagaggttgacctgaaaaatggccacaacttatttatttctgcggccgctgtgccccccggatccttgcttagcggtccaggcctcgcgcctgcagccagtagtgccggtggagctgcctccagcgcgcagacccaccggtcctttctggggcctttccctcccggcccccagttcgccttaggccccatgtctctgcaagctaatttgggaagcgtcgcgggatctagtgtactccagtcgctattcagttcagttccagcggctgccgggctggtgcacgtgagtagtgccgcgaccaggctgaccaatagtcacgccatgggatcgttcagcggcgttgccggaggcacagtgggagggaactag

SEQ ID NO: 115010 - DNA, 1203 bp, synthetic construct
  misc_feature 1..1203: note = Description of Artificial Sequence: Synthetic coding sequence
  source 1..1203: mol_type = other DNA
atgaggggccgacggggggaccgaatgacaataaatattcaggagcatatggcaatcaatgtttgtcccggtccaatccggcctattcgtcagatctctgattacttcccccgagggccgggccccgagggggggggaggagggggcggagaagccccagcccatctggtgccgctggccttggccccgccagcagccttgctcggcgctaccacaccagaggatggcgccgaggttgatagttacgatagcgacgatgcaacagctctcggtaccctggagtttgatttgttatatgatcgcgcttcttgcacgctgcattgcagtattctgagggctaaaggtctcaaacctatggattttaatggtcttgccgacccatatgtaaagcttcacctcttgcctggcgcttgcaaggccaacaaactgaagacgaagacacagaggaatactctcaaccctgtgtggaatgaagatttaacatattctggtattacagatgacgatatcacacacaaagtgctgcggattgcagtgtgtgacgaggacaagctctctcataacgagttcatcggcgaaatccgtgtccctctgcggagacttaagccttcccagaagaaacacttcaacatttgcctggagcgccaggtgcctctcgccagtccttccagcatgtccgctgcgctaagagggatttcttgttatctcaaagaactggaacaggcggaacaggggcaaggactgctcgaggagcggggaaggatcttgctctccctcagttatagcagccgcagacgcggtcttcttgtgggcatactgcgatgcgcccatttagcggcaatggacgtgaatggctactctgacccatatgtcaagacatacctgcggccagacgttgacaagaaatctaaacacaagacctgtgtcaagaagaagaccctgaatcctgaatttaacgaggaattcttttatgagatcgagctctctacgctggccactaagacgcttgaggtaaccgtgtgggactacgacattggaaagtccaatgattttattggcggagttagtctggggccaggagcccggggcgaggcgcgtaaacattggagcgattgtctccaacagcctgacgctgcgctagagcgatggcacactctgacctctgaattgcccccagccgcaggagccttgtcttccgcctag

SEQ ID NO: 115011 - DNA, 927 bp, synthetic construct
  misc_feature 1..927: note = Description of Artificial Sequence: Synthetic coding sequence
  source 1..927: mol_type = other DNA
atgaccttacgaaggcgcggagaaaaagctaccatcagcatccaggagcatatggctatcgatgtgtgtccgggacctatccgccccataaaacagatttccgactacttccctagattcccccgaggactgccccctgacgcaggcccacgggccgcggccccgccagatgcaccggctcgtcccgcggtggccggggcaggacgaaggtctcctagcgacggcgcacgggaagatgacgaagacgtggaccagttattcggagcatatggatcctcccccggacccagccctggcccatctcccgcacggcccccagctaaaccacctgaagacgagcctgacgccgatggctacgagagcgatgactgtactgccctaggaacgctggattttagtctcttatacgaccaagagaataacgctcttcattgcaccattacgaaagctaaagggctgaagccaatggatcataatggtctggccgacccttacgtgaagctacacttgttgcctggcgcttctaaggccaataagctacgcacaaagaccctgaggaatactctgaaccctacctggaatgagaccctgacatattatggtatcacggatgaagatatgatccgaaagaccttgaggatcagcgtttgtgacgaagacaagtttcggcacaacgaattcataggggaaactcgggtacctctgaaaaaacttaagcccaatcataccaagaccttttctatctgccttgagaagcagctgcccgttgacaagactgaagacaaaagcctggaagaaaggggacgtatattaattagccttaagtatagcagccagaagcagggccttttagttggcatcgttcggtgtgctcatctcgccgcaatggacgccaatggatattccgatccctatgtaaaaacgtag

SEQ ID NO: 115012 - DNA, 927 bp, synthetic construct
  misc_feature 1..927: note = Description of Artificial Sequence: Synthetic coding sequence
  source 1..927: mol_type = other DNA
atgaccctccgccggcgcggcgaaaaagcgactatttcgattcaagaacatatggccatcgatgtttgcccgggacctatccggccaataaagcagataagcgactacttcccacggttcccaagaggattaccaccagacgccggcccaagggccgcggcacccccagacgcacctgcccgtcctgccgtagctggtgcaggccgccgttccccatccgacggcgcccgcgaggatgacgaggatgtggatcaactgttcggcgcatacggatcatcaccaggacctagccctgggccatcaccagctcgccctcctgcgaaaccacctgaagacgagccagacgcagatggttacgaaagtgatgactgcactgctctgggaaccttagatttcagcttgttgtatgatcaagagaataacgcgctgcactgtaccataactaaagccaagggattgaagcccatggaccataatggattagctgacccctatgtgaagctgcacttgctgccgggtgcctctaaagcaaacaaactcaggacaaaaaccctgagaaatacgctgaatccgacctggaacgagacattgacgtactacgggattaccgacgaggacatgatcaggaagaccttgcgaatctctgtttgcgacgaagataaattcaggcacaatgagtttatcggtgagacacgcgttccccttaaaaagctcaagccaaaccatacgaaaaccttctctatttgtctagagaaacagctgcccgtggataaaacagaggacaaatctctcgaggagcgaggaaggattcttatcagccttaagtactccagtcagaagcagggcctgttggtgggaattgtgcggtgcgcgcacttggccgccatggacgcaaacggatactcggatccttacgtgaaaacgtag

SEQ ID NO: 115013 - DNA, 1275 bp, synthetic construct
  misc_feature 1..1275: note = Description of Artificial Sequence: Synthetic coding sequence
  source 1..1275: mol_type = other DNA
atggctctacccacaccctctgattccactttgcctgctgaggctagaggcagaggacgccgcaggcgtctggtgtggactccttcccaatctgaggctctccgcgcatgtttcgaacgcaacccttatcctgggattgctacaagagaaagattggcccaggcaatcggcatccctgagcctcgagtccagatctggttccaaaacgagaggagtaggcagctcaggcaacatagacgagaatcaagaccttggcctggcagacgtggcccccccgagggcagacgtaaacgcaccgctgttactggatcccagactgccctcttgcttcgtgccttcgagaaggatagatttccaggaatagcggcccgcgaggagctggcccgagaaacggggctgcctgagtcacggatccagatttggttccaaaataggcgcgcccgccatccagggcagggcgggagagctccagctcaggcaggcggcttgtgctcagcagcacctggcggcggtcaccctgctcctagctgggtggcgtttgcccatactggcgcctggggaaccggcctgcctgcgccccatgtaccatgcgcgcctggcgcccttccgcagggcgcctttgtgagccaggctgcacgcgccgccccagctctccaaccttcgcaagcagctcccgccgagggtgtgtcacagcctgcgccagcccgcggcgacttcgcttatgcagcccctgctcctcctgatggggcactcagccacccccaggcacctaggtggcccccacaccctgggaaatctcgggaggaccgtgacccacaaagggatggtctaccggggccctgtgctgtggcccagcccggtcccgcacaagcaggcccccagggacagggggtactggccccaccaactagccagggcagcccttggtgggggtggggccgcggtccccaggttgccggagcagcgtgggaaccacaggccggggctgcaccaccccctcaacccgctcccccagatgcctccgcttccgctagacagggacagatgcagggcattcccgcgccaagccaggcacttcaggaaccagctccttggagcgcgttgccatgtgggttgttgctggatgagctgctggcctctccagagtttttgcagcaagcccagcctctgctggagactgaggcgcctggagagctagaagcctccgaagaggctgcaagcctagaagctccactgtctgaggaggagtatcgagcccttttggaggaattgtag

SEQ ID NO: 115014 - DNA, 1458 bp, synthetic construct
  misc_feature 1..1458: note = Description of Artificial Sequence: Synthetic coding sequence
  source 1..1458: mol_type = other DNA
atgaaggggtggagtctgcctgcatgtggtccccttcagggtcgcctggcagggtggcttgctgtgcgcgctggcttgctggccgccccagcagccgtgcacagccccgccgaggtccatgggagcccacccgccagtctgtgtcccaggccttccgttaaattcagacctggactgaccgctatggcactccccactccatcagattcaaccctgccagctgaggcccgcggacggggccgcaggcggagacttgtctggaccccctctcagtcagaagctctgcgagcatgcttcgagagaaacccttatcctggcatcgcaacaagggaaagattagctcaagcaattggcatacccgagccccgcgttcagatctggtttcagaatgagcgatcccgtcagcttcgtcagcatcggcgcgaaagccgaccctggcccggcagacgcggcccccccgaggggcggcgcaaacgcaccgcggtgactggcagccagaccgctttgctcctgagggctttcgagaaggacaggtttccagggattgccgcaagggaggagttggctagggagacaggtctgcctgagtcacgcatccagatctggttccagaaccgccgagccaggcatcctggacagggaggacgtgctccagctcaggccggcggtctctgttcagctgcgccaggaggaggccaccctgctccatcttgggtggccttcgctcataccggtgcatgggggacaggactgcccgctcctcatgtaccctgcgctccaggggcgctacctcagggagcctttgtgagccaggctgcccgcgctgcccccgctctacaaccaagccaggcagcaccagctgagggggtgtctcagcccgcaccagcacgcggagacttcgcttacgctgctcctgcaccccctgacggggccctgagtcacccacaagccccacgatggccaccgcaccccggaaagagccgcgaggatcgagatccacagagggatggtctgcctggaccttgcgccgttgcccagcccgggccagcacaggccggtccacagggtcagggggttctggcccctccaacatctcaaggtagcccctggtggggctggggtagggggcctcaagtggcaggggccgcctgggagccccaagcgggagccgcccctcctcctcagccggctcctcctgatgcctctgcctcggctcgacagggccagatgcaaggtattcccgctccctctcaggccctgcaggagccggcgccctggagtgccctgccatgtgggctcctgctggacgaactgctagcttcccccgagttcctacagcaggcacaacccctcctggagaccgaggcccccggtgagctcgaggcttccgaagaagctgcctctctggaagcacctctgtccgaggaggaataccgggctttgctggaggagttatag

SEQ ID NO: 115015 - DNA, 1326 bp, synthetic construct
  misc_feature 1..1326: note = Description of Artificial Sequence: Synthetic coding sequence
  source 1..1326: mol_type = other DNA
atgaagaccctaccattgcattcacactgcacagagatgcaaaggctgctccccaagctggagatgcttaccctgggttctagcttttgtagtctccaaggcgagttctgtcaagctatggactcgtttacaaccgtctcacatgtggggatgtgtgaagaaacggacgcatcatttaacgtgttcagccctaagtttcaatttgacaggagccattgccagtccctgagatttcaccagaacatggagctggattttggtcattttgacgaaagggataagacttcgagaaatatgcggggatctagaatgaacggtcttccatctcctacacacagtgcacactgcagcttctatcgtacacggactttgcaagccctcagcaatgaaaaaaaggccaagaaggtgcgattctaccgaaacggagatcggtatttcaagggcatagtctacgcggtgtcatcagatcgctttcgtagtttcgacgcactgctcgctgacctgacccgatctctaagcgataacataaacctaccccagggcgtgcgctacatttacacgatcgatggttctcgcaaaattggttcaatggacgagctggaggagggcgagagttatgtgtgctcaagtgataattttttcaaaaaagtggaatacaccaaaaacgtgaaccctaactggtctgtgaacgtgaagacttctgccaatatgaaggccccacagagcttggcaagctccaacagtgcccaagcgcgagagaataaggattttgtccgaccgaaactagtcaccattatccgctcaggggtgaagcctaggaaggcggttcgggtgttactgaataaaaagacagcccactcctttgaacaggtgctgactgatatcactgaggccataaaacttgaaaccggggtggtcaagaagctttataccctggatggaaaacaggtcacatgtctgcacgatttcttcggcgatgatgatgtctttattgcatgtggtccagaaaagttcaggtacgcgcaagacgacttttctctggatgagaacgagtgtcgcgttatgaagggaaaccctagcgccaccgccgggcctaaggcctcaccaaccccccaaaagacctctgcgaaaagccctggccctatgcgccgatccaagtcccctgcagactctgcaaacggtacatcctctagccagcttagcacgcctaaatcgaaacagtccccaatttctacccccacctcccccgggtccctcaggaaacacaaggatttgtacctgcccctatcccttgatgattcagacagtctgggagatagcatgtag

SEQ ID NO: 115016 - DNA, 1098 bp, synthetic construct
  misc_feature 1..1098: note = Description of Artificial Sequence: Synthetic coding sequence
  source 1..1098: mol_type = other DNA
atggaattagactttggacactttgacgagcgcgataagactagcaggaatatgcgggggtccaggatgaatggcctgccaagtcctacccactcagcccactgttccttctatagaaccaggacccttcaggctctgtcaaacgagaaaaaggccaaaaaggtgagattttatagaaacggcgatcgctatttcaaggggatcgtctacgcggtaagttccgataggttccggagctttgatgcactgctcgctgacctcacgcggtctctgtcagataatattaatttgccccagggagtgagatatatctacacaattgatggaagccgtaaaattggtagcatggatgagctggaagagggcgagagctacgtgtgttcttcggataacttcttcaagaaagtggaatacaccaaaaacgtgaaccccaactggtctgtcaacgtgaaaacttccgccaacatgaaagccccacagtctcttgcatctagtaacagcgcccaggccagagagaacaaagattttgtgcggcccaaactcgtgaccataatcagaagcggagttaagccaaggaaggccgtccgcgtattgctgaacaagaagactgcacattcgtttgaacaggtgctcacggatattaccgaagctattaagctcgagaccggcgtggtgaaaaagctctatactctcgatggcaagcaggtcacatgtctgcatgacttttttggcgacgatgatgtattcatagcttgcggaccggagaagtttcgctacgcacaggacgatttttctctggacgaaaacgagtgtagagtaatgaaaggcaatccgagcgccactgcgggacccaaagcctcaccaactccccagaaaacgagtgctaaatcgcccggcccgatgcgccggtccaagtccccggcagatagcggtaatgaccaggacgcaaacggaaccagctcctcacagctgtctaccccgaaatctaagcagagcccaatcagcacccctacctcaccaggcagccttcgcaagcataaagatctctacctcccgctgtcccttgacgatagcgacagcctcggggattctatgtag

SEQ ID NO: 115017 - DNA, 1098 bp, synthetic construct
  misc_feature 1..1098: note = Description of Artificial Sequence: Synthetic coding sequence
  source 1..1098: mol_type = other DNA
atggaattggatttcggccacttcgatgagagagataagactagtaggaatatgcgtggatctaggatgaatggtctcccctcccccacgcactccgcacactgttccttctacagaacgcgcacgttacaggccctgtcgaatgaaaagaaagctaagaaagtgcgattctataggaatggcgatagatattttaagggcatcgtgtatgctgtctcgagtgatcgatttcgctccttcgatgcgttactggccgatctaacacggtctttaagtgacaatatcaacctgcctcagggcgtccgatacatctacacaattgatggtagtcgaaaaatagggtcaatggacgagcttgaagaaggcgaatcctatgtgtgctctagcgacaattttttcaaaaaggtcgaatatacaaaaaatgtcaaccccaattggtctgtgaacgtgaagacgtcggctaatatgaaggccccgcagtctctggccagcagcaactctgctcaagcaagggaaaataaagacttcgtacgaccaaagcttgtgacgattattagaagcggcgtgaagccgagaaaagctgtgagagtgctcctgaataagaagacagcacactccttcgaacaagtcttaaccgacatcacggaagctattaaactggagaccggtgtggtgaagaaactgtatactctggacggcaaacaggtgacttgtttgcatgacttttttggagacgatgacgtgtttatcgcctgcgggccagagaagtttcgctacgcacaggatgatttttcactggacgaaaacgagtgtcgagttatgaaagggaatccatctgctacagcgggcccaaaagcatccccaaccccacagaaaactagcgccaagtcgcctggcccgatgcgcagatctaaaagccccgccgactctgggaatgaccaggacgccaatggcaccagcagttcccagctatctaccccaaagtcaaaacagtcccccatcagcacccccactagcccaggttccctgcgcaagcacaaagacctttatttaccactgagcctcgatgatagcgactcgttaggggacagcatgtag

SEQ ID NO: 115018 - DNA, 1317 bp, synthetic construct
  misc_feature 1..1317: note = Description of Artificial Sequence: Synthetic coding sequence
  source 1..1317: mol_type = other DNA
tgatgcaccgagatgcagagacttctgccaaaactggaaatgctgacactcggcagctctttctgctccctgcagggagaattctgccaggcaatggacagtttcaccaccgtgtctcacgtaggaatgtgcgaagaaacggatgcgagtttcaacgtgtttagtccaaagttccaattcgatcggtcccactgtcagtccctgcgatttcatcagaatatggagttggattttggtcacttcgacgagagagataaaacttccaggaacatgaggggcagccgtatgaacgggcttcccagcccaacccattctgctcattgttccttttatcgcacacgcaccctgcaggccctgtcaaacgaaaaaaaggcaaagaaagtccggttctatcggaacggggatagatacttcaaggggattgtgtacgccgtatcctcggaccgttttcgtagttttgacgccctgctggctgatctaacccgaagcctttctgacaacattaacctgccccagggcgtgcgctacatctatacaatcgatggcagcaggaaaatcggtagtatggacgaattggaggagggcgaatcttacgtgtgcagtagtgataactttttcaagaaggtcgaatacaccaagaatgtgaaccccaattggtccgtaaacgtaaagacttccgctaatatgaaggccccccaatctctggcctcttcaaacagcgcccaggccagagagaacaaagattttgtcagacccaagctggttaccatcattagaagcggagtgaagccaagaaaggcagtgcgcgtacttctcaataagaagacagctcacagcttcgagcaggtactgacagacattacagaggctataaagctggagaccggggtcgttaaaaagctttataccctggacggaaaacaggtcacctgtctccacgatttctttggcgacgatgatgtgttcatagcttgcggtcccgaaaaattccgttatgcgcaggacgacttctcattggatgagaatgaatgtcgggtgatgaaggggaatccgtccgctacagccggacccaaagccagccctacccctcaaaaaacctcggcgaagtctccaggccctatgcgccgctccaagagcccagccgacagcggaaacgaccaagacgccaacgggacctctagcagccagctgagtacaccaaagtcgaaacaatccccaatctcgaccccaacttccccgggcagtctgcgcaagcataaggacctgtacctgcccctgtccctggacgattctgattccctcggagacagtatgtag

SEQ ID NO: 115019 - DNA, 1083 bp, synthetic construct
  misc_feature 1..1083: note = Description of Artificial Sequence: Synthetic coding sequence
  source 1..1083: mol_type = other DNA
atggagctcgatttcgggcatttcgatgagcgcgataaaactagcagaaacatgcgggggagccgcatgaatggattaccttcacccacccacagcgctcactgttcgttctatcggacacgcaccctgcaggcccttagtaatgagaagaaggcgaagaaagttaggttttatcgcaatggtgatcggtatttcaagggcatcgtgtacgctgtcagcagtgatagattcagatctttcgacgcattgttagctgacttaacccgctcactatcggacaatattaatctgcctcagggggtaaggtatatttacacgatagatggatcccgcaaaattggaagcatggatgagctggaagagggcgagagttacgtctgttcctcagacaacttttttaaaaaggtcgagtacactaagaacgtaaatccgaactggtctgttaatgtaaagacgtcagctaacatgaaagcccctcagagcctggccagttctaactctgcccaggcccgcgagaataaagatttcgtgagacctaaactagttacgatcatccgctctggtgtcaaaccaagaaaggcagtgagggtactcctgaacaaaaagacagcacactctttcgagcaggtgctaacggacattactgaagccatcaaattggaaaccggggtagtgaaaaagctctataccctggacgggaagcaagtcacttgtctgcatgatttttttggggacgatgacgtctttattgcttgtggtcctgagaagttcaggtacgctcaggacgacttttctctggatgaaaatgagtgcagggtcatgaagggcaatccatctgctacagcaggccccaaggcttctccaaccccgcagaagacctctgccaagagccctggtccaatgagacgctcaaagagccctgccgactcagccaatggcaccagctcctctcagttgtctacacccaagtctaagcaatcccccatatccaccccaacatcgcccgggtcactcagaaaacataaggacctgtatctccccttgtcgctggatgatagtgatagcttgggcgattctatgtag

SEQ ID NO: 115020 - DNA, 342 bp, synthetic construct
  misc_feature 1..342: note = Description of Artificial Sequence: Synthetic coding sequence
  source 1..342: mol_type = other DNA
atggagctcgactttggtcattttgacgaacgggacaagacctctcgtaacatgcggggctcccgcatgaacggattgcccagccccactcactccgctcattgctccttctaccgcaccagaacgttacaagcactgagtaatgaaaaaaaggccaaaaaagtgagattttacagaaacggcgacaggtactttaagggaattgtgtatgcggtatcctctgacagattcaggtccttcgacgcactcctggctgacttgacacgcagcttatccgataacatcaacctaccgcagggcgtccgatacatctatacaatagatggctctaggaaaatatag

SEQ ID NO: 115021 - DNA, 1083 bp, synthetic construct
  misc_feature 1..1083: note = Description of Artificial Sequence: Synthetic coding sequence
  source 1..1083: mol_type = other DNA
atggaactcgatttcggccacttcgacgaaagggacaagacctccagaaatatgagaggaagtaggatgaatggactcccatcccccacgcactcagcccactgtagtttctaccggactcgcaccctgcaagctctgtctaacgaaaaaaaggctaagaaggtccggttttaccgcaacggggatcgctattttaagggaatcgtctatgccgtgtcgagcgaccgctttcgcagctttgacgctcttttggcggatttgacacgatcactctctgataatattaatctgccacagggcgtccgttacatatacaccattgatggctctcgtaagatcggatctatggatgaactggaggagggtgagtcgtacgtgtgctctagcgataactttttcaagaaagttgagtacaccaaaaatgtcaaccccaattggtccgttaacgtcaaaacctcggccaacatgaaggcgcctcagagcctggcttccagtaacagtgcccaggcaagagagaacaaagacttcgtgagaccaaagttggtaactatcatacggtcaggcgtaaagcctaggaaagcggtgagagtcctgctcaacaaaaagactgcacatagctttgagcaggtgttaactgatattaccgaggcaatcaagttggaaacgggcgtggtgaagaaactttatacactggatggcaagcaggtgacatgcctacacgacttcttcggcgatgacgatgtctttatcgcttgtggtccagagaagtttaggtatgcacaggatgattttagcctggatgagaatgagtgtagagtgatgaaggggaatccatctgcaactgcaggtccaaaagcatcccctacgccccaaaaaactagtgccaaatctcccggacccatgcgcaggtccaagagccctgcagacagcgcgaatggtacttcctccagtcagctgtcaacccctaaatccaagcagtctcctatttccaccccaaccagcccaggttctctgcgcaagcacaaagacttatacctgcctctgagcctggatgattccgactcactgggtgattccatgtag

SEQ ID NO: 115022 - DNA, 1065 bp, synthetic construct
  misc_feature 1..1065: note = Description of Artificial Sequence: Synthetic coding sequence
  source 1..1065: mol_type = other DNA
atggctaagacgggggccgaagaccatcgggaggccctgtcccagagttccctcagcctcctcacagaagccatggaggtgttgcagcagtcgtccccggagggaacacttgacggcaataccgtgaacccaatatataagtatattctcaatgacctgccccgggagtttatgagttcacaggcaaaggccgtaataaagactacagacgactatctacagagtcaatttggcccaaataggctggtccatagcgcagctgttagcgaggggagcggcctgcaggactgttccacccaccagactgcctcggaccactcacacgacgagataagcgacctggattcttataagtccaatagcaaaaataattcttgctccatatctgcttcaaagaggaacaggcctgtgagcgctccagtgggccaactgagagtcgccgagttctcctcactgaaattccaatctgcccgaaactggcagaaattgtcccagcgccacaaattgcagccccgggtgattaaagttaccgcttataaaaatggttcaaggaccgtctttgctagggtgaccgtacctaccattactctgttactcgaggagtgtacagagaaactgaacctgaatatggctgcacggagggtatttctggccgacggcaaagaggctctcgagcctgaggacattcctcacgaggctgacgtgtatgtgagtaccggcgagcctttcttgaacccctttaagaagattaaggaccacctgctgctaatcaagaaagtgacatggacgatgaacggacttatgctgcctacagacataaaacgtcgcaagactaagccagtactgtctataagaatgaaaaaattaaccgaaaggacaagcgtgcggatactttttttcaaaaatggcatgggccaggacggtcacgagattacggtaggcaaagagaccatgaaaaaagtacttgacacgtgcaccattcggatgaacctgaacctgccagccaggtacttctacgacctgtatggcaggaaaatcgaagatattagtaaagggaagcactag

SEQ ID NO: 115023 - DNA, 690 bp, synthetic construct
  misc_feature 1..690: note = Description of Artificial Sequence: Synthetic coding sequence
  source 1..690: mol_type = other DNA
atgaaaatgtggaataactggggctggtgcgggggccggcgccgaggatgcaccaagattctgtctactaagaagggaattcagatgagtatcaagaacaaacatctcatcgtgatcccagctttttcccacacgatgagtcagctcgacttcgatttccactgcgtatttgtgtctattgatgaagggatcttcaaagccggcgccgaacgaagtgagactcgaggagcagctgaagtccaggaagatgaggatacgcaggttgaggtcccggttgaccagcggccggccgaaatagttgatgaggaggaggatggcgaaaaggccaacaaggacgccgagcagaaggaggatttttccggaatgaatggagacttggaggaagaagggggccgtgaagcaactgacgctcctgagcaggttgaagagatcttggatcactcagaacagcaggcgagacccgcccgggttaacggcggaactgacgaggagaacggcgaagagctgcagcaggtgaataacgagctgcagttagtgctggacaaggagcggaagagccagggcgccgggtccggccaggacgaggctgatgtcgatcctcaacgacctcctcggccggaggtgaagatcacctctccagaagagaatgaaaacaatcagcaaaacaaagactacgccgctgtggcctag

SEQ ID NO: 115024 - DNA, 1431 bp, synthetic construct
  misc_feature 1..1431: note = Description of Artificial Sequence: Synthetic coding sequence
  source 1..1431: mol_type = other DNA
atgagcggcagctccgcccgatcaagtcatctgtctcagccggttgttaagtccgtgttagtgtatagaaatggcgatcctttttacgcagggagaagggtggtgattcacgagaaaaaggtgtccagtttcgaggtgttcctcaaggaagtgactggcggagtgcaggctccattcggcgcagtccgcaacatctacacacctcgtacaggccaccggatacgaaagctggatcaaattcagtcaggtgggaactatgttgcgggaggccaagaggctttcaaaaagctaaactacttggacataggtgagatcaagaagaggcctatggaagttgtgaacacagaagtgaagcccgtgattcatagcagaatcaacgtatcagccaggtttcggaaacccctgcaggagccctgtaccatcttcctcatagcaaacggggatctaattaaccccgccagtcggctcttgattcccaggaaaaccctcaaccagtgggatcatgttttacagatggtgaccgaaaagataacgctccggtcaggggcggtgcacagattatacacactggaagggaaactggttgagtcaggggcagaactcgagaacggccaattctatgtagcagtgggtcgcgacaagttcaaaaagctgccatatagtgaactgttatttgataagtcgactatgaggcggccttttggccagaaagcatcctcactgcccccaattgtgggctccaggaagtcgaagggcagcggaaacgataggcattcaaagtcaactgtcggaagcagtgacaactcctcacctcagccactgaaacggaagggcaaaaaagaggacgtcaacagcgagaaacttactaaactgaagcagaacgtgaagctgaagaatagccaagaaacaattccaaactccgatgaaggaatcttcaaagccggcgccgagagatccgaaacccgtggcgccgcagaagtgcaggaggatgaggacacgcaggtggaagtgcctgtcgaccagcggccagcggaaatagtggacgaagaagaagatggcgagaaagctaacaaagatgccgaacagaaggaagatttctccgggatgaacggcgatctggaggaggaagggggacgcgaagctacagacgctccagagcaggtagaagaaattttagatcattccgagcagcaggccaggccggcacgggtcaacggtggtaccgacgaggaaaatggggaggagctgcagcaggttaataacgaacttcagctggtgcttgataaagagcgcaaatctcagggcgccgggtcagggcaggatgaagccgatgtggatccacaacgccccccccgcccagaggtgaagatcacgtctccagaagaaaatgaaaacaaccagcaaaataaagattacgcagccgtagcttag

SEQ ID NO: 115025 - DNA, 267 bp, synthetic construct
  misc_feature 1..267: note = Description of Artificial Sequence: Synthetic coding sequence
  source 1..267: mol_type = other DNA
taggtggtgatccatgaaaaaaaggtttcgtccttcgaggtcttccttaaagaagtcacagggggcgtgcaggccccatttggggccgtccgcaatatttacactccaagaaccgggcatcgaattcgcaagctcgatcagattcagtcaggcgggaactatgtggctggaggccaggaggcattcaaaaagttaaattatctggatatcggcgaaataaaaaaaaggccgatggaggttgtgaacaccgagcttcatgtgctgtag

SEQ ID NO: 115026 - DNA, 363 bp, synthetic construct
  misc_feature 1..363: note = Description of Artificial Sequence: Synthetic coding sequence
  source 1..363: mol_type = other DNA
atgagcgggtcctccgcacgaagcagccacttgagtcagccagtggttaagtccgtcctcgtctaccgcaacggagatcctttctatgcagggcggagagtcgtcatacacgagaagaaggtgtctagctttgaggtgtttctgaaagaagtcaccgggggagtgcaggccccttttggcgccgtccggaacatctacacacctcgcacagggcacaggattcggaagctggatcagatccagtcaggcggcaactatgttgcaggaggccaggaggcctttaagaagctcaattacctcgacatcggcgagatcaagaaacggccaatggaggtggtgaatacagagcttcacgtgctgtag

SEQ ID NO: 115027 - DNA, 1947 bp, synthetic construct
  misc_feature 1..1947: note = Description of Artificial Sequence: Synthetic coding sequence
  source 1..1947: mol_type = other DNA
atgaaaaaaccaatttgcaagacgaccgagccgtacgcaccagtgagattaagggtcctgcaaaacggtgagaagaataagaataggtccgttacaatactgggaccggacatcagtcccggtcgaaaaacacagtgtaccgagattctgaacctgcctagtgctgctcgccgtctgtacaacgagaaaggcaaagagatcttcgcactgaaggacctgcagagagatgaattagtgtatgtgtcctgtggcgaactgtggattaaccctgaccttagtatcgcccaacagaagaaacagatctttttaaggaacctcgagagcgatatcgcgaagattcagatattttgttctacacataagatcgaggcgttagtactcgaggtccagtcagacatagtcagtggcagcaagctggcggtgcacaagcccgtagctatattcggcgaggagaaacaggtgaccgagcccgaggagaagcagatgcaggaagatccactgactaccgagaatgcttcttcggagatattagattcccacgtcagagcacacctgaggatgaaagcatgtcacactttaccaagatacgcgtggcaagaaacatctcacgactttgatgaagatgactctcttcctaaaaaaactgaaaaaggcctttttgagaatgtggagccacagaaaaagcactcttgctcccctaagcacagtaaactccataagcactgccatcagcagttcgaatatagggacggccaaatcataagccacgcggctcctcagctagtgctaggggttcagggcccaaatctgagaagtggcatggaagtagtccttgtcgagaagaaatcagatggttctcaccaaaggtggattcatcaggaagattctcgaaccttccatctggtttccaacccagatcttgtcctggctgtaagcatgacaaaaacacgtaatgaggtgtgtgggtatccagttatcgttcagaagtacaaaccttacaacaatggcgccgcgaatcagaagtggcactatatgaaaaatattaaggccctagttgcttttcattctacagccctggacaaggaaatcacgagcgctaactatgccggggtgtgcacatcatcagtcattaaggaagagaacatcgaccagcctggatactgctacctaagccctgatggcaaacgcaaaactatgctgtgtctggcctgcggtcagtctatgaggaccgaaaagggattgaagcagttgctgcctggagtgcctttcctatgtataagtggaaccaaaacccaaaaaccatttctgcaggggccgttcaaagtcatctcagtcgcggaagtggatttatcatgtgataaggctgaaaagacactgagctattatcaggctagactgctgtccctgcgcatgaagacttgtacccaggcagcctcgcattctggtatggcagctacccatcagaaagccgtgaaaatcatcgcctataagaatggcgacggttatagaaatgggaagttgatcgtggcaggaacgttccccatgctgctcaccgagtgtactgagcaactgggcctggccagggccgcttctaaagtctatactaaggatggaacgcccatattcactctccgggacttggttctatgggctctggacgagagcttcctccagagggacagcgagaaacaaaagcaggacgccgctccggtagggaaggaacagatcattgtcgaaaaaaatcctaggatgaaggttaagaaccgactcttcgctaaatctgtaacgagcgactccctcgatggcattgataagtcgctcctgaccctgattctccgcaatccaatcgccatttgggttagctgcggggaaccctttctgccccctaacgagagcaggaaaatacgggaaaccgagcttgcaaagaagggccagaacttcggctag

SEQ ID NO: 115028 - DNA, 1365 bp, synthetic construct
  misc_feature 1..1365: note = Description of Artificial Sequence: Synthetic coding sequence
  source 1..1365: mol_type = other DNA
atgaagaatatcaaagccttagtggcattccattcaacagctctggacaaggagattacctctgccaactatgccggcgtctgcacctcttcagtgataaaagaagagaacatcgatcagccaggctattgttacctgtcccctgacgggaagcgcaagacaatgctctgccttgcctgtggccagtcaatgcgcaccgagaaaggcctgaagcagctactgcctggagtgccttttctatgtattagtggtactaagacacagaagccatttctgcaaggcccatttaaagttatttctgtcgcagaggtcgatctttcctgcgacaaggcggaaaagactcttagctattaccaagctagactactgagcttgcgaatgaagacctgtacacaggcagcctcccattctggaatggccgccacacaccagaaggccgtgaagataatcgcctataagaacggcgacggctaccggaatggaaaactgatagtggccggaacctttcccatgctcctgacagagtgtacggagcagctgggtctggctcgggcagcaagcaaagtgtataccaaagatggtacacctatctttactctgcgtgacctggtgctatgggcactggacgaatcttttttacagagagactctgagaaacagaagcaggatgccgcaccggtgggcaaggagcagattatcgttgagtcaatggaggagaatccccggatgaaagtgaagaaccgattgtttgcaaagtccgtgacctccgactctctcgacggaatagataaatcactgctgactttgatccttcggaaccctattgccatctgggtcagctgtggggagcctttcttaccgcccaacgcgctgcagaaagccgagaaactagaaaaacagaactggctgaagaaagatcgcatactcgccgacctggatactatgaggcataagatgaggcagctcaaaggtcggcgagtggccgcttgccagcccgctaccatggtgcccactaagtctcctgtgcaacccgtcgtggtagagggcggctggacggaacagactcaacaggagattaagctgatggaattgataagacataccgaggcacacctatcagaaatccaggaaatggagtcaaaaattaacttccctatcgccaccaaacggatagccgtaaagccatctaacctctacaagcagccaaacacaaaacgggtgtggatctatctgaacggcggacgaccggaagacgggacttacgcatggggaaaaacgatctctgaggtatccctcctatatctgaaaacatggattttcatttggagcagaaaggtctttttttatttccttatcaccgcttag

SEQ ID NO: 115029 - DNA, 2190 bp, synthetic construct
  misc_feature 1..2190: note = Description of Artificial Sequence: Synthetic coding sequence
  source 1..2190: mol_type = other DNA
atgtccttcggcagagatatggagcttgagcacttcgatgaacgtgacaaggctcagcggtattcacggggaagtagggtaaacggtttaccatccccaacccacagtgcgcattgctcattctacagaactcgcactctacagaccctttcttccgagaagaaggccaaaaaagtgaggttctatcggaacggcgacagatatttcaagggaattgtgtatgcaatatccccagaccggtttagatcttttgaagccctcttagctgatctgacacgcactctgtccgataacgtgaacctgcctcaaggtgtacggacgatctacactatcgatggcctcaaaaagatttcttcactagatcaactggtggagggagagtcgtatgtttgcggaagcatcgagccattcaagaagttggagtataccaaaaatgtcaatcccaactggtctgtaaatgtgaagactacatcagccagtagagcggtttctagcctagccactgcaaagggaagtccttctgaagtgcgcgagaacaaggactttatccgccctaaactcgttaccataatccgttcaggcgtgaagccaagaaaggcagtccgaatattgctgaacaaaaaaaccgcccacagtttcgaacaagtcctcacagacatcactgatgccatcaagctcgactcaggagtggtgaagcgcctctataccctggacgggaaacaagtaatgtgtttacaggacttttttggtgacgacgatatctttatcgcctgcggccccgagaaattcaggtatcaggatgattttttactggacgagagcgagtgtcgggtggtgaaatcaacttcatacacaaaaatagccagtagctcccgccggagtacaacgaagtcaccagggccttcccggagatctaagtcccctgccagcacctcatcagtcaacggcacgcccggatctcagctgagcacacctagaagtggaaagagcccgagcccatcaccgacatcgcctgggtcattaagaaaacagcggtcatctcagcatggtggctctagcacttctctggcatcaaccaaagtctgctcatcaatggacgaaaacgatgggccaggagaagaagtgagtgaggagggcttccagatccccgccaccatcaccgaaagatataaagttggcaggacaatcggggacggcaacttcgcggtagtcaaggagtgcgtggaacgcagcaccgcccgagaatacgcattgaaaattattaagaagtcaaagtgccgcggcaaagagcacatgatacagaacgaggtctcgatacttaggcgggtgaagcacccaaatattgtcttactgatcgaagaaatggacgtgcccaccgaactgtatctagtcatggagctggtgaaaggaggggatctgttcgatgcaataacatccaccaataaatataccgaacgagatgctagcggtatgctgtataacttggcctcggcaatcaagtatttacactcgctaaacattgtgcatcgcgacattaagcccgagaacttgctggtgtatgagcatcaagatggatcaaaaagcctgaagttaggggactttggacttgcaacaatcgttgacgggcctttatatacagtgtgtggcactcccacttacgtggcaccggagattatcgcagagacagggtatgggctaaaagttgacatctgggctgccggcgttatcacttacatcctgctgtgcggattccctcccttccggggttctggagatgatcaagaagtcttattcgaccagatactaatggggcaggtggattttccctcaccatattgggacaatgtgtccgattccgccaaggagcttatcactatgatgcttctggtggacgtggaccagaggttcagcgctgtccaggtcctagagcatccttgggtgaacgatgacgggctgccggaaaacgaacaccaactgagtgtggccggaaaaataaaaaagcactttaatacgggaccgaaacccaactccacggccgcaggtgtgagtgtcattgccctcgatcatggattcaccattaagcgctctggcagcttggactactaccagcagccgggcatgtactggatcaggccccccctgctgatccgacgaggacgtttctccgatgaggacgcaactcgcatgtag

SEQ ID NO: 115030 - DNA, 2223 bp, synthetic construct
  misc_feature 1..2223: note = Description of Artificial Sequence: Synthetic coding sequence
  source 1..2223: mol_type = other DNA
atgtcctttggtagagacatggagctcgaacatttcgatgaacgggataaggcccagagatacagccgggggagccgagtgaatggtctcccctctcctacccactcagctcactgttccttctaccgcaccaggactcttcagaccctgagcagcgaaaagaaggcgaaaaaagtgaggttctataggaatggagatcgctatttcaaagggatagtatacgccataagtcctgacaggttccgctccttcgaggcattgctggccgacttgaccagaactctgtctgacaatgtaaatttgccgcagggtgtacgcaccatctacaccatcgatggcttgaagaaaatctctagtcttgatcaactggttgagggcgagtcctatgtgtgtggctcaatcgagccatttaagaaattggagtacacgaaaaacgtgaaccccaattggtccgttaatgtcaagacaacctcagcgagcagggccgttagctccctagccacagccaaaggaagccccagtgaggtgcgcgagaataaggactttatcaggcctaaattggtgactatcatcaggagcggcgtgaaacctcgcaaggccgttagaattctcctgaacaaaaaaactgcacattcctttgaacaagttctgaccgatatcacggacgcaataaaactggactccggagtcgtgaaacgactgtatacactagacggcaagcaggtgatgtgcctgcaggatttcttcggggatgatgatattttcatcgcatgcggccccgaaaaattccggtaccaagatgattttctactggacgagagcgagtgcagggttgttaagtcaaccagctatacaaaaatcgccagctcctctagacgatcaaccactaaatcccctggccctagccggcgctccaagtcaccggccagtacatcaagtgtgaacggcactcccggatcccagctttcaacaccacgttctgggaagtctccctccccaagcccaacaagtccggggtccctgcgcaagcagcgttcttctcagcacgggggctcctctaccagcctggcaagcaccaaggtctgctcctcaatggatgaaaacgatggcccgggggaggaggtaagcgaggagggctttcagattccagctacaattacagaaaggtacaaagtcggacggacaatcggagatgggaattttgcagtggtgaaagagtgtgtcgaacgcagtacagctagggaatacgcactgaagattattaagaagtctaaatgccgaggcaaagagcatatgatccagaacgaggtcagcatcctgagacgggttaagcatcccaatattgttttgctgattgaggaaatggatgtgcctaccgagttatatcttgttatggagcttgtgaaaggcggggacctattcgatgcaatcaccagcaccaataaatacaccgaacgagacgcctccggaatgctgtacaacctagcgtccgcaataaaatacctccacagcttgaatattgtgcatcgcgatataaagccggaaaatctgctggtttatgagcaccaggacgggtcgaaatcactgaagcttggagacttcggcctggctacgattgtggatgggcctctgtacaccgtgtgcggcaccccaacatacgtggcccctgaaatcatcgccgagacaggctacggcctgaaggtggacatatgggctgccggcgtgatcacctacattctattatgcggatttccgccctttaggggcagcggcgatgaccaggaagtgttatttgaccagatactaatggggcaggtagattttccctcaccatattgggataacgtctcggactcagctaaggagcttataaccatgatgctcctggtggacgttgaccagcggttctccgccgtccaggtccttgaacatccttgggtcaatgatgatggcctgcccgaaaacgaacaccaattgtccgtggctggtaaaatcaaaaaacactttaacacaggccctaagcccaactctaccgcagcgggggtttccgtcatcgctacgacagccctggacaaagagagacaggtgtttcgcagacggagaaatcaggacgtgcggagtagatataaagcacaaccagcccccccagagctgaacagtgagtcagaggactactccccttcttccagcgaaaccgtccgaagccctaactcccccttttag

SEQ ID NO: 115031 - DNA, 1092 bp, synthetic construct
  misc_feature 1..1092: note = Description of Artificial Sequence: Synthetic coding sequence
  source 1..1092: mol_type = other DNA
atgagtttcggcagagatatggagcttgagcatttcgacgagcgggataaagcccagcgatactctcgaggcagtagagtgaacggactccctagccccacccatagtgctcactgcagcttctataggacacgcacactccaaactctcagctctgagaagaaggccaaaaaagtacgcttctaccggaatggggacagatacttcaagggaatcgtctatgccatttccccagataggtttagaagctttgaagctttgttagccgatttgacgagaaccctgagtgataacgtgaatctgccccagggcgtgcgtaccatttatactatcgacggcctgaagaagatctctagcttggatcagctggtggagggagagtcctacgtgtgtggatctatcgaacctttcaaaaagttggagtacactaaaaatgtgaatcctaattggagtgtaaacgtgaaaactacgtctgcctctagagccgtaagttcactggccacagcaaaggggtccccctctgaagttcgggagaataaggattttatccgccctaaattagtgaccatcatcaggagtggagtcaaaccgagaaaagctgtacgtatcctgttaaacaaaaagacagcccattcattcgaacaggtgctcaccgacataactgatgctattaagctggacagcggcgtggtaaaaagactatacactctggatggtaagcaagtgatgtgcctgcaggacttttttggtgacgacgatatctttatagcgtgtggacctgaaaagtttcggtaccaggatgactttctccttgatgagtcagagtgtagggtcgtgaagagtacttcatacaccaagatcgcctcaagtagtcggagatctactactaagtcccctggaccaagcaggcggtctaagtctccagcatcgacctcaagcgtcaatggcaccccggggtcacagctatctactcctagatccggtaagagccctagtccaagccccacgtcacccggcagcttacggaaacagagagatctataccgcccgctatccagtgacgacttagacagcgtcggcgatagcgtgtag

SEQ ID NO: 115032 - DNA, 1302 bp, synthetic construct
  misc_feature 1..1302: note = Description of Artificial Sequence: Synthetic coding sequence
  source 1..1302: mol_type = other DNA
atgctcgaactcatcgaagttaatggcacaccagggtcccagcttagtacacctcgctcggggaaatccccttcaccctcaccaacaagccctggcagccttcggaagcagcgctcctcacagcatggcggctcaagcacatccctggcttcgacaaaggtctgctcttccatggatgagaatgacggtccgggcgaagaggttagtgaggaaggtttccagatccccgcaacaattacagagcgctacaaagtagggaggactattggcgatggcaattttgctgtggtcaaagaatgcgtggaaaggagcacagctcgggaatacgcattgaaaataataaagaagtcgaagtgtcgtggaaaagagcacatgattcaaaatgaggtgagcattctgaggcgtgtaaagcatccaaatatcgtactgctcatagaggaaatggatgtgcccacggagctgtacctggtcatggagctagttaagggaggtgatttgtttgacgccatcacttctacaaacaaatataccgagcgcgacgccagcggcatgctgtataacctggcaagcgccattaaatatctacacagcttgaacatcgttcatagggacatcaagccagagaaccttcttgtgtatgagcaccaagatgggtccaagtctttgaagttgggtgattttggcttagctacaatcgttgatgggcccctgtataccgtatgcggcacccccacatatgtggcaccagagattatcgccgagaccggatacggattgaaggtggacatttgggccgccggagttatcacgtatatcctgctttgcggattcccaccatttagaggatccggagatgatcaagaagtgctcttcgaccagatcttgatggggcaagtggactttccttcaccttactgggacaatgtctcggactctgcaaaggagctgattaccatgatgctgctggtggacgtggatcagaggttcagtgcggtgcaggtcttggagcacccttgggtcaatgatgacggtttgcctgaaaacgaacaccagctgtcggtagccggcaaaatcaagaaacattttaacactggacctaaacctaatagcactgctgcaggggtgtccgtgattgccactaccgccctggacaaggagcgccaagtattccgaaggcgacggaaccaggacgtgagatctaggtacaaagcacagcccgcccccccagagctgaacagtgagtcagaggattattccccctcgtcctcagagaccgtccggagtcctaactcaccattctag

SEQ ID NO: 115033 - DNA, 1266 bp, synthetic construct
  misc_feature 1..1266: note = Description of Artificial Sequence: Synthetic coding sequence
  source 1..1266: mol_type = other DNA
ttatcattaatcaagttcaacggaacccccggcagccagttatcgactcctcgtagtggcaagagtcccagcccctctcctacatctccgggttccctgaggaaacagcggagtagccaacatggaggcagcagcactagcttagcgagtacaaaggtgtgttcaagtatggatgaaaacgacggccctggggaagaggtatctgaggaaggcttccaaatccctgcaactatcacggagcgctacaaagtgggacgtactattggtgatggtaacttcgccgtggtgaaggagtgcgtggagcgctccaccgccagggagtacgccctcaaaatcatcaagaagtctaagtgtagaggcaaagaacacatgatccagaatgaagtctctattctgagaagggtgaagcaccccaacatcgtcctgctaatcgaagagatggacgtcccaaccgaactatacttggtgatggagctcgtcaaggggggtgatctgtttgacgctattacctccaccaacaaatacacagagagagacgcctcaggaatgctgtataacctagcctccgccatcaaatatctgcatagcttaaacattgttcaccgggacataaagccagagaatcttctggtgtacgagcaccaggacggatccaagtccctcaagttaggagactttggacttgcaacaatcgtggacgggccactgtacacagtctgcgggacaccaacctacgtcgcccctgaaatcattgctgaaactggctatggcttgaaagtggacatctgggccgctggcgtcatcacatacatcctgctatgtggattcccaccttttcgaggctccggggacgatcaagaggtgctgttcgaccagattttgatgggccaggtggactttccctcaccctattgggataatgtctcagattctgccaaggagcttattactatgatgctgctggttgatgtagatcagcgctttagcgccgtacaggtgcttgagcacccatgggttaatgacgacggccttccggagaatgaacaccagctttcagtggctggaaaaatcaagaaacactttaatactgggcccaaaccgaattcaactgcagcgggggtgtcggtcatcgctctggatcacggatttactatcaagcgtagcggatccctggactactatcagcagcctggtatgtactggattcggcccccgctgttaatacgtcgaggtcgcttttcggacgaggatgcaaccagaatgtag

SEQ ID NO: 115034 - DNA, 1860 bp, synthetic construct
  misc_feature 1..1860: note = Description of Artificial Sequence: Synthetic coding sequence
  source 1..1860: mol_type = other DNA
atgtcattcggacgcgatatggaactggaacattttgacgaaagggacaaggcccagcggtatagccgtggttcccgggtgaacggtttgccttcacccacccactctgcacattgttcattctatcggacaaggaccctgcagacactcagtagcgagaaaaaagcaaaaaaagtgcggttttatcgtaatggagaccggtattttaagggtattgtgtatgctataagccccgaccgcttcagatcctttgaggcattgctcgcagatctgaccaggaccctgtcagacaatgtgaatctgccccagggtgtgaggactatttataccattgacggtctgaagaagattagctctctggaccaacttgtcgagggcgaatcatacgtgtgtggctcaatcgaacccttcaagaaacttgagtatacaaagaatgtgaaccctaactggagcgttaatgtgaagacaacgagtgcaagccgcgccgtctccagcttagcaaccgctaagggatccccctccgaggtcagggagaataaggattttatcagacccaagctcgtcaccataataaggtccggagttaagccccgcaaggcagtccgaattctgctgaataagaagacagcgcacagttttgaacaggtccttaccgacataactgacgccattaagctcgactccggtgtcgtcaaacggctgtacactttagatggcaagcaagtcatgtgccttcaggactttttcggagacgacgacattttcatcgcatgcggtcccgaaaaattccgttaccaggatgatttccttcttgacgaaagcgagtgtagggtcgtgaagagtacgagttataccaagatcgcctcatcctccagaaggtcaactaccaagtcccctgggcccagcagacgatctaaaagccctgccagtaccagctccgtgaatggcaccccagggagccaactgagcacgcccagaagtggtaagtccccctcaccttcccctactagtcctggctccctaagaaaacagcgatccagccagcatgggggcagcagcacatccttggccagtactaaagtgtgtagctcaatggatgagaacgacggtcctggcgaggaggtatcagaggagggctttcagattcccgcgacaatcacagaaagatacaaggtgggtcgaaccatcggagatgggaatttcgctgtggtgaaggagtgtgtcgagcgctcaacagcgcgcgagtacgccctaaagattatcaaaaagtcaaagtgcagggggaaagagcatatgatccagaacgaggtctccattctgcggcgagtcaaacatcccaacatagtgctgcttatagaagagatggacgtgcccactgaattgtacctggtaatggagctggtcaagggcggcgacctgtttgatgccataaccagcacaaacaagtaccttcactccttaaacatcgttcatagggatatcaagcctgaaaatctgcttgtttacgaacatcaggatggcagcaagagcttgaagttgggcgactttggcctggcaacaatcgtggacggaccactgtacaccgtgtgtgggacaccaacttatgtggcccctgagattatcgccgagacaggctacggtctgaaagtggatatctgggctgcaggagtcataacatacattcttttgtgcgggtttccaccgtttagaggcagcggagacgatcaggaagtgctcttcgaccagatcctgatggggcaggtggattttccttccccatactgggataacgtctctgatagcgcgaaagagctgatcacaatgatggcttctcagaagatgaacatttcctgccaatag

SEQ ID NO: 115035 - DNA, 2301 bp, synthetic construct
  misc_feature 1..2301: note = Description of Artificial Sequence: Synthetic coding sequence
  source 1..2301: mol_type = other DNA
atggcaagcacaaggtctatcgaactggaacatttcgaagagcgggataagcgtcctagaccgggcagcagacggggagcccccagttctagtggcggaagttcctccagcgggcctaaaggcaatggccttatacctagtccagcccactccgcccattgctctttctatagaactaggacacttcaggctttgtcttctgaaaagaaggcgaaaaaagctcggttctatcgcaatggggaccggtactttaagggattggtattcgccatctctagcgaccgctttagaagcttcgatgctcttctcattgagctgactcgcagcctgagtgataatgtcaatctgcctcaaggtgtaagaacaatttacacaatcgacggtagccgcaaagttacaagccttgacgagctattggagggtgaatcatacgtctgtgcgagcaatgaaccattccgtaaggttgattacacgaagaacattaaccccaattggagtgtgaacataaaaggcggcacctcgcgggccctagcggcagcctcttctgtcaagtcagaggttaaggaatccaaagattttattaagccaaagcttgtgacagtgatcaggtcgggtgtgaaacctaggaaagccgtccggatccttctcaacaagaaaaccgcacactccttcgagcaggttttgaccgacatcactgaggccatcaagctggactctggtgtggtgaagcgcctttgcactctcgacggcaaacaggtgacttgcctccaggacttctttggggacgacgacgtgtttattgcctgcggacctgaaaagtttcgttacgcccaggacgacttcgtgttggatcactccgagtgtcgggtgcttaagtccagttattcacgcagcagcgctgtaaagtacagcggcagtaaatcccctggtccttcgaggagatctaaaagtcccgcctctgttaatggaacaccaagcagccagctcagtactcctaaatccactaagagttcatcctcttctcccacgagccctggctcctttcgcgggcttaaacagatctcagcccatggtcggtcctccagcaacgttaacgggggccccgaattggatcgttgtatcagtcctgagggggtaaatgggaatagatgctccgaaagctcaactttacttgagaagtacaagatcggcaaggtgataggtgacggcaactttgccgtcgtgaaggagtgcatcgaccggtcgacgggcaaggaattcgccctgaagattattgataaggccaaatgctgcgggaaggagcacctgatagaaaacgaggtctccatcttacggcgtgtgaagcatccaaatattattatgctcgtcgaggagatggaaacggcaacagaactctttctggtaatggaactggtaaaggggggtgacctgttcgacgcgattacaagctcaacaaagtacaccgagagagacgggagcgccatggtctacaacttagctaacgctctgagatatcttcacggcctgagcatcgtccatcgggacatcaaacctgagaacctgctggtctgcgagtatcctgacggaaccaagagcctgaaattgggcgacttcggtcttgcgacagtcgtcgagggcccactgtatacagtttgtggcacaccaacatatgtggctccagaaatcattgccgaaactggttacggattgaaggttgacatttgggcggctggagtgataacctacattttgctgtgcggctttccgccgtttaggtcggagaataacctgcaagaggacctattcgatcagatactggccggcaaactggagtttcccgccccttactgggataacatcacagacagtgccaaggagttgatttctcaaatgttgcaggtgaacgtggaggcacgctgcacggcaggacaaatcctttcacatccctgggtgagcgatgatgcttcacaggagaacaatatgcaggctgaggtcactggtaaactgaaacagcacttcaataacgcactgcccaagcaaaattcgaccactaccggggtatccgtaattatgaatactgctttggataaagaaggtcagattttttgttctaaacattgtcaagattctggcaggccaggcatggagcctatttcaccagttcccccgtctgtggaagaaattcccgtccccggcgaagccgtgcctgcccctaccccccctgaatcccccaccccccatcctccgccagccgcacccggcggtgagcgcgctggcacttggcggagacatcgggactag

SEQ ID NO: 115036 - DNA, 2352 bp, synthetic construct
  misc_feature 1..2352: note = Description of Artificial Sequence: Synthetic coding sequence
  source 1..2352: mol_type = other DNA
atggcgagtactcgctccattgagttagagcacttcgaagaacgcgacaaaaggccacgccctggatcacggcgtggggcgccatcttcctcaggtggcagtagcagctccggcccgaagggaaatggtctaatcccttcaccggcgcactctgcacattgttccttctaccgcactcgtacactccaggccttaagcagcgagaaaaaagccaaaaaagcaagattttacagaaatggggacaggtactttaaggggttagtctttgctatctccagtgacaggtttaggtcctttgacgccttactcattgagttgacccggtccctaagtgataatgtaaatctgccccagggcgtccgaaccatatacaccattgatggcagcaggaaagtgacctctctagatgagttgttggaaggcgagagttacgtttgtgctagtaatgagccttttcgcaaagtggactatacaaaaaatatcaatcccaattggagcgtcaacatcaagggtgggacctctcgtgcactggcggctgcctcgtccgtgaagtccgaggttaaggagtccaaggactttattaaacctaaactggtcaccgttatccgctccggtgtgaagccaaggaaggccgttcggatactgctgaataagaagactgctcatagcttcgagcaggtgctgactgatataaccgaggctattaagcttgattcgggtgtggtgaaacgcctgtgcaccctcgacgggaagcaggttacgtgtctgcaggatttctttggcgacgacgacgtcttcatcgcctgtggtcccgagaaatttcggtatgcccaagatgacttcgtgcttgaccacagcgagtgtagagttttaaaaagcagctatagccggtcaagcgccgtgaaatattccgggtccaaatcccctggcccttctcgcaggtccaagagccctgctagtgtgaaacgcggaggtcattactcttctgcatactcaactgctaagtcccctgtcaatggcaccccatcatctcagctttctactcccaagagcactaagtcttcctccagttctccaaccagccctggctcctttagagggcttaagcagatctccgcccacgggcggtcttcctctaatgtgaacggcggtcccgagctggatcgatgtatttcccccgaaggtgtgaatgggaatagatgtagcgaatctagtaccctgctcgaaaaatataagatagggaaagttataggcgatgggaacttcgcagttgtcaaagaatgtatcgacaggtccaccggtaaagaatttgccctgaaaatcattgacaaggcaaagtgctgtggcaaggagcatctcatcgagaatgaagtgtccatcttgcgccgggtaaagcaccccaatatcatcatgctagtggaagagatggagactgctacggaattattccttgttatggagctggtgaaaggcggtgatctctttgatgccattacttctagcactaagtacacagagcgggatgggagcgccatggtctacaaccttgcaaacgcattgcggtacctccacggcctgtccatcgtccacagggacataaaacctgagaacttgctcgtttgcgaatatcctgacggtactaaaagtttgaaactgggcgacttcggacttgcaacggttgtggaaggacccctgtacacggtttgcggtactcctacgtacgtcgccccagaaattatcgccgagacaggctatggcctgaaggtggatatttgggccgcaggtgtgatcacctatatcctcttatgcggctttccgccatttcggagcgaaaacaatttgcaggaagatctcttcgaccagatcctggccggaaaactcgagttccccgcaccttactgggacaatataactgatagtgctaaagagctaatctcacagatgttgcaagtgaacgtcgaagcaagatgcaccgcaggtcagattttgagccatccttgggtaagtgacgacgcatcacaagaaaacaatatgcaggctgaagtcaccggcaaactgaagcaacacttcaataacgccctgcccaaacaaaattctactacaacgggcgtctctgtgattatgaacaccgccctggataaggaaggccagatcttctgctcgaagcactgccaagactccggaagacccggtatggaacccatcagccccgtacccccatcagttgaagagattcctgtacccggcgaggctgtgcccgctccgactcctcctgaatcccctaccccacacccaccacctgctgcccccggtggagaacgcgccggcacctggcgcagacatcgcgactag

SEQ ID NO: 115037 - DNA, 2298 bp, synthetic construct
  misc_feature 1..2298: note = Description of Artificial Sequence: Synthetic coding sequence
  source 1..2298: mol_type = other DNA
atggccagtacaagatccatcgaactggaacattttgaggagagagacaaacgaccccggcccggttcccgacgcggcgccccctcttccagcggaggcagttcctcaagtggtccaaaggggaatggactcataccctctcccgctcattccgcgcactgcagcttttaccgaacacggactcttcaagccctaagcagtgaaaagaaagccaagaaagcccgcttttaccgcaatggtgaccggtattttaaaggccttgtgttcgccatctccagtgatcggttcagaagctttgacgcactcctgatcgaattgacgcggtcgctcagcgataacgttaatttaccccagggcgttcgaactatctacactatagacggatcccgcaaggttacttcactagacgaactgctcgaaggggagtcctatgtctgcgcaagcaacgaaccttttcgcaaagtggactacactaaaaacattaatccaaattggagtgtaaacatcaaggggggaacatctcgtgcgttggccgctgcttcctcagtgaagagcgaggtgaaagaatcaaaggatttcataaaacccaaacttgtaactgtgatccgttccggggtgaagccaaggaaggcggtgcgtatcttactgaacaaaaagactgcccacagttttgagcaggtattaactgacatcacagaagcgatcaaattggactcgggtgtggtgaagcgcctgtgcactctagacggtaaacaggtgacctgtctgcaggacttttttggagatgatgatgtgttcattgcatgtggccctgagaagttcaggtatgcccaggacgacttcgtgcttgaccatagcgaatgcagggttctgaagagctcatactctcggagcagcgctgtaaaatactctggcagcaagagccccggcccctctagacggtctaaatcgcctgccagtgtgaatggtacaccatcatctcagttaagcacacccaaatcaaccaagagttcgtcctcatcccccacaagtccaggttcatttaggggtctgaaaatatccgcccatgggagaagctcatcaaacgtgaatggaggacctgaattagatagatgcatttctcctgaaggggtgaatggaaatagatgtagcgagtccagcaccctgcttgaaaaatacaagataggtaaggttattggagatggcaacttcgctgtcgtaaaggaatgtattgacagatccactggtaaagagttcgctctcaagattatcgacaaggcgaaatgctgtgggaaggaacatctcatcgaaaatgaagtctccattctccgccgagttaaacatcccaatataataatgctcgtcgaagaaatggagaccgccacggaactgtttctcgtaatggagctcgtgaaaggtggggacttattcgacgctattacgtccagcacaaagtacacagagcgggatggctcagcaatggtgtacaatctggctaacgcgttaagatacctgcacgggctgtcaattgtgcatcgggatattaagccagaaaacctcttggtctgtgaataccctgacggaacgaaaagcttgaaattgggagatttcggactggcaactgtcgtggaaggccctctctataccgtgtgcggcacccccacgtacgttgctcccgagatcatcgccgaaactggatatgggctgaaggtcgacatttgggcggccggcgttattacatacatactgttatgtgggttcccaccttttcggagcgagaataacctccaggaagatctgttcgaccagatcttagctggaaaattggagtttcccgctccctactgggataatattacggattctgccaaggagctgatttctcagatgctgcaggtcaacgtagaagctcggtgtacagcgggccagatcctgtcgcacccgtgggtgagcgacgacgcctctcaggaaaacaatatgcaggcagaggtgaccggcaaactgaaacagcactttaataacgcccttcctaagcagaattcaaccacgaccggtgtgagcgtgatcatgaatacggccctggataaggaaggccaaatcttctgcagcaagcactgtcaagattctgggcgacctggtatggaaccaataagtcccgtgccacccagcgtggaggagattcctgtaccgggcgaggcagtccccgctccaacacctccagaatctcccacacctcatcctcccccagcagctccgggtggggaaagagcaggaacatggcggaggcaccgagactag

SEQ ID NO: 115038 - DNA, 1947 bp, synthetic construct
  misc_feature 1..1947: note = Description of Artificial Sequence: Synthetic coding sequence
  source 1..1947: mol_type = other DNA
atgggaaaggaacccctgacactgaagtccattcaggttgcagtcgaagaactgtaccctaacaaggcgcgggcattaacgcttgcccagcactcaagagctccatctccaagactccgtagccggctctttagtaaagccctcaaaggcgaccatcgttgtggtgagaccgagacacctaaaagctgctcagaagtcgctgggtgcaaagctgctatgcggcaccagggtaaaattccggaggagctgagcctcgacgatcgcgcacgcacccagaaaaaatggggacgaggtaagtgggagccagagccatcatccaaacctccaagagaggccaccctcgaggaaaggcacgctaggggcgaaaaacatttaggagtcgagatcgagaagacgagtggcgagatcatcagatgcgagaagtgtaaacgagagagggagcttcagcagagcttagaaagagaaagactgtcattgggcacatccgaactggatatggggaaagggccaatgtatgatgtagaaaaactggtcagaacaagaagttgcagacgcagccctgaagcgaaccctgcctccggagaggagggttggaagggtgactcacatcgatcttccccccgcaatccaactcaggagttacggagaccctcgaagtcaatggacaaaaaagaggaccgggggcccgaagatcaagagtcccacgcacagggcgctgcgaaggctaaaaaggacctggtcgaggttctccccgtgacagaggagggactgcgtgaggtgaagaaggatacacgcccaatgagcagaagcaaacatgggggctggttgctacgggagcaccaggcggggtttgaaaagttgaggcgcacgagaggggaagagaaggaggcagaaaaggagaaaaagccttgcatgtctggtggtcgccgtatgacattgcgagatgaccagcccgctaaactggaaaaagaaccaaagacccgtccagaagaaaataagccagaacgccctagcggccggaagccacggcccatgggaatcatcgcagcaaacgtggagaagcactacgaaacagggagggtgatcggcgacggaaactttgccgttgttaaagagtgcagacatagggaaactagacaagcctatgcgatgaaaataattgataaatcacgcttaaaaggcaaggaagacatggttgactcagagatcctgatcatccaaagtctctctcacccgaacattgtgaagctgcacgaggtatacgaaacggacatggaaatttacctgatcctggaatatgtacagggcggagacctcttcgacgccatcatagagagcgttaagttccctgaaccagacgcggctctaatgatcatggacttgtgcaaggcattggttcacatgcacgataagtctattgtccatcgagacctcaagcctgaaaatctcttggtgcagagaaacgaagataagtcgacaacactcaagcttgccgatttcggattagcaaagcatgtggtgagaccaatcttcactgtgtgtggcacacctacctatgtagcaccggaaatcctgagcgaaaagggatatggtctggaggtggatatgtgggcggcaggcgtgatcttgtacatcttgctgtgcggctttcccccattccgtagtcccgagcgggaccaagacgaacttttcaatatcatccaactggggcatttcgagttcctgcctccgtattgggataacatctctgacgctgccaaagatctggtctctaggctgctggtcgtagaccctaaaaagcggtataccgcacaccaggtcttacagcacccatggattgaaaccgcaggcaagacaaatacagtcaagcggcagaaacaagtgtccccaagcagcgagggtcactttagatcccaacacaagcgggtggtggagcaagtatcctag

SEQ ID NO: 115039 - DNA, 1122 bp, synthetic construct
  misc_feature 1..1122: note = Description of Artificial Sequence: Synthetic coding sequence
  source 1..1122: mol_type = other DNA
atgcctaatgacgaggctttcagtaagccttccacaccaagcgaggcaccgcatgctcccggagtgccgccccaagggcgagcagggggatttgggaaagccagcggggccctagtgggcgcggcctcgggtagttctgccggaggatcttccagagggggaggttccggttcaggagcctccgatttaggggccggatctaaaaagtcacctagactgcctaaatgcgctaggtgccggaatcacggctacgcttcccccctgaagggacacaagcgtttttgtatgtggcgcgactgtcagtgcaagaagtgtaacctcattgcggagcggcagcgcgtgatggccgcacaggtcgcactcagaaggcagcaggcgcaagaagaggaactgggcatttcccacccaattcctttaccctcagccgccgaactgctcgttaaaagagagaacaacggcagcaatccttgtctcatgacggaatgctcaggtacgagtcaaccacctcccgcatcagtgcccacaacagcagcctccgagggaagaatggtcatacaagatatccccgctgtgacttcgagaggacacgtggagaatacgccggatttagtgagtgactccacatattactccagtttctatcagcccagtttattcccgtattacaataacctgtacaactgtccccaatactccatggctctggctgccgattccgcctctggggaagtgggcaacccactaggcggaagccctgtcaagaattccctgagaggcttgcccggaccctatgtgcctggtcaaactggtaaccagtggcagatgaagaatatggaaaatagacatgcgatgagtagccaataccggatgcatagctattaccctcctccaagttacctaggacaatccgttccacagttttttacctttgaagatgcaccatcttaccctgaggcacgcgccagcgtcttctcgcccccgtctagtcaagacagcgggctggtgtctcttagtagtagcagcccgataagtaataaatcaacaaaagccgtgctcgagtgtgaacctgcgtctgagccttcctcctttacagtcacccctgtcattgaggaggatgagtag

SEQ ID NO: 115040 - DNA, 525 bp, synthetic construct
  misc_feature 1..525: note = Description of Artificial Sequence: Synthetic coding sequence
  source 1..525: mol_type = other DNA
atgcccaacgatgaggctttctctaaaccttctaccccatcagaggcaccccacgctccaggggtgccaccccagggccgcgccggggggtttggaaaggcgagcggtgcgctggtcggagcagccagtggcagcagcgctgggggtagtagtagaggaggggggtccggctctggggcctccgacctgggagccggatccaaaaagagtccccggctccctaaatgtgctaggtgcaggaaccacggatacgccagcccattgaagggacataaacggttttgcatgtggcgagattgtcagtgcaagaagtgcaatttaatagcggagaggcaaagggtcatggctgcgcaggtcggcgccggggtgagggagccaggcttttcactgagtttctttttcttctttttctttcgatggagcttagcacgcctcccaagactgcagtgctcaggcgccatcctggcacactgtaactcagcctctagggtgcaggctattctgctgccccaacctcctaaatag

SEQ ID NO: 115041 - DNA, 681 bp, synthetic construct
  misc_feature 1..681: note = Description of Artificial Sequence: Synthetic coding sequence
  source 1..681: mol_type = other DNA
atggcagacccacaagccgggagcgctgccggagattgggagattgatgtggaatcacttgagctcgaggaggatgtgtgcggtgctcctcggtccacccccccaggaccctccccacctccagccgatggcgactgcgaagatgacgaagacgatgacggggtggacgaagacgctgaagaggaaggcgacggtgaagaggcgggggcttctcctggaatgcctggccagcctgaacagaggggaggacctcagcctagacctcctcttgccccccaagcatcacccgcaggtacgggtccaagagaacgatgcacccctgcaggcgggggagctgagccacgcaagctctctagaactccgaagtgcgctcggtgtcgcaaccacggtgtcgtgagctgtctcaaagggcacaaacgcttctgcagatggagggattgccagtgtgctaattgtttactagtggtggagcggcaacgcgtaatggccgctcaagttgctcttagacgccaacaagccacagaggataaaaagggcctttcaggtaaacagaataacttcgaacgcaaagcagtttaccagagacaggtccgcgcgccttctcttctggccaagtccattcttgaggttctgcttgggctcttttacagctactacgtctacatcatgaaccatctctag

SEQ ID NO: 115042 - DNA, 1686 bp, synthetic construct
  misc_feature 1..1686: note = Description of Artificial Sequence: Synthetic coding sequence
  source 1..1686: mol_type = other DNA
atggccgacccgcaggcaggtagtgctgcgggggattgggaaatcgacgtcgagagcctggagctggaggaagatgtgtgtggagccccacgtagcacaccaccggggcctagtccccccccggcagatggtgattgcgaggatgacgaagacgacgatggagtggatgaggacgccgaggaggaaggcgatggagaggaggccggggcttcaccgggcatgcccgggcaaccggaacagcgcgggggccctcagccgcggcctccccttgccccgcaggctagcccagctgggaccggcccccgggagcgttgtactccagctggtggaggagctgaaccacggaaactgagtcgtacacccaagtgcgctagatgcagaaatcacggggttgtgtcctgcctgaagggccacaaaaggttctgcagatggcgggattgccagtgcgctaattgtctgctcgttgtcgagcgccagagagtgatggctgctcaggtcgccctcagaaggcagcaggcaactgaggacaagaaagggttgtcgggtaagcagaacaatttcgagagaaaagccgtctatcaaaggcaggtgagggcgccatccctgctcgccaagagtatcctggagggttatagacccatccccgccgaaacatatgtgggcggaacatttccactgcccccccccgtttcagaccggatgagaaaaagacgcgcattcgctgataaggagctggagaacatcatgttggagcgggagtacaaagaaagagaaatgctggagacgtcgcaagccgctgcgctcttcctacccaatcggatggttccgggaccagattacaactcgtacaaatctgcttacagcccaagcccagtcgaacccccttctaaggacttctgcaacttcctccctacatgcttggacctcaccatgcagtattcaggatcaggcaacatggagctaatctcatcaaatgtaagtgtggccactacctatcgacagtaccctcttagctctcgctttctcgtttggccaaagtgtggaccaatcagtgacactctgttatatcagcagtgtttgttgaacgctacaacatccgttcaggcgctgaagccaggtgcaagctgggacctcaagggagcgagggtgcaggatggactcagcgcagaacaggacatgatgcctagcaagctggaaggctctctggtgctaccccacacccccgagattcagaccacacgcagcgacctccaggggcatcaagctgtgccagaacgctcagccttctctccacctcggagaaacttctcccccatagtcgacacagacagcctggcggcgcagggccatgtgctgaccaagatctcgaaggagaacactcggcaccccctacccctgcggcacaaccccttccattctctgtttcagcaaactctgacggataaatctgggccagagctgaaaaccccatttgtaaaagaggcttttgaggagacgcctaagaagcaccgggaatgtctcgtgaaggataatcagaaatacaccttcaccattgatcggtgcgcaaaggacctgttcgtggctaagcaggtgggtaccaaactgtcggtgaatgagccattatcattctccgtagagagtatcctgaagcggcccagctctgccattacacgcgtaagtcaatag

SEQ ID NO: 115043 - DNA, 1686 bp, synthetic construct
  misc_feature 1..1686: note = Description of Artificial Sequence: Synthetic coding sequence
  source 1..1686: mol_type = other DNA
atggcagatccccaagcgggttcagccgccggagattgggagatcgacgttgagtcactcgagcttgaagaagacgtttgcggagcccccaggagtacacccccaggccccagcccgcctccagcggacggcgactgtgaggacgatgaagatgatgatggcgtggatgaagacgccgaagaggaaggcgacggggaggaggccggcgcctctccgggaatgccgggtcagcctgaacagaggggcggaccccagccacgcccccctttggcaccccaagcctcacccgctggcactggtccgcgggagcgatgcactccagctggaggtggcgcagagccgcgcaaactgtcacggacccccaaatgtgcccgatgtagaaatcatggcgtagtatcctgcctgaaaggacacaaacgcttctgtcggtggagggactgtcagtgcgccaattgcctcctggtggtcgaaaggcagagggtcatggcggctcaggtggcactgcggagacagcaggctactgaggataagaaaggcttgtccggtaagcagaacaacttcgaacggaaggcagtatatcagcgccaggtgagggccccatctctacttgccaaaagcattctcgagggctatagacccatcccagccgaaacctatgtcggagggaccttcccactacccccacctgtgtctgaccgtatgaggaagaggcgggccttcgcagataaagaattggagaacatcatgctcgagcgagaatacaaagagagagaaatgctggagacttcacaggctgccgcattgttcctgcccaaccgcatggtgccaggtccagactataactcctacaagtcggcttactcaccttcaccggtggagcccccttcaaaggacttctgcaacttcttacccacatgtctggacttgacaatgcaatatagtggttcagggaatatggagctcatctctagtaatgtttcggttgccactacatacagacaatacccactcagctctcggtttctagtctggccaaaatgcgggcctatcagcgatactctgctctaccagcagtgtttgctgaacgcgacaacttccgtgcaggcgctgaaacctggagcctcatgggacctgaaaggggcccgagtccaggacgggctttccgcagagcaggatatgatgcccagcaagctcgaggggtccctggttcttccccacactccagaaattcagaccactcgctctgacctacaaggacaccaggccgtcccagaaaggagtgcctttagcccacctaggcggaatttttcaccaatagttgataccgattctctggccgctcagggacatgtactgacaaaaatttcaaaggagaatacaagacaccccctgcccctaagacataatcccttccattctttgtttcaacagactcttactgataagtcaggccctgagctgaaaactccattcgtaaaagaagcctttgaggagacccctaagaaacaccgggagtgtttggtgaaggataatcaaaaatatacctttaccatcgaccggtgtgcgaaggatcttttcgtggccaaacaggtaggtaccaaattgtcagttaacgaaccactatccttctcagtcgagagcattctgaagagaccttcgtctgccatcacccgtgtgagccagtag

SEQ ID NO: 115044 - DNA, 1686 bp, synthetic construct
  misc_feature 1..1686: note = Description of Artificial Sequence: Synthetic coding sequence
  source 1..1686: mol_type = other DNA
atggcggacccacaggccggaagcgctgcgggcgactgggagatcgatgtggagtccttagagctggaagaagatgtctgcggcgcaccaagatcaacccctcccggtcctagcccacctcctgccgatggcgattgtgaggacgatgaggatgatgatggcgtagatgaggacgccgaggaagagggcgatggagaggaggcgggcgcttcccccggaatgcccggacaacccgaacagagagggggtcctcagcccagacctccgctcgccccgcaggcttcccccgcaggcactgggcctcgcgaacggtgcactcctgccgggggcggtgcagaaccgaggaaattgtcacgcaccccaaagtgcgccagatgcagaaaccacggcgtggtgtcctgtcttaagggtcataagagattctgtcggtggagggattgtcaatgcgccaactgcttgctcgtcgtcgagagacagagggtaatggcagctcaggtagccctgcgccgccagcaagctaccgaggataagaaggggttgtccggaaagcagaacaattttgagaggaaggccgtataccaaagacaggtgagggcaccatccctacttgccaagtccatcctcgaaggatacaggccaatcccagcagagacttatgtgggcggcacctttccccttccaccgccagtgtccgatcgcatgcgtaagcggcgcgcctttgccgacaaagaactcgagaatatcatgctggaacgcgagtataaggagcgggaaatgctcgaaaccagccaggcagccgcactcttcttgcctaaccgaatggtgcccggaccagactataactcatacaagtcggcgtacagcccctcacctgttgaaccaccttccaaggacttttgcaatttcctgccaacgtgtttggacttgacaatgcagtactccggttcaggaaacatggaactgatctcatcaaacgtgtccgtagccaccacctatcggcagtatcccctcagctctaggtttctcgtttggccaaagtgtgggcccatctccgataccttactgtatcagcagtgtctgttaaacgctactactagcgtgcaggccctcaagcccggggcgtcttgggatcttaagggcgcacgagtgcaggacggcctgagtgctgagcaggacatgatgccaagtaagctggaggggagcctggtgctcccccacacacctgagattcagacaactcgcagcgacctacaggggcaccaggctgtgccagaacgatccgcattcagcccgcctcggagaaacttctctccaatcgtggacaccgatagcttggcagcgcaggggcatgtgctcaccaaaatcagcaaggagaacacacgccatccactccccctgcgccacaaccctttccattcactgtttcaacaaaccttgaccgataaatccgggcccgagttaaagaccccctttgtgaaggaagcattcgaggagactccaaaaaaacaccgggagtgcttggtgaaagacaaccagaaatacacattcacaatagatagatgtgctaaagacctttttgtcgctaagcaggttggcacgaagctttcagtcaatgagcccttatccttctccgtcgaatccattctcaaacgcccttcctccgccataacccgggtgtctcaatag

SEQ ID NO: 115045 - DNA, 681 bp, synthetic construct
  misc_feature 1..681: note = Description of Artificial Sequence: Synthetic coding sequence
  source 1..681: mol_type = other DNA
atggccgatccacaggctggctcagcagctggagactgggaaatagatgtggaatctctcgagctggaagaagacgtgtgtggcgccccccgttccactccacctggcccctctcccccacccgcagatggggattgcgaagacgacgaggatgacgatggagtggatgaggacgccgaggaggagggcgatggcgaggaggctggggcctcccctggcatgccgggccagccagagcaaaggggtggaccccagccgcgaccaccactcgcacctcaggcttcccccgctggtactggccctcgtgaaagatgcactccggctggtggtggagccgaaccccgcaaattatccagaaccccaaagtgtgcgagatgtagaaatcatggagttgtgagttgccttaagggccacaagcggttctgtcgctggagagactgccagtgcgccaactgtctgctcgttgtcgagagacagcgcgtaatggccgcgcaagtggccctgagaagacagcaggctaccgaggacaagaaagggctgagtgggaagcagaataactttgaacgcaaggctgtctaccaacgacaggtgcgggctccctctctattggcaaaatccatactggaggtgctgctgggtcttttttattcttactacgtatatatcatgaatcacttatag

SEQ ID NO: 115046 - DNA, 681 bp, synthetic construct
  misc_feature 1..681: note = Description of Artificial Sequence: Synthetic coding sequence
  source 1..681: mol_type = other DNA
atggctgacccgcaggcaggaagcgcagctggggattgggagatagatgtcgagtcacttgaactcgaggaggacgtgtgtggagcccctcgctccacaccccccgggccctccccccctccagcggatggggactgtgaggatgacgaagacgacgacggggtggacgaggacgccgaagaagagggcgatggtgaggaagccggtgcttctcctgggatgccaggccagcctgaacagcgtggtggccctcaacctcggcccccacttgccccccaggccagccccgctggcaccggacctagggagcgatgcacccccgccggcgggggcgctgaaccccggaaactctcccgcacacctaagtgtgctcggtgtcgaaaccatggtgtcgtttcatgcctaaaaggacataagcgcttctgtaggtggcgtgattgccaatgcgcaaactgtttactcgtagtcgagcgccagagagttatggccgcccaggttgcactccgccggcagcaggccacagaggacaagaaaggactgtcggggaaacaaaataacttcgaaagaaaggctgtgtatcagcggcaagttcgggctccgagcttattggcaaaatccatactggaggtgctcttgggccttttttattcatactatgtctacataatgaatcacctttag

SEQ ID NO: 115047 - DNA, 6039 bp, synthetic construct
  misc_feature 1..6039: note = Description of Artificial Sequence: Synthetic coding sequence
  source 1..6039: mol_type = other DNA
atgtggattctggcattgagcctgttccagtccttcgccaacgtattcagcgaagatctgcactccagcctgtactttgtgaacgcatccctgcaggaagtggttttcgcttcaactactggtaccctcgtcccctgccctgccgccgggatcccccccgttacactccggtggtacctcgcaaccggcgaagaaatctacgatgtaccaggcatccgccatgtgcacccaaacggcaccctgcagatttttcctttcccacccagcagcttttcaacgctcattcacgacaacacttactactgcacagccgagaatccttcaggcaagatacggagccaagatgtccacattaaggctgtactgcgggagccgtatacggtgcgggtggaggaccaaaaaaccatgcgaggaaacgtcgccgtattcaaatgcataataccttcgtcagttgaggcatatatcactgtagtgtcttgggaaaaggataccgtttctcttgtttctggttcaaggttcctcatcacatcgacaggagctctgtatatcaaggatgtgcaaaatgaagacgggctttacaactacaggtgtattacgcgacatcgctataccggcgagacccgacagagcaacagtgctcgtctctttgtttcggaccctgccaacagtgcaccatccattctggacggattcgaccaccgaaaggcaatggcgggacaacgggtggaactgccctgcaaggccctcggtcaccccgaacctgactatcgatggttgaaagacaacatgcccctggagctttcaggacgttttcaaaagaccgtgacgggcttgctaatcgagaatattcgaccatcagactctggtagctacgtgtgcgaggtgagcaacagatatggaaccgccaaggtcattgggcgactttatgtcaaacagcctcttaaagcgaccatatcacctcggaaggtaaagagctctgttggatctcaggtttcccttagctgcagcgtcactggaactgaagatcaggagctgagttggtaccgaaacggcgaaatcctgaatcccgggaaaaacgtccggatcaccgggatcaaccacgagaacctgataatggatcacatggtcaagtcagacggtggggcttaccagtgctttgtgcggaaggataaacttagtgctcaggactacgtgcaggttgtgctcgaggatgggactccaaaaattatctcagccttctctgaaaaagtagtatctccagctgaacccgtctcccttatgtgcaacgtcaaaggcacacctttacccacgataacctggacactagatgatgatccaattctgaagggcggttctcaccgcatctctcagatgattacatcagagggcaacgtagtctcctacctgaacatcagcagctctcaagttcgcgacggtggggtttacagatgcaccgccaacaattctgctggggtggtgttgtatcaggcccgtataaatgttcgtgggccagctagcatcagacctatgaagaatataaccgcgattgccggtagagatacatacattcattgccgggtgattggctatccatactattcaatcaagtggtataagaatagcaaccttcttccatttaatcatcgccaggttgcattcgagaacaatggtaccttaaagctgagtgacgtgcagaaggaggtcgatgaaggcgagtatacatgtaacgtgcttgttcagcctcaactttcaacctcccagagcgtccacgtgactgtgaaggtccctcctttcattcagccatttgaatttcccaggttctctatcgggcagagggtgtttatcccttgcgtagtcgtgtccggtgatttaccaattaccatcacatggcaaaaggatggtcgcccgattccagggtctttgggggtgaccattgataacatcgacttcacctcatcattacgtattagtaacctctcattaatgcacaatggaaattatacgtgcattgctagaaatgaggcagccgcggtggagcaccagtcccaacttattgtgcgcgttccgcccaagttcgtggtccagccacgcgatcaggacgggatatatggtaaggcagtcattctaaactgctccgctgaggggtaccctgtgcctactattgtctggaaattcagtaagggagctggtgtgcctcagtttcagccaatcgctctgaatggccgtatacaagtactctctaacgggtctctattaatcaaacacgtcgtagaggaggactctggctactacctgtgtaaggtctcaaacgacgttggtgccgacgtgtccaaatctatgtacctgaccgtaaaaatccccgctatgatcaccagttacccaaacacaacactcgcgactcaaggccagaagaaagagatgtcttgtacagctcatggagagaagccaatcatcgtacgttgggaaaaggaagaccggatcattaaccccgaaatggccagatacctcgtctcaaccaaagaggttggcgaagaggttatctcaacgttacaaatcctgcccaccgtccgtgaggattcaggcttctttagttgtcacgctattaactcatacggagaggataggggcatcatccagcttactgtgcaggaaccccctgaccctccggagattgagatcaaagatgtgaaggctaggaccataacccttcgatggacaatggggtttgatggaaacagccctatcactggctatgatatcgagtgcaagaataagagcgactcctgggatagtgcccagcgcaccaaggatgtgagtccccagctgaacagcgcaacgatcatcgacatccacccttcgtcaacttacagcatcagaatgtatgctaaaaacaggattggcaaatctgagcctagcaacgagctgaccatcacggctgatgaggcagcacccgatgggccccctcaggaggttcatctggaacctataagctcccaatccattagggtgacatggaaggcccctaaaaagcacctgcaaaatggcattatcagggggtatcaaatcggctatcgcgagtattctactggaggcaattttcagtttaatatcatttcagttgacactagtggcgattccgaggtgtataccctggacaatcttaataaattcactcagtatgggctggtggtccaggcttgcaaccgcgccggcacaggcccatcctcccaggaaatcatcactacgacactcgaggacgtgccaagctaccctcccgaaaacgtgcaagccatagctacctctccagagagcatttccatctcatggtccacactctctaaggaggccctgaacggtattctccagggtttcagggtaatatattgggcaaacctgatggatggcgaacttggagaaattaagaatatcactactacccagcctagtttagagctcgacggcctggagaagtatacgaattactcgattcaggtattggctttcactcgcgccggcgatggagtgcgaagtgagcagatattcacgaggaccaaagaagatgtgcctggacctcccgcaggagtcaaagctgccgcagcatcagcatctatggtcttcgtctcctggttaccacctctgaagttgaatggaattatacgaaaatacacagtcttctgtagccatccctaccccactgttatatccgaattcgaggctagtccagatagctttagctatcgcatccccaatctaagtcgtaaccgacagtactcagtgtgggtggtggctgtgactagtgctggacgaggtaattcctctgagattataactgtggaaccactcgccaaagcaccggctaggattctcacatttagtgggaccgtcaccactccatggatgaaagacatcgtgctgccctgcaaagcggtaggagatccttcaccagcggttaaatggatgaaggactccaatggcactccctctttggtgactatcgatgggcgacgctccatcttcagcaacggatccttcatcatcaggacagtgaaggcggaagacagcggctactacagttgtatcgccaacaacaactggggatctgatgagatcattctcaacttgcaggtccaggtccctccagatcaaccacgactcaccgttagcaaaacaaccagctccagcataaccttatcttggctgccgggggacaacggggggtcatcaatacgtgggtatatcttacaatattctgaagataattccgagcaatggggaagctttccgatctcaccgtcagagcgaagttatcggttggaaaacctgaagtgcggaacttggtataaatttactttgaccgctcagaacggcgtcggacctgggcggatcagtgaaattattgaagcaaaaaccctgggcaaagagccgcaatttagtaaagagcaggagttatttgcgtccattaataccacgcgggtccgtttgaacttaattggttggaacgacggaggttgtcccataaccagcttcacccttgaataccgccctttcgggactaccgtgtggactaccgcacaacgcacctcattaagtaaatcctatatactgtacgaccttcaagaggctacttggtatgagcttcagatgcgggtgtgtaatagcgctgggtgcgccgagaaacaggccaattttgctacactcaactacgatggttctaccatccccccgctgattaagagcgttgtccagaacgaagagggcttgactaccaatgaaggcttgaaaatgctcgtcacaatctcttgcattttggtcggcgtactgttactgttcgtcctattactcgtggtacgtcgtcggaggagagaacaaagacttaagaggctgcgtgatgccaaatctctggccgagatgttaatgagtaaaaatacacgcacttctgacaccctgtctaagcagcaacagacccttaggatgcacattgacattccacgggcccaattgctcatcgaggagagagacactatggaaacgatagacgacaggagcactgttctgcttactgacgctgattttggagaagccgctaagcaaaagtctctgacggtaacccatacagtccactaccaatcagtgagccaggcaaccggacctctggtagacgtgagtgatgcccgcccaggaacaaaccctaccacccggagaaatgccaaggccggtcctactgcccggaaccgctatgcttcccagtggaccctcaatcggccccaccctacgatctctgcacacacactaacaactgattggcgccttcctacccctagagcagcggggtcagtcgataaagagtccgattcatattcagtctcacccagccaagatacagatcgagctcgatcaagcatggtctcaacggagtcggcatcgtcgacttacgaagagctggctcgggcctatgaacacgctaagatggaggaacaactaaggcatgccaaattcacaatcaccgagtgtttcatctcagatactagtagcgagcaactcactgctggcacgaatgaatacacagattcactcaccagcagtactccctctgaaagcggaatatgtcgcttcactgcatcaccacccaagcctcaggatgggggccgcgtcatgaatatggcagtgccgaaggcccatcggcccggcgatctgatccacttgcccccttatctgcgcatggatttcctcctgaaccgcggcggcccaggaacttctagagacctctcattgggccaggcctgtctcgagccacaaaaatctcgtactctcaagcgccctaccgtgttggagcctatcccgatggaagctgcatctagcgcctcttctactcgcgaggggcaatcttggcaaccaggcgccgtggcgaccctcccccagagggaaggtgctgagctggggcaagcagcgaagatgagtagttcccaggagagtttgctggattcaagaggccatttgaaggggaacaatccctacgccaagagctataccctcgtctag

SEQ ID NO: 115048 - DNA, 6342 bp, synthetic construct
  misc_feature 1..6342: note = Description of Artificial Sequence: Synthetic coding sequence
  source 1..6342: mol_type = other DNA
atgacgggagccggagagcccagaagagaagaacctccaccccagccaagcgctggtctgagatctagagagtctggtgcgccttctgccggcgggtgggagagagccgagcgaggccggggagccgccgccagacccgcgaccggccctccaccgaggcgcattgggcccctttacggcatgtggctcgtgacattcctcctgctgctggactcccttcacaaagctagacctgaggacgtcggtacgtccttgtattttgtcaatgactctctacagcaggtgacatttagtagctcggttggcgtcgtggtgccgtgcccagctgcaggttcaccctccgccgccttgagatggtacctggcaacaggggatgacatatacgacgttcctcatatcagacacgtgcacgctaatggaactcttcaactctatccattcagcccctcagcattcaattcattcatccacgataacgattacttctgcactgccgaaaatgccgcaggaaagatccgctcacccaatattcgggtaaaagctgtctttagggaaccctacactgtcagagtggaggatcaacggtctatgcggggcaatgtggctgtgtttaagtgccttattccatcatcagttcaggaatacgtgagtgtggttagctgggagaaagataccgtgtccattatccccgagcatcgtttttttataacctaccatggtggactttatattagcgacgtgcagaaagaggatgcactgtcaacttacaggtgcatcactaagcataagtactcaggtgaaaccaggcaatctaatggcgcgcgcctcagtgttactgatccagctgagtctatccctacaatcctggatgggttccacagccaagaagtgtgggcaggccatacagtggagctgccctgcacagccagtggctaccctattcccgcgatacggtggttaaaggatgggcggccactgccggcggatagccgttggaccaaaagaataaccgggctcacaatctccgacctgaggacggaagacagtggcacatacatttgtgaggtaacaaacacattcggtagcgcagaggcaacaggtatccttatggttattgaccctctccatgttacactgaccccaaaaaaattaaagaccggtatcggcagtaccgtgatcttgagctgcgccctgacagggagccctgagttcacaatcagatggtacaggaacaccgaactcgtgctgcccgatgaagctattagtatccgaggtctgtctaacgagaccttgttgataacttcagcccagaagagtcacagcggagcctatcaatgctttgccacgcgcaaagcacagactgctcaagactttgctatcatcgcgctggaggatggcacaccgcgcatcgtgtctagcttttctgagaaagtagtgaaccccggtgagcagttcagcctcatgtgcgccgccaaaggagcccccccacctaccgtcacctgggccctggatgacgagccaattgttcgcgacggcagccaccgcactaatcaatatacaatgagcgatggcaccacaatcagccacatgaatgttactggcccacagattcgggatggtggagtctatcgatgtaccgcaagaaacctggtgggatcggccgagtaccaggcacggattaacgtgcgcgggccaccaagcattcgggctatgcgaaacattaccgctgtggcaggtcgggatacactgattaactgccgcgtgatcgggtacccgtactacagcatcaagtggtacaaggatgcactgttgctcccagacaaccatcgccaagtcgtcttcgagaacgggacgcttaagctgaccgacgtccaaaaaggtatggacgagggtgaatacttgtgtagtgtgctgattcagcctcagctgtccatctctcagtctgtccatgtggccgttaaggtccccccgttgatccaaccttttgagtttccccccgcatccatcggccagctgctctacattccttgtgtcgtttccagcggcgacatgccaatcaggataacttggcggaaagacggccaggtgatcattagcgggtccggagtgactatagaatccaaggaatttatgagttccctccaaatcagctcggtttcgctcaagcacaacgggaattacacgtgtatcgcttctaacgctgctgctacggtctctagagagagacagctcatagtacgtgtgcctccccgtttcgtggtacaacccaataaccaagacggcatctacgggaaagccggcgtgctgaactgctccgttgacggataccctcccccaaaggtgatgtggaagcacgccaaggggagcggtaatccccaacagtaccatcccgtcccacttaccggccgaatccagattctgccgaatagctctctgcttatccgccatgtcctggaggaggacattggttattacctgtgccaggcgtccaatggtgtgggtacggacatttccaagtccatgtttctcacagtcaagatcccggccatgataacctcccacccaaataccacaatcgctattaaagggcatgcaaaggagctcaactgtacagcgaggggcgaacgcccaattattataagatgggagaaaggcgatactgtcatcgacccggaccgtgtgatgagatatgccattgccactaaggacaacggggacgaggtggtgtccacactgaaactgaagccggctgaccgaggcgactccgttttcttttcctgccatgctatcaattcctatggggaagacagaggcctgatccagcttaccgtacaagaacctccagatccccccgagctggaaatcagggaagtgaaagcccggagtatgaatcttcggtggactcaacggtttgacggcaattcaatcataacgggctttgatatcgagtataagaataaatccgattcctgggacttcaaacaatctactagaaatatctctcctaccatcaatcaggccaacatcgtggacctccaccctgccagtgtctattcaattcggatgtattccttcaataagataggtagatccgagccttctaaagagcttactatttctacagaggaagcagcgccggacggtccccctatggacgtgaccctccagccggtgacttcccagagtatccaggttacctggaaggccccaaaaaaggaattacaaaacggcgttattagaggttatcaaatagggtaccgagagaactccccaggcagcaacgggcagtattcaatcgttgaaatgaaggccacaggcgactctgaggtgtacactctggataatctgaagaagttcgcgcagtatggggtggtcgtccaagcctttaacagggcgggtaccggaccatcttcctccgaaatcaacgcgactaccctggaggacgtcccctctcaaccgcccgaaaacgtgcgcgcactgagcatcacatcagacgtggctgtcattagctggtccgaaccacctcgttccaccctgaacggggttctgaaaggctacagagtgattttttggtccctgtatgttgatggcgagtggggcgaaatgcagaatattaccacaacacgcgaacgggtcgaactgcggggaatggagaagtttacaaattatagtgtccaggtcctggcctacactcaggctggagatggcgtccgcagttccgtactctatatccaaacaaaagaggacgtccctggtccccccgccgggattaaggctgttccttcctctgctagctctgtggttgtatcttggctcccccctacaaaacccaacggggtcattcgcaaatacacaattttctgctccagccctggctcgggccagcccgccccatccgaatatgaaacgtcgcccgaacagctgttttaccggattgcacatcttaatcgcggacaacagtatctcctttgggttgctgccgtgaccagcgctgggagaggaaatagctctgaaaaagttaccatcgagccagccggtaaggctcctgccaaaattatcagcttcggcggcaccgtcactacaccttggatgaaagacgtgcgactcccttgcaatagcgtcggagatccagcgcccgctgttaagtggaccaaggattccgaggacagcgcaatccccgttagcatggacggccatcggctgatccacacgaatggcaccctgctcctacgggccgttaaagctgaggatagcgggtattacacatgcacagccaccaacaccggtggttttgatactatcatcgtcaacctgctggtgcaggttccacctgatcagcctaggctgacagtgtccaaaacctcagcttccagtattacgttgacttggattcccggcgacaatgggggcagctcaatacgcggctttgtcctccagtacagtgtggacaacagtgaggagtggaaggatgtattcatctctagttctgaacggtcgttcaagttggacagcctgaagtgcggcacctggtataaagtgaaactcgcggccaaaaactccgtcggctcgggcagaatttcagaaatcattgaggccaaaacgcatgggagggaaccttccttcagtaaagatcagcatttattcacccatatcaactccacccatgcgcgcctcaatctccagggttggaataatggcggttgtcccattaccgcaattgtgctggagtacagaccaaaaggcacatgggcgtggcaagggttacgggcaaactccagtggggaagtgtttctaactgagctcagagaggccacttggtacgagctgcgcatgcgggcttgcaatagtgcaggttgcggcaatgaaacagctcagttcgccaccctcgactatgacggcagcactatccctcccatcaagagtgcccaaggtgagggtgatgacgttaaaaagctgtttacaattggttgcccagtcatccttgccactctgggcgtggctctgctgttcatcgtgcgtaaaaaaagaaaggagaaacgcctgaagcggcttagggacgccaagtctctggccgaaatgcttatttcaaagaataaccgctccttcgacacaccagtgaagggcccccctcaaggacctcgtctgcacattgacataccccgggtccaactgctgatagaggataaggagggaatcaagcagttgggagacgataaagctacgatacccgtgaccgacgcggagttctctcaggccgtgaacccacagtcgttttgtaccggagtgtcgctgcaccaccctacgctgatccagagcactgggcctctgatcgacatgtcggatattagacccggcacaaatccggtttcccgtaaaaacgtgaaatccgcacacagcactcggaaccgttacagtagtcagtggactctcaccaagtgtcaggcatccactcctgccaggaccctcacctccgattggcgcacagtggggtcccagcatggcgtgacagtgacagagtccgacagctacagtgcttcactttcccaggataccgacaagggtagaaattcaatggtttctacagaaagcgcgtcttccacttacgaggagctggcaagggcctatgaacacgcaaagctggaggaacagttacagcacgctaagttcgaaatcactgagtgcttcattagtgatagctcttctgaccagatgactacaggcacaaatgagaacgcagatagcatgacaagtatgtcaaccccttctgagcccggtatctgtagatttacagccagcccaccaaagccccaggatgcagatcggggcaagaacgtggcagttcccatcccacacagggccaacaagtcggattactgcaatcttcctttgtacgctaagtccgaagccttctttagaaaggccgatggtcgggagccctgtccagtcgtgcctccaagggaggcttccatccgtaacctggctagaacatatcatactcaagcccggcacttgacactcgatccggcaagtaaaagcctggggctgccccaccctggggccccggctgcagcctcgaccgctacactaccacaacgcactcttgccatgcccgctccacccgctgggaccgcccccccggctcccgggcccacccccgcggagcctcctactgccccctcagctgccccccccgcccccagcaccgagcctcctagagccggtggaccccacacgaagatgggaggaagtagagattctctcctggaaatgtcgacgtccggcgtgggaagaagtcagaagcagggagctggggcgtattcaaaatcttatacactcgtgtag

SEQ ID NO: 115049 - DNA, 5463 bp, synthetic construct
  misc_feature 1..5463: note = Description of Artificial Sequence: Synthetic coding sequence
  source 1..5463: mol_type = other DNA
atgcttccttactgggccggccatacggtggaactgccatgtactgccagtggctacccgattccagccataagatggttgaaggacgggagacctcttccggcggacagcagatggaccaagcggatcactgggctgacaattagcgatctcagaactgaggactcaggaacctatatttgtgaagtcacgaatacttttggaagtgcagaggccacagggatactgatggtcatcgatccactgcacgttaccctgacgccaaagaagctcaagacagggattggctcaaccgtcatacttagttgtgccttgacgggctcccccgagttcaccatcaggtggtatcggaataccgagttggtgctccctgatgaggcaatatcaatcagggggctgagtaatgagacattgctgattaccagcgctcagaagtcgcattctggagcctatcagtgtttcgccacccggaaggctcaaaccgcgcaggattttgccattatcgcactggaggatgggactcctagaattgtctccagtttcagtgagaaggtcgttaatcctggtgagcagttttcactgatgtgtgcagccaaaggagcaccaccaccaaccgtgacatgggcccttgacgacgaacctatcgtcagggacggctctcatagaacgaaccagtatacgatgagcgatggcactacaatctcccatatgaatgtaaccggcccgcagatccgagacggcggggtctacaggtgtacggcccggaatctagtggggtctgcagaatatcaggccagaataaacgtcaggggaccaccgagcatccgggccatgcgcaacattactgccgtagcgggcagggacacgctcattaattgtcgggtcatagggtacccctactactcaattaagtggtataaagatgcgctgctgctgccggataaccatcgacaggttgtgtttgaaaatggaactctgaagctgaccgatgtgcagaaggggatggatgagggggagtacctgtgttcggttctgatccagccccagctctccattagccagagcgtacacgtggcagtgaaagtccctccactcattcagccctttgaatttcctcctgcatccataggacagctcctctatatcccatgcgtcgtaagcagcggagatatgcctatcagaattacctggagaaaggatgggcaagtcatcatttcagggtctggcgttacaattgagagtaaggaattcatgtcaagtctgcagatcagcagcgtttctctaaagcacaacggcaattatacttgcatcgccagcaatgccgcagccacagtctcaagagagcgccagctgattgtcagggttccacctcggtttgtagtgcagccaaacaaccaggacggcatctatggcaaagcgggcgtgctcaattgcagtgtggacggataccccccacctaaggttatgtggaaacacgccaagggcagcggcaacccccaacagtaccacccggttccactgacgggccggatacagattttgcccaattccagtcttttgattagacacgtactggaggaagacatcggctattacctctgccaggcttccaacggagtaggtactgacatcagtaaaagcatgttcctaactgtgaagatcccagccatgatcacaagtcaccccaacacaaccattgcgattaaggggcacgcgaaagaactcaattgcaccgccagaggtgaaaggccaattatcatccggtgggaaaagggagataccgttatcgaccctgatcgcgtgatgagatacgccattgcaactaaggacaatggggatgaagtggtgtccacgctcaagcttaagcccgccgacagaggggacagtgtgttctttagctgtcacgcgattaatagttatggcgaagataggggtctgattcaactcaccgtacaggagccccccgacccgcccgagcttgagattcgcgaggtaaaagcgcggagcatgaatttgcggtggacccagagatttgacggcaacagtattatcaccggttttgacatcgaatacaaaaataagtctgacagttgggacttcaaacagtccaccagaaacatcagcccaaccatcaaccaagctaacattgtagatttacatcctgcaagcgtgtactctataagaatgtactcattcaacaagattggccggtccgaaccttccaaagagctgaccatctctaccgaagaagcagcccctgatggtccaccgatggatgttaccctgcaaccagttaccagtcagtctattcaggtaacctggaaggccccaaagaaggagctgcagaacggcgtgattagagggtaccaaattggttaccgcgaaaacagccctggcagcaacgggcagtactccatagtcgagatgaaagccacaggagattctgaagtatataccctagataatcttaaaaagtttgctcaatacggcgtcgtggtgcaggccttcaaccgggctggaacaggaccttccagctctgagatcaacgccacaaccctcgaggatgtgccctcccagcccccagaaaacgttcgagctcttagcatcacttcggatgtagcagtcatatcctggtctgagccaccaaggagcaccctgaatggggttttaaaagggtatcgggtgatattctggtctctgtacgtggacggcgaatggggggagatgcagaacattactaccactcgagaacgtgtcgagctaagaggaatggagaagttcacgaattacagcgtgcaggtcctggcctatacgcaagccggagatggcgtaagatcatcagtcttgtatatccaaacaaaagaggatgtgcccggacctcccgccgggatcaaagcagtaccctctagcgcaagcagcgtcgttgtgtcatggttgcctcccacaaagcctaatggggttatccggaaatatactattttttgttcctccccgggatccggacagccggctccctcagaatacgaaactagcccggagcagctattttaccgcatcgctcacctaaacagaggccagcagtacctgctgtgggtggccgccgtcacctccgctggaagaggtaactcctcagaaaaagtaaccattgagcccgccggcaaggcccctgccaagatcatttcgttcggaggaacagtaacaaccccgtggatgaaagacgtccggctgccttgcaacagcgttggcgaccctgctcccgcggtgaagtggacgaaggattccgaggattcagcgataccagtgtcaatggacggtcaccggctgattcataccaatgggacgctcctcctgcgggctgtgaaagctgaggacagtgggtactacacatgtacggcaaccaacaccggcggcttcgacaccataattgtcaacctgctggtacaggtcccacctgaccagcctcgactgacggtttccaagactagtgcgtctagcatcacgctgacctggatccccggcgataatggggggtcttccattagggggttcgtgctccagtatagcgtggacaatagcgaagaatggaaggacgtcttcatatcatcatctgaaaggagctttaagctggactctctgaagtgtggcacctggtacaaagttaaattagctgcgaaaaattctgtcgggtcagggagaatcagtgaaattattgaagcaaagacccacggcagagagccttcattctcgaaagatcaacacttattcacgcacataaatagtacgcacgcccggctgaacctccaaggttggaacaatggggggtgccctatcaccgcgatcgtcctggaataccgccctaagggcacttgggcatggcaaggcttgcgcgctaatagcagtggggaagtgtttctgactgagctcagagaggctacatggtacgagctgagaatgagggcctgtaactcggccggttgtggtaacgaaacggcacagttcgcaaccctggattacgacggaagcaccatccccccaatcaaatcagcacagggagagggtgatgacgttaaaaagctttttacaatcgggtgtccggttattctggctacgcttggggtggccctgctatttatcgtcagaaagaagagaaaggaaaaaaggctgaagagactgcgtgacgcaaagtccttggcagagatgctcatctccaaaaacaacagatctttcgacactccggtgaagggacccccgcagggaccccgcttacatatagacataccacgcgtgcagctcctgattgaggataaagaggggatcaaacagctgggcgacgataaggctactatccctgttacagacgcagagttttcccaggctgtaaatccccagtcattctgtaccggagtgtcactgcaccacccgactttgatccagtccactgggcccctgatcgacatgtcagatattcgacctggtaccaatcctgtcagtagaaaaaatgttaaatccgctcacagcacaaggaaccgctatagttcccagtggaccctaaccaagtgccaggcatccacacctgcgaggacattaaccagcgattggcggaccgtcgggtcccagcacggcgttacggtgacagagagtgactcgtatagcgcaagcctgtcccaagacacggacaaggggaggaattctatggtcagcacagaaagcgcatcatccacttacgaagaattagctcgtgcctatgaacacgcgaaattggaagagcagcttcagcacgccaaattcgagattacagaatgcttcatttctgattcctcctcggatcagatgacaactggcactaatgagaatgctgactccatgacatccatgtccactccatctgagcccggaatctgccggtttactgcatctccccctaaaccccaggacgccgatcgaggtaaaaacgttgctgttccaatccctcacagggctaacaagtcggactactgcaatctcccattatacgcaaaatcagaggccttttttaggaaagctgacggacgggagccctgtcccgtagtgccccctagagaggcatctatcaggaatttggctcgcacctaccatactcaggctcgacacctcactctagatcccgcatccaaaagcctgggactcccccaccctggcgcaccagcagccgcaagcaccgcgaccttgccacagagaaccttggcgatgcccgctccccctgccggaacagccccccctgcccctggcccaacaccagcagaaccccccacggcccccagcgcagctccccccgcacctagcaccgagccacctcgggccggaggccctcacactaagatgggcggctccagagactccttattggaaatgagcacctcaggagtgggacggtcacagaaacagggcgctggagcctactccaagagttacacactagtatag

SEQ ID NO: 115050 - DNA, 762 bp, synthetic construct
  misc_feature 1..762: note = Description of Artificial Sequence: Synthetic coding sequence
  source 1..762: mol_type = other DNA
atggagggaacagtaaatttgcaactttccgcgaagtctgtgggtgtcttcgaggcattctacaattccgttaaacctatccagattattaatagtacaatagaaatggtcaagccaggaaagtttccaagcggtaaaaccgagattccattcgagttccccctgcacctcaagggtaataaagtcctgtacgaaacctaccatggggttttcgtgaacattcagtatacattacgatgtgatatgaaaaggtccctcctcgcaaaagatctgacaaagacatgtgagttcattgtgcatagtgccccacagaagggaaagtttactcccagtccagtcgacttcaccatcacccccgagacgctccagaacgtcaaggagagggccctgctgcccaaatttctgttgcgtactagtcagctgaacaaactttgccatcacgccgcgactaatggtcgcgcaggcggcggcgagcttgggagccgtcaccagaagcgcggcgccgccgccggggctcggggggatgtgagggtctgcaggtacgcccgcgatgccacagagattcagaacattcagatcgctgacggtgacgtatgtcgtggtctgtccgtcccaatatacatggtgtttccacggctcttcacatgtccgaccttggaaaccacaaacttcaaggtggagtttgaagtgaacatcgtagttctgctgcaccccgatcacctgatcaccgaaaacttcccattaaaactgtgcagaatctag

SEQ ID NO: 115051 - DNA, 894 bp, synthetic construct
  misc_feature 1..894: note = Description of Artificial Sequence: Synthetic coding sequence
  source 1..894: mol_type = other DNA
atgggcacggctctggatatcaagataaagagggcaaataaagtctatcatgccggtgaagtactttccggcgtggtggttatttcttccaaggacagtgtacagcatcagggtgtgtcccttacaatggagggaacagtgaacctacagctcagcgccaaaagcgtgggggtgtttgaggccttctacaactcagtgaagcccattcaaatcattaacagtacgattgagatggtcaagcccgggaagtttccatctggcaaaaccgagattcccttcgaattcccgctgcatctgaagggaaacaaagtgctgtacgaaacttatcacggagtatttgtaaatattcagtacaccctgcgttgcgatatgaagcgatctttgttggctaaggatctcactaaaacgtgtgagttcatcgtgcatagcgcgccgcagaaaggcaaattcacaccaagcccggtggattttaccataaccccagagaccctccaaaatgtgaaggaaagagcgcttctacctaaatttctgctcagaggacatctcaacagcacgaactgcgttataacccagcccctcaccggggaactcgttgttgaatcctccgaggcagctattcgaagcgtagagttacagctcgtgagggtggagacatgcggttgcgccgaggggtacgccagggatgcaactgagattcaaaacatccagatagctgacggcgacgtttgtcgagggttgtcagtgcccatttatatggtgtttcccagacttttcacctgtccaactctggaaaccacaaacttcaaagtcgaattcgaagttaacatcgttgttctgctgcaccccgaccaccttatcacagaaaacttccccttgaaactgtgtaggatctag

SEQ ID NO: 115052 - DNA, 519 bp, synthetic construct
  misc_feature 1..519: note = Description of Artificial Sequence: Synthetic coding sequence
  source 1..519: mol_type = other DNA
atgggaactgcactggacattaagataaaaagagctaacaaagtgtaccacgctggaccccaaaagggcaaattcacaccctctcctgtagatttcacgattactcctgagacactgcagaatgttaaagagagggcgctactgcccaagtttcttctgcgggggcacctgaacagtactaattgtgtcatcacccagccacttaccggtgaactggtagtggaatcctccgaggctgccattaggagtgtcgaattacagttggtgcgggttgagacctgcggatgcgcggaaggatacgcacgcgacgccaccgagatccaaaatatacagatcgctgacggtgatgtatgtagaggcctctctgtccccatctatatggtcttcccgagactatttacttgtccgactctggagaccactaattttaaggtggagtttgaagttaatatcgtggtgctcctgcaccctgatcacctcattacagagaatttcccattgaagctgtgccgcatttag

SEQ ID NO: 115053 - DNA, 813 bp, synthetic construct
  misc_feature 1..813: note = Description of Artificial Sequence: Synthetic coding sequence
  source 1..813: mol_type = other DNA
atgggcactgccttggacatcaaaatcaagagagctaacaaggtgtaccacgcgggcgaggtgctgagtggagtggttgtgatatcatctaaggacagcgttcaacaccagggtgtatctttgactatggagggcacagttaacctgcaactgtccgcgaagagcgtcggagtgttcgaggcgttttataattcagtcaaacctatccagatcattaactcaacgatcgaaatggttaagccggggaaatttccatccggtaagacggagatcccgttcgagttcccacttcacctgaaaggcaacaaggttctgtatgaaacctatcacggagtctttgttaacatccagcctcagaagggcaaattcacacctagccctgttgacttcacaattacccctgagaccctgcagaatgtgaaggagcgcgcccttcttcccaaatttctgctgcggggccacttaaattccactaactgcgtgatcacacagccattaactggagaactggtggtggaaagctcagaggccgccatcagatctgtggagttacagctggtgagggtggaaacttgtggatgcgctgaagggtatgcaagggatgctacggagatacagaatatccagattgcagatggggacgtatgtcgaggcctatccgtgcctatctacatggtatttccgcggctcttcacttgccccactttagagacgaccaactttaaggtagaattcgaggttaacatagtcgtgctgctacacccagatcatcttattaccgagaatttcccactgaaactctgcaggatctag

SEQ ID NO: 115054 - DNA, 663 bp, synthetic construct
  misc_feature 1..663: note = Description of Artificial Sequence: Synthetic coding sequence
  source 1..663: mol_type = other DNA
atgggcacagccctcgacatcaaaatcaaaagagccaacaaggtgtaccacgcgggcgaggtgctctctggcgtggtggtgatctcgagcaaagattctgtgcagcaccagggcgtcagcctgacaatggagggaaccgtgaacctccagttatcagcgaaatctgtcggcgtgtttgaagccttctataattccgtgaagccacagaaagggaaattcactcctagcccagtcgactttactatcacaccagagacattgcagaatgtcaaggaacgggccttattaccaaagttcttgctgcgtggacacttgaacagcaccaactgtgtcattactcagcccctgaccggtgaacttgtggtggaaagttcagaggcagccattagaagcgtagagcttcaactggtgagagttgagacctgcggctgtgcagaggggtatgcccgcgacgccacagaaatacaaaacatccagatcgctgacggagatgtgtgccgtggcttgagtgtccccatttacatggtattccccagactctttacatgtcctacgctggagaccaccaatttcaaagtggaatttgaagtgaatatcgtcgtgttacttcacccagatcacttaattaccgagaacttcccactgaagctctgcagaatttag

SEQ ID NO: 115055 - DNA, 357 bp, synthetic construct
  misc_feature 1..357: note = Description of Artificial Sequence: Synthetic coding sequence
  source 1..357: mol_type = other DNA
atgtccctgatcattctcacacgggatgatgaacctagaatcttcactccagatagcgacgccgcttcacctgcgctgcattctactagcccattgcccgacccggcatccgcaagcccactgcacagggaagagaaaattttgcccaaggtgtgtaacattgtcagctgcctctccttcagcctgcctgcttctccaacagatagcggcttagcttccccaaccattatcacccgcgaaggacagcagttttgggcaaaatgtttgatttggaagtatcagctctatctgcacggtctgcataaaaagtccgacggacgccgagacaaacagatctcagcaagtccaagcacatag

SEQ ID NO: 115056 - DNA, 573 bp, synthetic construct
  misc_feature 1..573: note = Description of Artificial Sequence: Synthetic coding sequence
  source 1..573: mol_type = other DNA
atggagccagaggccgctgctggcgcccgtaaagctcgaggtaggggctgccactgccccggggacgcaccgtggagacccccacccccccgggggcctgagagtcccgctccctggagaccttggattcagacacctggagacgcagagctgactcggactggacgaccgctcgaaccccgcgcagaccagcatacttttggctctaaaggagccttcggatttcagcatcccgtccgggtctatctgcctatgtccaagcgccaggagtatctgcgtagcagcggcgagcaagtgctggcgagttttccggtgcaggctactattgacttttatgatgacgaatcgactgaatctgcctccgaggccgaagagccggaggagggacccccccctctccaccttttgccccaggaagtgggcggccgccaggagaatggccccggaggcaagggccgcgatcaaggtattaaccagggacagcggtcttcaggcggcggagaccactggggagaaggccctttgccgcaaggggtttcatctcgtggcggtaaatgttccagttccaagtag

SEQ ID NO: 115057 - DNA, 294 bp, synthetic construct
  misc_feature 1..294: note = Description of Artificial Sequence: Synthetic coding sequence
  source 1..294: mol_type = other DNA
atgaaggaacccggtccgaatttcgtgaccgttcgcaaaggattgcacagtttcaaaatggcattcgtcaagcatctacttttattcttgtccccacgactggagtgctccggtagcatcacagaccattgctctttgcacctgcctgtgcaggaaatcctcatgtctcaacctcccgaacagctcgggctgcaaaccaacctgggaaaccaggagagctccgggatgatgaagttgtttatgccacggcctaaggtacttgctcagtatgagagcattcaatttatgccttag

SEQ ID NO: 115058 - DNA, 276 bp, synthetic construct
  misc_feature 1..276: note = Description of Artificial Sequence: Synthetic coding sequence
  source 1..276: mol_type = other DNA
atgaaggagcctggacctaatttcgtgaccgtcaggaaaggcttacatagtttcaagatggcctttgtcaaacacctccttctggaatgtagtggaagcatcacggatcactgtagcctgcacttgcccgtgcaggagatcttgatgtctcagcctccagaacagctaggcctgcagaccaacctgggaaatcaggagtcgtccggcatgatgaaactgtttatgcccaggccgaaagtcctggcacaatacgagtctatacagttcatgccctag

SEQ ID NO: 115059 - DNA, 531 bp, synthetic construct
  misc_feature 1..531: note = Description of Artificial Sequence: Synthetic coding sequence
  source 1..531: mol_type = other DNA
atggcaagcagcagtggaaatgacgacgatctcacaatcccacgagccgccattaacaagatgataaaggagacactgcctaacgtacgcgttgccaacgatgcccgcgagctggtggttaactgttgtaccgagttcattcacctgatcagctccgaagcaaatgagatctgcaacaagtctgagaaaaagacaatttccccagaacacgtgattcaggccctggagtcacttggctttggctcatacatctctgaggtgaaggaggtgttacaggaatgcaagacggttgcccttaaaagaaggaaggcgtcgtcccgcttggagaatttaggtatcccggaagaagaactgctgcgccagcaacaggaactatttgcaaaagccaggcagcagcaggccgaactagcccagcaggagtggttgcagatgcagcaagccgcacaacaggctcagctggcagccgcatccgcaagcgcttccaaccaggcaggaagttctcaagacgaggaagacgacgacgatatctag

SEQ ID NO: 115060 - DNA, 531 bp, synthetic construct
  misc_feature 1..531: note = Description of Artificial Sequence: Synthetic coding sequence
  source 1..531: mol_type = other DNA
atggcatcctcctcagggaacgatgacgacctgactataccacgggccgccatcaacaaaatgatcaaagagacccttccaaatgtcagggtggcaaatgacgcacgggaactggtagtgaactgttgcaccgagtttatccacctcatttcaagcgaggcgaacgaaatttgcaataagtctgaaaaaaagacaataagccctgagcatgtcattcaggcccttgagtctctgggatttggaagctatatttctgaggtcaaggaggtcctgcaggaatgcaaaaccgtggcactaaaacgccgcaaagccagttctaggctagaaaacctcgggatccccgaggaggagctgctccgccagcagcaggaactctttgcaaaggcccgacagcagcaagcagagctagcgcagcaggagtggttacagatgcaacaagctgcacaacaggcccaattggctgcagccagcgcttctgcttccaatcaggcggggagtagccaagatgaggaggatgacgatgacatttag

SEQ ID NO: 115061 - DNA, 1470 bp, synthetic construct
  misc_feature 1..1470: note = Description of Artificial Sequence: Synthetic coding sequence
  source 1..1470: mol_type = other DNA
atggaatccatgttttcttcccctgccgaggcggctctgcagagagaaactggggtccccggcttactgactcctctccctgacctggatggggtttacgagctggaaagagtggctggtttcgtgagggacctcggatgtgaaagagttgccttgcagttccctgatcagttgttgggtgacgcagtggcagtggccgcaaggctggaagagacaaccgggagcaaaatgttcatccttggtgacaccgcctatggctcgtgctgtgtcgacgtgctgggggccgagcaagcaggcgcccaggctctgattcacttcggaccagcctgcctgagcccccccgcgcgacccctaccagttgctttcgttcttcgacagcggagtgttgccctagaactgtgcgttaaggcatttgaggcccagaatcctgatccgaaggctcctgtggtgctgctgtcagaacccgcttgcgcccatgctctggaggcgttggcaacactgctgcggccaaggtacctcgacctcctggttagctctccggctttcccccaaccggtcggatcactcagtcccgaaccaatgccactggaacgctttgggcgaaggttcccactcgccccaggcaggagactagaagaatatggcgctttttacgtaggtggatccaaggctagtccagatccagatctagacccagatctttccaggctgttgttaggttgggctcccggacagcctttctccagttgctgccccgataccgggaaaacacaggacgaaggcgcgagggccggccggttaagggcacgaagacggtatctggtggaaagggccagagatgctcgcgtcgtgggcctgttggctggcactctcggtgttgcacaacatcgagaggcactcgctcaccttcgcaatctcacacaggcggccggcaaaaggtcatatgtattagccctgggacgccccacacccgcaaaattagccaactttccagaggttgacgtgttcgttctgctcgcttgcccattgggtgcccttgcccctcagctgagcgggtcctttttccagcccatactggcaccatgtgaactggaggctgcctgtaacccagcgtggccgcccccgggcctggctccccacctgacccactacgctgatttactcccagggtcaccatttcatgtcgcactcccaccacccgagtccgagctgtgggagacgcctgacgtctccttaataaccggggatctccggccaccacccgcctggaaatcttctaacgatcatgggagcctcgctctgactccacggccacagttggaactggccgagtcctcacccgccgcctcgtttctgtctagtagatcttggcaggggctggagccccggctgggacaaacgccagtaacagaggccgtgagtgggaggcgtggaatcgctatcgcatacgaggacgaggggtccgggtag

SEQ ID NO: 115062 - DNA, 786 bp, synthetic construct
  misc_feature 1..786: note = Description of Artificial Sequence: Synthetic coding sequence
  source 1..786: mol_type = other DNA
atggagagcatgttttctagccccgcagaggccgctttgcaacgggaaacaggggtacccgggctgttaacgccgctccctgatctcgacggcgtgtacgagctggagcgagttgctggtttcgttcgtgatttgggatgtgagcgggtcgctttacagttcccggatcagctgctaggagatgcagtggcagtggctgcacgcctggaagagaccacaggaagcaaaatgtttatcttgggcgataccgcatacgggagctgttgcgtggacgtcttgggagccgaacaagcaggggcacaggcccttattcactttggtcctgcctgcctgtccccccccgccagaccgctccctgttgccttcgtgttgagacagcgatccgtggcactcgaactgtgcgtgaaagctttcgaggcccagaaccccgacccaaaagcacctgtagtgcttctgtcagagcccgcctgcgctcatgccttaggatccccttttcacgtggcgctacctccaccagagtccgagttatgggagacacctgacgtgagcctgatcacaggcgacttacggcccccccccgcatggaagtccagcaacgatcacgggtctctagcccttacccctcgccctcagctggagttagctgaatcgtctcctgctgcctcatttctcagttctcgttcatggcaaggtttggaaccccgacttggtcaaacgcctgtcactgaagcagttagcggtagaaggggcattgcaattgcatacgaagatgaaggcagcggatag

SEQ ID NO: 115063 - DNA, 1065 bp, synthetic construct
  misc_feature 1..1065: note = Description of Artificial Sequence: Synthetic coding sequence
  source 1..1065: mol_type = other DNA
atgttgtggctgtggcttcatgactggcggcggcgtcagggacagagatgcagtttctgggtgactcagcccaccgccgaggctctagccaccctgttgcgccctcgctacctggatctcctggtgagctcccctgcatttccccaaccggtgggatcactgtctcccgaacccatgccccttgagcgctttggtcgtcggttccccctcgctccgggtcgcaggctggaagaatatggcgcattttacgtcgggggcagcaaagccagccctgatcctgacttggaccccgacctgagtagactgctactcgggtgggctccaggccagccattctccagttgctgtcctgatacaggaaagacgcaggatgaaggagcgcgggccggccgcctccgagcacgacgcaggtatctcgtggaaagagccagagacgccagagtggttggacttttggccggaacactgggggtggcccagcatcgcgaggccttggcgcatctgcgcaacctgactcaggcagctggcaagcggtcctatgtgctcgcgttagggagacccacaccggccaaactggctaactttcccgaggtcgacgttttcgtgttgttggcttgtcccctcggagccctagcccctcagttgtccggctctttcttccaaccaatcctggcaccttgtgagttagaggctgcctgtaaccctgcctggccaccaccaggtctggctccacatctgacacactacgctgatctactgccaggttccccttttcacgtggccctgccaccaccagagagtgaactttgggagactccagacgtgtctctgattacaggggacttaagaccaccacccgcctggaagtcttctaacgatcatggatctctagccctgacaccacgcccacagctcgaactcgccgaatcttccccggcagctagctttctcagcagccgctcttggcaagggctcgaacccagattgggccagacccctgtgaccgaggccgtgtccggtagaaggggcatcgccatcgcatacgaggatgaagggagcggatag

SEQ ID NO: 115064 - DNA, 174 bp, synthetic construct
  misc_feature 1..174: note = Description of Artificial Sequence: Synthetic coding sequence
  source 1..174: mol_type = other DNA
atggcagtattccatgatgaggtggagattgaggatttccagtatgacgaggattctgaaacctacttttacccctgtccatgtggcgacaatttttctattacaaaggatcagtttgtgtgcggagagactgtgccagctcccagtgccaataaggagttggtcaagtgctag

SEQ ID NO: 115065 - DNA, 249 bp, synthetic construct
  misc_feature 1..249: note = Description of Artificial Sequence: Synthetic coding sequence
  source 1..249: mol_type = other DNA
atggccgtgttccacgacgaggtcgaaatcgaagatttccaatatgacgaggactctgagacatacttttacccttgtccttgtggtgacaactttagcattaccaaggaggacttggagaacggcgaggatgtggctacctgcccctcttgctcccttataatcaaagtaatttatgataaagaccagtttgtatgcggcgagacagttcccgcaccaagcgccaacaaggaattggtgaagtgctag

SEQ ID NO: 115066 - DNA, 855 bp, synthetic construct
  misc_feature 1..855: note = Description of Artificial Sequence: Synthetic coding sequence
  source 1..855: mol_type = other DNA
atgctgtatcttataggccttggtctcggggacgcaaaagacataactgtaaaaggactcgaggtggtccggcgctgttccagggtgtatttggaggcctatacaagcgtgctgaccgtgggcaaggaggctcttgaagagttttatggacgaaagttggttgtcgccgatcgagaggaggtggaacaggaggcagacaacatactgaaggacgctgacatcagcgacgtcgcattcttggtcgtaggagatccattcggcgctaccacgcacagcgacctggtcctacgggccactaaactgggtattccctaccgcgtaattcacaacgccagcattatgaatgcagtaggctgctgcgggctccagctgtacaaattcggggagacagtgagcatcgttttctggacagacacgtggaggcctgagagtttttttgataaagtcaagaaaaatcgtcagaacggcatgcatacactgtgcctactcgatataaaagtcaaagagcaaagcttggaaaatctgattaagggtcgcaaaatatacgagccccctaggtacatgtcagtgaatcaagccgctcaacagcttttggaaatcgtgcaaaaccagcgtattagaggagaggaacccgttaccgaggaaaccctatgcgtaggcctcgccagagtgggggccgatgaccagaagattgccgccgggactttgcggcagatgtgtaccgtggacctgggcgagcccttgcattcgctgattatcactggaggctcaatccaccccatggagatggagatgctgagtctcttctcaatccccgagaactcttccgaaagtcagtcaattaacgggctgtag

SEQ ID NO: 115067 - DNA, 858 bp, synthetic construct
  misc_feature 1..858: note = Description of Artificial Sequence: Synthetic coding sequence
  source 1..858: mol_type = other DNA
atgctgtacctgattgggcttggtcttggggatgccaaggacataaccgtgaaaggcttggaggtggtccggcgctgcagcagggtgtacctcgaagcttacacctcggtcctgacagttggaaaggaagccctcgaggaattctacggacgcaagctggtcgttgccgatcgcgaggaggtggagcaagaggccgataacatactgaaagatgcagatattagcgatgttgcctttcttgtcgtcggtgacccttttggcgctactactcattcagatctggtgttgcgagccaccaaattgggaattccatatcgcgtgatccacaacgcaagcattatgaacgcagtcggctgctgtggtttacaactatacaaatttggtgaaaccgtgagcatagtcttctggactgacacctggcggccagaaagcttcttcgataaggtgaaaaagaaccgtcagaacggcatgcataccttatgtctgctggacataaaagtgaaagagcagagcctcgagaatcttatcaagggccggaagatatatgagccccctcgttatatgtcagtgaaccaagctgcccagcaactgcttgaaatagtgcagaatcagagaataagaggggaggagcccgcagtaacagaagaaactctgtgtgtcgggctcgccagagtgggggcagatgaccagaagatcgcagctgggaccctgcgacagatgtgtacggttgatctgggagaaccactccattccctgatcataaccggtgggtctatccatcctatggaaatggagatgctgagccttttctccatacccgagaattccagtgagtctcagagtatcaacggcctgtag

SEQ ID NO: 115068 - DNA, 705 bp, synthetic construct
  misc_feature 1..705: note = Description of Artificial Sequence: Synthetic coding sequence
  source 1..705: mol_type = other DNA
atgctctacctgatcggtctgggactcggggatgctaaagacatcactgtaaaaggactggaggttgtccggcggtgctcccgggtgtacttggaggcatatacttcagtcctcactgttgggaaggaagctttagaagaattctacggacgaaaattggtggtcgctgaccgcgaggaggtggagcaggaggcagataatatactgaaggatgcagacatctcagacgtagcatttctggtggtcggggaccccacggacacttggcgtcccgaaagcttttttgacaaagttaagaagaaccggcaaaatgggatgcatacactgtgcctcctggatatcaaagttaaggaacagagccttgaaaatctcatcaaaggcagaaagatatacgaacctccccgctatatgagcgtgaatcaggctgcgcagcaattgctcgagattgtgcagaatcagcgcatccgcggagaggagccagctgtgaccgaggaaaccttgtgtgttggcctggcacgagtgggcgccgacgatcagaagatcgccgcaggcacattgcggcagatgtgcactgtggatttgggagaacctctgcactcactgatcattaccggaggcagtatccacccaatggagatggaaatgctgagcctgttctcgatccctgagaattcctccgaatcccaatccatcaatgggctgtag

SEQ ID NO: 115069 - DNA, 141 bp, synthetic construct
  misc_feature 1..141: note = Description of Artificial Sequence: Synthetic coding sequence
  source 1..141: mol_type = other DNA
atgtgcactgtcgatctgggcgagccactccacagtctgattattacaggagggtccatccatcccatggagatggagatgctttcccttttttccatcccagagaatagctctgaatcgcagtctatcaatgggctgtag

SEQ ID NO: 115070 - DNA, 855 bp, synthetic construct
  misc_feature 1..855: note = Description of Artificial Sequence: Synthetic coding sequence
  source 1..855: mol_type = other DNA
atgctgtacttaatcggcctgggcctcggcgatgccaaggacatcactgtaaagggactggaagtggtcaggcggtgcagccgagtttacctggaagcctatactagcgtcctgacagtgggcaaagaggctttggaagaattctatggcaggaagctggtcgtggccgacagagaagaggtcgagcaggaagccgacaacatcctaaaggatgccgatatcagtgacgtcgccttcctggtcgtgggtgacccttttggtgcgaccacacactccgacctcgtcctgcgggctactaagctgggtattccttatcgcgtcattcacaacgcttcaatcatgaacgccgtgggatgttgcgggctccaatatatatcactggaacggcagttcctgctgttctttggacagacactgggccccgaaagctttttcgataaggttaaaaagaacaggcagaatggaatgcacactctatgtctccttgacatcaaagtgaaggagcagagtttggagaacctcataaaaggcaggaagatttatgaacccccacggtacatgtcagtaaaccaggccgcacagcaattactcgagatcgttcagaatcagcggattaggggcgaagagccggctgtgacagaggagactttgtgtgtgggactggctcgcgtcggggcagatgatcagaaaatcgccgctggcaccctgaggcagatgtgtaccgtcgacctcggtgaacctctccactctctaatcataactgggggttctattcaccctatggaaatggagatgctgagcttgtttagcattccagagaattccagtgagagccaatccatcaacggtctgtag

SEQ ID NO: 115071 - DNA, 858 bp, synthetic construct
  misc_feature 1..858: note = Description of Artificial Sequence: Synthetic coding sequence
  source 1..858: mol_type = other DNA
atgctctacctgatcgggctgggcctcggtgatgctaaagacattacagttaaagggctggaggtggtcagacgctgctcacgtgtttaccttgaggcctatacatccgtgctgactgtcggcaaggaggccctcgaggagttctatggccgcaaactggtggttgcggatagagaagaggttgagcaggaagctgacaatattctcaaggacgcagacatttcagatgttgcgttcctggtggtaggagatcccttcggcgctactacccactcagatctggtcctcagggctactaaactggggattccataccgcgttatccataacgcgtccattatgaatgccgtggggtgttgtggcctgcagttgtataaatttggcgaaacggtctcaatcgtcttttggacagatacatggagaccggagagtttctttgacaaagtgaaaaagaataggcagaacggtatgcacactctgtgtcttctcgacatcaaggtgaaggaacaatcattagagaatctcataaaagggcggaaaatctatgagcccccacggtacatgtctgtgaaccaggccgcgcagcagttgctggagatcgttcagaaccagcgaatccggggcgaggaaccggccgtgacagaggagacactctgtgtcggcctcgcccgggtcggagctgatgaccagaagattgctgcgggcaccttgcgacagatgtgcactgtggacttgggagagcctctgcatagcctgataatcacgggcggatctatccatcccatggagatggagatgcttagtcttttctccatccccgagaattcatccgagtcccagagtatcaatggcctgtag

SEQ ID NO: 115072 - DNA, 2028 bp, synthetic construct
  misc_feature 1..2028: note = Description of Artificial Sequence: Synthetic coding sequence
  source 1..2028: mol_type = other DNA
atggaggggcgtccaccaccagaaggaaggccccctccccggcctcgaaccggtcgcgcgcctcggggacgcagaagggcagtttttgcagccgtattgcactggtcacacatcacacatttgttcgaaaatgatcgccactttagccacctgtccacgcttgaacgagagatggcatttcggactgaaatgggcttgtactacagctactttaagactattgtggaggccccgtcttttctgaatggcgtgtggatgatcatgaacgacaaattaaccgagtatccacttgtaatcaacactctgaagagatttaacctttaccccgaggtgattctcgctagctggtacaggatttataccaagattatggacctgattggaattcaaacaaaaatctgttggacagtcactagaggcgagggactgtcaccaattgagagttgcgaggggctgggtgaccccgcgtgcttctatgttgcagtgatttttattctcaatggtttaatgatggctctgttctttatctacggaacatacctgagcggctcccggctcggggggcttgttacagtgctctgtttcttctttaaccacggcgaatgtactcgcgtcatgtggacaccgcccctgcgcgagtctttctcatatcccttccttgtgctgcaaatgcttctggtgacccacatcctaagagccactaagctgtaccgtggcagcctcatcgccctgtgcatatccaacgtttttttcatgctgccgtggcagtttgcccaattcgtgctcctcacgcagatagcctccttgtttgctgtatacgtcgtggggtacatcgatatctgcaaacttcgaaagatcatatatattcacatgattagcctcgccctctgtttcgtgctgatgtttgggaacagcatgctgctgactagttactacgccagctctctcgttattatttggggcatcctcgctatgaagcctcacttccttaagatcaatgtatctgaattgtctttatgggtaattcagggttgtttctggctttttggcacagtcatcctgaagtatcttacctcaaagatcttcgggattgccgatgacgctcacatcggaaacctcctgacaagtaagtttttcagttataaagacttcgatacattactctatacatgtgctgctgagtttgactttatggagaaggaaactccgctacgctacacgaagacactccttctgcctgtcgtgcttgtggtgttcgtcgcaattgtgaggaaaatcatttctgacatgtggggggttttagcaaagcagcaaacacatgtgaggaagcatcagttcgaccacggagagctggtatatcacgctctacaattgctcgcgtataccgcgctgggcatactcattatgaggctcaaattatttctgacccctcacatgtgtgttatggcctccctgatctgctctcgacagctcttcggctggctgttttgtaaggttcatccgggcgccattgtctttgccattttggccgccatgtcaatacaaggttcagccaatctgcagacccagtggaatattgtgggtgagttcagcaatttgccccaggaggaactcatcgagtggattaaatactcaactaagccggacgcagtttttgcgggcgccatgcccacaatggcgagtgttaagttatcagcactgcgcccgatagtgaatcacccacactatgaagacgcgggcttgcgtgctcggactaagattgtgtatagcatgtattctcgaaaagccgccgaggaggtgaaacgagagttgatcaagttgaaggtcaactactatatactagaggaaagctggtgtgttcggagatccaagcctggctgctcgatgcccgaaatttgggatgtggaggatcctgccaatgccggtaagactccgctttgcaatctattggtgaaggactccaaaccacacttcacaaccgtattccagaactcggtgtacaaggtcttggaggtagtcaaggaatag

SEQ ID NO: 115073 - DNA, 258 bp, synthetic construct
  misc_feature 1..258: note = Description of Artificial Sequence: Synthetic coding sequence
  source 1..258: mol_type = other DNA
atgtattctaggaaggctgccgaggaggttaagagggaactgataaagctgaaagtaaactattacattctggaggaaagttggtgtgtccgcagaagtaagccaggatgttcgatgccagagatctgggatgtcgaggaccccgccaacgccggcaaaactcccctttgtaacctgctagttaaagattcaaagccgcactttacaactgtctttcaaaatagcgtgtacaaagtcctggaagtggtaaaagagtag

SEQ ID NO: 115074 - DNA, 2277 bp, synthetic construct
  misc_feature 1..2277: note = Description of Artificial Sequence: Synthetic coding sequence
  source 1..2277: mol_type = other DNA
atgcggaagcaaggggtttccagcaagagactccagtcttccggccgatcacagtctaagggtcggcgtggagccagcctggctagggaacccgaggttgaggaagagatggagaagtcagctttaggcggcggcaagctcccccgaggaagttggaggtcttctcccggcaggatccagtctttaaaggaacgcaagggcctggaattggaagtggtggcaaagacattcctgttaggccccttccagttcgtgcggaacagcttggcgcaattgcgcgaaaaagtgcaggagttgcaagcccggcgtttcagcagtaggacaactctcggcatcgccgtgttcgtggctatcttgcattggttacatctggtgaccctcttcgagaacgatagacacttttcccacctgagctccctggagagggagatgacatttcgaacagagatgggtctgtattactcctacttcaaaaccatcatcgaagccccatcctttctggagggtttgtggatgatcatgaatgatcgcctgactgaatatccactgataatcaatgctatcaaacgattccatctctaccccgaagtcattattgccagttggtactgcacgttcatgggcattatgaatctgttcggcctagagactaagacctgttggaacgtcacacggatcgaaccactgaacgaggttcagtcttgcgaaggcctgggggatccagcttgtttttatgtaggtgtcatctttatcctcaacggtctcatgatggggctgtttttcatgtacggtgcttacctgagtggaactcagctgggcggcctaattacggtgttatgtttttttttcaatcacggggaggccacgcgggttatgtggactcctccactacgtgagtcattcagctacccattccttgttttacagatgtgcatactgaccctaattctccggacctcttccaacgaccgccgacctttcatcgcattgtgtctgagcaatgttgcgttcatgcttccctggcagtttgcccagtttatattgtttacccagattgccagcctatttccaatgtatgtggtggggtacatcgagccctctaagtttcagaagataatctacatgaatatgatcagcgtcactttgtccttcatccttatgttcggaaacagtatgtacctgtcaagctactacagctcctctttgcttatgacttgggcaattatcttgaaacgcaatgaaattcagaaactaggcgtgtctaagcttaacttttggttaatacagggatccgcatggtggtgtggtacaattattcttaaatttcttacttccaagattctgggagtgtcagaccatatccggctgtcagatctcatcgccgccagaattctcagatacacagattttgacactctgatatacacttgcgccccagaatttgatttcatggaaaaggcaactcctctgcgttacaccaagactctattgcttccagtggtgatggtaatcacctgtttcatatttaagaagaccgtacgggacatatcctacgttctggccacaaacatctacctgcgcaagcaactgcttgaacattccgaactcgcctttcacaccctgcaacttctggtgtttacagcgctggctatcctgattatgcgcctgaagatgttcctgactccacatatgtgtgtcatggcaagccttatctgttcccgacagctgttcggctggctgtttcgccgggtgcgcttcgagaaggtgatatttggtatcctgactgtgatgtctattcagggctatgctaacctgaggaaccagtggtcaatcatcggcgaatttaataacctcccgcaagaggagttgcttcagtggattaaatattctaccacttcagacgctgtgtttgctggcgcaatgccaacaatggcaagcattaagttgagcaccctccacccaattgtgaaccacccccattacgaagacgctgatctcagggctaggacaaaaatagtctacagcacctactcccgtaaatctgctaaggaggttcgcgacaaactgctggagttgcacgtcaattactacgtgttagaggaggcctggtgcgttgtgcgaaccaagcccggctgtagcatgctggaaatctgggatgttgaggaccccagcaatgctgcaaaccccccactgtgtagcgttcttctggaagacgcgaggccctactttaccacagtgttccagaacagcgtatatagagtacttaaagttaactag

SEQ ID NO: 115075 - DNA, 618 bp, synthetic construct
  misc_feature 1..618: note = Description of Artificial Sequence: Synthetic coding sequence
  source 1..618: mol_type = other DNA
atgaggctaaagatgttcttaaccccccacatgtgtgtgatggcttccctgatctgttcccgccagttatttggctggctctttcggagggtgcgctttgaaaaggttatcttcggtatcctgaccgtcatgtcgatacaggggtacgctaacttgaggaaccagtggtccataatcggggagttcaataacctcccacaagaggaactcctgcagtggataaaatactcgacgacatcagacgcagtcttcgcaggggccatgcctacaatggcttccatcaagctgtccaccttgcatcccatcgtgaatcacccacattacgaagatgctgaccttagagcaaggactaaaattgtctattcgacctactccaggaaatccgccaaagaggttagagacaagctgctagagcttcacgtgaactattacgtgctggaagaggcatggtgtgtggtacggactaaaccaggatgttccatgttggaaatctgggatgtcgaggatccaagcaacgccgccaacccgcccctctgctctgtgttactcgaggatgctcgaccgtactttacgaccgtctttcagaacagcgtctatagagtgttgaaggtgaactag

SEQ ID NO: 115076 - DNA, 273 bp, synthetic construct
  misc_feature 1..273: note = Description of Artificial Sequence: Synthetic coding sequence
  source 1..273: mol_type = other DNA
atgagaaaacaaggggtctcttctaagaggcttcagagctcgggacgcagccagtctaagggacggaggggtgcatcgctcgcccgcgagcccgaggttgaggaggagatggagaaaagcgccttgggtgggggaaaattgcctagggggtcttggagatcctcccctggaagaatccagtccctcaaagagcgcaaaggtctcgagctggaggtagtcgccaagactttcctgcttggcccatttcagttcgtgcggaattcactagcatag

SEQ ID NO: 115077 - DNA, 1629 bp, synthetic construct
  misc_feature 1..1629: note = Description of Artificial Sequence: Synthetic coding sequence
  source 1..1629: mol_type = other DNA
atgatgtctatcagacagagacgagagataagagctacagaggtatccgaggatttccccgcccaggaagaaaacgtcaaacttgaaaacaagttgccctcgggctgcacttcccgcagactatggaaaatcctgtcccttacaattggcggcactatcgcgctctgtatcgggcttctaactagcgtctatctcgctaccctgcacgaaaatgacctgtggttttcgaacatcaaagaagtggaaagggagatctcattcaggactgagtgcgggctgtattatagctactataagcaaatgctgcaggctccaaccctagtacagggctttcacggactgatatacgacaataagacagagtctatgaagactataaacctcctacagagaatgaacatttatcaggaggtctttctgagtatcttataccgggttctccccatccagaaatatctggagcctgtctacttctacatctacacactatttggactacaagctatctatgtgactgccctgtacattacatcctggcttctgagtgggacatggctgtccgggctgttagctgccttctggtacgtgactaacaggatcgatacaacgcgagttgagtttaccatccccctgcgagaaaattgggctcttcctttttttgccattcagatcgctgccattacctatttcttgcggcccaatctacaaccgctgagcgaacggttaactttgctggccattttcatatcaacgtttctgttcagtctgacctggcagttcaaccagttcatgatgctcatgcaggctctggtgctcttcacgttagactcgcttgatatgctgcctgcagtaaaagctacctggctctacggaatacagataacatcacttctgctcgtctgtatcctgcagttttttaatagcatgatattaggaagcttgctgatctcctttaacctatccgtgttcattgcccggaaacttcagaagaacctgaaaaccggctcctttctgaaccggctggggaaactgttgctgcatctctttatggtgctgtgccttactctgttcctaaacaacatcatcaaaaagatactgaacctgaagtcggatgagcatatcttcaagtttttaaaggcaaaattcgggttaggggccactagggacttcgacgctaatctttacttatgtgaggaagccttcggattattgccatttaatacctttggccggctttccgataccctactgttttatgcttacatctttgttctatccatcaccgtgattgtagccttcgtcgtggcttttcacaacctttcagatagcacaaaccagcaaagcgtgggcaaaatggagaagggaactgtcgacctcaagcctgagactgcatataacctcatccacactattctgtttggcttcttggcactgtctacaatgcggatgaagtacctctggacaagtcacatgtgtgtgtttgcctcatttggattgtgttccccagagatatgggaactactccttaagtctgtacacttatacaaccctaagaggatttgtattatgagatactctgtacccatactaatccttctgtatctgtgctacaaaaaccagaagtcctag

SEQ ID NO: 115078 - DNA, 2151 bp, synthetic construct
  misc_feature 1..2151: note = Description of Artificial Sequence: Synthetic coding sequence
  source 1..2151: mol_type = other DNA
atgatgtctatacgccagagacgtgagatacgcgccacggaggtatccgaggactttccagctcaggaggagaacgttaagctcgagaataagttacctagcggatgcacatcccgccggttatggaaaattctctctctcacgattggcggcacaatcgccctgtgcatcggcttgctaacttccgtgtatcttgctacactacatgagaatgacctgtggttttccaatatcaaggaagtggagcgggagatttccttcagaacagaatgcggcctttattattcctactataagcagatgctccaggctcccaccctggtccagggattccacggactgatttacgataataaaacagagtccatgaaaactatcaacctgctgcagagaatgaacatctaccaggaggtgttcctgtccatcctctaccgcgtcctgcccatccagaagtacctcgaacccgtgtatttttacatttacaccctcttcggtttgcaagccatctatgttacagctctgtacatcacttcttggttgctgagtggaacatggctgtctggcctcttagctgcgttctggtatgtgacaaatagaatagacactactcgcgtggagttcaccatccctctgagagaaaattgggccctccccttcttcgccattcagattgcagcaataacttatttcctgcgtcccaatctacagcctctatccgagagactgacgctcctggccatcttcatatctacatttttattctctctcacctggcagttcaatcagttcatgatgctgatgcaggccttagttttgtttactctagatagtctagatatgctcccggcagtgaaagcgacctggctttacggcatccagattacctccctcttgctggtttgcattctgcagttctttaattctatgattttgggttcgctcctgataagtttcaacctttcagtgttcatcgcgcgaaagctccaaaagaacctgaagaccggatcttttctgaataggcttggcaagttgctgctccacttgttcatggttctttgccttactttgttcttgaataatataataaagaagatcttgaacttaaaatccgacgaacacatctttaaatttctcaaagcaaagttcggcttgggggctactcgggacttcgacgccaacctgtacctgtgcgaggaggcattcggcctgctgccattcaacacattcggaagactctctgacacactgttgttctatgcttatatattcgtcctaagcattactgttatcgtggcctttgtcgttgcatttcacaacttatccgacagtactaaccagcaatctgtcggcaagatggagaaggggactgtcgatcttaaaccagaaacagcttacaatctgatacatactattctgtttggattccttgcattgagcactatgaggatgaagtacttatggaccagccacatgtgcgtattcgcaagcttcgggctttgcagccccgagatttgggagttacttctgaaatcagttcacctgtataatcccaagcggatttgtattatgcgttacagcgtgcccatcctgatactcctctacctctgttataaattttggccagggatgatggatgagctgtctgagctgagagaattttatgacccagataccgtagagcttatgaactggatcaactcaaatactccaaggaaggctgtcttcgctgggtctatgcaattgctggccggagtgaaactctgcactgggcggaccctgacaaatcaccctcactatgaggactcctctctcagggaacggactcgggctgtctaccagatttatgctaagagagcaccagaggaggtgcacgcattgctaagatctttcggcacagattacgtgattctcgaggactctatttgctacgaacggcggcatcgccgagggtgcaggcttagagatttgctcgatattgccaatggtcacatgatggacgggcctggagaaaatgaccccgatctgaagcccgctgaccacccccggttctgcgaggagattaagaggaatctgccgccctatgtggcttactttactagagtgttccagaataagactttccatgtgtataagctgtcccggaataaatag

SEQ ID NO: 115079 - DNA, 342 bp, synthetic construct
  misc_feature 1..342: note = Description of Artificial Sequence: Synthetic coding sequence
  source 1..342: mol_type = other DNA
atgatgagcattagacaaaggagagaaattcgggctacggaggtgagcgaagatttccctgcccaggaagaaaatgttaagctcgaaaacaagctgccctccgggtgcaccagcagacggctctggaaaatccttagtctcaccattggtgggaccctccccttcgcgctcgactttctgcacctttccactctgcctcgctatatgaagatgatatacggattccttatactacggaaatggtctgaaaagagccattctgagcaatcggtcgcctgtataacacccacaacctcaagatgctgtaggctgcagcctagttgcaaggtgttcatggcatag

SEQ ID NO: 115080 - DNA, 2151 bp, synthetic construct
  misc_feature 1..2151: note = Description of Artificial Sequence: Synthetic coding sequence
  source 1..2151: mol_type = other DNA
atgatgagcattcggcaacggcgcgagatacgcgcgacagaggtgtctgaggactttcccgcccaggaagaaaacgttaaattggaaaacaagttgccttctggctgtacctcccggagactgtggaagattcttagcctgactattggtggcacaattgcgctctgcatcggactgctgacaagtgtctatcttgctacactccatgaaaatgacctttggtttagcaatatcaaggaggttgagagggaaatttcttttaggacagagtgtggcctttattactcttattataaacagatgctgcaagcccccacactggtgcagggcttccacggacttatttacgataacaagaccgagagcatgaagacgatcaatctccttcagcgcatgaacatttatcaagaggtctttctctctatcctctacagggtgctgcccatccagaagtacctggaacccgtctacttttatatttatacactcttcggacttcaggctatctatgtcaccgccctgtacattacaagttggttgctctctggcacctggctgagcggcctgctggcagcattctggtacgtaaccaacagaatcgacactacaagagtggaatttaccattccgcttcgagaaaattgggccttgccattttttgccattcagattgcagcaatcacctattttctgaggcctaatttacagccactctctgagcggcttaccttgctggcaatctttatatccacattcctgttctcactgacatggcaatttaaccaattcatgatgctcatgcaagcattggtgctgtttacccttgattctctggacatgctgccagccgttaaggccacctggctctacggcatccagatcacgtctcttctgctggtgtgcatcctgcagttttttaattcaatgatcctgggatcacttttgatatcctttaacctgtcagttttcattgcacgaaaactgcagaagaacctgaaaactggttcttttcttaatcgactggggaaattgctcttgcacctgttcatggtgctatgtctcactctgtttctaaataatatcatcaaaaagattctgaatctaaagtccgacgaacatattttcaagttccttaaggcaaagttcgggctgggggctacccgcgacttcgatgccaatttgtatctgtgcgaggaagcttttggcctgctcccgtttaacaccttcggtcggttgagcgataccctcctcttctatgcctacattttcgtgctgtcaattaccgtaatagttgcatttgttgtcgcctttcacaacctctctgattctacaaatcagcaaagtgtcggcaagatggagaagggcactgtggatctgaagcctgagacagcctataacctgattcacaccatactctttggcttcctggcactgtccactatgcggatgaaatatctttggacaagtcacatgtgcgtctttgcctccttcgggttgtgtagtccagaaatctgggagctgctcctgaagtccgtgcatctttataaccccaagagaatctgcatcatgagatattccgtgcccatccttattctgctatatttatgctacaaattttggccaggcatgatggacgagttgtctgagcttagagagttctacgatcctgataccgtggagttgatgaactggatcaactcaaatacccccaggaaggctgtgttcgctggaagcatgcagctcttggctggcgtgaagctttgtacggggcggacccttacgaaccatcctcattatgaggattcatcactgcgggaacgcaccagggcggtctaccagatctatgctaaacgcgcccccgaggaggttcatgcccttctgcggtctttcgggacggactatgttatccttgaggacagcatctgctatgagaggagacaccgaaggggctgccgactgcgcgacctccttgatattgccaatggccatatgatggacggccccggggagaacgatcccgacctgaaaccagcggaccatccaagattctgcgaagagataaagagaaacctgccaccctacgtggcctactttacccgcgtgttccagaataagaccttccatgtgtataaattaagtaggaataagtag

SEQ ID NO: 115081 - DNA, 2172 bp, synthetic construct
  misc_feature 1..2172: note = Description of Artificial Sequence: Synthetic coding sequence
  source 1..2172: mol_type = other DNA
atggcggaggaagagggaccaccagtagaactccgccagaggaaaaaacccaagtccagcgagaataaggaaagcgccaaggaggagaagatcagcgacatccctatccctgagcgagcccccaagcatgtgctctttcaaagattcgccaaaatcttcattggttgtctggctgcagttacctccggcatgatgtatgcactgtatctatcggcttatcatgagcggaaattctggttctctaaccgccaggagttggagcgggaaattaccttccagggggatagtgccatttattactcttactacaaggatatgctaaaagccccctcttttgagaggggtgtctacgagcttactcacaacaataaaaccgtcagcctgaagaccatcaatgccgtccagcagatgagcttgtatcccgagctgatcgccagcattctgtatcaagccactggatctaacgagataatcgaacccgtgtatttttacatcgggatcgtgttcgggctccaagggatctacgtgaccgccctcttcgtaactagttggctgatgtcagggacatggcttgccgggatgttgacagttgcctggtttgtcatcaacagggtggatacgacaaggatcgagtactccatcccattgagagagaattgggccctgccctactttgcctgccagatcgcagcactgactggctatctaaagtctaacctgaatacatacggcgaaaggttctgttacctgttgatgtcagcctcaacatatacattcatgatgatgtgggagtactcacactacctcctgtttctgcaggctatctcactgtttctgctggataccttcagtgtggagcagtctgataaagtgtatgaggtatacaaaatatacattttctcactctttctgggctatttgctccagttcgaaaatcctgccctattggtttccccactcctgtctctagtcgccgccctgatgctggcgaagtgcctgcagctgaacgttaagaaggggtccttcgtcgcgaagatcattaaggtcataaatttctatctcgtgtgcaccttgacaattacattgaatattatcatgaagatgtttgtgccgcataaagagaacggccacatgcttaagttcctggaagtcaagttcggccttaatatgaccaaaaattttacaatgaactggctcttatgccaggagtccctgcaggctccgtcacaagactttttcctgaggttaacgcagtcaagtctgctccctttctacattttggtgctgattatctgtttcctctcaatgctccaggtcattttccgaaggatcaatggtaagtcactgaaggaaaccgtaaccctggaagacgggagaatcggcgaacggcctgagattatctatcatgtgatacataccatcttactgggtagtctcgccatggtcatcgagggcttgaagtatatttggatcccctacgtatgcatgctcgccgcgtttggagtgtgtagtcctgaactgtggatgaccctgtttaagtggctgagattgaggaccgtccaccccatactacttgccctgatcctgtcaatggcggtcccgacaatcatcggcctgtcgttatggaaggaattcttcccccgcctgatgacagaactgatggagcttcaagagttctatgatcctgatacagtggaactcatgacctggatcaagcgacaagcccccgtagccgccgtcttcgccggctctccccaactgatgggcgccatcaaactctgcaccggatggatggtcacatctctcccactctataacgatgacgatcttctaaagagaaatgagaatatttatcaaatttatagtaagagatccgcagaggacatctataagatattgacctcttacaaagcaaactacttaatagtagaagacgcgatctgtaatgaggtcgggcccatgcggggctgtcgtgtcaaggaccttttagatatcgcgaatggccatatggtatgtgaggaaggagacaaattaacatatagtaaatatgggcgcttctgtcatgaagttaaaatcaattactcaccctacgtaaattattttaccagagtgtactggaatcgcagttatttcgtgtacaaaatcaacactgttatctccttccagtcctag

SEQ ID NO: 115082 - DNA, 300 bp, synthetic construct
  misc_feature 1..300: note = Description of Artificial Sequence: Synthetic coding sequence
  source 1..300: mol_type = other DNA
atggaacctgagcaaatgttggagggccaaacccaagtcgctgagaaccctcatagtgaatacggacttactgataatgttgaacgcattgtcgaaaacgagaaaataaacgccgagaagagctcgaaacaaaaagtggatctgcagagcctgcccacacgggcctaccttgatcagactgtagtgcctattctcctccaggggctcgccgtcctcgccaaggaaagacccccgaacccaatcgagttcttggccagctacctcctgaagaataaagcccagtttgaagaccgcaattag

SEQ ID NO: 115083 - DNA, 300 bp, synthetic construct
  misc_feature 1..300: note = Description of Artificial Sequence: Synthetic coding sequence
  source 1..300: mol_type = other DNA
atggaacccgagcagatgttggagggccagacgcaggtggctgaaaatccacactccgaatatggactgacggataacgtggaacggatagtggaaaatgaaaaaataaacgctgagaaatcaagtaagcagaaggtggatctgcagtccttgcctacccgggcttatctcgatcagacagtcgttcctattttgttgcagggcctcgctgtgctggctaaggagcggccaccaaacccaatcgagtttctggcctcctacctgctcaagaataaggcccagttcgaggataggaattag

SEQ ID NO: 115084 - DNA, 1956 bp, synthetic construct
  misc_feature 1..1956: note = Description of Artificial Sequence: Synthetic coding sequence
  source 1..1956: mol_type = other DNA
atggctggtcacccctggcatgggaccgcggcactggcctctagtcaagcgtggagagacggccgtgagaggcaggcactggtctcctgccgggccctgtatacatatgaagacggatcggacgacctgaaactcgccgctagcggcgaggggggcctacaagaattgagtggccattttgaaaatcagaaagtgatgtacggcttctgctccgttaaggacagtcaggccgccttacctaagtacgtgctcataaactgggtcggagaagacgtaccagacgctagaaaatgcgcttgtgcgtctcatgttgccaaggtagccgagtttttccaaggagtggatgtgattgttaatgccagttctgtggaagatattgatgccggtgccattggtcaacgtttgtcaaatgggctagcccggctttcttcaccagtactgcaccgtctgagattgcgggaagatgagaacgcagagcccgttggaaccacctaccagaaaaccgatgcagccgtcgagatgaagcgcataaacagggagcagttctgggagcaggccaagaaagaggaagagctacgtaaggaagaggaaaggaagaaggcccttgatgagcgcctaagatttgagcaggagagaatggagcaggaacggcaagagcaggaggaacgtgagcggcggtatcgggaacgagagcagcagattgaagaacatcgtaggaagcagcagacacttgaagccgaagaggccaaacggagactgaaagaacagagcatcttcggagaccatcgtgatgaggaggaggaaacccatatgaaaaaatctgagtccgaggttgaagaggcagcagctatcattgcccagcgccctgacaaccccagagagtttttcaagcagcaggagcgagtggccagcgccagcgctggctcttgcgacgttcccagtccctttaatcatagaccaggctcccacctcgactcccatcgtcgcatggctcctaccccgattcctacgaggagcccttccgactcatctaccgcttcgaccccagtagctgagcagatcgaaagagccctggacgaagtgacgtcatcgcaaccacctccccttccacccccaccacccccggcgcaagagacacaggaaccgtccccgatcctggacagcgaagaaacccgggcggcggctccccaggcatgggccggaccaatggaagaaccaccacaggcgcaggccccaccacgggggcctggatcacccgctgaggacctgatgtttatggaatctgccgagcaggccgtgctggcagctccagtcgagccagccacagcagacgccactgaaatccacgacgctgcggataccatcgaaacagacactgctactgcagacactacagtggctaataacgtgccgcccgctgctacctcgttgattgacctgtggcccggcaatggtgagggcgcctctactctccagggcgaaccacgtgcccccacgcctcctagtggtaccgaggtcacattggctgaggtgcccctgctagacgaggtggcccctgagccactcttgcctgccggcgaaggatgcgccacgctgctgaactttgatgaactcccggaacctcctgctactttctgtgatcctgaggaagttgagggggagagcttggcagctccacagacacccacccttccctctgctctggaagagctggaacaggagcaagagccggaacctcaccttctgacaaatggcgaaacaacacagaaggagggaactcaggcctccgagggttatttttcacagagtcaggaggaggaattcgcacagtctgaggagctgtgcgccaaggcccctccaccggtgttttacaacaaaccccctgagatagatatcacgtgttgggacgccgatcccgtacctgaggaggaggaaggctttgaaggaggcgactag

SEQ ID NO: 115085 - DNA, 1950 bp, synthetic construct
  misc_feature 1..1950: note = Description of Artificial Sequence: Synthetic coding sequence
  source 1..1950: mol_type = other DNA
atggccggagtgtcattttccggtcacagactcgagctgctggccgcttacgaggaggtgatcagagaagagagcgccgctgattgggctctgtacacttacgaagatggctcagacgatctgaagctggccgcctcaggggaaggggggttacaggagctgagcggccactttgagaatcagaaagtgatgtacggtttctgctcagtgaaggactcccaggcagccctgcctaagtacgtactgattaactgggtgggcgaagacgtgcctgacgctcgtaaatgtgcatgcgcctcccacgtggcaaaagtggcagagttctttcagggcgtcgacgtgatagtgaatgcttcatccgtcgaggatattgacgccggcgccattgggcagaggctttctaatggattagcaaggctgtcctcgccagtgctccatcgattgcgactgagggaagatgagaatgcggaaccggtcggcacgacataccaaaaaactgatgcagcagtagagatgaaacgaattaacagggaacaattttgggaacaagccaagaaagaggaagagttgaggaaggaggaggagcggaagaaagcactggatgaaaggctgcggtttgagcaagaacggatggagcaagagagacaggagcaggaggagcgggagaggaggtatagggaacgggaacaacagatcgaggagcatcgtaggaagcagcaaactctggaggccgaggaagccaagcggagactgaaggagcaaagcatcttcggagaccaccgcgacgaagaagaagaaactcacatgaaaaaatccgaaagtgaggtggaagaggcggccgccatcatagcgcagagacccgacaaccctagggagtttttcaagcagcaggagcgggtagcaagtgcttctgccggatcctgcgacgttccaagtccatttaatcatagacccgggagtcacctggattcacatagaaggatggctcctacccctatccccactaggagtcctagcgattcatcaaccgcctctacaccagtggccgagcagatcgagcgggctttggatgaggtcacctcgtctcagcccccccccctgcctcccccccctcctccggctcaggaaacacaagaaccctccccaatcctggacagcgaggaaaccagggccgccgccccacaggcctgggctggcccaatggaagagccaccccaagcccaggcaccaccacgcggccctggatcacctgccgaggatctgatgttcatggaatctgccgaacaagccgtgctggctgctcctgtcgaacccgctacagccgacgctacagaaattcatgacgcggcagatacaatagaaaccgacacagccaccgccgacaccactgtggctaataatgtaccacctgccgctacctccttgattgatctgtggcctgggaatggagagggtgcttctaccctgcagggcgaaccccgcgccccgacaccccccagtggcacagaggtcactttagccgaggtgcccctactggacgaagtcgcccccgagcccttactgccggccggagaaggatgtgccaccctgctcaattttgatgaacttccagagccccctgctacattctgtgatcctgaggaggtggagggcgagtctcttgccgcgcctcaaacaccaactctgccaagcgcccttgaagagctagaacaggagcaggagccagagccccatctcctcaccaacggagagactactcaaaaggaaggcacccaggcctcagagggctacttttcacagtcccaagaagaagagtttgcccagtccgaagaactgtgtgccaaggctcccccacccgtgttttataacaaacctcctgagattgacattacatgctgggatgctgacccggttcccgaagaggaggaaggattcgagggtggggattag

SEQ ID NO: 115086 - DNA, 1146 bp, synthetic construct
  misc_feature 1..1146: note = Description of Artificial Sequence: Synthetic coding sequence
  source 1..1146: mol_type = other DNA
atgaagaaaagtgaatccgaggtcgaggaagctgccgccatcatcgcccagaggccagataatccaagggagttctttaagcagcaggaacgggtcgcatctgccagtgccggcagctgcgacgtgccgtcaccttttaatcaccggcctggcagccatctggacagccaccgccggatggcacctactcctatcccgacgcgcagcccgtcggatagtagcaccgctagcaccccagtagccgaacagattgagcgtgcccttgatgaggtgacatcatcccagcctccccccctgccacccccacccccacctgcacaagaaacacaggagccatcccctatactggatagcgaggagactcgggcagctgcaccgcaggcgtgggcaggcccgatggaagaacctccccaagcccaggccccacccagggggcctggaagcccagccgaggacctgatgtttatggaatcagctgagcaggccgtactcgcggctcctgtcgagccggcgacagcagacgccaccgagatccacgacgcggctgatactattgagacagacaccgccaccgctgataccactgtggcgaacaacgtgcctccggccgctacgagcctgatcgatctgtggcccgggaacggcgaaggcgcttcgaccctgcagggagaaccgagagcccccactcctccgtccggaacggaggtgacccttgctgaggtgcccctactggatgaggtcgcacctgaaccccttttacccgccggcgagggatgcgctactctgctgaactttgatgagcttcctgaacctcctgccactttttgtgatccggaagaggtcgagggtgagagtttggcagccccgcagactccgacgcttccctctgctctggaggaactggaacaggaacaggagcctgagccacacctactgacgaacggggaaacaactcaaaaagagggaactcaggctagcgaaggatacttcagccagagccaggaggaggagtttgcacagtccgaagagctttgtgctaaagccccgcctccggttttctataacaaacctcccgaaatcgacataacctgttgggacgccgaccctgtgcccgaagaggaagagggctttgaaggtggagattag

SEQ ID NO: 115087 - DNA, 954 bp, synthetic construct
  misc_feature 1..954: note = Description of Artificial Sequence: Synthetic coding sequence
  source 1..954: mol_type = other DNA
atggcaggcgtaagttttagcggtcaccgcttggagttgctggccgcatacgaggaagtcatcagggaggagtctgcagccgattgggcactctatacttatgaagatggctcagacgaccttaaattggctgcctctggaggaggtttgcaagagctcagtggacattttgagaatcagaaagtgatgtatggcttttgttccgtcaaggacagtcaagccgccttaccaaagtatgtcctgatcaattgggtgggagaggacgtgcccgacgcaagaaaatgcgcctgtgctagccacgtggccaaggtagcggaatttttccagggggtggacgtgatcgttaatgctagttcggtggaagacattgacgccggagcaataggacagcgcctcagtaacggcctggctcgtctcagttcaccggtgctgcatcggctaaggctgagagaagatgagaacgccgagcccgtgggcactacgtaccagaagaccgacgccgcagtggagatgaagaggatcaatagggaacaattttgggaacaggctaagaaggaagaagaattgagaaaggaggaagaacgcaaaaaagctctggacgaacgcctgaggtttgaacaagagcgcatggagcaggagagacaagagcaggaggaaagagaacgccgttaccgcgagagagagcagcaaatagaggagcaccgtagaaaacagcagactttggaagccgaggaggctaagcggagactcaaggaacagagtatctttggcgatcaccgggacgaggaggaggagacccacatgaagaagtcggaatcagaggtggaagaggccgcagcgatcattgcacagcggccggataatcctagagaattcttcaaacagcaggagagagtcgctagcgcaagtgctggatcgtgtgatgtgccctcacccttcaaccaccggccgtag

SEQ ID NO: 115088 - DNA, 375 bp, synthetic construct
  misc_feature 1..375: note = Description of Artificial Sequence: Synthetic coding sequence
  source 1..375: mol_type = other DNA
atggcaggcgtcagcttctcgggacatcggctggaactgctcgctgcttacgaagaagtcatcagggaggagtcagccgctgattgggcattgtatacctatgaggacgggtctgatgatctaaagctggccgcctccggtgagggaggtctacaggagctgtctggccattttgagaaccaaaaagtgatgtacggcttctgttccgtgaaggactcccaggcagcactcccaaagtacgtgctcattaactgggttggcgaggacgtaccagatgccaggaaatgcgcctgcgcttcacatgtggccaaagtggccgagttctttcagggagtggacgtaatagtgaacgcttcatcagttgaagatatctag

SEQ ID NO: 115089 - DNA, 3900 bp, synthetic construct
  misc_feature 1..3900: note = Description of Artificial Sequence: Synthetic coding sequence
  source 1..3900: mol_type = other DNA
caccgtatgagcttccaccctggcagagggtgtccccggggcaggggaggtcacggtgccaggccttccgccccatctttccgcccgcagaacttgaggttgttacacccacaacagccgcccgtacagtaccagtacgaacccccatcagctccgagtaccactttctcaaattccccggcacccaattttctccccccgcggccagacttcgtaccttttcccccaccgatgccaccgagcgcccaggggcccctaccaccctgtcccatccgaccccctttccccaaccatcaaatgcgacatcccttccccgtccccccctgctttccaccaatgcctccaccgatgccctgccccaacaatccacctgtccccggagctcccccgggtcaaggaactttcccctttatgatgccgcctccctctatgcctcatcccccaccaccacctgtcatgccacagcaggtgaattaccagtatccacctggctactcccatcataacttccctcctcctagttttaattctttccagaacaaccccagctcctttttaccatccgcaaacaactctagtagtccccactttagacacctgccaccgtatcctttaccaaaggctccctctgaacgccgatcacccgagcgactcaagcactacgatgatcacagacatagagaccattctcatgggaggggagaacggcataggagcctcgaccgaagggagcgagggaggtcgcctgacagaagaaggcaggatagtcgctaccgtagcgactacgaccgaggtagaactccctcacgccatagatcttacgagcgatcatcgcgctcgcccagtcgtgaaaaaaagcgcgcgagatgggaggaagagaaagaccgatggtctgataatcagtcctctggtaaagataagaactacacaagcattaaagagaaggaaccagaggagactatgccagataagaatgaggaagaggaagaagaactactcaagccagtgtggatccggtgtacccatagtgagaactactatagcagcgatccaatggatcaggtgggcgacagtaccgtggtggggacatcgcgtctgcgagatctctacgacaaatttgaggaagagctcgggagtcgtcaggaaaaggccaaagctgcccgcccgccctgggagccaccaaaaaccaagctggacgaggacctggagtcaagttcggaatctgagtgcgagagcgatgaggattcgacctgctcatccagctctgacagcgaggtctttgacgtgatcgcagaaattaaaagaaagaaggcccatcctgacaggcttcatgacgagctgtggtataatgaccccggtcagatgaacgacggacccctgtgcaagtgctccgcgaaggcaaggcggactggtatacgacactctatataccctggagaagaagctattaagccatgcaggcccatgaccaataacgctggccggctgtttcattaccggattacagtctcacccccaaccaatttccttaccgaccgccccaccgtcatcgagtacgacgaccacgaatacatctttgagggattctctatgtttgctcacgcacctctgaccaacattcccctttgtaaagttatccggttcaatattgattacacgatccactttatcgaggagatgatgccagaaaatttttgcgtgaaaggcttagaactattcagtctgttcctgttcagggacatcctggagttatatgactggaatctgaaaggaccactttttgaagacagccccccctgctgccctcggttccatttcatgccccgattcgtaaggttcttaccagacggcgggaaggaagtcttatcaatgcatcaaattctgctgtatctgttaaggtgctccaaagccctggtgccagaagaggaaattgccaatatgctccagtgggaagagttggagtggcagaaatatgctgaagagtgcaagggcatgatcgttaccaatcctgggacgaagccatcctccgttcggatcgatcaacttgatcgggagcagttcaaccctgatgttatcacatttccgatcatcgtgcactttggcattcgcccagcccagctgagctatgccggagacccccagtaccagaaactatggaaaagctatgtgaaattgaggcaccttctggccaactcgcctaaagtgaagcagacggacaagcagaaattagcccaacgcgaggaggcgctccagaagatacggcagaaaaacaccatgcgcagggaagtgaccgtggagttgtcctctcaggggttttggaaaacaggaatccgcagcgatgtgtgccagcatgccatgatgctgccagtactgacccaccacataagataccaccagtgtctgatgcatctggataagctgatcggttacacctttcaggataggtgtttgttacaactggccatgactcacccgagtcatcacctgaatttcggaatgaatccagaccacgcgaggaactccctgagcaactgtggcataaggcagccaaaatatggggatcgaaaagtccaccacatgcacatgcgaaagaagggtatcaacaccctgatcaacatcatgagccggctggggcaggatgacccaaccccgtcacggattaatcacaatgaacgcttagagtttttgggggacgccgtcgtggagttcctgacatctgtacatctctactatctgttcccctctctggaagagggcggactcgcaacttatcgcacagctatcgtgcagaatcagcatctggcaatgttggcaaagaaattggaactggatagatttatgttatacgctcacggaccagacttgtgtcgcgaatcagacctgagacatgccatggctaattgcttcgaagcccttataggagctgtgtatctcgaggggtctctcgaagaagcaaagcagttattcggaagactgctgtttaacgaccctgacttgagggaggtatggctgaactaccctttacaccccttgcagttacaggagccgaatacggatcgccagctaatcgaaacttctccggtgctgcagaaacttaccgaatttgaagaagctataggtgtcatctttacccatgtccggctgctggcccgggccttcacgctgcgcactgtggggttcaatcacctgaccctcgggcataaccagaggatggaatttttaggcgactctattatgcagctggtggcgacggagtatctctttattcactttcccgatcaccacgaagggcaccttactctgctgcgttcatctctagtaaacaaccgtactcaagccaaagtggccgaggagctcggcatgcaggaatacgccattactaacgataaaactaagaggcctgtggccttgcgcactaagactctagccgatcttctggagagtttcatagctgctctttacatcgacaaagacctcgaatacgtccacactttcatgaacgtatgtttttttccaaggcttaaagagttcatactcaaccaagattggaatgaccctaaatcacagctccagcagtgctgtctcacacttagaactgagggcaaagagcccgatataccactctacaagacactgcaaaccgtgggaccatcccatgctcggacgtataccgtggcggtgtactttaagggagaacgcattgggtgcgggaagggcccctccattcaacaggctgagatgggagctgccatggacgcattggagaaatataacttccctcagatggcgcatcaaaagaggtttattgaacgcaagtacagacaggagctgaaggagatgcggtgggagagagagcaccaagagagagaaccagacgaaacagaagatataaaaaaatag

SEQ ID NO: 115090 - DNA, 4125 bp, synthetic construct
  misc_feature 1..4125: note = Description of Artificial Sequence: Synthetic coding sequence
  source 1..4125: mol_type = other DNA
atgatgcagggcaacacctgtcacagaatgtcatttcatcccggaaggggatgtccccggggccggggagggcatggcgccagaccaagtgctccgagctttagacctcagaatctcagactgcttcatcctcagcaaccccccgtccaataccagtatgagcctccatccgccccaagcaccacgttctccaattccccagcacccaattttttgccacctcgcccagattttgtgccattccctccgcccatgcccccctccgctcagggacctctgcccccgtgcccgattcgccctcccttcccaaatcaccagatgcgtcacccattccccgttcctccatgttttccaccaatgcccccacccatgccatgccccaacaaccctccagtacctggagcacctcccgggcagggaacttttccttttatgatgcctcctccatcaatgccccatcctcccccccctcccgttatgcctcagcaagtgaactatcagtaccccccaggatattcacaccacaactttccgccgccttcatttaacagttttcagaataatccctcctcatttctgccctctgctaacaacagttcgtctcctcactttaggcacctgcccccgtatcccctgcccaaggcgccatccgaacggcgatccccagagcgcctgaagcactacgatgaccaccgacatagggatcattctcatggtcgcggtgaacgccaccgcagtctcgaccgacgagagagagggcgctcacctgacagaagacgccaggacagtcgatatagaagtgactacgatcgcggccgaactccgtcacggcaccggtcatacgagaggtcacgcgaaagggaacgggaacgccacagacatcgggataacagacgcagcccttcgctggaacggtcctataaaaaggaatacaagagaagcgggcgaagctatggcctttcagtcgtgcccgagccagccgggtgcacccccgaactgcctggcgagattattaaaaacactgactcctgggccccccccctagagatagtgaatcacagatccccctcacgggagaagaagagggcacgctgggaggaagaaaaggatcggtggtcagataatcagtcgtcggggaaagacaagaattacaccagcataaaagagaaggagcctgaagaaactatgcccgataagaatgaagaggaggaagaagagttattaaaaccagtgtggatacggtgcacgcatagtgagaactattatagcagcgatcctatggatcaggtcggggattccacggtcgtcggaacatctaggctcagggacttgtatgacaaattcgaggaggaactcggttcaagacaagagaaagctaaggctgccaggcctccctgggaacccccaaaaaccaagctagatgaagatctggaatcgtcgtcggagtccgagtgtgaaagcgatgaagattccacttgctcttcctcaagcgattcggaggtgttcgatgtgatcgccgaaattaaaagaaaaaaggcccatcccgatcggctgcacgacgaactgtggtataatgaccctggtcagatgaacgacggccctctgtgcaaatgcagcgccaaggctcgacgcactggcattcgacattcgatctatcccggcgaggaggccatcaagccttgtcggcctatgaccaacaatgccgggaggctattccattatcggatcacggtatcgccacccacaaattttctgaccgatcgtccgacagtgattgagtatgatgaccatgaatatatattcgaagggttttccatgtttgcacatgcccctctgacaaatatccccctgtgtaaagtaatacgatttaacattgactataccatccatttcattgaagaaatgatgccggagaatttctgcgttaagggactcgagctatttagtcttttcctgtttagagacattctggaattgtacgattggaacctcaaagggcctttgttcgaagacagccccccctgttgccctaggtttcactttatgcctagatttgtccggttcctccctgacggcgggaaggaggttctgtctatgcaccaaatcctcctttatcttttgaggtgctcgaaggcactggtgcccgaggaggagattgccaatatgcttcagtgggaggagttggagtggcagaaatatgcggaggagtgtaaaggcatgatagttacaaatccagggacaaaaccttcctccgtacgcatcgaccagctggaccgggagcagttcaatcccgacgtgattacctttcccattattgtgcacttcggcattcgtcctgcacagctgtcatatgccggtgacccgcagtaccaaaaactctggaagtcctatgtgaaactgcggcacctgctcgcgaattctcccaaggtaaaacaaaccgataaacaaaaactggcacagcgtgaagaggcattgcagaagataaggcagaagaatacgatgagacgagaggtcacggtggaattgtcaagccagggattctggaagacaggaatccgcagcgatgtctgccagcatgcaatgatgctccctgtgctcacccaccacatcaggtatcaccagtgtctaatgcacctggataagctgattggatacactttccaggatagatgtctcctccagcttgccatgacacatccctctcaccaccttaatttcggtatgaatcctgatcatgcgcgaaactccctcagtaactgtgggatccgccagcctaagtacggtgataggaaagtgcatcacatgcatatgaggaagaaaggaattaacacactcattaacattatgagccgcttaggacaggatgatccgactccctcccgtatcaatcataacgagcggttggaatttctgggggatgctgtcgttgagtttctaacgtctgttcacttgtattacctgttcccctcattggaggagggtggtctggcgacttatcggactgctatcgtccagaatcaacacttggccatgcttgccaagaaattggagctggacagattcatgctgtatgcccatggccccgacttatgccgggaatccgatcttcgacacgccatggcaaattgcttcgaggcccttatcggtgctgtgtacctggaggggtccctggaggaggccaaacagctttttggcagactgctctttaacgatcccgacttgcgagaggtgtggttgaattaccctctgcacccattgcagcttcaagagccgaacacagacaggcagctcatagagacaagccccgtactccaaaaactcacggagttcgaggaggcaatcggtgtgatcttcacgcatgttcgcttactcgcgcgggcattcacactgcgtacagtcggtttcaatcatctcacgcttgggcataatcagagaatggagtttttaggagacagcatcatgcaactggtggctactgagtatctgttcatacacttccctgaccatcatgaagggcacctaactctgttaaggtcatccctggtgaacaacaggactcaggccaaagtagcagaagagctgggaatgcaggaatacgctattaccaacgacaaaacgaaaaggcctgtggcccttagaacaaaaactctcgcggatctgttggaaagctttatcgctgctctgtacatcgataaggacctggaatacgtgcacacatttatgaacgtatgcttcttccctcgcttaaaagaatttattctcaaccaggattggaacgaccccaaaagccaactgcagcagtgctgtctcacgttgcggacggaaggcaaagaaccggatatccccctgtacaaaaccttacagaccgtggggcctagccacgcaaggacctacacggtggccgtgtactttaaaggggagcggatcggctgtggtaaaggaccctccattcaacaggctgagatgggagccgctatggacgcactagaaaagtacaattttccacagatggcacaccagaaacgcttcatcgagaggaaatatagacaggaattgaaagagatgcgatgggaacgcgagcatcaagagcgggaacccgacgagaccgaagacatcaagaaatag

SEQ ID NO: 115091 - DNA, 3558 bp, synthetic construct
  misc_feature 1..3558: note = Description of Artificial Sequence: Synthetic coding sequence
  source 1..3558: mol_type = other DNA
cataggatgagctttcaccccggtcggggatgtcctaggggaagaggagggcacggagccaggcccagcgcaccgagcttccgacctcaaaatctccgcctgctgcacccccagcaacctcccgtgcagtatcagtatgaaccgccatctgccccaagtacaacttttagcaacagcccagcacctaatttcctcccaccgcggcccgatttcgttccttttccccctcccatgcccccttcggcccaggggcccctgcccccatgtcctatccgcccccccttccccaaccaccagatgaggcatccatttcccgtccccccgtgcttcccgcctatgcccccccctatgccttgtccgaataaccctcctgtgccgggtgcgcccccaggacagggcacctttccctttatgatgccacctcctagtatgccccaccctccgcctccccccgttatgccacagcaggtcaattatcaatacccacctggctattcccatcacaacttcccccccccctcatttaactcctttcagaataacccttcctctttcttaccaagcgccaacaattctagcagtcctcatttcagacacctgcccccatacccactgccaaaggccccatcagaacgacgcagccctgagaggcttaagcattacgatgaccataggcacagggatcatagccacggacgtggtgaacggcatagaagcttggaccgcagagagcggggccgttccccagaccggagacggcaggattcccgatatcgtagcgattacgaccggggcaggacccctagtcggcaccggagttacgagaggagccgcgaacgggaaagggaacgtcatagacaccgtgataatagaagaagtccatccctggagaggagctacaaaaaggagtacaagcgaagtgggagccgctcgccatccagggaaaagaaacgtgctcgctgggaagaagaaaaagacaggtggagcgacaaccagtcctcaggcaaggataagaattataccagtattaaggaaaaggagcccgaagaaactatgccagataaaaacgaagaggaggaagaggagctcttaaagccggtatggattagatgtacacactccgaaaattattacagttcggacccaatggaccaggtaggggactcaactgtggtgggaacctcgagactcagggatctatacgataaatttgaggaagagcttggcagccgccaggagaaagccaaggccgctcggccgccctgggaaccgcccaagactaaattagatgaagatctcgaatcttcgagtgagtcagagtgcgaaagtgacgaggattccacatgcagtagtagctcagactccgaagtctttgacgtgattgccgaaatcaagcgtaaaaaagcccacccagaccggctacacgatgagctgtggtataatgatccgggccagatgaatgacggcccgctctgtaagtgttccgccaaagcacgccggaccggtattcgtcactcgatatacccaggggaagaggccatcaaaccttgccggccaatgaccaacaacgctgggcgccttttccactacaggattacagtgtctcccccgacaaattttctgacagaccgcccaaccgtgatagagtatgatgatcacgagtatatttttgagggtttttccatgttcgctcacgccccacttacaaacatccccctctgcaaggtgatacgtttcaatatcgattatactatacattttatcgaagagatgatgccagagaacttctgtgtgaagggcctcgaactgttctcgctgtttctgtttcgagatatcctggagttgtacgattggaacttgaaaggccccctgtttgaagatagtcctccatgctgcccccggttccacttcatgccacggttcgtaagatttctgcctgatggcggaaaggaggtcttaagcatgcaccagatcttgctctacctcttgcggtgctccaaggccctggtgcccgaagaggaaatcgcaaacatgctccagtgggaggagctggagtggcagaagtacgcggaagagtgtaaagggatgatcgtcaccaatccaggcacaaagcctagttctgtccgaatcgatcagctcgaccgggaacagttcaacccagacgtaatcactttcccgataatagttcactttggcatccggccagctcagctgtcttatgctggggacccacagtaccagaagctgtggaaatcgtacgtgaaactccggcacttgttagcaaactcccctaaggttaagcagacagataagcagaaactcgctcaaagggaggaggcattgcagaaaattcgccagaagaacaccatgagacgagaggtaacagtggagctgagctcccagggattttggaaaacaggcatccgttccgacgtctgccagcacgctatgatgctgcccgtattaacacatcatatcagataccatcagtgtctgatgcatctcgacaaattgataggctacacattccaggataggtgccttttacagctggcgatgacacatcccagtcatcatctgaactttggcatgaacccagatcatgcgaggaatagcctcagcaactgtggaatacgccagcctaaatatggagatcggaaagtgcatcacatgcacatgagaaagaagggcatcaacactctgataaatattatgagccgtctgggtcaggatgacccaacccccagtcgtattaaccataacgaaaggctggaattcctgggggatgctgtagtggaattcctgacatctgtgcatctgtactatctatttccatcccttgaggagggaggtctagcaacttacagaaccgccatcgtccagaaccaacatttagcaatgctcgcgaagaaactagagctcgaccgcttcatgctctatgcgcatggtcccgatttatgccgagaaagtgacctgagacatgccatggccaattgctttgaggctctgattggtgcggtgtatcttgaaggatcgctggaggaagctaagcagctcttcggaaggctgttattcaacgatcccgacctgagagaggtctggctcaattacccgctgcacccactgcagctccaggagcctaacaccgacagacagttaatcgaaacaagtccggttcttcagaaacttaccgagttcgaggaggctatcggcgtaatcttcactcacgtccggctcctggcccgcgctttcactttacgtacagtaggctttaatcacttgactctgggtcataatcaacggatggagttcctaggagactcgataatgcaactggtggctacggagtacctgttcattcattttcccgaccaccatgagggtcacctgactcttctgagaagttctttggtgaataacagaacccaagctaaggtagctgaggaacttggtatgcaggagtggagtatctacctgctaagtaactgtgactgctgcctgctgcgaccctctttggtttttctacagacaatgaacgaagtctgtagtctaaaatag

SEQ ID NO: 115092 - DNA, 4014 bp, synthetic construct
  misc_feature 1..4014: note = Description of Artificial Sequence: Synthetic coding sequence
  source 1..4014: mol_type = other DNA
atgatgcagggcaatacctgtcacagaatgagttttcaccccggccgcgggtgcccgagaggacggggcggccatggggcccggccaagtgccccatcatttcggccacagaacctgcgcctgctccaccctcagcagccgcccgtgcagtatcaatatgagcctccatctgcgccttcaacgacattctcaaattctcctgccccgaactttctgcctccccggccggattttgtgcccttccccccccctatgccgccatctgcacagggccccctgcccccctgtcctatccgaccaccattccccaatcatcagatgaggcacccttttcctgtgcctccctgctttcccccgatgccaccccccatgccctgccccaacaatcctcccgtccctggcgccccccctggacagggtaccttccctttcatgatgccacctccatcgatgccccacccccctcctccgccagtcatgccacagcaggtgaactaccagtacccccctggatattcacaccacaacttcccaccaccttccttcaactcatttcagaacaatccatccagcttcttaccatccgcaaacaactcctcttcgcctcacttccgacacctcccaccttaccccttacccaaagcaccttcagaaaggcgaagccccgagcgcctgaaacactatgacgatcaccgccaccgggatcactctcacggccgcggggagcggcaccgcagtttggatcgccgtgagcgtgggaggagtcccgatcgacgcaggcaggacagtaggtacaggtctgattacgaccgcgggagaactccgtcgaggcatagatcctacgaacgcagtcgcgagagagaacgggaacgccatagacacagagataataggcgcagcccctcccttgaaagatcttataagaaagagtataagcgctctggtagccggtccccctcccgtgagaaaaaaagggcccgctgggaagaagaaaaagacaggtggtctgataatcaaagctcgggtaaagataagaattatactagtatcaaagagaaggaacccgaggaaacaatgcccgacaaaaacgaggaagaggaggaggaactactcaagcccgtatggattagatgtactcattccgagaactactacagcagtgatcccatggaccaggttggagattcgaccgttgttggcaccagtaggcttagggatttatacgacaaattcgaagaagagctgggctctcggcaggagaaggccaaggcggcgcgacccccttgggagcctcctaagaccaagctcgatgaagatctggagtcctctagcgaatctgaatgtgagagcgatgaagactccacatgcagcagctcctccgactccgaagttttcgacgttattgcagagatcaagcggaagaaagcgcatccggaccgtctgcacgacgagctttggtataatgaccccggccaaatgaacgatggcccactgtgtaaatgtagcgcgaaggcaaggcggactggcatccgacattctatttaccctggagaggaggccatcaagccctgcaggcctatgacaaataatgctgggcgcctattccactataggatcactgtctcccctccgacgaacttcctgacagaccgtcccactgtcatcgagtacgacgaccacgagtatatctttgaaggattctctatgtttgcgcatgctccactgactaatatccctctttgtaaggtgataagatttaatatagactacacaatccacttcatagaagagatgatgcccgagaacttctgtgtcaaagggctggagctgttttctcttttcttgttccgcgacattctcgagctttatgactggaacttgaagggccccttgtttgaagattcccccccttgttgtccccggttccactttatgccaagatttgtgcgctttctgcctgacggaggaaaagaggtgcttagtatgcaccagatcctgctctacctgctgcgatgcagcaaggcattggtcccagaggaggagatcgccaacatgttgcaatgggaggaactggagtggcaaaaatacgcagaagagtgtaagggcatgatcgtgaccaacccaggaactaagcccagtagtgtgcgaattgaccagctggacagagagcagtttaatcctgatgtgataacatttcctatcatcgttcactttggaatccgtccggcccagctctcttacgctggagatccccagtatcagaagctgtggaaaagctacgtgaaactccgtcacctgttagcaaacagcccaaaggtgaaacagactgacaaacagaaactagcccaaagagaagaagcactccagaagatccgtcagaaaaatacaatgagacgtgaggtgacagtggaactgtcaagtcagggcttttggaagaccgggatcaggagcgatgtgtgtcagcacgctatgatgctgcctgtgctcacacaccacatacgttaccatcagtgcctgatgcatctggacaagctcatcggatacacgtttcaggaccggtgcctgcttcagctggccatgacccatccaagtcatcatctgaattttgggatgaaccccgatcacgccagaaattctcttagcaactgcgggattcgacaacctaaatatggagaccggaaagtgcaccacatgcatatgaggaaaaaaggcattaataccctgatcaacattatgtcccgcctgggccaggatgacccgactccttctagaataaatcacaatgagaggttggagtttctgggtgatgccgtagtcgaatttcttacctccgtccatctgtattatctttttccatcactcgaagagggaggcctggccacatatcgaaccgcgattgtgcaaaaccagcatctggccatgctcgcaaaaaagctggagctcgaccgctttatgttgtacgcacacggaccggacttgtgtcgggaaagcgacttacgccacgcaatggccaattgctttgaagctcttataggggcagtttatctggaaggttccctcgaggaagccaagcagctgttcggtaggttgctatttaatgacccagacctccgggaagtgtggctgaattacccattgcaccctctccagctccaagaacccaataccgatcggcagcttattgaaacgtcccctgtcctgcagaagctgaccgagtttgaagaagcaatcggtgtgatctttacacacgttagattgcttgcacgagctttcaccctgcggaccgtgggcttcaaccacctgactctgggccacaaccaacggatggagttcctcggcgactctatcatgcagctagtagctacagaatacctgtttattcacttccccgatcatcacgagggccatcttacactactacgtagctcactggtaaacaaccgcacccaagcgaaagtggcagaggagcttggaatgcaggaatatgcgattacaaatgataagacgaagcgacctgtcgcgctgagaaccaagaccctcgctgacctgctggagtcttttattgccgcgctctacattgacaaggacctggagtatgtgcataccttcatgaacgtttgctttttcccacgtttaaaggagtttattctgaaccaagattggaacgatccaaagagtcagctccaacagtgttgcttaacattgcgcacagaggggaaggaaccggatatacctctgtacaagaccctgcagactgtaggtccctcacacgcaaggacctatacagttgcagtatattttaaaggcgagcgcatagggtgtggaaaaggacctagcattcagcaggccgagatgggcgctgccatggacgctctcgagaagtacaattttccccagatggctcaccagaaacggttcatcgaacgaaagtatcgccaggagttgaaagaaatgcggtgggaacgggaacaccaggagcgggaacccgacgagaccgaagacataaagaaatag

SEQ ID NO: 115093 - DNA, 606 bp, synthetic construct
  misc_feature 1..606: note = Description of Artificial Sequence: Synthetic coding sequence
  source 1..606: mol_type = other DNA
atgatgcaggggaacacctgtcatcggatgagttttcatcctgggcgtgggtgccctcggggtcggggagggcatggggctagaccctccgccccaagtttcagaccccagaacttacgcttgctgcatccccagcaacccccagtgcaataccagtacgagcccccctctgccccctccacaaccttctctaactccccggctcccaatttcttgccccctaggcctgatttcgtgcccttccctcctccaatgccacctagcgcacaagggcccttaccaccatgtcccattcggcctccttttccgaatcatcagatgagacatccattccctgtccctccatgttttccaccaatgccaccacctatgccgtgccctaataatcccccagtaccgggcgcgccccctggccaaggaacgtttcccttcatgatgcctcccccaagcatgcctcatcccccacctcccccagtaatgccccaacaggtaaactaccaatacccgcccggttattcccaccacaacttcccaccaccgagcttcaactctttccagaacaacccaagcagctttttgcccagcgctaacaacagttccagctag

SEQ ID NO: 115094 - DNA, 4125 bp, synthetic construct
  misc_feature 1..4125: note = Description of Artificial Sequence: Synthetic coding sequence
  source 1..4125: mol_type = other DNA
atgatgcagggcaacacctgccaccgcatgtccttccatcccgggcgggggtgcccacgggggcgcggtggacacggagcacgtccctcagctccaagcttccgccctcagaacctgaggctactgcatccccaacagccaccagtccagtatcaatatgagccaccctctgctccatccactaccttttccaatagtcctgctccaaactttcttccccccagaccggattttgttcccttcccgccgcctatgcccccgtctgcccagggtcccctccctccttgtcccatccggcctccttttcccaaccaccagatgaggcatccctttccagtgcctccctgctttccgcctatgccgccaccgatgccttgtccaaataatccccctgttcccggggctccacctggccaggggacctttccctttatgatgcctcctcccagtatgcctcatcccccacctccccctgtgatgccgcagcaggtaaattatcagtatcctccaggatattcacaccataatttcccaccgccctcatttaactcctttcagaacaacccctcatcttttctaccatcagcaaacaacagtagtagtccccatttccgccatctccccccgtatccactgcccaaagcccctagtgagaggagaagcccagaacgtctgaaacattatgatgatcaccggcaccgtgatcatagtcacggacgaggggaacgtcaccggagtctggacaggcgggagcgtggtcgctctcccgaccggcgccggcaggatagccggtaccggtccgactatgaccgagggcggacaccgtccaggcatagaagttatgaaagatctagggaacgggagcgagagcggcatcgccatagagacaatagacggagtccatcactggaaagatcatacaaaaaggagtataaaagatcaggacgctcctacggactgagcgtagtgccggagcccgctgggtgtacacctgaactccctggagaaatcataaaaaacaccgactcctgggcccccccactcgagatcgtcaatcatagatcacccagccgcgagaagaagcgagctcgctgggaagaagaaaaagacagatggtctgacaaccagtcatccgggaaggacaagaactacacgtccataaaggagaaggagcctgaggagactatgcctgacaaaaacgaagaggaggaggaggagctccttaaacccgtgtggatccgttgtactcatagtgagaattactatagcagcgacccgatggaccaggtgggtgatagcaccgtggtcgggacctcccgcctaagggacctctacgataaattcgaggaggaactgggctccagacaggagaaggccaaagcggcgcgccccccctgggaacctcctaagactaaactggacgaagatttggagagctcatccgaatcagagtgcgagagcgatgaggacagcacctgcagcagtagttccgactctgaggtattcgatgtcatcgccgaaataaagcgcaaaaaggctcaccctgataggttgcatgatgagctctggtacaacgaccccggccagatgaacgatggcccactctgcaaatgttccgctaaggcccgccgcaccggaattcggcacagtatctacccaggtgaagaagccattaagccatgccggccaatgacgaacaatgctgggcggttattccattataggatcacagtgtcccctcccacaaactttcttaccgataggccaacagtgattgagtacgacgatcatgagtatatcttcgagggtttctctatgtttgcccatgctcctctgactaacattccactttgtaaagtcattaggttcaatatcgactacacaatccattttatcgaggagatgatgccggagaatttctgtgtaaagggattggagttgttcagtttattcttgtttcgtgatattctagagctgtacgattggaatttgaaaggacccctctttgaagacagcccgccatgttgcccacgattccattttatgccgcgcttcgtcaggttcctgcccgatggaggaaaagaagttctttctatgcaccaaattctgctctaccttctgagatgtagcaaagcacttgtacctgaggaagaaattgccaacatgctacagtgggaggagctggagtggcaaaagtacgcagaggaatgtaagggcatgatagtgactaatccgggcacaaagccgagctctgtgcgtatcgatcaactggatagagagcagttcaacccagacgttattacattcccgatcattgttcactttggcatacgcccagcgcagctgagttatgccggtgatccacaataccagaaactctggaagtcctatgttaagcttcgacacctgctggctaacagccccaaagtgaaacaaacagacaaacagaagctggcccagcgggaagaggcactccagaagatccgccagaagaacactatgaggcgtgaggttaccgttgagcttagctcgcaggggttctggaagaccggcatcagatccgatgtgtgccaacacgcaatgatgctgcctgtgctcacacaccacattaggtatcaccagtgtcttatgcacctggataagttaatcgggtacacctttcaggacaggtgcttactccagctggcgatgactcacccatctcatcatctgaattttggcatgaatcccgaccatgcgagaaattcattatccaactgcggaattcgacagccgaaatacggggaccggaaggtgcaccacatgcatatgcggaagaagggcatcaacaccctgattaatattatgtccaggctaggtcaggacgaccccacccctagtagaataaatcacaacgaacgactggagttccttggagacgctgtggtcgaattcctgacgtccgttcatctctattatttgtttcctagcctggaagaaggaggtctggccacctataggacagcaattgtgcaaaaccagcacctagccatgcttgccaaaaaactggagctggatcggttcatgctctacgcccacgggcctgacctttgtcgggagagcgacctccgacatgcaatggccaactgtttcgaggcgctgattggcgccgtttacctggaaggtagtctggaggaggccaagcagctgtttggacggttgctgttcaatgatccggatctccgagaggtgtggctgaattaccctcttcacccgctgcagcttcaggagccaaatacagaccgacagctgattgagacttcaccagtgctccagaaactgacggagttcgaggaagcgatcggggtgattttcacgcacgttaggctgctcgctcgagcctttaccttgaggaccgtcggattcaatcatctaactcttggccacaaccagagaatggagtttcttggcgactccataatgcagctggtagccacagagtacctgtttatacactttccagatcatcacgagggccatctaacattactgaggagcagtctggtcaacaataggacccaggctaaagtggctgaagagctgggcatgcaggaatacgccataacaaacgataagactaagcggccagtcgcactgagaacgaagacactggccgaccttttggagagctttatagcggcgctgtatattgacaaagatttagagtacgttcatactttcatgaatgtctgctttttccccagactcaaagagttcattctcaaccaagattggaacgaccccaaatcccagctgcagcagtgttgtttaacactgcgcactgaaggaaaggagcccgatattccattgtataaaaccttgcagaccgtgggaccctcccacgccaggacatacaccgttgccgtgtattttaagggcgagaggatagggtgcggcaagggacccagcatccagcaggccgagatgggggccgcaatggacgcactggaaaaatacaacttcccccaaatggcccaccagaagagattcattgaaagaaaatatcgccaagaactgaaggaaatgcggtgggagagagaacaccaggaacgcgaacctgatgagactgaagacattaaaaaatag

SEQ ID NO: 115095 - DNA, 630 bp, synthetic construct
  misc_feature 1..630: note = Description of Artificial Sequence: Synthetic coding sequence
  source 1..630: mol_type = other DNA
atgaaagccgtcgtgcagcgggttacacgcgcatccgtgaccgtgggaggcgagcagatctctgcaattggccgggggatctgcgtgcttttggggattagccttgaggatacccagaaggaactggaacacatggtgcgcaagattctcaatttacgagttttcgaagatgagtcaggaaagcattggagtaaatctgtcatggataaacaatacgagattctctgtgtgtctcaatttactttacagtgcgtgctgaaggggaacaagccagacttccatctggctatgcctactgagcaagcggagggcttctataatagcttcctggagcaattaaggaagacgtatcgaccagagctgataaaggatggcaagttcggagcgtacatgcaggttcatatacagaatgacggtcccgtgacgatagaattagaaagcccagctccagggacagcgacatcggatccaaaacagcttagtaaactggaaaagcaacaacagcgcaaagagaagacacgagccaagggtccgtccgaaagttctaaggagcggaatactcctagaaaggaggataggtcagcttcctctggggcagaaggagacgtgtccagcgaaagagaaccttag

SEQ ID NO: 115096 - DNA, 843 bp, synthetic construct
  misc_feature 1..843: note = Description of Artificial Sequence: Synthetic coding sequence
  source 1..843: mol_type = other DNA
atgggtcgtgctgagctacttgaaggaaaaatgagcacacaggatccaagcgatctgtggtctagatccgatggcgaagcagagttgttacaggacttgggatggtaccatgggaatcttacccgacatgccgcagaagccctgctgctgtcaaacggctgtgacggttcatacctattgagagactccaacgagactaccggtctgtactccctgagcgtcagagcaaaggattccgtgaaacatttccatgtggaatatacgggctacagtttcaagttcgggtttaatgaattcagttcactcaaagattttgtaaaacactttgccaaccagccccttattggtagtgagaccggcaccctgatggtgttaaagcatccctatccaagaaaagttgaagagccaagtatctacgagtccgtcagagtccataccgcaatgcagaccggccgtaccgaggatgacttagtgcccacggccccgtccctgggcactaaagaagggtacttaacaaagcagggtggcctggttaaaacatggaagactcgatggttcaccctacaccgtaatgaactgaagtatttcaaagatcagatgagcccagaacctatcaggattctggacctcacggagtgtagcgcagtccagttcgattattcccaggagagagtcaattgtttttgtttggttttccccttcagaaccttctacctctgtgcaaagaccggggtggaagcagacgagtggatcaagattctgcgatggaaattgtcgcagatccgcaaacaattgaaccagggcgaagggactatacgcagcagaagtttcatttttaaatag

SEQ ID NO: 115097 - DNA, 4656 bp, synthetic construct
  misc_feature 1..4656: note = Description of Artificial Sequence: Synthetic coding sequence
  source 1..4656: mol_type = other DNA
atgggcttctgcctcgcactcgcgtggacactactggtgggggcttggacacctctgggggcccagaacccaatttcatgggaggtccagaggtttgacgggtggtataacaatttgatggagcacagatgggggtcaaaaggctcaagactgcaaagactcgtccccgcctcatacgcagacggcgtgtaccagcctcttggcgaaccacatctgcccaatcctagggatctctccaacacaatttcccgtggccccgctggcttggctagcctacgcaatcgcactgtcctgggtgttttcttcgggtaccacgtcctgtctgatctggtgtcggtggaaacaccgggctgccccgcggagtttcttaatatcagaattccccctggcgatccaatgtttgatccagaccagcgcggtgacgtggtgttgcccttccagagatccaggtgggatcctgaaaccgggagaagcccgtccaaccctcgggaccccgccaatcaagttaccggctggttagacggaagcgctatttacggcagttctcactcttggagtgacgctctgagatccttttctcggggtcagctggcatccggcccagacccagctttcccgagagattcccaaaaccccctcttaatgtgggccgctccagatcccgcaactggccagaacggtccaagagggctctacgcgttcggcgcagaacggggtaacagagagcctttcctgcaggcactgggattactctggttccgctaccacaatttgtgggctcagagactggcaagacagcacccagattgggaggacgaggaactgtttcagcatgcgcgcaagcgggtcattgccacataccagaatatcgccgtttatgaatggctgccttcctttcttcagaaaaccctgccagagtacaccggctaccgtccttttcttgatccttcaattagtagtgaatttgtcgccgcatcggagcagttcctaagcactatggtcccgccaggcgtatacatgcggaacgctagctgccacttccaaggcgtgattaatcgtaacagtagtgtgagtagagccttgcgcgtctgtaacagttactggtctagagaacatccctccctacaaagtgccgaggacgtggatgcccttcttctgggtatggccagccagattgcagagagggaggatcacgttctggtcgaggatgttcgggacttctggcccggaccgcttaaatttagcagaacagaccacctggcctcttgtcttcagagaggccgtgacctaggtctgccgtcttataccaaggcacgcgccgccctgggcttgagtcccatcacccgctggcaggacattaaccctgctctgagccggagcaacgacaccgtgttggaggcaacagccgctctttacaatcaagatctctcatggcttgagctcctgccgggcggactgttggaaagtcacagagacccagggcccctcttcagcacaatcgtgctggagcagttcgtgagattacgagacggagacaggtactggttcgaaaatactagaaacggcttattctctaaaaaagaaatcgaagagatccgaaacaccacattgcaagatgtgctggtggccgtcatcaacatcgacccatcagctcttcaacctaacgtgttcgtgtggcataaaggcgacccctgcccccagccaagacagctgagcacagagggattacccgcgtgcgctccatcggtggtgagggactacttcgaaggctcagggtttggctttggtgtgacaattggtacactctgctgctttcctttggtgagcctgctgtcagcatggatagtggcccggcttagaatgagaaacttcaagcggctccagggccaggatcggcaatcaattgtctctgagaagttagtaggtgggatggaggcactcgagtggcaggggcacaaagaaccatgtaggcccgtactggtctacctccagcctgggcagattcgcgtagttgacggaaggttgactgtcttacggactatccagctgcagcccccccagaaagttaatttcgtgctctcaagtaatcgcggcaggagaactttactgctgaagatcccaaaagaatatgatcttgtgctgctgttcaaccttgaggaggagcggcaggctctggtggagaaccttcgaggagcactgaaagagagtggactgtcaatacaggaatgggaactgcgggagcaggaattgatgcgtgcagccgtcacacgcgaacagcgaaggcacctgcttgaaaccttttttcgacatcttttttctcaagttctcgacattaatcaggctgatgctggaacacttcctctagattcatctcagaaggtgagggaggcgctgacttgcgagctgagccgagccgaatttgcagagtccctgggactgaaaccacaggatatgttcgtggagtctatgttcagccttgccgacaaggatggtaatgggtacctgagcttccgtgagtttctggatatacttgtggtgtttatgaaagggagcccagaagaaaagagtagactgatgttccggatgtacgactttgacggcaatggtctcataagtaaagatgagttcatccggatgctgcgctcattcatcgagatcagcaataattgtctgagtaaggcccagctggccgaagtcgtcgagtccatgttcagggagtcaggatttcaggacaaagaagaactgacttgggaggacttccacttcatgcttagggaccataatagcgaactcagattcacccagctttgcgtgaagggcgtagaggtgcctgaagtaatcaaggacctgtgtaggcgtgcatcttatatctcccaggatatgatttgcccgtctccccgtgtgagcgcaaggtgtagccggtccgacatcgaaaccgaactcacgccccagagactccagtgccccatggatacagacccacctcaggaaatccgtagaagatttggaaagaaggttaccagcttccagcccctgctttttacagaggctcatcgtgagaaattccagaggagttgtttacaccagactgtccagcagtttaagaggttcattgagaactataggcggcacattggctgcgtcgccgtcttctatgctattgctggtggtcttttcttggagcgcgcatattattacgccttcgccgcacatcataccggcatcaccgacacaaccagagtgggaatcatactctccagaggcactgctgcttcaattagctttatgttctcgtacatcctcttgactatgtgtagaaacctcattaccttcctaagagaaaccttcctgaacaggtatgtcccctttgatgccgccgtggacttccatcgcctcattgcgagcacagctatcgtactcactgtcctgcatagtgtgggccatgttgtcaacgtatatctttttagcattagcccgttgagcgtcctgtcatgcctattccccggtctcttccatgatgatgggagcgaacttccgcagaaatactactggtggttctttcagactgtcccagggttgacaggtgttgtgctcctacttatcctggcgataatgtacgtctttgcctcccaccatttccgcagacgctcatttcgcggattttggctcacccaccacctatacattcttttgtatgtgctgctgatcatacacggtagcttcgctttgatccaactgccacggtttcatattttttttctcgtgcccgccataatatacggcggggataagctcgtgtcattatcccgcaagaaggtcgagatcagtgttgtcaaagctgagctactccccagcggagtgacacatctaaggttccagaggccccagggtttcgagtacaagtccggccaatgggtgcgtatcgcatgcctggcgctcggcacgaccgagtaccacccgttcacgttgacttctgcccctcatgaggacaccctttcactccacatcagagcagcaggcccgtggaccacccggcttagagagatctactctgccccaactggggatagatgcgcccgataccccaaactgtacctcgacggaccttttggtgagggtcaccaggagtggcacaagtttgaagtgtctgtgctcgtgggaggtggcatcggcgttacaccatttgcctccatcttgaaggatctggttttcaagtctagcgtgtcctgccaagtgttttgcaaaaagatctattttatttgggtgacaagaacccagcggcagttcgagtggctggccgacattatccgcgaggtggaggaaaacgatcatcaagatttggtatcagttcacatctatattactcagctcgccgaaaaatttgatttaaggactaccatgctctatatctgtgaaaggcacttccagaaggtgctcaaccgttcactgtttaccggacttcgttcaattacccacttcggccgacccccatttgagccattcttcaatagcctgcaggaggtccacccacaagtcaggaagatcggggtgttcagttgtgggcctccaggcatgacaaagaatgtggagaaagcttgccagctaattaaccgtcaggatcgcacccattttagtcaccactatgaaaacttttag

SEQ ID NO: 115098 - DNA, 4656 bp, synthetic construct
  misc_feature 1..4656: note = Description of Artificial Sequence: Synthetic coding sequence
  source 1..4656: mol_type = other DNA
atggggttctgcctagctctcgcctggactcttctcgtcggagcatggacacctctgggggcccaaaacccaatctcatgggaagttcagagatttgatggttggtacaataatctgatggaacaccggtgggggagtaaaggatcccgcttgcagcgtttggtgccagcttcctacgcagatggtgtgtatcagcctctgggagagccacacctgcccaatccccgcgacttgtccaacacaatctctcggggtcccgctggcctggcttctctccgcaacagaaccgtattgggggtgttctttgggtaccatgtgctgtctgatctggtttctgtggaaacacccgggtgtcccgccgagtttctgaatattcgcataccccccggcgatccgatgtttgaccccgatcagagaggcgacgtagtcctcccgttccaaaggagccgctgggatccggaaacaggaaggagccctagcaaccctcgtgaccccgctaatcaagtgactggatggctggatgggtcagctatctatggttcctcccactcctggtcagacgcgctccggtccttctcgaggggacagcttgcctcagggcctgacccagcattcccccgggactcccagaaccctcttttgatgtgggcagcccccgacccagcaaccggccagaacggcccacgcggactgtatgcattcggggcagagagagggaaccgtgagcctttcttgcaggctctcggactgctgtggtttcgctaccacaatctctgggctcagcggctggccagacagcatcccgactgggaggatgaagagctctttcagcatgcacgcaaacgggtcatcgccacttatcaaaacatcgcagtatacgaatggctgcccagtttcctgcagaaaactctgcctgaatacactggctatcggccatttttagatccaagcatatcctccgaattcgtggccgcatctgagcagttcctgagtactatggtccctcccggtgtgtacatgcgtaacgccagctgccattttcaaggggtaatcaataggaattcgagcgtctcaagggctctcagagtgtgtaattcttactggagcagagagcatccaagtctgcagagcgctgaggacgtggatgccctgctgctcgggatggctagccagatcgcagaacgtgaagaccacgtgcttgtggaggatgtgagggacttctggcccggacctctaaagttctcacgcacagaccatttggcttcttgcctccagcggggccgcgatctcggtctgccctcttacacgaaagcccgcgcagcattaggactgagtccaattaccagatggcaggatatcaatcctgcgttgagtcgcagtaacgataccgtgcttgaagcaaccgcggccctttacaaccaagatctgtcctggctggagctgttgcctggcggactcctggagtcgcatagagaccctggacctctttttagcaccattgttctcgagcagttcgttagactgcgggatggagatcggtattggttcgaaaacacacgcaatggactgttctctaagaaggagatcgaagaaatcagaaataccaccctacaggacgttctggtagccgttattaatattgatccctctgctctacagcctaatgtttttgtgtggcataagggagatccatgcccccagccacgacagttatccaccgaaggactgcccgcctgcgctcctagcgttgtacgggattattttgaaggttccgggtttggattcggggtcactatcggtacactctgttgcttccctcttgtgagtctgctttctgcttggatagtggcccgcctcagaatgcgcaatttcaaacgactccagggccaggatcgccagagcattgtgagcgaaaaactggtgggcgggatggaggcactggagtggcagggccacaaggagccatgtagaccggttctagtctacctgcagcccggtcagattcgggttgttgacggacgcctgaccgtcctgaggactattcagctccaaccaccacagaaagtgaattttgtgctgtctagtaaccggggacgacgtaccctgttactgaaaatcccaaaagagtacgacctcgtactgctgttcaatctggaggaggagagacaggccctggtggagaaccttagaggcgccctgaaagagagcggcctctctattcaggaatgggagctaagggaacaagaactcatgcgagctgccgtgacacgagagcagaggcgccacttactggaaacttttttccgccacctcttttcccaggttctcgacataaaccaggccgacgccggaactctccctttagactcttctcagaaggtcagagaagcactgacatgtgagctctctagggctgaatttgccgagtccttgggactaaagccacaagacatgttcgtcgaatcaatgttttctttagcagacaaagacggcaatggttacctttcttttcgggagttcctggacatcctggttgtattcatgaaggggtccccagaggagaagtcacgactgatgtttagaatgtatgattttgatggaaatgggttgatttccaaagacgaatttattagaatgctacgctctttcatcgaaatttcgaataattgcctgtccaaagcccagctagccgaagttgtggaatctatgttccgtgaaagcggctttcaagacaaggaggaacttacgtgggaagactttcattttatgctgcgtgatcacaatagcgaactgaggtttacacagctgtgcgttaagggggtcgaggttccagaagtcatcaaagatctgtgtagacgggcgtcttatatcagccaggacatgatttgtccaagtcctcgcgtcagcgcacgctgttccaggagcgacattgaaaccgaactcacacctcaaagactgcagtgtcctatggataccgatcctccccaggagatccggcgccggttcggaaagaaagtgacctccttccagcctctgctcttcaccgaggcccatcgagaaaaatttcagagatcttgtttgcatcagaccgtccagcagtttaagagattcatcgagaattatcgccggcacattggctgcgtggcagtcttctacgcgattgctggggggctctttctggagagggcctattattacgcctttgccgcacaccacacaggaattaccgataccactagggtaggcattatactgtcccggggaaccgctgcgagcatttctttcatgtttagttacatcctcctgacaatgtgtcgcaacctcatcactttcctgagggagaccttcctgaacagatacgtgccatttgatgccgcggtcgactttcatcgactgatcgcgtctactgcgatcgttcttaccgtgctccatagcgtggggcatgtcgtgaatgtctacttattctccatcagccccttatcagtcctctcttgtctgttccccggccttttccacgacgatggcagcgagctgccacaaaagtactactggtggttcttccaaacagtccctgggctgaccggggttgttctgttgttgattttggccattatgtacgtgttcgcttctcaccactttcgcagacgaagctttcgtggtttttggctgacacatcatctgtacattctgttgtatgtgcttctaattatccatggatcatttgccctcatccaactgcccaggttccacatattctttctggttcccgccattatttacggaggcgacaagctagttagtctgagccgcaagaaggtggagatcagcgtggtgaaggctgaactcctgccatcaggggtcacacatctgagattccaaagaccacagggctttgaatacaagtccggtcagtgggtgagaatcgcttgcctggcgcttggcaccaccgagtatcatccatttaccctgacatctgcaccccacgaagacaccctgagcttgcacattcgcgccgccgggccctggacaactcggctccgggagatctattccgctccaacgggcgacagatgtgcacgttatccaaagctgtacctggatggtcctttcggagagggacatcaggagtggcacaaattcgaagttagtgtgcttgtaggcggtggaataggagtgacgcctttcgcgtctatcctaaaagatctggttttcaagagctccgttagctgtcaggtcttctgtaaaaagatctatttcatctgggtcaccaggacccagaggcaattcgagtggctggcagatatcatacgcgaagttgaggaaaatgatcaccaggacctggttagcgtgcatatttatataactcagctggccgagaagtttgatctaaggacgacaatgctatacatatgtgagcgtcattttcagaaggtccttaacaggagtctctttactggtctcaggtccatcacgcatttcggacgtcctccttttgaacctttctttaacagcttacaggaggtacacccacaagtccggaagatcggggtgttttcttgtgggccacccggcatgaccaaaaatgtggagaaagcctgtcagctgattaaccgccaagatcgcactcatttctcccatcactacgagaacttctag

SEQ ID NO: 115099 - DNA, 4656 bp, synthetic construct
  misc_feature 1..4656: note = Description of Artificial Sequence: Synthetic coding sequence
  source 1..4656: mol_type = other DNA
atgggattctgtctggctctggcttggacgttactcgtgggggcatggacacccttaggagcccagaatccaataagctgggaggttcagaggttcgacggctggtataataacctgatggagcaccggtgggggtctaagggcagccggcttcaacgtttggtccctgcctcttatgcagatggcgtgtaccagccgctgggggagccccatctgccaaatcctcgggacctgagcaacacaatcagtagggggcccgccggattagcatccttgaggaacaggacagtgttgggtgtgtttttcggataccatgtactcagcgatctcgtatccgttgagacaccaggctgccccgcagagtttctgaatatcaggattccccctggagatcccatgtttgacccggatcagcgtggggacgtggttctgccatttcagcgatccaggtgggaccccgaaaccggacgcagtccaagcaatccgagggacccggccaatcaggttacaggatggttggacgggtcagccatctacgggtcctcccactcctggtcggacgccctgagaagctttagtcgaggacagttggcttcgggcccagatcccgctttccccagggattcacagaacccgctgctcatgtgggctgcgcctgacccagccaccggtcaaaacggccctcgcggactctacgccttcggggcagaacgaggtaacagagaaccttttctgcaggcgctcggactgctgtggtttcgctatcacaatctctgggctcagcgactagcccgccaacacccggactgggaggatgaggaactattccagcatgcccggaagagggtgattgcaacttatcagaatatcgctgtatatgagtggttgccctcttttctgcagaagactctcccagagtacactggctatcggcctttcctggatccctcaattagctccgagttcgtcgctgctagcgaacaattcctgtcaaccatggtgccccccggggtctatatgaggaacgcatcatgccactttcaaggagttataaataggaactcgagtgtgagtcgtgcactgcgggtgtgtaattcctactggagtcgcgagcacccgtccctgcagtctgctgaagacgttgatgctctcctgcttggaatggccagccagatcgcggagcgcgaagatcacgtgttagtggaagacgtaagagatttctggccaggaccgctcaagttctcaagaactgaccatcttgcaagctgcctgcagcggggtcgggatctgggcctgccctcctataccaaggctcgggcagctctcgggctgagtccgatcacaagatggcaggacatcaatcctgcactatcgcgttcaaacgataccgttttggaagcaactgctgcgctgtataaccaggatctttcttggctggaattgctgcccggcggcctcttggagtcccatcgcgatcccggacctctgttctccacaatcgtgcttgaacagttcgtgcgactgagagacggcgataggtactggtttgaaaacaccagaaatggtttattctctaagaaagagatagaggaaatcaggaacacaacattgcaggatgtgttggtagcagtgatcaacatagaccctagtgctctgcagcccaatgtattcgtctggcataagggagacccctgtcctcagccacggcagctctccaccgagggactgcctgcttgtgccccatcggttgtgcgggattacttcgaggggagtggattcggatttggagtcactataggcaccctctgctgctttccacttgtgtccttgctctccgcatggatagtagcccgcttacgcatgagaaacttcaagcggctgcaaggacaagatcgacaaagcatagtgtctgaaaaactggtcgggggaatggaggcgctggagtggcaggggcacaaggagccatgcaggcctgttctggtctatctccaaccaggacagattcgtgtggtcgacggtagacttaccgtgctgcggactattcagcttcagccacctcagaaagtcaacttcgtgctgagtagcaataggggtagacgcacactcctcctcaagattcccaaggagtacgatctggtgctcctgttcaacctggaagaggaacgccaagcgctagtggagaacctgcggggtgctttgaaggagtcaggcttatctatccaggaatgggagctacgggagcaagaattaatgcgggccgccgtgacacgggaacagcgccggcacttgctggaaaccttcttccggcaccttttcagccaggtactggatataaaccaagccgatgccggaactttgcccctagattccagtcaaaaagttagggaggccttaacatgtgagctctcacgggcagaatttgcggaatccttgggcctgaagccacaagacatgttcgtggagtccatgttttctttggccgacaaggacggtaacggctatctttctttccgagagtttttggacatactggtcgtgtttatgaagggctcacccgaagaaaaatcccggctgatgtttcgaatgtacgactttgatgggaatggtcttatttctaaagacgaattcatcagaatgctaaggtcatttattgagatctccaataattgcctgagcaaggcacagctggcagaagttgtcgaatctatgttcagagagagtggatttcaggacaaggaagaactgacgtgggaagactttcactttatgcttcgggaccacaattccgagctgcgtttcactcaactgtgcgtgaaaggtgtcgaggtcccagaggtaattaaggacctctgccgccgggcttcttatatttctcaggatatgatttgtccctctcctagagtgtccgcgagatgtagccggtcagatattgagacagaacttaccccccagaggttgcagtgcccaatggacactgacccaccccaggaaatcagaagacgtttcggcaagaaagtgacctcctttcagcccctcttattcacagaggcacatcgggagaaattccagcggtcttgtctgcaccagaccgtgcaacaattcaaacgtttcattgagaactacaggcgccacattggatgtgtggctgtcttttacgcaatcgccggtgggctgttcctcgagcgtgcctactattacgcgtttgccgctcaccacaccggcattaccgataccacacgcgtgggcatcatactttctcgaggcactgccgcctccattagtttcatgttctcgtacattcttctaacaatgtgtaggaatcttatcacattcctgcgggagacattccttaataggtacgtaccattcgacgccgctgtcgacttccatagattgattgcttccacagccatcgtgcttacagtcctccattccgtaggtcacgtggtcaacgtatacctgttcagcattagtcctctgtctgtgctcagctgcctttttcctgggctgtttcatgatgacgggagcgagctgcctcagaagtactactggtggttctttcagacagtgcccgggctgacaggtgtcgtgctcttgctgatattggccattatgtacgttttcgcgagccaccatttcaggcgcagatcttttagagggttctggctgactcatcatttatacattctgttgtatgtcctgctcatcatccatgggtccttcgcactgatacagctaccacgatttcatatcttttttttagtccctgcaattatctatggaggggacaaattagtcagtctgtcccgaaaaaaagtcgaaatctcggtggtgaaggctgagttgctgccatctggcgtgacccatttgagattccagcgtccccagggatttgaatataaatcaggccaatgggtgaggatcgcttgtctcgccctggggaccactgagtaccatccttttacactgacctccgcaccccacgaagataccctgagcctgcacattagagcagctggcccatggaccaccagactgagagaaatttatagtgcccctacaggcgatcgttgtgctaggtaccccaagctgtatctggatgggccatttggggaaggccaccaggaatggcacaagtttgaggtgtcggtcctagtgggaggtggtattggggttaccccttttgcaagcatcctgaaagacctcgtgttcaagtcctccgttagttgtcaggtgttttgtaagaaaatttactttatctgggttactagaacacaacgacaattcgaatggctcgccgacattattagagaagttgaagaaaacgatcaccaggatctggtttcagttcacatctatattacacagttagcagagaagtttgatctgcggaccactatgctgtacatctgtgagaggcacttccagaaggttctgaatcgctcgctcttcaccggactgaggtccatcacccatttcggacggccccccttcgagccatttttcaactcgctccaggaggtgcatcctcaggtcaggaagatcggggtgtttagctgcgggcccccagggatgacgaagaacgttgaaaaggcttgccagttgataaatcgacaggatcgcacacacttttcacatcattatgaaaatttttag

SEQ ID NO: 115100 - DNA, 132 bp, synthetic construct
  misc_feature 1..132: note = Description of Artificial Sequence: Synthetic coding sequence
  source 1..132: mol_type = other DNA
atgggattctgcctcgcactggcatggacgctcctggttggagcctggacgccattgggcgcacagaacccaatctcgtgggaggttcagcgctttgatggctggtacaataacctcatggaacacaggtag

SEQ ID NO: 115101 - DNA, 3594 bp, synthetic construct
  misc_feature 1..3594: note = Description of Artificial Sequence: Synthetic coding sequence
  source 1..3594: mol_type = other DNA
atgtggatgcattgttgctgggcgtggccgcctcggtcccagtccgagcgaaccatgtgctggctgaagatgtgcggcgtgagcctcagactcagcctgcaagtggtgaactcttggcctctgggcagggggagtgctggcctgccagaaccggacttttggcccggtcctctgaagtttagtaggactgatcatctggcttcttgcctgcaacgaggacgggatctggggctgccatcttacactaaagccagggctgccctcggcctgtccccgatcactcgctggcaggacatcaatcccgctctgagccgctccaatgatacagtcctggaagcaaccgcagcactttataaccaggacctcagctggctggaactgttgccgggaggattgctggagagccacagggatccagggccgttgttcagtaccatcgtgctcgaacagttcgtgaggctgcgtgacggcgatcgctattggtttgagaataccagaaacggtctgttttctaagaaagaaatcgaggaaattaggaacacgacccttcaagacgtgctagtggctgttattaatatcgacccaagcgcccttcaaccaaacgtattcgtgtggcacaagggggatccttgcccccagccgcggcagcttagcactgagggactacctgcctgcgcccctagcgttgttcgtgactattttgaaggttccgggttcggctttggcgtgacaattggaacattatgctgttttccactggtcagtctgttatcagcctggattgtcgctaggctgcgcatgagaaatttcaagaggctgcagggtcaggatcggcagagtatagtgtcagagaagctggttggagggatggaggctctggagtggcaaggccacaaagaaccttgcaggccggtgctcgtgtatctccagcccggacagattcgggtggtcgacggcagacttaccgttttgcgcacgatacaattgcaacctccacagaaggtgaactttgttttgtcctctaaccgcggcagaaggactctgctgcttaagataccaaaggagtacgatctcgtgctgctctttaacctggaggaagagaggcaagctcttgttgagaacctgcggggagctcttaaggagtccggcttatcaattcaggagtgggaacttcgggaacaagaactaatgcgagccgctgttacgagagaacagcggcgtcacctgttggagacattcttccggcatctcttctctcaagtgctggacatcaaccaagctgatgctgggaccctccccctggattcttctcaaaaagtaagggaagccttgacctgtgaactgtctcgggctgaatttgccgagagcctgggactgaagcctcaggacatgtttgtggaatcgatgtttagtcttgcggacaaagacggaaatggctatctcagctttcgggagttcctagatatactggtggtgtttatgaagggcagccctgaggagaagtcacgacttatgttccgaatgtacgattttgatgggaatggcctgatatcaaaggatgaattcataagaatgctgaggtcttttatcgagatctccaacaattgtttgtccaaggctcaactcgcagaggtggttgagtcaatgtttagggagagtggatttcaggacaaggaggagctgacatgggaagattttcactttatgttgcgcgatcataacagtgagctcagattcactcaattgtgtgttaagggggtggaggttccggaggttatcaaagacctttgtagacgagcgagctacattagtcaggacatgatatgtccttccccgagggttagcgcccggtgcagtagatctgatatcgagaccgagttaacacctcagagactgcaatgccctatggacacggatccaccgcaggagattcggcgccggtttggcaaaaaagtgacctcatttcagccactgctgttcactgaagctcacagagagaaatttcagcgctcttgtttacatcagactgttcagcaatttaagaggttcattgagaattatcggcgccatattggatgcgtcgctgtgttttatgccattgcgggagggctctttctcgagcgcgcgtactattatgctttcgctgcacaccacaccggtattactgataccacaagagtcggcatcatattatcaagggggaccgctgcttctataagcttcatgttctcatacatcctcttaaccatgtgtaggaaccttatcacattcctgcgggagacattcctcaacaggtacgtcccattcgatgccgctgttgatttccataggttaattgcaagtactgccattgtccttactgtgttacacagtgtgggccatgtcgtgaatgtgtacctgttcagtataagccccctgtcagtgctgtcgtgcttgtttcctgggttatttcacgatgacggctcagagctcccacaaaaatattattggtggttcttccagacagtgcccggactaactggggtggtgctactgctgattctggccataatgtacgtgtttgcaagccatcattttcggaggcgctcctttaggggattttggttgacacatcacctatatatcttactctatgtattgctcattatccacggatccttcgcccttatccagctccccaggttccacatcttttttctggttcctgctataatctatggcggcgataaactggtgagtttaagccgaaaaaaggttgaaatctccgtagtgaaggccgagttgctaccctctggggtgacgcatctgaggttccagcggcctcagggtttcgagtacaagtcaggtcagtgggtgcgcattgcatgtctggctcttggcacaacggagtaccatccgttcaccttgacatcagctccacatgaggacacactatccttgcacatcagggccgcagggccctggacgacccgactcagggagatctacagcgcgccaaccggtgatcggtgtgctcgctaccctaaactgtatctggacggcccattcggagaaggccaccaggaatggcacaagtttgaggtgagtgtgctcgtggggggcgggattggcgttacaccctttgcctcgatcttgaaagacttagtgttcaaaagctccgtctcatgccaggtcttttgtaagaaaatatactttatatgggtcacacgtactcaaaggcagtttgaatggttggctgatatcatccgcgaagtagaagaaaatgatcatcaggatttggtctcagtgcacatttacatcacccagctggccgagaaatttgatctcagaaccactatgctctacatttgtgagagacacttccagaaggtgttgaatcggtctctcttcacaggcctgcgctccataactcactttgggagaccaccgttcgaacctttttttaacagtttacaggaggtgcacccacaggtacggaagataggagtgttcagttgcggcccccccggaatgactaagaatgttgagaaggcatgtcagttgataaatcggcaggatcgcacccatttctcacaccattatgagaacttctag

SEQ ID NO: 115102 - DNA, 4647 bp, synthetic construct
  misc_feature 1..4647: note = Description of Artificial Sequence: Synthetic coding sequence
  source 1..4647: mol_type = other DNA
atgctgcgtgccaggcccgaggcccttatgctgctgggcgctctactgacaggatctctggggccctccgggaatcaggatgccctcagcctcccttgggaagtccaaaggtatgacggatggtttaacaatttacgtcaccatgaaagaggcgccgtcgggtgtcgccttcagcggcgagtccctgccaactacgctgacggcgtctatcaggctctcgaagaacctcagttgcctaacccacgtcgactgagcaacgcagcaactagaggcattgccgggctgccatccctgcataacagaactgtcctgggagtgtttttcggctatcatgtcctatccgatgtggtctccgttgaaactcctggctgccccgcggaattcctgaacattcggattcctcccggtgaccctgtgttcgaccccgaccagagaggtgatgtcgtgctgcccttccagcggtctcgctgggatcccgagacaggaagatcacccagtaatcctcgagatcttgcgaaccaggtgaccggctggctggacggttctgccatatatggttcctcccactcatggtcagatgccctacgctcatttagcgggggccagctggcgtcgggcccagaccctgcttttccacgtgacagtcagaacccgctactgatgtgggccgctccagatccagctacagggcagaatgggcctcgcggattgtacgccttcggagctgagcggggaaatcgcgagcctttcttgcaggccctaggactcctgtggttcagatatcataatctgtgggctcaaagattggcaaggcagcacccagactgggaagatgaagaactatttcagcacgcccggaagcgggtgattgccacgtaccaaaacatagccgtctacgagtggttacccagttttctgcaaaaaactctgcccgaatacacaggataccgcccctttttagacccaagcatttcccccgaatttgttgttgcctccgagcagtttttttctactatggtccctcctggggtatatatgcgaaatgctagttgccacttcaggaaagttcttaataaaggattccagagctcacaggccctccgcgtgtgcaataattactggatccgggagaatcccaatctgaactccacacaggaggtcaacgagctgctacttggtatggccagtcagatcagcgagctggaggacaacatagtagtggaggaccttcgtgattactggccagggcctggaaagttctctcggacagactatgtagcctcttcgattcagcgcggtagagatatgggcctgcccagttacagccaagcactcctggcctttgggctcgacattcctaggaattggagcgacctcaatccgaacgtggatccacaggttctcgaggcaaccgccgcactctacaatcaggacttgtcccagttagagctactactaggcggcttgctcgagtctcatggtgatcctggacctctgttctctgctatcgtgctggaccagtttgtgaggctgcgagatggcgatcgatactggtttgaaaacacgaggaacggtcttttcagcaaaaaagagatcgaggatatccgtaacacaactctgcgggacgtactagtcgcggtgataaacatcgatccatccgcactacagcctaacgtgtttgtgtggcacaaaggggcaccctgcccccaacccaaacagctcacaactgatgggctgcctcagtgtgcccctctgacagttttagacttcttcgaagggagcagccctggtttcgccatcaccatcatcgccttgtgctgcctgcctctggtgtccctgctcctgtctggcgtcgtagcatactttaggggacgtgaacacaaaaagctccagaagaaactcaaagagtccgtgaagaaggaggccgcaaaggacggagtgcctgccatggagtggccaggtcccaaggaaaggtcctcccccatcatcatccaattgctgagcgaccggtgtcttcaggtgttgaaccgccatcttacagtcctgcgcgtggtacagctccagcctctgcagcaggtgaacctaatcttgtctaataatagggggtgtcgaacgttactcttgaagatcccaaaggagtatgacctggttctgttgttcagcagtgaggaggaacgcggcgcattcgttcagcagctgtgggacttctgcgtcagatgggctctcgggctgcatgtcgctgagatgagtgaaaaggagctctttcggaaagccgtgaccaagcagcaacgggagcgaattttagaaatcttctttaggcacctcttcgcccaggtcttagatattaaccaggctgacgcaggcacacttcccttggatagtagtcagaaggttcgtgaagcgctaacttgcgaactgtcccgcgcagagttcgccgagtccctcggactcaagcctcaggatatgttcgtggagagcatgttttctctggctgataaagacgggaacggctacctgagcttccgggagtttctggatatactggtagtttttatgaaaggatcgcccgaggacaaatcacgtctgatgtttaccatgtatgacctggacgaaaatggtttcctgagcaaagatgagtttttcaccatgatgagaagcttcatagaaatatcaaataactgcttgagcaaagcccagctggctgaggtggtggaatctatgttccgggaaagcggattccaagacaaagaggagttgacatgggaagactttcatttcatgctgcgagatcacgactctgaactgcggtttacacagctgtgtgtcaagggaggagggggcggtgggaacggcatcagggatattttcaaacaaaatattagttgtcgggtgtccttcatcacacgaacaccgggagagcgttctcatccccagggccttggccctcccgcccccgaagctcctgagttaggcggccctggcctgaaaaaacgatttggcaagaaagccgctgtcccaacaccaagactctacactgaggccctacaagaaaaaatgcagcggggattcctggcccagaagctccaacaatataaaaggtttgttgagaactatcggcggcatatcgtctgcgttgccatctttagtgcaatatgtgtcggtgtgttcgctgatcgcgcttactattacggatttgcatctccaccatccgacatcgcacagaccacactggtgggtatcatcctgagtagaggaacagccgcctccgtgtcctttatgtttagctatattctgctgacaatgtgtagaaacctgatcacgttcctgcgagaaactttcctgaaccggtacgtcccatttgacgccgccgtggacttccacaggtggatcgctatggccgctgtagttctggcaatcctccactccgccggacatgccgtaaacgtctacatcttttcagtgagccccctctccctgctcgcctgtatcttccctaacgttttcgtcaatgacgggtccaaactgccacagaagttctactggtggttcttccagactgtgcctggtatgactggagttctgctattgctggtcttggccatcatgtacgtgttcgcctcacaccatttcagaagaaggagtttccgggggttctggttgactcatcacctgtatatcttactttacgcactcctaattatccatggctcatacgccctcatccagctaccaacattccacatctattttcttgtgcctgctattatctacggtggcgataagctggtgagcctgtcaagaaagaaggtggagatctctgtggtgaaagcagagctcctgcccagcggagtgacctatttacaattccagcgtccacagggcttcgaatataagagcggacaatgggtgaggattgcttgcctggctttgggcaccacagaatatcatccatttaccctgactagcgctcctcacgaagatacattgtcccttcatattagagcagtggggccctggaccacaaggctgagagaaatttattcttcacccaaagggaatggctgtgcaggataccccaagctgtacctggacggcccattcggagaagggcatcaagaatggcataaatttgaagtgtccgttttggtgggaggcggtattggcgttacccccttcgcctccatccttaaagatctggtgttcaagtcctcactgggttctcaaatgctgtgcaagaagatttactttatctgggtgacacggacacagcgacagtttgaatggttggctgacatcattcaagaagtggaggagaacgatcaccaggacctggtttcggtgcacatctacgtgacccagctcgcggagaaattcgatctccgcaccacaatgctctatatatgtgagaggcattttcagaaggtactgaaccggtccctctttacagggctgagatccatcactcactttggacgaccaccattcgagcctttcttcaatagcctgcaggaagtgcacccccaggtgagaaaaattggcgttttctcttgcgggccgccaggaatgaccaaaaatgtagagaaggcttgccaattagtgaacaggcaggatcgcgctcacttcatgcaccactatgagaacttttag

SEQ ID NO: 115103 - DNA, 1452 bp, synthetic construct
  misc_feature 1..1452: note = Description of Artificial Sequence: Synthetic coding sequence
  source 1..1452: mol_type = other DNA
atggcaacactcggtcacacttttccattctacgccggcccaaaaccaaccttccccatggacactacactggccagcataattatgattttcctgactgcactcgctactttcatcgttattctgccagggattcgagggaagactcgcctgttttggctgttgcgtgttgtcacctccttgtttatcggagcggcaatactcgcggtgaatttctcttccgagtggagcgtgggacaggtaagcaccaatacctcgtataaggctttctctagcgaatggattagtgccgacatcgggctgcaggtgggcctaggaggagtgaatatcacactgaccggcacacccgttcagcagctgaatgagaccatcaattataatgaggagttcacatggcggctcggggagaattacgcagaggaatacgctaaagcactggagaagggactcccagatccggtgttatacctcgcagaaaagttcaccccaaggagtccttgcgggttgtataggcagtacagactcgcgggccattatactagcgcaatgctctgggtcgcatttctgtgttggctgttggcaaacgttatgctatccatgccagtattggtttatggaggatacatgcttttagccacagggattttccagcttttggcacttcttttcttcagcatggcaacctctctgacgtcaccatgcccactacaccttggtgctagtgtgttgcatactcaccatggccccgccttctggattaccctcacaactggcctgctctgcgtcctgctggggttggctatggcggtagcccacaggatgcagccgcataggttgaaggcgttttttaaccaaagtgttgatgaagatcccatgctcgagtggtcccctgaagaaggcggcttgctaagtccgcgctaccgttccatggcggatagccctaaatcacaagacatcccgctgagcgaggcctcttcaactaaagcttactatagacctagaagactctctttggtaccggctgatgtgcgtggattggcacctgccgctctgagtgctctcccaggagccctgctggcgcaggcgtggagggcactactaccaggccttcgatgcccaaaggctggcaaagagagccgacttggtcccccacactcaccttggcgattcggacccgaagggtgtgaggaacgctgggccgagcataccggggacagcccccgaccgttgcgcgggcgcgggaccggtcggctctggcgctggggttccaaggagcgacgggcatgtggggtgcgcgccatgctgcctcgactggtaagtaattcaggcctgaaaaggccttcctgcttagacttgcctaaatgctgggattacagacgagacgcccgtgccttcttccacttactggaacccaccccttgtgttacaagtcggcataccccacttatctag

SEQ ID NO: 115104 - DNA, 1317 bp, synthetic construct
  misc_feature 1..1317: note = Description of Artificial Sequence: Synthetic coding sequence
  source 1..1317: mol_type = other DNA
atggcgaccctgggccatacatttcccttctacgctgggcccaaaccaactttccccatggatactacgctggccagcatcattatgatctttctgaccgccctggcaactttcatcgtgatcctcccggggatccgtgggaagacacgcctcttctggctcttgagagtggtcacctctcttttcataggagccgcaattctgggcacccccgttcagcaactgaatgagacaatcaactataacgaagaatttacctggagactcggagagaactatgccgaagaatacgcaaaggctttggagaagggtctgccagaccctgtcctgtatctcgccgaaaagtttacaccacgttcgccatgcggtctatatcggcagtatagactcgccgggcattacacaagtgctatgctgtgggtggcgttcctgtgttggctgctggcgaatgtaatgctgtccatgccagtcctcgtctacggcggttatatgctgctggcaaccgggatcttccaattactggccctgttgtttttttccatggccacttctctcactagcccgtgccccctgcatctgggagcctctgtactgcacactcaccacggaccggccttttggattacactcactacagggctcctgtgcgtgttgcttggtctggctatggcagtggcccacagaatgcaaccccatcgactcaaagcgttttttaaccagtcagtggacgaggacccaatgttagaatggtcccctgaggaagggggactgctgtcaccccgctaccgcagcatggcagacagcccaaaatctcaggacatccctctgagtgaagcatcatccaccaaggcatattaccggcctagaagactttcgttagtgccagctgacgttagaggactcgcgccagctgccctgagcgccctgccaggagcactgctggcacaagcatggagagctctcctgcccggactcagatgtcctaaagccggaaaagaatccagacttgggcctccacactctccgtggcgcttcgggccagaaggatgtgaggaaaggtgggctgaacatactggtgactctcccaggcccctgcgtggaaggggaacagggaggctgtggcggtgggggtccaaagagcggcgggcctgtggtgtgagagccatgctgccccgactggtatccaatagtggactgaagcgaccttcgtgcttggacttaccgaagtgttgggattacaggagggacgctagagccttctttcacttgcttgagcctaccccctgcgtgaccagtcggcatacaccactgatctag

SEQ ID NO: 115105 - DNA, 234 bp, synthetic construct
  misc_feature 1..234: note = Description of Artificial Sequence: Synthetic coding sequence
  source 1..234: mol_type = other DNA
atggcaactctggggcacacgtttccattctacgccggaccgaagcctacatttcccatggacactaccctggcctccataattatgatttttcttaccgctctggccacatttatcgtcattctgccgggcattcgcggcaagaccaggctgttctggctcctccgtgtagtcaccagcctgtttattggcgccgcgatccttggcacacctgtgcagcaattgaatgagtag

SEQ ID NO: 115106 - DNA, 219 bp, synthetic construct
  misc_feature 1..219: note = Description of Artificial Sequence: Synthetic coding sequence
  source 1..219: mol_type = other DNA
atggccacccttggccacacttttcccttctacgctggccccaaaccaacctttcccatggatacaactttggccagcataattatgatttttctgaccgccttggccacctttatcgtaatcttgccgggcataaggggcaagacacggctattctggttattgcgggtcgtaacctccctctttatcggggctgccatcctggctgtaaacttttag

SEQ ID NO: 115107 - DNA, 897 bp, synthetic construct
  misc_feature 1..897: note = Description of Artificial Sequence: Synthetic coding sequence
  source 1..897: mol_type = other DNA
atggcaacccttgggcacacattcccattctacgctggcccaaagccaacttttccaatggacacgacattagctagtatcattatgatattcctgacggcactcgccacttttattgtcatactgcccggtattagaggtaagacgcgcttattttggctgttgcgcgtcgtgacttcgctgttcattggggcagccatcttaggcactcccgttcagcagctgaacgagaccatcaattataacgaagaattcacctggcgcctgggtgagaattacgcggaggaatacgcaaaagcgctggaaaagggcttaccagatccagtgttataccttgctgaaaaattcacacccagatctccctgcgggttataccgtcagtataggttggccggacattatacaagcgccatgctgtgggtggccttcctgtgttggctccttgcaaatgttatgttgagtatgccagtgttggtctatgggggatacatgcttctggcgaccgggattttccaactgctggctctgctctttttctctatggctaccagtctcacctcgccatgcccgctgcacctgggagctagtgtgttgcacacacatcatggacccgcattttggattacattgaccaccggcctcctgtgcgtgttactgggcctagccatggcagtcgcccacagaatgcagccgcatcgtctgaaggcattcttcaaccaatcagtcgacgaagaccccatgcttgaatggtcccctgaggaaggagggctgctttccccacgataccgatcaatggccgacagcccaaagagccaagatataccactgtcagaagcatcttctaccaaggcctactgtaaagaggcacacccaaaggatccagattgtgccttgtag

SEQ ID NO: 115108 - DNA, 42 bp, synthetic construct
  misc_feature 1..42: note = Description of Artificial Sequence: Synthetic coding sequence
  source 1..42: mol_type = other DNA
atggccactctcggccacaccttccccttttacgccggttag

SEQ ID NO: 115109 - DNA, 897 bp, synthetic construct
  misc_feature 1..897: note = Description of Artificial Sequence: Synthetic coding sequence
  source 1..897: mol_type = other DNA
atggcgaccttgggacatacctttcccttttacgcgggcccgaagcccacgtttcccatggacacaaccctcgcttctattattatgatatttctcactgcactagcaactttcattgtaatcttgccaggcatcagaggaaagacgcgactgttctggcttctgcgcgtcgtcacttctttgtttatcggggccgctatacttgggacacctgtccagcagctgaacgagaccatcaattataatgaggagtttacatggaggctgggagagaattacgccgaagaatatgcgaaggctctggagaaagggttacccgatcccgtgctttatttggccgagaagtttaccccacgatctccatgcggactgtatagacagtaccgactggctggccactataccagtgctatgctgtgggttgcctttttatgctggctgctcgccaatgtgatgctcagtatgccggttcttgtgtacggagggtacatgctgctggctacagggattttccagctcctggccctcctcttcttctcaatggcaaccagcttaacttccccctgtcccctgcatctaggcgcaagcgtgctgcacacccaccacgggcctgccttctggatcactttgacgaccggactgctgtgcgtactgttgggtctggccatggctgtggcccataggatgcagccccaccgcctaaaggctttttttaaccagagcgtggatgaagatcctatgctggaatggtcccctgaagaaggaggactgctgtctccccgctatagatcaatggctgactcccccaagtcccaggacatccctcttagcgaagcctcatctacaaaggcctactgcaaagaggctcatccgaaagaccctgattgcgctctctag

SEQ ID NO: 115110 - DNA, 1452 bp, synthetic construct
  misc_feature 1..1452: note = Description of Artificial Sequence: Synthetic coding sequence
  source 1..1452: mol_type = other DNA
atggccaccctcggccacacctttcccttctatgctggccctaaacccacattcccaatggacaccacactggcaagcatcattatgatctttttaacagctctggccacctttattgtaattctgcccggaattcgaggcaaaacccggctgttttggctattgcgcgtcgttacaagcctgtttattggcgccgctattcttgccgtgaatttctcctccgagtggtctgtcggacaggtctctactaatacttcttacaaggccttctcctcagagtggatcagtgccgacatcgggctccaagtcggtctggggggagtcaacattaccctgaccggcacccctgtgcagcagctgaacgaaacaattaattataatgaggaattcacatggagattgggcgagaattatgcagaggaatacgcaaaggccctcgaaaagggcttacccgaccccgtcctctaccttgccgagaaattcacgcctcggtcaccatgcggcctgtatcggcagtatcggttggctggtcactacacatcagcaatgctctgggtagcctttctgtgttggctgctggccaacgtaatgctgagcatgcccgttctcgtttacggaggctacatgctcttggctaccggcatctttcagttactggcgttgctctttttctccatggctacctctctgacttccccatgccctctgcacctgggtgcctcagttcttcatacacaccacggccctgccttctggattacattaactacaggactgctgtgtgtgcttttaggcctggccatggcagtggcccatcggatgcaaccacaccgcctaaaggctttctttaatcaatccgtggatgaagatccaatgcttgaatggtcccccgaggagggcggcctcctgagcccaaggtatagatccatggccgattcacccaaatctcaagatattcctcttagcgaggcatcatcaactaaggcttattaccgtccccgacgtctcagcttagtgccagctgatgtgcgaggcctggccccagcagccctaagcgctctgcctggcgcgctcctggcccaggcttggcgcgccctgttaccaggactgcgttgcccaaaagcaggtaaagagagcagactgggacctccacacagtccttggcgcttcggcccggagggatgcgaggagcgatgggctgagcacacaggcgattcacctcgtccactcagaggccgaggaacagggagactgtggcgatggggctccaaagagagaagagcttgcggcgtgcgagccatgctgccacggctggtgtcgaattccggactcaaacgcccatcctgtcttgatctgcccaagtgttgggactatcggcgtgatgctagagctttctttcatctcctggagcctaccccgtgcgtcacatcacgacatactcctctgatttag

SEQ ID NO: 115111 - DNA, 219 bp, synthetic construct
  misc_feature 1..219: note = Description of Artificial Sequence: Synthetic coding sequence
  source 1..219: mol_type = other DNA
atggccaccctcgggcacacctttcccttttatgccgggcccaaacccacatttccaatggacacgactctggcctctatcattatgatattcctcactgcactcgctacatttatcgttattctgcccggaattagaggaaaaaccaggctgttttggcttctaagagtggtgacaagccttttcataggcgccgcaattctgggcacccccgtatag

SEQ ID NO: 115112 - DNA, 51 bp, synthetic construct
  misc_feature 1..51: note = Description of Artificial Sequence: Synthetic coding sequence
  source 1..51: mol_type = other DNA
atggccacattgggacacacatttcctttttatgcggggcctaaaccttag

SEQ ID NO: 115113 - DNA, 366 bp, synthetic construct
  misc_feature 1..366: note = Description of Artificial Sequence: Synthetic coding sequence
  source 1..366: mol_type = other DNA
atggctaccctaggtcacacgttccccttctacgcaggccccaagcctacatttcctatggacactactctggccagtataatcatgatctttctaaccgccctggccaccttcatagtcatactccccggcatccgaggcaagacccgactgttttggctactccgtgtcgtgacctccttgttcataggcgctgcgatcttagctgttaacttttcgtccgagtggagcgtgggacaggtcagtacaaacacatcctataaggctttcagcagtgaatggatctctgcggacattggcctccaagtgggtctgggcggggtgaatattacgctgaccggaacacctgttcaacagctgaattag

SEQ ID NO: 115114 - DNA, 1032 bp, synthetic construct
  misc_feature 1..1032: note = Description of Artificial Sequence: Synthetic coding sequence
  source 1..1032: mol_type = other DNA
atggcaaccttgggacataccttcccattctatgccgggccaaagcccacctttccaatggacaccacattggctagtattatcatgatattcctcactgctctcgcaactttcatcgtaatcttgcctggcatacgcgggaagacccggcttttctggcttcttcgtgtagtgacctctctgttcattggggccgccatcctggctgtgaatttcagcagcgagtggtctgtggggcaagtgtctactaacacctcctataaggccttttcttcagagtggatttctgccgatatcggtctgcaagtggggttgggaggcgtgaatatcacactgaccggaacccctgtgcagcagttgaatgaaacaattaattataacgaagagtttacatggcgtctaggcgagaactatgccgaagagtatgccaaggcacttgaaaagggactgcctgatcccgtgctgtacttggccgaaaaattcacacctcgatcgccttgtggtctgtatcgacagtaccgcctcgccggtcactatacatcagctatgctgtgggtggcctttctgtgctggcttctggccaacgtgatgctgagtatgccagtgctcgtctatgggggctacatgctgcttgcaactggcatctttcaactcctggccctgcttttcttttctatggccaccagcctcacaagcccttgtcctcttcaccttggcgcgtctgtcctgcacacccaccacggtcccgccttttggatcaccctcaccactggtctcctttgtgtgctgctgggactcgcgatggctgtagcacaccgtatgcagccccaccggttgaaagccttctttaaccagtctgtagatgaggatcctatgctggagtggtctcccgaggaggggggtcttctgtcacctcggtaccgcagcatggctgacagcccgaagtcccaggatattccgctctctgaggcgtcttccaccaaggcctactgtaaggaggcgcaccccaaagatcccgattgcgcattgtag

SEQ ID NO: 115115 - DNA, 963 bp, synthetic construct
  misc_feature 1..963: note = Description of Artificial Sequence: Synthetic coding sequence
  source 1..963: mol_type = other DNA
atgaccctgtggaatggggtactaccattctatccccagcccaggcacgccgcaggcttttcagttccactactgatcgtgatcctcgtgttcctggccctggccgccagctttctgctgatcttgcctgggattcgcggccacagccgatggttttggttggtaagagtgttgctgtccctgttcattggggctgaaatcgtcgccgtccactttagcgctgagtggttcgttggcactgttaatactaacacgtcgtataaggccttttctgctgccagggttacagcccgtgtgcgtctgctggtgggtttggaggggatcaacataacactcactggaactcctgtgcaccaactgaatgagactattgattacaacgaacagtttacctggagactcaaggagaactacgccgcagagtatgccaacgcccttgaaaaaggcctgcccgatccagtactataccttgccgaaaaatttactcccagctccccttgtggcctttaccaccagtaccatttggcaggacattacgccagtgcgacactatgggtggccttctgtttctggttattatctaacgtcttgctgagcacgccagcccccctgtacggcggcctggccctactgacgaccggtgctttcgcactgtttggggtgttcgctttggcctcaatttctagcgtgccactctgtcccctcagactcggatcctcagctctgaccacgcagtatggtgcagcgttctgggtcacgctggccactggcgttctttgtctatttctggggggagctgttgtcagtctccaatacgtaaggcctagcgctttgcgcactttgctggaccagagtgccaaagactgtagccaggagcgggggggaagccctctaatattaggcgatccgttgcacaaacaggctgcattacctgatcttaaatgcattaccacaaacctgtag

SEQ ID NO: 115116 - DNA, 1767 bp, synthetic construct
  misc_feature 1..1767: note = Description of Artificial Sequence: Synthetic coding sequence
  source 1..1767: mol_type = other DNA
atggagggtgacggtgtgccatggggttctgagcctgtcagcgggcctggtccgggtggtggaggcatgatcagagaattatgcagagggttcggccgctatcggaggtacctcggccggctgcgacagaatctccgcgagacccagaagttttttcgtgacattaagtgtagccacaatcacacatgcctctctagcttgacaggtggcgggggagccgaaaggggacctgccggagacgttgcagaaacaggtcttcaggccggccagctgagctgcatctcctttccaccaaaagaagagaagtatctgcagcagattgtggattgtctcccatgtatcctgatcctcggtcaggactgtaacgtgaagtgtcagctcctgaatctgctgttaggcgtacaggtcttgcccaccaccaaactgggctcagaagaaagttgtaagctgcggagattgaggttcacctacggtacacagacgagagtttccctagctctgcccggtcagtacgaactggtgcacactctggtggcccaccaggggaactgggagacaatacccgaagaagacctggaggtgcaggaaaataatgaggacgcagcacacgtcctagccgagcttgaagtgacaatgcaccatgccctgttgcaagaggtcgatgtcgtcgtcgccccctgccagggccttagacctacggtggatgtcctgggagacctcgtgaacgacttcctccccgtgattacttatgccttacataaagacgagctttctgagcgagatgaacaggaattgcaggagataagaaagtatttttcttttccagtctttttcttcaaagtgccaaaattgggatcagagatcattgacagttccacgcggcggatggagagcgaaagatctcccctctataggcagctgattgatctgggttatctgtcctcttctcactggaattgtggagctcccggccaggacactaaggcccaaagcatgttagtagagcagagcgaaaagttgagacacttgtccacattcagccaccaggtcttgcaaacccgtttggttgacgcagctaaggcccttaatttggttcattgccattgcctcgatatttttattaatcaggcgtttgacatgcaacgcgacctgcagattaccccgaagcgtctcgaatacactcgcaagaaggagaatgagctgtacgagagcctcatgaacatagctaaccgtaagcaggaggaaatgaaagacatgatcgttgagaccttaaacactatgaaggaagagctgctagatgatgccacaaacatggagttcaaagatgtgatcgtcccagaaaatggagaaccaataacggatcttggattctgcaaacccgaagcaatgatgtccggcagcattgtggggacccctattcatatggcccctgagctgtttactgggaagtacgacaattccgtggacgtctatgccttcgggatcctgttctggtacatttgctcgggttccgttaaactgcccgaggcattcgagcgatgtgcaagcaaggatcatctgtggaacaacgtgcgccggggagccagaccagaacgactgcctgtgttcgacgaagaatgttggcagctgatggaagcatgctgggatggggacccactcaaacggcctctgctgggaatcgttcagcccatgctacaaggaatcatgaacaggttatgtaagtcaaacagcgagcagcctaaccggggcctggacgattccacttag

SEQ ID NO: 115117 - DNA, 2655 bp, synthetic construct
  misc_feature 1..2655: note = Description of Artificial Sequence: Synthetic coding sequence
  source 1..2655: mol_type = other DNA
atggagggtgatggcgtaccttggggatctgagcctgtgagtggccctgggccaggcggcggtgggatgattcgggaactttgccgaggatttgggcgatataggcgctatctcggcagacttagacaaaacctgcgcgaaacacagaaattttttcgcgacatcaagtgcagccataatcacacctgtttaagtagcctgacaggaggtgggggagcagaacgaggccctgccggggacgtggcggaaaccggcctccaggctggccagctctcgtgcatttctttcccccctaaggaagaaaaatatctgcagcagatcgtcgattgtctaccatgtatcctgatcctcgggcaggattgcaacgttaagtgccagctgctgaacttgcttctgggtgtgcaggttcttcccacaaccaaattaggctcagaggagagttgtaagctccgaagattaaggtttacctacggaactcagacaagggtatcgctcgctcttcctggccaatacgagttagttcatacactagttgcacatcaggggaactgggagacgatccccgaagaggatctcgaagtccaggagaacaacgaggatgctgcccatgtccttgcagagctggaagtcacaatgcaccacgccctcctgcaagaggttgacgtagtggtggcaccttgccaaggtctccgaccgacggtagatgtgctgggggacctggttaatgattttctcccggtaattacgtatgctctccataaggatgagctgtctgagagagacgagcaggagctgcaggaaatcagaaaatatttctctttccccgtattcttttttaaggtgccgaagctgggcagtgaaataatagacagctcgacccggaggatggagagcgaaagatctcctctctacagacaactgatcgacctgggatatctcagtagctcacactggaattgtggcgctccagggcaggatactaaagcgcaatctatgctcgtggaacagtctgagaaacttagacatctcagcactttcagccaccaagttctgcagacgcgactggtggacgctgcaaaggcactgaacctcgtacactgccactgtctggatatttttataaaccaggcttttgacatgcagcgagatctgcagattacgccaaaaaggctggaatataccaggaagaaggagaacgaactgtacgagtctctgatgaatatcgctaaccggaaacaggaggaaatgaaggacatgattgtggaaacccttaacactatgaaggaggagctcctggatgatgccactaacatggaatttaaggacgtaatcgtaccggaaaacggcgagccagtcggaactcgggagattaaatgctgtatccgccagattcaggagttgatcatatcccggctgaatcaggctgtggccaataaactgatatcttctgtcgattatttaagagaatcctttgtgggaaccctggagagatgtctgcaaagcctggaaaagtcacaagatgtctcggtgcacatcaccagcaattacctaaaacagatattgaatgccgcctaccatgtggaggtcaccttccacagcggatcctcagtgacccgcatgctgtgggagcagatcaagcaaatcatccagcgcattacatgggtctcacctcctgcaattacgctggagtggaagagaaaagttgcacaggaagcaatcgaatctttaagcgcatcaaaattggccaaatccatttgtagccaatttcgcactcgtctgaattcttcgcatgaggctttcgctgcttcgctgcgacagctagaagcaggacactccgggcggctggagaaaactgaggacctgtggttaagagtgcgcaaggaccacgccccccgcctggcccggctcagcctggagtcatgctctttacaggatgttcttctgcaccggaagcccaaactgggccaagaactggggcgaggccaatatggagtggtctatttgtgcgataactgggggggacacttcccatgtgctctgaaatctgtagtcccgccagatgaaaaacattggaacgatctagctctcgaattccattacatgagaagcctgcccaaacacgagaggctggtcgacctgcacggaagcgtgattgattataattatggaggcggttcttctatagcggtgctgctaatcatggaaagacttcacagggacttgtatacaggactcaaagcaggcctgacattggagacccggctgcaaatcgcgttggacgtggtcgaggggatacgttttctgcacagccaggggctggtccacagggatattaagctcaaaaacgttctgctggacaagcagaatcgggccaagattacagacctagggttttgcaagcctgaagctatgatgtcaggaagcatcgtggggacccctatacacatggccccagagctgtttactggtgcccgcccagaacgactgcctgtgttcgacgaggaatgctggcagcttatggaggcctgctgggatggtgaccccctgaagaggccgctgctgggaatcgtccagccgatgctccaagggataatgaatcgactgtgtaaatctaattccgagcagcctaacagggggctggatgatagcacatag

SEQ ID NO: 115118 - DNA, 2790 bp, synthetic construct
  misc_feature 1..2790: note = Description of Artificial Sequence: Synthetic coding sequence
  source 1..2790: mol_type = other DNA
atggaaggtgatggagtgccttggggatcagaaccagtatccggcccagggccaggcgggggaggcatgattcgagagttatgccggggcttcggccggtatcgcaggtatctgggtcgcctgcgccagaatttgcgcgagacacagaaattctttcgcgacatcaagtgtagccataatcacacatgccttagttcattgacgggaggaggcggcgcggagcgaggacctgctggcgatgtggcagaaaccggactacaggcagggcagctcagttgtatctcattcccacccaaggaagagaaatacctccagcaaatcgtggattgcctgccctgcatcctgatcctaggccaggattgcaacgtgaaatgtcagctgttaaatttactcctcggtgttcaggtactccctacaacaaaattgggcagcgaggagagctgcaaacttcgacggctgcggttcacgtacggaacacagaccagagtgagtcttgccctcccaggccagtacgaactggtgcacacactggtggcccatcaaggcaactgggaaaccatccctgaggaggatctggaagtccaggagaacaacgaagatgccgcacatgtcctggcagagttggaagtcactatgcaccacgcactgttacaggaagttgatgtggtagtggccccatgccaaggtctgagaccaaccgtggacgtccttggcgatctggtcaacgacttccttccggttataacctacgccctccataaggacgaactttcagaacgggacgagcaggagctacaggagatccgaaagtatttttcttttcccgtgttctttttcaaagtgcccaagttgggtagcgagatcattgatagcagtaccaggcggatggagtcggagaggtcaccgctctaccgccagctgattgatctggggtatttgagcagttcccactggaactgtggcgctcccggccaagataccaaggctcagagcatgctggttgaacagtccgaaaagctccgacaccttagtaccttcagccaccaagtgctccagacaaggctcgttgacgcagctaaagctctgaatctggtgcactgtcactgtttggacatttttatcaatcaggcctttgacatgcagagggacctgcagattacccccaaacgcctcgagtataccaggaagaaggagaacgagctgtatgaatcactcatgaatattgcaaatcggaaacaggaagaaatgaaggacatgattgtggagaccttgaacacaatgaaggaggagctcctggatgacgccaccaatatggagtttaaagatgtgatagtgcccgagaacggagagcctgtaggaacacgcgagattaagtgctgcataagacagatccaagaattaattatctcccggctcaatcaggccgtggctaacaagctgatctcatcagtcgactacctacgagaatcctttgtcggcactctcgagaggtgcctccagtcgctggagaagtctcaagatgtctctgttcacattacttctaattacctgaagcagatcctgaatgccgcatatcacgtggaggtcacatttcacagtggtagctcagtgaccagaatgttatgggagcagatcaagcagataatccaacgaattacttgggtttccccacctgcaatcacactggagtggaaaaggaaagtagctcaggaagcaattgagagtctctcagcttcgaaattggcaaagtcgatctgtagccagtttcggaccaggctgaactcatcccacgaggctttcgctgcttcactgcgccaattggaggccggccacagcgggaggctggaaaaaacagaggatctttggcttcgggtgcgtaaggaccatgcacctcgtctcgccagactgagcctcgagtcatgtagtctgcaggacgtcctcctgcatcgcaagccaaaattggggcaagagctcggaagggggcaatatggtgtggtctacctctgcgataattggggcggccactttccctgcgcactgaagagtgtggtgcccccagacgaaaaacattggaatgatctcgcactcgagtttcactatatgagatctctgccaaagcatgagagacttgttgacttgcacggctcagtcatcgattataactacgggggtggatcaagcatcgctgtattgctcatcatggagcgtctgcacagagacctgtacaccggtctgaaagctggtctgacattggagacacggttgcagatcgccttggatgtggtggaggggattcgcttcctccactcccaaggtttagttcacagggacatcaaattgaagaacgtgctgttagataagcagaatagggcgaagattaccgatctcgggttttgcaaacctgaggcaatgatgtccggctccattgtgggcacccctatccacatggctcctgagctgtttaccggtaagtatgataacagtgtcgacgtttatgcgtttgggattctgttctggtacatttgctcgggcagcgtcaagctgccagaggcctttgagcggtgcgcaagcaaggaccatttgtggaataatgtccggcggggcgcccgccccgagagactgccggttttcgacgaagagtgttggcagcttatggaggcttgctgggatggagatcccctgaaaaggcccctgctgggcatcgtgcagcccatgctccagggaatcatgaacagactttgtaaatccaattcggaacagccgaaccggggtttggacgatagcacttag

SEQ ID NO: 115119 - DNA, 1104 bp, synthetic construct
  misc_feature 1..1104: note = Description of Artificial Sequence: Synthetic coding sequence
  source 1..1104: mol_type = other DNA
atggtgatggaggttggaactctcgacgccgggggtttgagagctttgctaggggagcgggcggcacagtgcctcttgttggattgcaggtccttcttcgctttcaacgccgggcacatcgccgggagtgttaacgtccggttttcaactatcgtgaggaggcgcgccaaaggagcgatggggttggaacatatcgtccccaatgcggaactcagaggcaggctcctggctggagcttatcatgccgtcgttcttctcgatgaaaggtccgctgcccttgatggcgccaagcgggatgggacgctggctctggccgcaggtgcactgtgtcgagaagcaagggctgcccaagtattctttctcaagggagggtatgaggccttttctgcatcttgtccagagctgtgctccaagcagagcaccccaatgggactgtcgctgcccctttccaccagtgttccagattccgccgagagcgggtgtagttcatgtagcacacctctgtacgatcagggcggtccagtagagattctgcctttcctgtacttaggctccgcctaccacgcgtcccgcaaggacatgctggatgctctggggattaccgctctgatcaatgtaagcgctaattgccctaatcacttcgaggggcattaccagtacaaaagcatccctgttgaggacaaccataaggccgatatctcatcctggtttaacgaagcaatcgattttatcgattctattaagaatgccggcggtcgggtatttgtccactgccaggcaggcatcagccgcagcgctacaatatgcctggcctacttgatgcgcacgaaccgcgtcaaactggacgaggccttcgaatttgtcaagcagaggcgaagcatcatcagtcctaatttctcattcatggggcagttattacagtttgagtcgcaggttctcgccccccactgctcggcagaggccggatctccagcaatggccgtcttagatcgcggcacatctacaactaccgtgttcaattttccagttagtatcccagttcactcaactaattccgcgctgtcctatctgcaatctcctatcacaactagcccatcctgttag

SEQ ID NO: 115120 - DNA, 909 bp, synthetic construct
  misc_feature 1..909: note = Description of Artificial Sequence: Synthetic coding sequence
  source 1..909: mol_type = other DNA
atggtaatggaggttggaacattagacgcaggaggcctgcgtgctttgctgggagagagggctgctcaatgtctgcttctagattgtcgaagttttttcgcctttaacgcaggacacattgcgggcagtgtgaatgtgaggttttccgccgctcaggtgttttttctcaaaggaggctacgaggctttctccgcttcctgtccagagctatgttcaaagcagagcacgccgatggggctctccctaccactgtctacgtcagtgccagactctgccgaatctggctgttcctcatgcagtactcctctgtacgaccaagggggacctgtcgaaatcctgccattcctctatctcggatcagcctaccacgcttctcgcaaagatatgttggacgctctgggcatcaccgcacttatcaatgtctccgcaaattgccccaatcacttcgaagggcactaccagtataagtctatccccgtggaagataatcataaggcagacatctccagctggtttaatgaggccatagactttattgatagtatcaagaacgccggagggagagtcttcgtgcattgccaggctggaatatctagaagcgccactatttgtctggcatacctaatgaggaccaacagggtgaagctggacgaagcattcgagttcgtcaagcaaagacgcagcattatctcccctaatttttcttttatgggccagctgctgcaattcgagtcccaggtgctggccccgcactgttccgcggaagccggctcccccgccatggcggtgctcgataggggaacgagcaccacgaccgtgttcaactttcccgtgagtataccagttcactccaccaatagcgccctgtcatatttacagtctcccattacaacatctccctcatgttag

SEQ ID NO: 115121 - DNA, 1023 bp, synthetic construct
  misc_feature 1..1023: note = Description of Artificial Sequence: Synthetic coding sequence
  source 1..1023: mol_type = other DNA
atggtgatggaagtcggaacactggatgctggcggcttaagggccttgttgggagaacgggcagctcagtgccttctgctcgattgccgttcctttttcgcattcaacgccggtcacatcgctggaagcgtcaacgtcagattctccacaatcgttcgaagaagagctaaaggcgccatgggcctggaacacatagttcccaacgctaaaagggatggtacactcgcccttgcagcaggagccctgtgtcgcgaggcacgggctgcacaagttttctttttaaagggaggctacgaagccttctccgctagctgtccagagctgtgctcaaagcagtccacccccatggggctgtctctgccgctctcaacctctgtgcctgactcagccgaatccggatgtagctcttgctctactcctctttatgatcagggaggccccgtcgagattctgccattcctgtacctaggaagcgcgtaccacgccagccgcaaagatatgctggatgccttgggaatcaccgcccttatcaacgtctctgcgaattgccctaatcactttgagggccactaccagtacaaaagcatacctgttgaagacaaccacaaggcagatatctcttcttggttcaacgaagccattgatttcattgattccattaagaacgcaggcgggcgggtctttgtgcactgccaggcaggaatcagccggtccgccaccatctgtctcgcctacttaatgcggactaacagggtcaagctggatgaggcgttcgaatttgtaaaacagcgccggtccattatatcgccaaattttagctttatggggcagctgctccagttcgagtcacaggtactggctccccattgctctgcggaggcaggctctcccgctatggctgtcctggatcgcgggacaagcactacaactgttttcaacttcccggtgtctattccagtgcactccaccaactccgctctttcatatctgcagtctcctattactacctcaccatcttgttag

SEQ ID NO: 115122 - DNA, 1134 bp, synthetic construct
  misc_feature 1..1134: note = Description of Artificial Sequence: Synthetic coding sequence
  source 1..1134: mol_type = other DNA
atgaggaactcagaaacactcgagagaggagtaggagggtgtagagttttctcctgtctggggagctacccaggtatagaaggcgccgggttggcccttttggccgaccttgccctaggtggtagactgctgggcactcatatgtctcagtggcaccacccccgatccggttggggccggaggcgggacttttctggaaggtcgagcgcgaaaaaaaagggaggaaatcacatccccgagaggtggaaggattatctgcccgtcggccagaggatgcctggcacccgctttatcgcttttaaagttcctctccagaagtcgtttgagaagaagctggctccagaagaatgtttcagcccgttagatctgttcaataagatcagggagcagaacgaggagctgggtctgattatcgacctgacatatacccagcgttactacaagcctgaggacctgcccgagaccgtcccttatctgaagattttcacagtgggacaccaggtccccgacgatgaaactattttcaagtttaagcatgcggttaatggctttcttaaggaaaataaggataacgacaagctgatcggtgttcattgtacacatggcctaaaccgcaccggttatctaatttgtagatacctgatagatgttgaaggtgtaagacccgatgacgcgatcgagttgttcaatcggtgtcggggacattgcctcgagcgccaaaattacatcgaggacctgcagaatggtccaattcgcaaaaactggaatagcagcgtgcccagaagtagtgattttgaggactccgctcacctaatgcaacctgtgcacaataaacctgttaaacagggacctcgctataatctgcaccagatccagggtcactcagcccctcgccacttccatacacagacccaatcgctacagcagtctgtgcggaaattttctgagaacccccacgtgtaccagcgccatcaccttccacctccaggaccacctggcgaagattactcgcatcgcaggtacagttggaatgtgaagccaaatgctagcagagccgcacaagacagacgacgatggtatccttacaactacagccgcttgagctatccagcatgttgggaatggacccagtag

SEQ ID NO: 115123 - DNA, 681 bp, synthetic construct
  misc_feature 1..681: note = Description of Artificial Sequence: Synthetic coding sequence
  source 1..681: mol_type = other DNA
atgtcccagtggcatcacccacgcagcggttgggggcggcgccgggatttttcgggacggtccagcgctaaaaagaagggaggtaatcatattccagagcgctggaaagactacctccccgtcggtcaacgcatgccaggcacacgcttcattgccttcaaggttccgctgcaaaagtcgtttgagaagaagcttgcacccgaggagtgttttagtccgttagatctattcaataaaatccgcgagcagaacgaagaactgggcctgatcatcgacctaacttatacccagcgctattataaacccgaagatcttcctgaaaccgtaccctaccttaaaatctttacagttggtcaccaggttccagatgatgagaccatcttcaaattcaagcatgctgtgaatgggttcctgaaagagaataaagataatgacaaactgattggagtccattgcactcatgggctgaaccgtacaggatacttaatatgtagaagaagtctggcgctctccccgcgccttgaatgttcaggcacaatctcgacccacagtaagttctgtttcccgggctctcgtagatcgcccgccagtgcgagtcaagtggccggaacgacaggggcccgacatcatgcccgtctcatcttctgtattttcagcagggacgtagttagtccttgctag

SEQ ID NO: 115124 - DNA, 822 bp, synthetic construct
  misc_feature 1..822: note = Description of Artificial Sequence: Synthetic coding sequence
  source 1..822: mol_type = other DNA
atgcggaatagcgagaccctggagcgtggcgtgggaggctgtcgcgtattttcttgtctgggcagctatcctgggatagagggcgcgggcttagccctgttagccgatctagctctgggaggcagacttctgggcactcacatgtctcagtggcaccacccgcggtctggctggggcagacggcgggatttctccggccgcagctcagctaagaaaaagggcggtaatcacattcccgaaaggtggaaggactacctgcccgtgggacaacgcatgccaggaacgcggtttatcgcattcaaggtgccactgcagaagtccttcgagaaaaagttagcaccagaagaatgtttcagccccttagacctcttcaataaaatccgagagcagaatgaggagctcggactgataatagacctcacctatactcagcgctattataaacctgaagatctgcctgagaccgtaccttacctgaaaattttcacagtcggccatcaggtaccagacgacgaaaccatcttcaagtttaaacacgccgtcaacggtttcctaaaagaaaataaagacaatgataaactgatcggcgtgcattgcacccatggtctcaacagaacaggctatctgatctgtcggagatccctggcgctgagccctagactggagtgcagtggaactatttccactcattcaaagttctgtttccccggttctagacgaagccctgccagtgctagccaggttgccgggactacaggcgcccgacatcatgccagattgatattttgtatcttctcgcgcgacgttgtgtcaccctgctag

SEQ ID NO: 115125 - DNA, 597 bp, synthetic construct
  misc_feature 1..597: note = Description of Artificial Sequence: Synthetic coding sequence
  source 1..597: mol_type = other DNA
atggatagcctgcagaagcaagatctccgaagacccaaaatacacggggcagtgcaagctagcccatatcaacctccaacgctcgcaagcttgcagaggttgctctgggtgagacaagccgcaacgctgaatcacatcgacgaagtgtggccgtcactcttcctgggagatgcttatgccgcccgagacaagtccaaactgattcaactcggcataacacatgtggtaaacgccgctgccggcaaatttcaagtcgacacgggtgcaaaattttaccgaggaatgtcactagagtattatggaattgaagccgatgataacccctttttcgacctgtccgtgtattttctgccagtcgctcgctatatccgcgccgcactttctgtgccgcaggggagagttcttgtgcattgtgcaatgggcgtctctaggtcggccaccctcgtgcttgcctttctaatgatttgcgaaaacatgaccctcgtagaagcaatccagacagttcaggcacaccggaacatttgtcctaatagcgggttcctgcgccagctacaggtgctcgacaacagactaggcagggagaccggtcgcttctag

SEQ ID NO: 115126 - DNA, 747 bp, synthetic construct
  misc_feature 1..747: note = Description of Artificial Sequence: Synthetic coding sequence
  source 1..747: mol_type = other DNA
atggcagagacaagcttgccggaattaggaggagaagacaaagccaccccctgtcctagcatcctggagctggaggaactattgagggccgggaaatctagctgctctagagtagatgaggtgtggccaaacctctttattggagatgcgatggattcgctgcagaaacaagatctgcgtcgtcctaagatccacggcgctgttcaggcatccccctaccagcctccaacccttgccagccttcagaggcttttatgggtgcggcaggctgctaccctcaaccatatcgacgaggtgtggcctagtttgtttctcggcgacgcctatgccgcaagagataaatctaaactgatacagcttggtattactcacgttgtgaacgccgcagcggggaaatttcaggtagatacgggggccaagttctaccgggggatgagcctggagtattatggcatcgaggccgacgataacccatttttcgacctctccgtatatttcctgcctgtggcacgatatattagggccgctctgagtgttccacaggggcgcgtgcttgtccactgcgcaatgggtgtctcccgtagcgctacactcgtgctggctttcctcatgatttgcgagaatatgactctggtcgaggctattcaaacagttcaggcgcacaggaacatttgtccaaactcagggttcttgcgccagctgcaagtgctggacaaccgactaggccgtgagaccgggaggttttag

SEQ ID NO: 115127 - DNA, 567 bp, synthetic construct
  misc_feature 1..567: note = Description of Artificial Sequence: Synthetic coding sequence
  source 1..567: mol_type = other DNA
atggccgaaacctcattaccagagctcggcggagaagataaggcaacaccttgcccatccattctagagctcgaggagttgctcagagctgggaaaagcagctgtagtagagtcgatgaggtatggcctaatttattcattggtgatgctgcaactgcaaacaaccgattcgaactctggaaattgggcatcacccatgtgctgaatgctgcccataagggtctctactgtcaaggcggccccgacttttatggtagttcggtgtcttacctgggggtgcctgcccacgacctgccggactttgatatatctgcttatttttcgtcagccgccgattttatccaccgtgcactgaacaccccaggggcgaaggtacttgttcattgtgtagtgggggtctctagaagtgccaccctagtgcttgcatacctgatgctgcatcagagactgagcctgcgccaggctgttataacagttagacaacatagatgggtctttccaaacaggggattcctacaccaattgtgtcgcctggatcagcagctgcgcggcgctggccagtcctag

SEQ ID NO: 115128 - DNA, 876 bp, synthetic construct
  misc_feature 1..876: note = Description of Artificial Sequence: Synthetic coding sequence
  source 1..876: mol_type = other DNA
atgggactgtgtcattttgcaaccttggccctcattttgctggtgctactggaagcgcttgctcaggcagatacgcaaaagatggtcgaagcccagcggggcgtagggcctcgcgcatgctactcaatctggctgctgctcgcacccacccctcctctctcccactgcctgcagagcccgcagaagcagcaccaagtatgcggagaccgcaggttaaaagccagtagcactaactgccccagtgagaagtgtacagcttgggcgaggtatagccatcgcatggactcactgcaaaagcaggacctgcgcaggccgaaaatccacggcgccgtacaagcgtctccttaccaaccccctactctcgcatccttgcagcggctcctgtgggtcaggcaagcggctacactcaatcacattgatgaagtatggccctcgctgttcctaggagacgcttatgccgcaagggacaagtcaaaacttatacagctgggcataacccacgtggtgaatgcagcagccgggaagttccaagtggacactggagcaaagttttacaggggcatgtctctagaatactatggcatcgaggccgacgataaccctttctttgacctgagcgtgtacttcctccccgtggcccggtatatccgtgccgccctgagtgtgcctcaaggacgcgtactcgtacactgcgccatgggcgtgtcccgcagcgccactctggtgctggcattcctgatgatttgcgaaaatatgaccctggtggaggccatacagaccgtgcaggctcatagaaatatatgtcccaacagcggtttcctgcgacagttgcaggtcctggataatcgtctcggacgcgaaacaggacgattttag

SEQ ID NO: 115129 - DNA, 597 bp, synthetic construct
  misc_feature 1..597: note = Description of Artificial Sequence: Synthetic coding sequence
  source 1..597: mol_type = other DNA
atggattcgctacagaaacaggatctcagacggcctaagattcatggtgccgtgcaggcctcgccttatcagccgcctacattagcctcgcttcagcgtctgttgtgggttcgccaagctgcgacactcaatcacatagacgaggtgtggccatccttgttcttgggggacgcatacgccgcccgtgacaagtccaaactgattcaacttggtataacgcacgtagtcaacgccgctgcgggcaagttccaagtagacacaggtgctaaattttatcgagggatgagcttggaatactatggcattgaagcagatgacaaccctttcttcgatctgagtgtttactttctgccagtcgcaaggtatattagggccgcgcttagtgtgccacaggggagggtcttagtgcactgtgcaatgggggttagccgctccgccaccctcgtccttgcgttcctaatgatctgcgaaaacatgactctggtggaagcgatacagacggtacaggctcacagaaacatctgtccgaatagcggatttctcagacaattgcaagtactagataacaggttggggcgggagactggtaggttctag

SEQ ID NO: 115130 - DNA, 984 bp, synthetic construct
  misc_feature 1..984: note = Description of Artificial Sequence: Synthetic coding sequence
  source 1..984: mol_type = other DNA
atgggattgcctcaacccaggcttcctgcccccgccttacaagcgggtcctgccacagccggatgcagaccagagctgcgggggcagtcctggtcactgctcccagccatgggcctgtgccacttcgctaccctggctttaatactcctcgtactgctggaggcattggctcaagcagacacccagaagatggtggaggcccagcgcggggtgggtcccagggcatgctacagtatctggttactactggcgccaactccaccgctatctcattgcctgcagtctcctcagaaacagcatcaggtctgcggcgacaggcgccttaaagcatccagcaccaattgtccgagcgaaaagtgcacagcctgggctcggtattcccatcgcatggatagtctgcagaagcaagacttacggcgcccaaagattcacggcgccgtacaggcgagtccgtaccagcccccgaccctggcatctctccagcgacttctgtgggtacgacaggccgccacactgaaccacattgatgaagtctggcctagcttgtttttaggtgacgcttacgctgcccgggacaagtctaagctaattcagctcgggattacacacgtggtcaatgccgcggcgggaaaattccaggtcgacaccggagcgaagttctaccgggggatgtcactggagtactacggcattgaggccgacgacaacccctttttcgacctatctgtttattttttgcccgtagcaaggtacatcagagcagccctgagcgtgccgcagggtcgggttctcgtgcactgtgccatgggagtgagccgatccgccactctcgtcttggccttcctgatgatctgtgaaaacatgaccttggtggaggctatacagaccgtgcaagcccatcggaatatttgtccaaattccggattcctgagacagctgcaagtcttagataatcggctggggagagagaccggacgcttttag

SEQ ID NO: 115131 - DNA, 597 bp, synthetic construct
  misc_feature 1..597: note = Description of Artificial Sequence: Synthetic coding sequence
  source 1..597: mol_type = other DNA
atgtcctctaggggccattcgacactgccacgaactcttatggcccccaggatgattagcgagggggacattggcggcatagcccaaatcactagtagcctgttcctcgggagaggctccgttgctagcaaccgacacctcctgcaggccagaggaattacctgtatagtgaatgccacgattgaaattcccaactttaactggccgcagttcgagtacgtgaaggtgccgcttgctgatatgcctcacgcacctatcggtctgtacttcgacaccgtggccgacaagattcactccgtctcacgcaagcatggagcaacactggtgcattgcgccgccggggtgtcccgcagtgccactctctgtatcgcatacctgatgaaattccataatgtatgtctgttagaagcctataattgggttaaagcccggcggccagtcatacggcccaacgtcggattctggagacagctcatcgactatgagcggcagctgttcggaaagagcactgtcaaaatggtgcagactccatacgggattgtccctgacgtgtacgaaaaagagtcgcgccacctaatgccctattggggtatttag

SEQ ID NO: 115132 - DNA, 597 bp, synthetic construct
  misc_feature 1..597: note = Description of Artificial Sequence: Synthetic coding sequence
  source 1..597: mol_type = other DNA
atgtcatctaggggtcactccacactgccaagaaccctaatggccccacgaatgatctcggaaggcgatatcggaggcattgcgcagatcacatcatccttgtttcttggccgcggtagcgtggcttccaaccgacatctcctgcaggcgaggggaatcacttgcatcgtgaacgcgaccatcgagatccccaattttaattggcctcagttcgaatacgtaaaggtgcctttggccgatatgccgcatgcgcccatcggtctgtactttgacaccgtggccgataaaattcacagcgtttccagaaaacatggagccactctcgtgcattgtgctgccggcgtgtctagatccgccactctgtgcattgcatatctaatgaagtttcacaatgtctgcctgctcgaggcgtacaattgggtcaaggccaggaggcctgtgattcggcccaacgtgggtttctggaggcagctaatcgactacgagcgacagctcttcggcaagagcacagtgaagatggtccagacaccctatggaattgtgccagatgtatacgaaaaggagtctagacacctgatgccttattggggtatctag

SEQ ID NO: 115133 - DNA, 945 bp, synthetic construct
  misc_feature 1..945: note = Description of Artificial Sequence: Synthetic coding sequence
  source 1..945: mol_type = other DNA
atgggactggaggcagctcgtgaactcgagtgcgccgcgctgggaactctcctccgcgaccctagagaagcagagcgcaccctgctcctggattgcaggccgtttctagccttctgcaggcggcacgtccgagcagctcgcccagtgccctggaacgcactactgagaaggcgcgcacgcggccccccagctgcagtgctggcctgcctgctgcctgatagggcacttaggaccaggctagtccgtggagagctggcgagagcagtggtgcttgacgagggctcggcctccgtggcggaactgaggccggactctccagcgcatgtgcttctagctgcactgctacatgaaactagggccggccccaccgccgtttactttctccgggggggcttcgatgggtttcagggctgctgcccagacctgtgttctgaggctcctgctcctgcactgccccctacaggcgacaaaacctcccgctctgactcccgcgcccccgtctatgatcaaggaggccccgttgagattctgccctacttgtttctggggagctgctcacacagcagcgatttgcagggtctccaggcctgcggaattaccgcggttttgaacgtcagcgcatcttgtccaaaccatttcgaaggtttgtttcggtacaaaagcatccccgtggaggataaccaaatggtcgagatctctgcgtggtttcaggaggctattggcttcatagattgggtgaagaattcaggaggacgggttctggtacattgccaggctggcatctcccggtcggcaactatctgcctggcatacttgatgcaatcacgccgcgtgcgcctcgacgaagccttcgattttgtgaaacaacggcgaggagtgatcagcccgaattttagcttcatgggacagttgttgcagttcgaaacccaggtactgtgccattag

SEQ ID NO: 115134 - DNA, 288 bp, synthetic construct
  misc_feature 1..288: note = Description of Artificial Sequence: Synthetic coding sequence
  source 1..288: mol_type = other DNA
atggccgccgcccggttgtgcctgagtctgctgctcctctccacttgtgtggctctactgctgcagccgcttctgggagcccaaggcgcccctttggagcctgtgtaccctggagataacgcgacgccagagcagatggcccagtacgcagcggatttgcgccggtatattaatatgctcactcgaccgagatacggtaagagacataaagaggataccctggctttctctgaatggggctctcctcatgccgctgtgcccagagagttaagtccactagatttgtag

SEQ ID NO: 115135 - DNA, 435 bp, synthetic construct
  misc_feature 1..435: note = Description of Artificial Sequence: Synthetic coding sequence
  source 1..435: mol_type = other DNA
atgtctgtggcccaggacattccaaagctccagaagctaggcatcacccatgtgctgaacgcggctgagggcagaagcttcatgcatgtgaatactaatgcaaatttttacaaggattcgggcattacatatctcgggattaaggccaacgatacccaggaattcaacctgtccgcatactttgagagagccgccgactttatcgatcaggctctggcacagaaaaacgggcgagtgctggtccactgtcgcgagggctactctcggtcaccgacgctggtgattgcctatctgatgatgcggcagaaaatggacgttaagtccgctcttagcatcgttcggcagaaccgggaaatagggccaaacgacggcttcctagctcagctatgccagctgaatgatcgcttagccaaagagggcaaacttaaaccttag

SEQ ID NO: 115136 - DNA, 1185 bp, synthetic construct
  misc_feature 1..1185: note = Description of Artificial Sequence: Synthetic coding sequence
  source 1..1185: mol_type = other DNA
atggtgacgatggaggaactacgggagatggattgtagcgtactcaagcgcctgatgaatcgggatgagaacggcggcggcgccggcggatccggctcccacggtacgctcgggcttccctcgggcggcaagtgtttactcctggactgccgacccttcttagcccattcagccggctatatcctcggatccgtgaatgtacgctgcaacacaatcgtgaggcgacgggccaagggctccgtttcactggagcagattctgcctgccgaagaggaggttagagcacggctacgatccggcctgtattcagccgtgatcgtgtacgatgaacggtcccctcgcgcagagagcctgagggaagattcgacagttagtctggtcgtccaagccctgcggcgcaatgcagaacgcaccgacatctgtttgttgaaagggggatatgagaggttttcaagtgagtatccagaattctgcagtaagactaaagctttggccgccatccctcccccggtccctccctctgccacagaaccacttgacttgggatgtagttcatgtggaacacccctgcacgaccaaggggggcccgttgaaattctaccattcctttacctgggctcagcataccacgccgctagacgggatatgcttgacgccctgggtatcaccgcacttctgaacgttagctcagactgtcccaaccatttcgagggacattatcagtataaatgtatcccagttgaggacaaccataaggctgacatttcctcctggttcatggaagcaatcgagtatatcgatgcggtgaaagactgcagaggtagagtcttggtgcattgtcaggccggtattagcaggagtgcaacgatttgtctagcctaccttatgatgaagaagcgtgtgcgtctggaagaggcatttgaattcgttaagcagcgtaggtctatcattagtcctaacttttcattcatgggccagctgctgcagtttgagagtcaggtgctcgccacctcatgcgctgcggaagctgccagcccatccggaccgctaagagagagaggcaaaacccccgccacacctactagccagttcgtcttctccttcccggtgagcgtgggcgtgcacagtgccccaagtagcctcccttacctgcacagcccaattactacttcaccaagctgttag

SEQ ID NO: 115137 - DNA, 912 bp, synthetic construct
  misc_feature 1..912: note = Description of Artificial Sequence: Synthetic coding sequence
  source 1..912: mol_type = other DNA
atgggcaggaaggtgcactctaacggttcgcagttcgccgaacattcacggagtccccggcggaccggccgagactgtaaaccagtgcgggcccccagtatggccttgggggtgagtcaactcgctggaagatcccggtgcctttgctcagagtcccaaggcggatatgaaaggttctccagcgagtacccagagttttgcagcaagacaaaggctctagccgccataccccccccggttccgccatccgctacagaaccactcgacctcggatgtagctcttgcgggactccactccacgatcaggggggaccagtggagattttgccctttctctacctgggcagcgcgtaccatgccgcgagacgcgatatgctggatgcccttggaatcaccgcactgctgaacgtttcaagcgactgccctaaccatttcgaaggtcattaccaatacaagtgtatccctgtggaggataaccacaaggccgacatttcctcttggtttatggaagctattgagtatatagacgcagtaaaagattgccgtggccgcgttcttgtccattgccaggcgggcataagccggagcgccaccatctgtctagcatacttgatgatgaagaagagagtaaggctcgaagaagcgtttgagttcgtcaaacagagacggtctatcatttcacccaattttagtttcatgggtcagctactgcagtttgaatcacaggtgctagctacaagctgcgccgctgaagcagccagcccatcgggtcccctgagagagcggggaaaaacacccgcgacacccacgtcgcagtttgtcttttccttccccgtgtccgtaggcgtgcatagcgcaccctcatctctcccatacctgcattccccaattaccacaagtccaagctgctag

SEQ ID NO: 115138 - DNA, 1155 bp, synthetic construct
  misc_feature 1..1155: note = Description of Artificial Sequence: Synthetic coding sequence
  source 1..1155: mol_type = other DNA
atgaaggtgacatcgctcgacggcaggcagctgcggaagatgttacgcaaggaagccgctgctcgctgcgtggttctggactgcagaccatacctcgcttttgcagcatctaatgttagaggcagtcttaacgttaatctgaactccgtcgtgctgagaagagcccggggcggagctgtctccgccagatatgttttgccagatgaagccgcaagggctaggctccttcaagagggaggcgggggagttgctgcggtagtcgttttagatcagggttctaggcattggcagaagttaagggaggagtcagctgctcgtgtggtgctcacctcccttcttgcatgtctaccagcaggccctagagtgtacttcctgaagggcggctatgagactttctacagtgagtatcctgaatgttgtgtggacgttaaaccaatatcccaggaaaagatcgagtcagaaagagcgcttatctcccagtgcgggaaacccgtggttaacgtgtcataccgccctgcttacgatcaggggggcccggtcgagatccttccctttctctaccttggcagtgcctaccacgcatcgaagtgcgaattcttggccaatctacatatcacagctttgctcaatgtgagcagacgtacaagtgaggcctgtgccacccatctacattacaaatggatacccgtggaagacagtcacactgcggacatatcatctcattttcaggaagctattgattttatcgactgcgtcagagagaagggcggcaaagtcctggtgcattgcgaggccggcatctcacgctcacccaccatctgtatggcctacctgatgaaaaccaaacagttcaggctgaaggaagctttcgactatatcaaacagcgccggagcatggtgtcccctaacttcggctttatggggcagctcctgcagtatgagtccgagatcctcccttccacgcctaacccacagcctcctagctgtcagggagaggctgcaggttcctcattgattgggcacttgcagaccctatcccccgacatgcaaggcgcatactgcactttcccggcatcagtcttagcacccgtgcccacccactcgacagttagcgagctgagcagatctcccgtggctactgccacaagctgttag

SEQ ID NO: 115139 - DNA, 1107 bp, synthetic construct
  misc_feature 1..1107: note = Description of Artificial Sequence: Synthetic coding sequence
  source 1..1107: mol_type = other DNA
atgccctgcaagtctgcagagtggctacaagaagaactggaggccagaggcggggcctccttgttgctactggactgcaggcctcacgagctctttgaatccagccatattgaaaccgctatcaacctcgcaatccctggactcatgctccgtagactgaggaaaggcaatctgcccatccgcagtattatccctaatcatgccgacaaagaaaggttcgccacaaggtgcaaagcagcgaccgtgttgctttatgatgaggccactgccgagtggcagcccgagccgggtgctccggcgtcagttcttggcctacttctccaaaagcttagggacgacggctgtcaggcttattacctccaggggggctttaataagttccaaactgagtatagtgaacactgcgagaccaacgtcgacagtagttctagtccaagcagctctccgccaacgtcagttctcggacttggcgggctcaggatctcatccgactgcagcgatggcgaatctgaccgagagttgccatcctctgcgaccgagtctgatgggagcccagttcccagttcacagccagctttccctgtgcagatcctgccctatctctacctcgggtgtgcaaaggattcaaccaacttggacgtcctcgggaagtatggaatcaaatacattctgaacgtcactcccaaccttcccaatgctttcgaacacggaggggaatttacctataaacagatcccgatctctgaccattggtcgcagaatctgtctcagttttttccggaggccatatctttcatcgacgaggcacggtcgaaaaagtgcggggtgctggttcactgcctagccggaattagcaggagtgtcacagtgactgtggcataccttatgcaaaagatgaatctgtccctcaatgacgcatatgattttgtgaaaaggaagaagagtaatatctcaccaaactttaatttcatgggccaactgttagacttcgaacgcaccctcggactgagctctccatgcgataatcatgcgagcagcgagcagttatatttttccacacctactaaccataatctgttccccttaaacacactggaatccacctag

SEQ ID NO: 115140 - DNA, 1260 bp, synthetic construct
  misc_feature 1..1260: note = Description of Artificial Sequence: Synthetic coding sequence
  source 1..1260: mol_type = other DNA
atgaaaaaccagctacggggccctccggccagagcccacatgagcacttccggggccgctgcagctggcggaacacgggccggcagtgagccgggggccggctctggcagcggagcagggaccggggctggggctgcgacaggagctggagctatgccctgtaagagcgcagagtggctgcaagaggagctggaagcccgcgggggcgcgtctctgctcctgctcgactgccgcccacatgaattatttgaatcctctcacattgaaaccgcaatcaaccttgccattcctggcctgatgctgagacgcctaaggaaggggaacctcccgattcgctctatcattccaaatcacgccgacaaggaacgctttgccacccgctgcaaggccgcaactgtgctcttgtatgatgaagcaaccgcggaatggcagcctgagcctggcgctcctgcctctgtgctcggcctcctgttacagaagctgcgggacgacggttgtcaggcatattatctgcagggtggcttcaacaagttccaaacagaatactctgagcactgcgagacaaatgttgattcttcttcatctccgagcagctccccccccacttccgtactcggcctcggcgggcttaggatctcctcagattgtagcgacggcgagtctgacagagagctgcccagctctgctactgagtccgacgggtcccccgttccatcctctcagccagcttttccagtccagatactgccatacttgtacctcgggtgcgctaaagactccactaatctcgatgtgttgggcaagtatggcattaagtacatcctcaacgtgacgccaaatcttcctaacgcattcgagcatggtggcgaatttacgtacaagcagattcccatatctgatcactggagtcaaaatttgtctcaatttttccctgaggcgatttcatttatagatgaggcccggagcaaaaagtgcggagtgctggtgcactgtctggccggtatttcccgatcagtgaccgtgacagtggcatatcttatgcagaagatgaacttgtccctgaacgatgcttacgacttcgtgaagcggaaaaagtccaatatctcccctaattttaactttatgggacagctgcttgatttcgaaagaactctgggactgagcagtccatgcgacaatcacgcgagttcagaacagctgtatttcagtactcccacaaatcacaatctctttcctctaaatactctcgaatccacatag

SEQ ID NO: 115141 - DNA, 1878 bp, synthetic construct
  misc_feature 1..1878: note = Description of Artificial Sequence: Synthetic coding sequence
  source 1..1878: mol_type = other DNA
atggccggggataggttacccagaaaggtgatggatgccaagaaactggccagtctactcagaggaggtcccggagggcctcttgtgatcgattctcgttcgttcgtcgagtacaactcctggcacgtgctgtccagtgtaaatatctgttgctctaagcttgtgaaacgtagactgcaacagggaaaagtgactattgccgagcttattcagcctgcagctagaagccaggttgaggcgactgaaccacaggatgtcgtggtgtatgaccagtccactcgggatgcatctgtgctggctgccgatagtttcctctcaatattgttgtccaaattggatggttgtttcgattccgttgctatccttacggggggatttgctactttttcctcttgcttcccagggttgtgcgaggggaagcctgcggcacttctgcccatgtctctgtcacagccttgtctccctgtcccatcagtcggacttacccgaatcctacctcatctgtacctcggcagtcagaaggacgtccttaataaagacctcatgacacagaacggcatctcttacgtgctgaatgcctctaattcctgccccaagcctgacttcatctgtgagagccggttcatgcgggtccctatcaacgataactactgtgaaaagttattgccatggctagacaagtcaattgagttcatagacaaagcaaagctttcatcctgccaggtgatagtccactgtttagccggcataagtcggagcgcgacaatagccatagcttacatcatgaagaccatgggtatgagttccgacgacgcctaccgctttgtaaaggatcgcagacctagtattagccctaacttcaattttctgggccagctactagagtacgaacggtcactgaagctgttggcggccctgcagggagatcctgggacccccagcggaacccccgaaccacctcctagtcccgctgcaggtgcgccattgccaagacttccacctcccacatccgaaagcgcagccacaggtaatgccgcagcccgtgaaggagggctctctgccggcggggagccccctgcaccccccacacccccggcaacatctgccctccagcagggattgaggggattacatctgagtagcgatcggttgcaggacacgaatcggctaaagcgctccttctcgctcgacataaagagtgcttacgctccctcaaggaggcccgatgggcctgggcccccagatccaggcgaagcaccaaagctctgtaagctggactctccgtccggcgctgccctggggctatcctccccttccccagattcgcctgatgccgcccccgaagcgaggcctaggccgcgacgaaggccgcggccccccgccggatcacctgcacggagtcctgcgcacagccttggcctgaacttcggtgatgctgcccgacagacaccccggcacggcctgtcagccttatctgcacctgggctgcccggtcctgggcagcccgctggccccggtgcatgggcccctcctttggattcccctggaaccccttcccccgatggaccctggtgcttctcacccgagggggctcagggagctggtggcgtcttgtttgccccttttggccgcgccggggccccggggcccggaggggggagtgatctacgccggagagaggcagctcgcgctgagcctagggacgctaggactgggtggcccgaggagcctgccccagaaacccagttcaaaaggaggagttgtcagatggaattcgaagagggcatggtggagggcagagcgaggggcgaggaactggctgcactggggaaacaagcttcttttagcggatcagtggaagtaatcgaggtgtcctag

SEQ ID NO: 115142 - DNA, 1878 bp, synthetic construct
  misc_feature 1..1878: note = Description of Artificial Sequence: Synthetic coding sequence
  source 1..1878: mol_type = other DNA
atggctggagaccggttaccacgaaaggtgatggacgccaagaagctcgcatcgttgctgcgcggcggcccaggtggtccccttgtcatcgattctaggagctttgtggaatataattcttggcacgtacttagctccgtgaacatctgttgcagtaagctagtcaaaagacgactgcaacaaggcaaagtgaccattgccgaactcatccagccagccgcccgctctcaggtagaagctacagagccccaggacgtggtggtgtacgaccagagtacccgggacgccagcgtactcgcggccgacagttttctttcaatcctcttaagcaagcttgacggctgttttgacagtgtcgccatcctgaccgggggttttgccacctttagttcctgctttcccggcctgtgtgaaggtaaacctgcagcccttctccccatgtccctgtctcaaccgtgtctgccagtccccagtgtgggactgaccaggattcttccccacctttacctcgggtcccagaaggacgtgctgaataaggacctgatgacccaaaatggaatcagctatgtgctgaacgcctcaaactcctgtcctaagccagactttatctgcgagagtaggtttatgcgggttcccatcaacgacaattactgtgaaaagctcctgccctggctcgacaagtcaatcgagtttatcgataaggccaaactctcctcgtgtcaggtcatcgttcactgtctggccggcatcagcagaagcgccaccatagcaattgcctatataatgaagaccatggggatgtcttcagatgacgcctataggttcgtaaaggatcggagaccaagtatctcgcctaactttaactttttgggacagctgttggagtacgaaagatccttgaagctgctggcggcgttacaaggagatcccggcaccccgtctgggacaccagagcctcctcccagtccagctgcgggcgcgccactccctagacttcctccccctacgagtgagtccgcggccacaggaaacgccgcagccagggaggggggattgtccgcaggcggcgaaccgccagcgccgccaacaccacccgccacaagcgcactgcaacagggtctgcggggtctgcatttgagctccgaccggctccaggacactaatcgactaaagcgaagtttttcccttgatattaaaagcgcctatgccccctctagaagacccgatggccccggccctcccgacccaggtgaggctcccaaactttgtaaattagactctccatccggagcagccctcgggctctcctccccgagtcccgacagtcccgacgcggccccagaggcccgccccaggccacgaagacgacctagacctccagctggctcaccagcacgatccccggcgcattccctcggactgaatttcggggatgctgccagacagaccccccggcatggtttgtcggcattaagtgctcccggtctgcccggccccggacagccagccggtcccggtgcatgggctcccccactcgattcaccaggaaccccttctcccgacggaccatggtgtttttctcctgagggagcacaaggggccggtggcgtgttgttcgcgcccttcgggagggccggggcgccaggtccaggtggcggctctgatttgcggcgccgggaggcggcgcgggcagagccgcgagatgcccgcaccgggtggcctgaagagcctgctcccgaaactcagtttaaaagaagaagttgtcaaatggaattcgaagaaggaatggtagagggccgcgcccggggcgaagagcttgccgccctcgggaaacaagcctcatttagcggttctgtggaggtgatcgaagtatcatag

SEQ ID NO: 115143 - DNA, 1626 bp, synthetic construct
  misc_feature 1..1626: note = Description of Artificial Sequence: Synthetic coding sequence
  source 1..1626: mol_type = other DNA
atgcatactgggggcgaaacgagcgcttgcaagcccagtagcgtccgtttggcaccaagtttttctttccatgctgccggacttcagatggccgggcagatgccccatagtcaccagtacagcgacagaaggcagccaaatatcagcgaccaacaggtgagtgctctgagctatagtgatcagatacagcagccattaaccaaccaagtgatgcctgatatcgtgatgctgcagcgaaggatgccacaaacatttcgggacccggctacggctccgctccgcaagctttccgttgacctgataaagacttataaacatataaatgaagtttattatgccaagaaaaagcgtcggcatcagcaggggcagggcgatgattcctctcataaaaaggaacggaaagtctacaatgacggatatgatgatgataactatgattacatcgtgaaaaacggggaaaagtggatggatcgctacgaaattgactcactcattgggaaggggtctttcggacaagttgttaaggcttacgacagggtcgagcaggaatgggtggctataaaaatcattaaaaacaagaaagcttttctcaatcaggcacagatcgaggtgcggctgctcgagctgatgaacaaacacgacaccgaaatgaagtactatatagtccatttgaagagacacttcatgtttcgtaatcatctctgtcttgtgtttgagatgttatcatacaatctgtacgaccttctgaggaacactaacttccgaggagtatcactgaacctgacacggaagttcgcccagcaaatgtgtaccgctctgttattcctggccacgccagaactatcgattatacactgcgacttgaaacctgagaacatactgctgtgtaaccccaagcgcagcgctatcaagatcgtcgatttcggatcaagctgtcaactgggacagagaatctatcaatacatccagtcacgcttctatcgttcacctgaggtgttgcttggaatgccatacgacctggccattgatatgtggtctcttggatgcatattagtggagatgcatacgggcgagcccctcttcagtggggccaacgaagtggaccagatgaacaagatcgtcgaggttctcggaattccgccagcgcatatacttgatcaggcacctaaagcccgcaagtttttcgagaaactgcccgacgggacctggaatctaaagaaaacaaaggatggaaagcgggagtacaagcccccagggactagaaagttgcataatatactgggggtggagaccggagggcccggaggccggcgtgcaggcgagtccggacatacagtcgcggattacctcaaatttaaggatctgatcctccggatgctggattacgatcctaagacacgcatacagccctattatgctctccagcatagtttttttaagaagactgccgatgaagggaccaatacaagcaactcagtgagtacatcgccagctatggaacagtcacagtcgtcagggactacctcatccacatcttcttcttccgtggtggagcagcactggatgccgggcgcattccgaatgacagtctcctttaccctcgaggtgcacgacgtgcccgtgtag

SEQ ID NO: 115144 - DNA, 1755 bp, synthetic construct
  misc_feature 1..1755: note = Description of Artificial Sequence: Synthetic coding sequence
  source 1..1755: mol_type = other DNA
atgcacactggcggggagacatccgcctgcaaaccaagctctgtcagacttgctccctcattctctttccatgctgccggactacagatggccgggcaaatgcctcattcgcaccaatattctgatcgccgacagccgaatatcagcgatcagcaggtgagcgcactgagttacagcgatcagatccagcagcccctgacgaatcaggtgatgcccgacatagtcatgctgcagagaagaatgccacagactttcagggacccagctactgcacccctcagaaagctcagcgtggacctcattaaaacttacaaacatatcaacgaggtctattatgccaagaaaaagcggagacatcagcagggacagggggacgactcatctcacaaaaaagaaagaaaagtttacaacgatggatacgacgatgacaactatgattacattgtgaagaacggggagaaatggatggaccgatacgagatcgacagtcttattggcaaaggttcttttggacaggtcgtgaaagcctatgatagggttgagcaagaatgggttgccattaaaatcatcaaaaataagaaggctttcctaaatcaggcccaaatcgaggtccgtcttctagaacttatgaataagcacgatacagaaatgaagtactatattgttcacctcaaacgacatttcatgtttaggaaccacctctgtctggtgtttgagatgttgagctacaatctgtatgacttattaagaaatactaattttagaggcgtgtcactgaacctgacgcgcaaattcgcccagcagatgtgtaccgcgctgctcttcctggcaactcctgagctttccatcatccactgcgacctcaagcctgagaatatcctcctgtgtaatccaaagaggagtgcgatcaaaattgttgactttggctccagctgtcagttgggccaacggatctaccagtacatccagtcacggttttaccgttctccagaagtgctgcttggtatgccctatgatctcgctatcgatatgtggagtctgggctgcattttagtcgagatgcacactggagagcctttgttttctggtgcaaacgaggtcgaccagatgaacaaaatcgtcgaagtattaggcattccaccagctcacattctcgatcaggcacctaaagccaggaaattctttgaaaaactgccagacggcacatggaatctgaaaaagaccaaagatggaaagagggaatataagcccccgggaaccagaaagctccataatatcttaggcgtcgagacaggcggacctggcggtcgaagggccggcgaatccggacacaccgtagcggactacctcaagttcaaggacctgatattgagaatgcttgactacgaccccaaaacccgtatccagccatactatgccttacagcactccttttttaaaaaaacagctgatgagggcaccaacacaagcaacagtgtctcgacatcaccagctatggagcagagccagtccagcggtaccaccagtagcacaagcagttcctcaggtgggagctctgggactagtaatagcggacgagcacggtctgaccccacacatcagcaccggcattctggcggccactttacggccgccgtacaggccatggactgcgaaacgcactccccacaggtgtcctctcacgtcgtgcacctgttagtaagccctgccattctcagatggtcgagtaccgggtgccaggtcccactagaatag

SEQ ID NO: 115145 - DNA, 2265 bp, synthetic construct
  misc_feature 1..2265: note = Description of Artificial Sequence: Synthetic coding sequence
  source 1..2265: mol_type = other DNA
atgcacactggtggggagaccagtgcttgcaaaccctccagcgtgcggctggcccctagcttttcattccacgccgccgggcttcaaatggcaggtcagatgcctcattcacatcagtactccgatcgtaggcagccaaacattagcgatcaacaggtgtcggctctgagttatagtgatcagatacaacagccactcaccaaccagcggagaatgccccaaacattccgggaccccgctaccgccccattgagaaagctgtcagtcgacctaattaagacttacaaacatattaatgaggtctattacgcaaaaaagaagagaagacaccaacagggccagggcgatgacagctcccacaagaaagagaggaaggtatataacgacgggtacgatgacgataattacgactatattgttaagaatggcgaaaagtggatggatagatacgaaatcgacagcttaatcggcaagggttctttcggccaagtggtgaaggcctatgatcgggtcgagcaagagtgggtggccattaaaataataaagaataaaaaggcattcctgaatcaagcccagattgaggttcgccttctcgaactgatgaacaaacatgatacagaaatgaaatattacattgtccatttgaagaggcacttcatgttccgaaatcacttatgcctggtttttgaaatgctgagctacaacctatatgatctgctgaggaacactaatttccggggtgtgtcccttaatctcacccgcaagttcgcccagcagatgtgtacagccttactcttccttgccactccggagctcagcatcatccactgcgatcttaaaccagaaaatatattgctgtgcaacccaaaacggtctgcaatcaagatcgttgatttcggatcttcttgtcagctcgggcagagaatctatcagtatattcaatctagattttatcgcagccccgaggtactgctgggcatgccttatgatctggccatcgacatgtggtccctgggctgtatcctcgtggaaatgcataccggagaaccactcttcagtggtgccaacgaggtagaccagatgaataagattgtggaggttttaggaatcccccctgcccacattctggaccaggctccgaaagctaggaaattttttgaaaagctgcctgacggaacatggaatctcaagaagacaaaggatggaaagcgggaatataagccccctggcactcggaaacttcacaacattctgggcgtggagaccggagggccaggcggacggcgtgcaggtgagtctggacacactgtcgccgactatttaaaatttaaggaccttattctgagaatgctagactacgaccctaagacacgcatccagccttactacgctcttcaacactcattcttcaaaaagaccgctgacgagggaactaatacctcaaactccgtgtccacctctcctgcaatggaacagtcgcaatcctctgggactacatctagcacctcctcctccagtggagggtctagtggcaccagtaactccggccgggctagatctgatccaacccaccagcatcgccactctggtggacacttcacagcagccgtgcaggcaatggactgcgagacccactctcctcaggtcagacagcaatttccagcacctttgggatggagcggtactgaggcccctactcaggttacagttgaaactcacccagtgcaggaaactaccttccacgtggccccccaacaaaacgctctgcatcatcaccatggtaatagcagtcaccaccatcatcaccaccaccatcaccatcaccatcacggccagcaggctctgggcaatagaacccgccctcgcgtgtacaattcaccgaccaattcttcatctactcaggattcaatggaggtgggccacagccatcactccatgacgtcattgagttcttccactacgtcctcctcaactagcagttcatccactggaaatcagggaaaccaggcttaccaaaatagaccagtggccgctaacactttagatttcgggcagaatggagccatggatgttaatctgaccgtgtattccaatcctcgacaggagactgggattgccggccaccctacatatcagtttagtgccaacacaggtccagcccactatatgacagaaggccacttgaccatgcgacaaggcgccgaccgagaagaatcccctatgaccggcgtctgcgtgcaacagtcgccggttgcatcctcgtag

SEQ ID NO: 115146 - DNA, 1590 bp, synthetic construct
  misc_feature 1..1590: note = Description of Artificial Sequence: Synthetic coding sequence
  source 1..1590: mol_type = other DNA
atgcacacgggaggcgaaacttctgcctgcaaaccttcgtccgtgaggctggcaccaagcttttcatttcacgcagccggcttgcagatggctggccaaatgccgcattcacatcagtattctgaccgccggcagccgaacatttctgaccagcaagtatcagccctttcatacagtgatcagatccagcaacccctgactaaccaggtgatgcccgacatagttatgcttcagaggagaatgccccaaacatttcgcgatcctgccaccgctcctttgagaaagttatctgtcgaccttatcaagacctataagcatatcaacgaggtatattacgcgaagaagaaacgcagacaccaacagggtcagggcgacgactcctcacataagaaagaaaggaaggtgtacaatgacggctacgacgatgacaattatgactatatcgttaaaaatggagagaagtggatggaccgctacgagatcgactcactgataggcaaaggaagctttggccaggttgttaaggcatacgaccgagtcgaacaagaatgggtggctataaaaattatcaagaacaaaaaggctttcctgaaccaggctcaaatcgaagtgagactcctggaattaatgaataaacatgacacggagatgaaatactacatcgtccaccttaagagacattttatgttccgaaatcatttgtgtctcgttttcgaaatgctcagttacaatctctacgaccttctcaggaacactaactttagaggcgtgagtctgaatttgaccaggaaattcgcccagcaaatgtgtacggctctgcttttcctggccaccccagaactcagcattatacattgcgacctgaaaccggaaaacatcctgctctgcaaccccaagagaagcgccatcaagattgttgatttcggaagctcatgtcagttgggacagcgaatctaccagtatatccaatctcgcttctatcggagtcctgaggtcctgctagggatgccttacgatctggcaattgacatgtggtcattaggctgtatcctggtcgagatgcatactggcgagcctctgttcagcggagccaatgaggtggatcaaatgaataaaatcgttgaggtgctcggtatcccgcccgcgcacattttagatcaggctcccaaggcccgcaagttctttgagaagttaccagatggcacctggaatctcaagaagacaaaggacggtaagcgggagtataaacccccaggtacaagaaaactgcataatattctgggcgtagagaccggcgggccaggggggagaagggcaggggagagtggacatacggttgcggattacctgaagtttaaagatttgatccttcgaatgttggattacgatccaaagacccgcattcagccttattacgctctccagcatagcttcttcaagaaaacggctgacgagggaacaaacacatcaaacagcgtgagcacttcgccggccatggagcaatcccagtcaagcgggacaacctcaagcacttcaagtagcagtggagcttctgcaatctcctgcagctcatggctggtacgccattag

SEQ ID NO: 115147 - DNA, 2292 bp, synthetic construct
  misc_feature 1..2292: note = Description of Artificial Sequence: Synthetic coding sequence
  source 1..2292: mol_type = other DNA
atgcacacgggtggagaaacatctgcttgtaaaccctctagcgtgagactcgcccccagctttagctttcacgccgcagggctccagatggctgggcagatgccccattcccaccagtactctgacaggcgacagcccaacattagtgaccagcaggtgtctgccctgagttactccgatcagattcagcagcctctgaccaaccaggtgatgcctgacattgtgatgcttcagcggaggatgccccagaccttcagagatccagccacagcgcctctcaggaagctatccgtcgatctgattaaaacatataaacacattaacgaggtatactacgctaagaaaaagcggaggcaccagcaggggcagggcgacgactcaagtcataagaaggagcgcaaggtctacaatgacggatatgacgacgacaattacgactacattgtcaaaaacggagagaaatggatggatcgatatgagatcgattcgctcattggcaaagggtctttcggccaggtggttaaagcatatgatagggtagagcaggaatgggtggccatcaaaatcatcaagaacaagaaggcttttttaaaccaggcacagattgaggtgcgtctgttagagcttatgaacaagcacgacacagagatgaagtactacattgtccatctcaagcggcactttatgttccgcaaccatctctgcctcgtgttcgaaatgctgtcttacaatctatatgatcttttgcgcaatacgaactttagaggcgtgtcactcaatttaacccggaagttcgcacagcaaatgtgcactgcgctgctttttttagcaacacccgagctgagtatcattcattgtgaccttaagcccgaaaatatcttactatgcaaccccaaaagaagcgcgatcaaaattgtagacttcggatcatcatgtcaattgggacagagaatctaccaatacatccagtccaggttctaccggtctcctgaagtgcttttagggatgccatacgatctggccatcgatatgtggagcctgggctgtatactggtggaaatgcatactggcgagccactgttcagtggagccaatgaggttgaccagatgaacaaaattgtggaagttttagggattccacctgcccacatcctcgaccaggctcctaaggctcgcaagttctttgagaaactcccagacggtacttggaacttgaaaaagaccaaggacggaaaacgagaatataaaccccccgggaccaggaaactgcacaacattctgggagtcgaaactgggggacccggcggccggagagctggggagagcgggcacaccgtggcagattatctaaagttcaaggatttgatcctgaggatgcttgactatgatcctaaaacacgaattcagccatattacgctcttcagcacagtttctttaagaaaacagccgatgaggggaccaacacgtccaattcagtgagcacaagcccagctatggaacagagtcagtcctctgggacaacatcgtccacttcatcatctagcggaggatcctccggaaccagcaattctggccgtgctcggagcgacccaactcaccagcataggcattcagggggtcatttcacggctgcagtacaggcaatggactgcgagactcattcaccccaggtgcgtcaacagttccctgccccactaggttggtctggaaccgaggcccctacacaggttactgtagagacacaccccgtacaggagaccaccttccacgtcgcaccccagcagaatgctctgcaccaccaccatggcaactcctcacatcaccaccaccaccatcatcaccaccaccaccaccatggccagcaggccctgggtaatcgcacacggcctagagtttacaacagccctacaaattcctcatctacccaggattccatggaagtcggtcacagccaccatagtatgacgtcattgtccagtagcactacttcctccagcacaagttcctccagtaccgggaatcagggaaaccaagcctatcaaaacaggccagtagctgcaaacacactcgacttcggtcaaaatggagctatggacgtaaacctgaccgtttattcgaaccctagacaggagactggcattgccggccaccccacttaccaatttagtgccaataccggccccgcccactatatgaccgagggccatcttaccatgcgccagggtgcagatcgtgaagagagcccaatgaccggcgtgtgcgtgcagcaatcaccagtagccagtagctag

SEQ ID NO: 115148 - DNA, 396 bp, synthetic construct
  misc_feature 1..396: note = Description of Artificial Sequence: Synthetic coding sequence
  source 1..396: mol_type = other DNA
atgcatactggcggtgagacgagtgcttgcaagccctctagtgtgagacttgccccctctttcagctttcatgccgccggactacagatggccggccagatgccccactctcaccagtatagcgataggaggcagccaaacatatcagatcagcaggtgagcgccctctcctacagcgatcagatccagcagcccctgaccaaccaggtgatgcccgatatcgtgatgttgcagagacgcatgccccaaacttttagagacccagccactgcgcccctgaggaagttgtccgtcgacctgatcaagacatacaaacatattaacgaggtgtattacgctaagaaaaaaagaaggcatcagcagggccaaggagatgattcatcccataaaaaatag

SEQ ID NO: 115149 - DNA, 1755 bp, synthetic construct
  misc_feature 1..1755: note = Description of Artificial Sequence: Synthetic coding sequence
  source 1..1755: mol_type = other DNA
atgcacaccggcggcgagacctccgcatgtaaacctagctccgttcggctcgctcccagcttctcttttcacgccgcgggactgcagatggcgggccagatgccacattcccatcaatatagcgaccgccggcaaccaaacattagcgaccagcaggtgtctgcattgagctattcagaccagatccagcagccgcttactaatcaggtgatgccagacatcgttatgctgcaacggagaatgcctcaaactttcagggaccctgccacagccccactgcgtaagctgagtgtggacttgatcaagacttacaagcatattaatgaggtatattacgccaaaaagaaacgccggcaccaacaaggtcagggggacgacagctcccacaagaaagaacgaaaagtgtacaatgacgggtacgatgacgataactacgattacattgtgaagaacggggaaaagtggatggacagatatgaaatcgattccctcattgggaaaggatcttttggccaggtggtgaaagcctatgacagagtggagcaggagtgggtcgccattaagatcatcaaaaataaaaaagctttcttgaatcaggctcagatcgaggtgcgactcctagaactgatgaataaacacgatacagagatgaagtactacattgtgcacttgaagagacattttatgttccgcaaccatctctgcttggtcttcgaaatgctatcatataatttgtatgacctgctacggaatacgaatttccgaggcgtgagcctcaatctcacgcgcaaatttgcacagcagatgtgcaccgccctgctctttttagccactccagagctgtctatcatccattgtgacctgaagccagaaaatatactgctctgcaaccccaagagatcagccattaaaattgtcgacttcggttcgtcctgccagttgggccagcggatctatcaatacattcaatctagattttatcgaagccccgaggtgctactagggatgccctacgatctggcaatagatatgtggagtctcggatgcatcctcgtggaaatgcacacaggtgaaccccttttcagtggcgctaacgaggtcgatcagatgaataaaatagtggaagtcctgggcattccccccgcccacatcctcgaccaggcccccaaggcccggaaattttttgagaagctccctgatggcacttggaatctgaagaagacaaaggatggcaaacgagaatacaagcctccgggtacgcgcaaactccataatattctgggagtggagacgggggggcctggaggtcggcgcgctggcgagtccgggcatacggtggccgactacctgaaattcaaagacctcatcttgcgtatgctcgattatgaccccaagactcgcattcaaccctactatgccctgcagcacagctttttcaagaaaacagctgatgagggaactaatacgagcaattctgtgtctacttctccggctatggaacagtctcaatcctctggcaccaccagctctacatcatccagctcaggaggaagttccgggacaagtaattcggggcgggcccgctctgatccgacgcaccagcacaggcattccggcggccacttcactgctgcagtccaagccatggattgtgagactcactctccacaggtgtctagtcatgtcgtgcacttacttgtgagccccgcaattctgcggtggtcatctacaggctgtcaagtcccgttggaatag

SEQ ID NO: 115150 - DNA, 141 bp, synthetic construct
  misc_feature 1..141: note = Description of Artificial Sequence: Synthetic coding sequence
  source 1..141: mol_type = other DNA
atgcatactgggggagagacatctgcttgtaagccaagttctgtgcgcctggcgccctcatttagtttccacgcagccggcctgcagatggcaggacagatgcctcactctcatcaatactcagatcgcaggcagccatag

SEQ ID NO: 115151 - DNA, 1608 bp, synthetic construct
  misc_feature 1..1608: note = Description of Artificial Sequence: Synthetic coding sequence
  source 1..1608: mol_type = other DNA
atgttcagaaatcatctttgtcttgtctttgagatgctctcttacaacctatacgacctgctgcggaatacaaatttcaggggggttagtctcaacctcactcgtaaattcgcacagcagatgtgtaccgccttattgttccttgcgacaccagagctttccatcattcactgtgacttaaaacctgagaacattctgctgtgtaacccgaaaaggtccgctattaagattgtggattttgggtcctcatgccagctgggccaaaggatctatcaatatattcagtctcgcttctatcgtagccctgaagtactgctggggatgccctacgacctggctattgatatgtggagtctgggctgcatccttgttgagatgcataccggcgaacctctgttttccggggccaacgaggtagaccagatgaataagatcgtggaagtgcttgggataccacctgcacacattctggaccaggccccaaaggccaggaagttctttgaaaagcttcccgatgggacctggaatctgaaaaagactaaggatggcaaaagggaatacaaacctcccggcaccaggaagttacataatatccttggagttgagaccggcggcccaggaggcagacgagcaggcgagtcaggtcacacagtcgccgattatcttaaatttaaggatctgattctcagaatgctggattacgacccaaagactcgtatacagccgtattatgcgctgcagcactcatttttcaaaaagactgcggatgaaggcacaaacacatccaatagtgttagcacctcccccgcgatggaacagagtcagtcatccgggacaacaagttctacctcaagctcgagtggagggtcgagtgggactagcaatagcggacgggcacgatccgacccgacccaccagcatagacatagcggaggtcactttactgctgccgtccaagctatggactgtgagacacactcaccacaggtgcgccagcagtttcccgcgccattaggttggtccgggaccgaagcaccgacacaggttaccgtcgaaactcatcccgttcaggagacgacctttcacgtcgccccacagcaaaatgccctccatcatcaccacgggaactcctcccatcatcatcaccaccatcatcaccatcaccatcaccacgggcagcaggcattggggaatcggacccgaccccgggtctacaacagccccacgaacagcagttcaacgcaagattccatggaggttggtcattcccatcatagcatgactagtctatcttcctcaactactagctccagcacatcctcctcatcgaccggcaatcaggggaatcaagcttaccagaacaggcccgtggcagccaatacactcgattttggtcagaacggggcaatggacgtgaacttgacagtgtactctaacccccggcaggagaccgggatagctgggcatcccacatatcagttctcagccaacactggacccgctcactatatgacagagggccatctgacaatgcgccagggcgcagaccgcgaagagtccccaatgacaggagtgtgcgtccagcagtccccagtagcctcatcctag

SEQ ID NO: 115152 - DNA, 1890 bp, synthetic construct
  misc_feature 1..1890: note = Description of Artificial Sequence: Synthetic coding sequence
  source 1..1890: mol_type = other DNA
atggcagtccccccaggccacggccccttctcagggtttcccgggcctcaggagcatacacaggtcctccccgacgtgcgacttcttcccaggcgattgccactggcatttagggatgccacttccgctcccctgcggaagctgtcagtggatctgatcaaaacttataaacacattaacgaagtctattacgctaagaagaaacgccgcgcgcagcaagcacccccacaggattcctcaaacaaaaaggagaagaaggtgctcaatcatgggtacgacgacgacaatcatgactatattgtgcggtccggtgagcgttggcttgaacgctacgagatcgatagcctgataggcaaagggagtttcggccaggtcgtcaaggcctatgatcatcaaacacaggaactggtcgccatcaagattataaagaataaaaaagcgttcctaaatcaggctcagattgagctcagactgctggagttgatgaaccagcacgataccgaaatgaaatactacatcgtgcacctgaagagacatttcatgttccggaaccatctgtgtctcgtgttcgaactacttagctacaatctgtacgatttactacgaaatactcatttccgcggcgtgtctctgaacctaacacggaagctggcccagcagctgtgcaccgcactcctttttctcgcaacaccagagctgagtattattcattgcgacctaaaaccggagaatattctgctgtgcaaccctaaaagatcggccatcaaaattgtggactttggttctagctgccaactaggccaacggatatatcaatacatccaaagtcgattttacaggtcaccggaagtgcttctcggaactccatacgacctggcgatagatatgtggagccttgggtgcatattagttgaaatgcataccggggaacctttgttctctggatcgaacgaggtggatcagatgaatcgcattgtcgaggtgctgggcatcccaccggccgcaatgctggaccaagccccaaaagcccggaagtactttgaacggcttcctggggggggctggacactgagaagaaccaaagagttgcggaaagactaccaggggcccggcacaaggcgattgcaggaggtgctcggcgtgcagactggcggtcctggcggaaggcgggctggggaaccaggacactccccagcagactacttgaggtttcaagacctcgtgttaaggatgttggagtacgaaccagcggcgcgcatttcccccctgggagccctgcagcatggattctttcggagaactgctgatgaggcgaccaacaccggtcctgctggctccagcgcttctacctctccagctcccctcgacacatgcccatcctctagcaccgcctcatcgatttcatcttctggcgggtcaagcggctcctctagcgacaacagaacgtatcgttactcaaataggtactgcggaggaccaggcccaccaatcaccgattgcgagatgaacagtcctcaggtgcccccatctcagcctctgcgcccctgggcaggtggcgatgttcctcataaaacccatcaggcccccgcaagcgcctcgtctttacctggaaccggggctcagcttcctccccaacctaggtatcttggccggccaccttctcccacaagcccccccccgcccgagcttatggacgtgtccctggtggggggacctgccgattgtagccccccccaccctgccccagcaccccagcaccccgctgctagtgccctgcggaccaggatgactggcgggagacctcccctgcccccgcccgatgaccctgctacccttggtccccacctcgggctgaggggagtgccacaatctactgctgcctcgtcatag

SEQ ID NO: 115153 - DNA, 1806 bp, synthetic construct
  misc_feature 1..1806: note = Description of Artificial Sequence: Synthetic coding sequence
  source 1..1806: mol_type = other DNA
atggccgtcccacccgggcacggacctttttccggcttcccaggtcctcaggagcacacccaagtgttgccggatgtgcgattgctcccaaggcgcctgcctctggccttccgcgacgcgactagtgcaccactacgcaagctgagcgtcgatttaataaagacctacaaacatattaatgaggtgtactacgccaagaaaaagcgcagggctcagcaggcacctccgcaagactcttcaaacaagaaggaaaagaaagtcttgaaccatgggtacgatgacgataatcatgactatatcgtacgatcgggcgaaagatggctggagcgctatgaaattgattccttgatcggaaagggctccttcggccaggttgtgaaggcttacgatcatcagactcaggaactggtggcgatcaagatcattaagaataaaaaggccttcctcaatcaggcgcagatagagctgcggctgctagaactgatgaatcaacacgatacagagatgaagtactatattgtgcacctcaaaagacactttatgttccggaaccacctttgcctggttttcgagctactgtcctataatctctacgatctccttaggaatacacattttaggggtgtgagtcttaatttaaccaggaagctggcacaacaactgtgcactgccttgttgtttctcgccacaccggagctgtccattattcactgtgatctgaagccagaaaacatccttctgtgcaatcctaagcgcagtgctattaagatcgtggattttggaagctcatgccaattggggcagcgtatataccaatatatccaatctagattctacaggtcaccagaggttctcttgggaacaccgtatgacctagcaatagatatgtggagtctggggtgtattctggtcgagatgcacacaggcgaaccgttgtttagcgggtcgaatgaagttgaccagatgaaccggattgtggaggtgttagggattcctcccgctgcaatgcttgatcaggcaccaaaagcaaggaaatatttcgagagactgcctggcggaggctggaccttgcggcggactaaggaattaagaaaggattaccagggtcctggtacgcgcaggctccaggaggatcttgtgctgcggatgctagagtacgaaccggccgctcggatttcgcctctcggcgctctgcagcatgggtttttccggcggacagccgacgaggccacgaataccggccctgccggatccagtgcgagtacctcaccggcgcctctggacacctgcccatcttctagtaccgcctccagcattagctcgtccggcggcagcagcgggtcctctagtgataacagaacctatcgctactctaaccggtattgcggcggcccaggccctcccatcactgattgcgaaatgaacagccctcaagtgccaccctctcaacctttacgcccttgggcgggtggcgatgtcccgcacaagacccaccaggcccctgcgagcgcttcaagcctgcctggcaccggtgcacagttgccaccccagcctcgctacctgggacgacctccctcacctacatccccacctccgccagaactgatggatgtgtccctggtgggggggccagctgactgtagccctccccaccccgcaccagctccgcagcaccctgccgcatccgccctacgcacacggatgaccggtggacggcccccactacccccgcccgatgaccccgcgacactaggcccacatttaggcctccgcggagtaccccagagtactgccgccagttcctag

SEQ ID NO: 115154 - DNA, 1770 bp, synthetic construct
  misc_feature 1..1770: note = Description of Artificial Sequence: Synthetic coding sequence
  source 1..1770: mol_type = other DNA
atggctgttcctccaggacacggccctttctccggctttccaggacctcaggagcatacacaggtgctgccagacgtccgtctacttcctaggagattgcccctcgcatttcgggacgcgactagcgcccctttgcggaaattgtctgtggaccttatcaagacctataagcatattaacgaagtgtattacgctaagaagaaaagacgcgcgcaacaggcgccaccacaggactccagcaacaagaaagaaaagaaagtactgaaccacggctacgacgatgataaccacgattacattgtgcgatctggagagagatggctcgagaggtacgaaattgacagcctgatcggcaaggggagctttggacaggtggtgaaggcttatgaccatcagacacaagagcttgtggccattaagatcattaagaataagaaggctttcttgaatcaggcacaaattgaattacgacttctagagcttatgaaccaacatgacaccgagatgaagtactacatcgtgcacctcaaacgtcatttcatgtttcggaaccatctgtgcctggtgttcgaacttctttcctataacctatacgatctgctgagaaacactcacttcagaggtgtatccttgaacctgaccagaaaactggcccagcagctatgtaccgccttactgttccttgcgactccagagctgagcattattcactgtgatctcaaaccagagaacatactgctctgcaatcccaaaaggtccgccataaaaatagttgactttggcagcagctgccagctgggccagagaatttaccaatacattcagtcccggttctataggagcccggaagtgttactcggtactccttatgatctagcaattgatatgtggtccctcgggtgcatcttggttgaaatgcacactggggaacctttattcagcggatccaacgaggtggatcagatgaatcgcatcgtcgaagtgctggggatcccgcccgccgctatgttagaccaagcgcctaaggcaaggaagtacttcgagaggctcccgggcggcggctggacacttcggcggaccaaagaattacgcaaagatctcgtgctccggatgctcgagtatgagcccgctgcacgaatatcccctctgggcgcactccagcacggctttttccgcagaaccgcagacgaggcaacaaatactggacctgccggaagtagcgcctctacctctcccgctcccctggacacctgtccaagcagttctacagcatccagtataagttccagcggcggctcgtcaggcagcagcagcgacaatcggacatatcgttacagtaacaggtactgcggaggaccaggaccaccgatcactgactgcgagatgaactccccacaggtccccccttctcagccacttcgcccctgggccgggggagacgtcccccataaaactcaccaggcccccgcctcagcttccagtttgccagggacaggcgctcagctgccacctcaaccaaggtacttaggccgtccaccctccccgacatctccacccccccctgagctgatggacgtttcgctggtgggaggccctgccgactgtagcccccctcacccagcccctgctccacagcacccagctgcctccgctcttagaacgcggatgacaggcggccgaccccccctacctccaccggatgaccccgcaacattggggcctcacttagggctcaggggtgtgccccagtctaccgctgccagtagctag

SEQ ID NO: 115155 - DNA, 285 bp, synthetic construct
  misc_feature 1..285: note = Description of Artificial Sequence: Synthetic coding sequence
  source 1..285: mol_type = other DNA
atgaatgaccacctccacgtcggcagtcacgcccatggccaaatccaggtacagcagcttttcgaggataattccaataaacggactgttctgaccacacaacctaatgggctcacaaccgtgggaaagacaggcttgcccgtagtgcccgagcgacagctggattcaatccaccgaaggcaaggttcatctacgagcttgaaaagcatggagggcatggggaaggtgaaagccacccctatgaccccagagcaagctatgaagcaatacatgcaaaaactctag

SEQ ID NO: 115156 - DNA, 1806 bp, synthetic construct
  misc_feature 1..1806: note = Description of Artificial Sequence: Synthetic coding sequence
  source 1..1806: mol_type = other DNA
atgctgaccaggaaaccgagtgccgctgcacccgccgcctacccaaccggtcgggggggcgactccgcggtccgccaacttcaagcttcccctggccttggagccggtgctacccgatctggagtcggcaccggcccaccatcacccatagcccttcccccactgcgcgccagcaacgctgcagccgccgcacataccataggcggttcgaagcacactatgaatgatcacctgcatgtcggctcacatgcccatggacaaatccaggtgcagcagctgtttgaggataatagcaacaaaaggacagttctgactacccagccaaacggccttacaacggtgggaaagacaggcctgccagtggttcctgagaggcaactggactctattcaccgtagacaaggatcctcaaccagtctgaagtctatggaggggatggggaaggtgaaagccaccccaatgactccggagcaagctatgaaacaatacatgcagaagctgacagccttcgagcatcatgaaattttctcttaccccgagatctactttctgggcctgaatgctaaaaaacggcagggaatgactggcgggccaaataatggcggttacgacgacgaccaggggagctacgtccaagtgccacacgaccatgtggcctatcgatacgaggtgctgaaggtcatcggcaaagggagttttgggcaagtggtcaaagcctatgaccataaagtccaccagcatgtcgctctgaagatggtcagaaatgagaagagatttcaccgccaggctgccgaagagatccgaatcttagagcaccttagaaagcaagataaagataatacgatgaacgtcattcacatgctggaaaactttacttttaggaaccacatctgcatgacatttgaactgctgtcaatgaatctctacgagctgatcaaaaagaacaagtttcaggggttctctctgcccctcgtacgcaagttcgcccactccattttgcagtgcctcgacgctctgcacaaaaacagaatcatccactgtgatctcaagccagagaatatcctcctaaagcagcagggaaggtctggcataaaggtaatcgattttggttcatcctgttacgagcatcagagagtttacacctatatccagtcccgtttttaccgagcacctgaggtaatcctcggtgcccgatacggcatgcctatagacatgtggtcccttggctgtatccttgccgaactccttaccgggtaccctttgctgccaggggaagatgagggggaccaactcgcgtgtatgatcgagctactgggcatgccatctcagaaacttctggatgcttctaagagggccaaaaatttcgtatctagcaaagggtacccgcgctactgtacagttaccactctttccgacgggtctgtcgtgctgaacggggggagatccaggcggggtaaactgagagggccacccgagtcgagagagtggggcaacgccctgaagggctgcgacgaccccctttttttggactttcttaagcagtgcctcgaatgggaccccgcagtaagaatgacccctggacaggcgcttaggcacccgtggctgcgccggaggctcccgaaaccccctactggggagaaaacgtcagtgaaacgtatcaccgagagtaccggagccattacatccattagtaagcttcctccaccatcgagctcggcctccaagcttagaacgaacctggcccaaatgaccgacgctaacggcaacatccagcagcgcacagttctccccaaactggtctcgtag

SEQ ID NO: 115157 - DNA, 1587 bp, synthetic construct
  misc_feature 1..1587: note = Description of Artificial Sequence: Synthetic coding sequence
  source 1..1587: mol_type = other DNA
atgaacgatcacctgcacgtgggatcgcacgcacacggtcagatacaggtgcaacagctgttcgaagataattccaacaaaagaacggtgttgacaacccaaccaaatgggctgacaactgtaggcaagaccggcctccccgttgtccctgaacggcagctggattccattcataggcgccaaggtagcagcacatctttaaagtcaatggaaggcatgggaaaggtgaaagccactccgatgacccccgagcaggctatgaagcagtacatgcaaaagttaacggcattcgaacaccacgagatcttctcatacccagaaatttatttccttggccttaacgctaagaaacgacagggtatgactggcggccccaataacggtgggtacgatgatgaccagggatcctatgtgcaggtcccgcatgaccacgtggcttataggtacgaagttctcaaagtcatcgggaaaggctccttcggccaggtcgtgaaggcctacgaccataaggtgcaccaacatgtggctctcaaaatggtgagaaacgagaaacgattccataggcaagctgccgaggaaatacggattctggagcacctgcgtaagcaggataaggataacaccatgaacgttatacacatgctggaaaatttcacttttcgaaatcatatctgtatgacattcgagctattgagcatgaatttatatgagctgataaagaaaaacaaattccagggcttctccctcccactcgtccggaagttcgcacactcaatcctgcagtgtttggatgcgctccacaagaaccgaatcatacactgcgatttgaaaccagagaatatcctcctaaagcagcagggcagatccggcatcaaagtaattgacttcggtagttcttgctatgagcatcaacgcgtttacacttatatccagagccggttttacagagcgcctgaagttatcctcggcgctagatacgggatgcccatagacatgtggtctcttggctgcattttggctgagctccttacgggctatcccctacttcctggcgaagacgagggggaccagcttgcttgcatgattgaattactgggcatgccatcccagaagctgctggacgcctcgaagcgggcgaagaacttcgtgtctagtaaggggtatcctaggtactgcaccgttacgacacttagcgatggttcagtagtgctgaacggcggtcggtcccgacgagggaaactgcggggtcctcctgagagccgagaatggggaaatgccctgaaggggtgcgacgatccactctttttggatttccttaaacaatgcctggagtgggatccagctgtccgcatgacacccggtcaggctttacggcatccctggctgcgtagacgcctcccgaagccccctaccggtgagaagacctctgtcaagcgaataaccgagtccacaggcgccatcacatctatctctaaactgcctcctccatcctcatccgcgtcaaagcttaggactaacctcgcccaaatgacggatgccaacggaaacatccagcagcggaccgtcctgcctaagctcgtgtcatag

SEQ ID NO: 115158 - DNA, 471 bp, synthetic construct
  misc_feature 1..471: note = Description of Artificial Sequence: Synthetic coding sequence
  source 1..471: mol_type = other DNA
atgaatgatcacctgcatgtcgggagtcatgcccatggtcagattcaagttcagcagctcttcgaggacaatagcaacaagcgaactgtgttaacaacacagccgaatgggctgacaacagtcggcaaaaccggattaccggtagtgccggagcggcagctcgactctatccatcgacggcagggatcaagtacctcactgaagtccatggaagggatgggaaaggtgaaggcgactccaatgaccccagagcaagcaatgaagcagtacatgcaaaaattgaccgcatttgaacatcatgaaatcttctcatacccagagatctattttcttgggctcaatgcgaagaaaagacagggcatgactgggggccccaataacggtggctatgacgacgatcagggttcttatgtgcaggtgcctcatgatcatgtggcatatcggtatgaggtcctgaaggtaattggatag

SEQ ID NO: 115159 - DNA, 1707 bp, synthetic construct
  misc_feature 1..1707: note = Description of Artificial Sequence: Synthetic coding sequence
  source 1..1707: mol_type = other DNA
atgaagtggaaggaaaagcttggcgatggagtgtacgatacttttatgatgatagacgaaacaaagtgccccccatgttcgaacgttctgtgtaatccatccgagcctccaccaccacgccggctcaatatgactactgaacagtttaccggagaccacacacagcactttctcgatggtggtgaaatgaaagtcgagcagcttttccaggagtttggcaatcgcaaaagcaataccatacagtcggacggcatctctgactctgaaaagtgttcccccactgttagtcaggggaagagttccgactgtttaaatactgtgaaatctaatagcagcagcaaagcccccaaagtggtgccactcactcctgaacaggccttgaaacagtataagcatcatctgactgcctacgagaagctcgagataatcaattacccagagatctatttcgttgggcccaacgctaagaagcgccatggtgttattgggggtccgaacaacggtgggtacgacgatgctgacggggcatacatccatgtcccacgggatcacttggcttatagatacgaggtgctgaagattatcggaaagggctcttttgggcaggtggcccgggtttacgatcataagctcaggcagtacgttgcgctgaagatggtgaggaatgaaaaaagatttcacagacaggcggctgaggagataagaatcctggagcacctgaaaaagcaggataagacaggcagcatgaatgtgatccacatgctggagtcttttacatttagaaaccacgtgtgcatggcatttgaactgctgtccatagacctgtatgagcttattaagaaaaataaattccaaggcttcagtgttcagctggtgcggaaatttgcccagtctattctgcaaagcctggacgcactgcataaaaataaaatcatccactgtgatctcaagccagaaaacattctgctcaaacaccacggaaggtctagcaccaaggttattgacttcgggtcatcgtgcttcgaataccagaagctttacacatacatccagagtaggttttatagagccccagaaatcattctggggagtcgctacagtacccccattgatatctggagcttcggatgcatactagctgaacttcttaccggacagccgctgttcccaggggaggacgagggcgatcagctggcctgcatgatggaactgttgggcatgccaccccctaagcttctggagcaatctaagcgagcgaagtactttatcaattcaaagggcatccctagatactgctccgtgacaacccaggctgacggccgagtggtcctagtcggggggagatctcgccggggaaagaagcgtggcccacctggaagcaaggactggggaaccgctcttaagggctgcgatgactacttgttcatcgagttcctcaagagatgtctgcattgggacccatcggctaggctcactcccgctcaggccctccgacacccctggatttctaagagtgttccaaggcctttaacaacaatcgataaggtctccggcaagcgagtggttaaccctgctagcgcctttcagggattaggctcgaaacttcctcccgtcgtaggaattgcaaacaagctgaaagctaatttgatgtcagagacaaatggatccatccccctgtgttccgtgttgcctaaactgatctcttag

SEQ ID NO: 115160 - DNA, 1707 bp, synthetic construct
  misc_feature 1..1707: note = Description of Artificial Sequence: Synthetic coding sequence
  source 1..1707: mol_type = other DNA
atgaaatggaaagaaaaattaggtgacggcgtctacgatacgttcatgatgattgatgagaccaagtgccccccctgctccaacgtactgtgcaatccttctgagcctcctccccctaggcgactcaacatgacaaccgagcagttcacaggcgaccatactcagcactttctggatggcggagaaatgaaagtggaacagctgtttcaggaatttggcaaccgcaaaagcaacaccattcaatctgacggtatcagcgactctgagaaatgtagccctaccgtgagtcaggggaaaagctccgattgtttgaacacagtgaagagtaattcctcttctaaagctcccaaggtggtgccactgactcccgagcaggccctcaaacagtacaagcaccaccttactgcctatgaaaaactcgagattattaattacccagagatttacttcgtcggcccgaatgctaagaagcgtcacggagtgattggcgggcctaataatggcggatatgatgatgcagatggagcctatatccacgtgcctcgcgaccatcttgcctatcggtacgaggtgctcaagattatcgggaagggttcctttggccaggtggctagagtgtatgaccacaaactcagacagtatgttgcacttaagatggtgcggaatgagaaacgttttcacagacaggcagccgaggagatccgcattttagaacacttaaagaagcaggacaagacaggatccatgaacgtgatccatatgttggaaagtttcacctttagaaatcacgtctgtatggccttcgaattactgagcatagatttgtatgaattaattaagaagaataaattccagggctttagcgtccagcttgttagaaaatttgcccaatccattctgcagtctctggatgccctgcacaaaaataaaataatccattgcgatctgaaacccgagaatatcctgctgaagcaccacggtcgctccagcaccaaagtgatcgacttcgggtcctcttgctttgagtaccagaaactatacacatacatccagagtaggttctaccgagcccccgagataatcttagggtcaaggtacagcacgcctattgacatctggtctttcggttgcattttagcagaattactcaccgggcagcccttgttccccggggaggacgaaggggaccaactggcgtgtatgatggagctcttaggaatgccgcctcctaaactgcttgaacagagtaagagagcaaagtactttatcaattctaagggaataccgcggtactgcagcgtcacaactcaggctgatggcagggtggtactggtcgggggccgcagtcggaggggaaagaagcgagggcccccaggaagcaaggattggggcactgccctcaagggttgtgacgactatttgtttattgaattcttgaaaagatgtttgcactgggatccatcagcgcgccttactcctgcacaagcattgagacatccctggatttccaagagcgtccctagaccccttaccacaatcgacaaagtgtctggtaaacgtgttgtgaatcccgcgtccgcttttcagggactaggctctaagctgcctcctgttgtgggcatcgccaacaagcttaaggctaaccttatgagcgagaccaatggctcaattcctttgtgttctgtattgccaaagctgatatcatag

SEQ ID NO: 115161 - DNA, 1767 bp, synthetic construct
  misc_feature 1..1767: note = Description of Artificial Sequence: Synthetic coding sequence
  source 1..1767: mol_type = other DNA
atgggaggcaccgctcggggtcctggccggaaggatgcgggccccccaggagcgggtctgcctcctcagcagcggaggctcggagacggtgtgtatgataccttcatgatgattgatgagacaaagtgccctccttgttctaatgttctctgtaacccttccgaacctcctccccctaggagacttaatatgacaacagaacagtttactggagaccatacccagcactttcttgacggtggagaaatgaaagtggagcagctcttccaggaattcggcaataggaaatccaataccatccagtctgatggtattagtgactctgaaaagtgttctcccactgtcagccaaggcaaatcttcggattgccttaatactgtcaaatcaaattcctcctccaaagcccctaaggtcgtccccctaaccccagaacaggctcttaaacagtacaaacatcacttaactgcatatgagaagcttgaaatcataaattaccccgagatctacttcgtgggcccaaacgcaaagaagcggcatggtgttattgggggcccaaataatggagggtatgacgacgcagacggtgcctacatccatgtgccgcgggaccatttagcgtaccgatatgaagtcctcaagattataggcaagggtagtttcggccaggtggcccgcgtgtatgatcacaagttgagacaatacgttgccctcaagatggtgcgcaacgaaaagcgatttcacagacaggctgccgaagaaatcagaatactcgagcatctgaaaaaacaggacaagacaggcagtatgaatgtgatacatatgcttgagtccttcacctttcggaaccatgtatgcatggcctttgagctactatccattgatttgtacgaactcatcaagaagaataagtttcaggggtttagtgtgcagctcgtgcggaaattcgcccaatccattctgcagtctctggacgccctgcacaagaacaagataatccattgtgacctcaagccggaaaatatcttactgaagcatcatggtcgcagcagcactaaagtgatcgattttggctcaagttgcttcgaatatcagaagctgtatacctatattcaatccaggttctaccgggcaccagagataatccttggatcaagatactctaccccaatagatatctggagcttcgggtgcatccttgcggagctgctaacaggccagccactgttccctggggaggatgaaggtgatcaacttgcatgcatgatggagctgctcggaatgcctccacccaaattgctcgagcagagcaaacgggccaagtatttcatcaattccaagggaattccaaggtattgcagtgttaccacccaggcagacggcagagtggtgctagtgggtggtaggagtagacgtgggaaaaagcgcggacctccaggatccaaggactggggaaccgctctaaagggctgcgacgactacctgtttatagagttcctgaaacgatgcctgcactgggatccttcggcaaggctaacacccgcgcaggcactgaggcacccttggatcagtaagagtgttccacggccactgacgacaatcgataaggtgtccgggaagcgagtggtaaatccagcatctgccttccaaggcctgggcagcaaactgccccccgttgtggggatcgctaacaagctgaaggccaatctgatgtccgaaacaaatggtagtatccctctctgtagtgtgctgcccaaacttattagctag

SEQ ID NO: 115162 - DNA, 732 bp, synthetic construct
  misc_feature 1..732: note = Description of Artificial Sequence: Synthetic coding sequence
  source 1..732: mol_type = other DNA
atgaagtggaaagagaagctgggagatggggtttatgacaccttcatgatgatcgatgaaaccaaatgtccaccatgttccaatgtgctgtgtaaccccagtgagcctcctccacccagacggctaaacatgactacagaacagttcactggagatcatacccaacacttcttggatggaggcgagatgaaagttgagcagctcttccaggaatttggcaacagaaagtcgaatactatccagtctgatggcatttccgactcagagaaatgctcaccaactgtatcccaggggaagtcaagtgactgcctgaacaccgtgaagagtaactcaagcagtaaggcaccaaaagtcgttcctctaacccctgagcaagcgctgaagcagtataaacaccatttgaccgcttacgagaagctcgaaattatcaattaccccgagatctatttcgtcggacccaatgctaagaagcggcatggggtcatcggcgggcctaacaacggcggatatgatgatgccgatggagcatatattcacgtgcctcgtgatcaccttgcctacagatacgaggtacttaagataatcggcaagggctctttcggccaagtagcgcgagtctacgatcacaagctccgccagtatgttgcactgaaaatggtgagaaacgagaagagatttcatcggcaggcagcagaagagatcagaattttggaacatctgaaaaaacagtag

SEQ ID NO: 115163 - DNA, 1563 bp, synthetic construct
  misc_feature 1..1563: note = Description of Artificial Sequence: Synthetic coding sequence
  source 1..1563: mol_type = other DNA
atgccagcctccgagcttaaggcatcagagattccattccacccttcaatcaaaacgcaagaccccaaggcagaagagaaatcccccaagaagcagaaggtgacactcactgcagcggaggcccttaagctgttcaagaatcagctgagcccctatgagcagagcgaaatcctgggctacgccgaactgtggtttcttggcttggaagccaagaaattagacacggcacccgagaagttttccaagactagctttgatgatgagcatggcttttatctgaaggtcctacatgaccacatagcttatcgctatgaagttctggaaaccatcggtaagggatcatttggccaggtcgccaaatgcctggatcataaaaataatgagctagtagcactgaagataattaggaataagaagagatttcatcagcaagccctcatggagttgaaaattctggaggcactacgaaagaaggacaaagacaatacttataatgtcgtccatatgaaagacttcttttattttcgaaatcatttctgtataacattcgaactcctgggcataaatctgtacgagctaatgaagaacaacaatttccagggctttagcctatcgatcgtccggcgtttcacattgagtgtgcttaagtgtctccagatgttgagcgtcgaaaaaatcatccactgtgatttgaaacccgagaacatcgtcctgtatcagaagggtcaagcctctgtgaaggtgattgactttggaagttcctgttacgagcaccagaaagtatacacgtacattcagagtcgattctacagaagcccagaagtaatcctcggccatccttacgacgtggccatcgatatgtggagtctcggttgtattacagccgagctctacaccgggtatcctctttttccaggcgaaaacgaggtggagcagctggcctgcattatggaagtcctggggttgccacccgccggatttatccaaaccgcttcacgaagacagacgttctttgattccaaggggtttcctaaaaatattacaaacaatcgtggaaaaaagaggtacccggactccaaggatcttactatggtgttgaaaacctatgacacaagcttcctcgacttcctcaggcggtgccttgtttgggaacccagtttacggatgacccccgatcaggccctcaagcacgcgtggatacatcagagccggaatctgaagccccagcctagaccacagacgctgcgaaaatctaacagtttttttcctagcgaaactcgcaaagataaagtgcagggctgccatcattcatccaggaaagcggatgagattaccaaggagaccacggaaaagaccaaagattcacccaccaaacacgtacagcatagcggggatcagcaggattgtctgcagcacggcgccgataccgtccagttgccgcagctcgtcgatgcgccaaagaaatccgaagccgctgtgggcgctgaggttagcatgaccagccctggacaatcaaagaattttagccttaaaaatacgaacgtcctgcccccgatcgtttag

SEQ ID NO: 115164 - DNA, 1563 bp, synthetic construct
  misc_feature 1..1563: note = Description of Artificial Sequence: Synthetic coding sequence
  source 1..1563: mol_type = other DNA
atgcccgcttcagagctcaaagctagcgagatccccttccatcccagcattaagacacaagatcccaaggcagaagagaagtcaccgaagaagcagaaggtgacactgacggcagctgaggctctcaaattgtttaagaaccagctgagcccctacgagcagtctgaaatcctaggatacgcagagctttggtttctgggcctggaagccaagaaactcgatactgcccccgagaaattcagcaagacttccttcgacgacgaacatggtttctacctcaaagtgctgcacgaccacattgcctaccggtacgaagttctggaaacaattggcaaaggatcgtttggtcaggtcgctaagtgcctggaccataagaataacgaattggtggctctgaaaattatcagaaacaaaaaaagatttcatcagcaggcactaatggagctcaagatcttggaggccctaaggaagaaggacaaagacaatacatataacgtagtacatatgaaggactttttctactttcgaaaccacttctgcataaccttcgagctgttgggtataaacctgtacgaactgatgaagaataacaattttcaaggattctctctttctattgttcggcggttcaccctctccgttttaaagtgcctgcagatgctctctgtggagaagattattcactgtgacctgaagcctgagaacattgtgctctaccaaaagggacaagccagtgtaaaggtcatagactttggcagttcctgttatgagcatcaaaaagtctatacctatattcagtctcgcttttatcgctctcccgaagttatcctagggcatccatacgacgtggcgatcgatatgtggagcctgggatgtatcaccgccgagttatacaccgggtatccgcttttccccggggagaatgaagtcgaacagctggcctgcattatggaagtgctcggtttgccaccggcaggctttatccagaccgcatcccgtagacaaacttttttcgactcgaagggctttcccaagaacataacgaataacagaggcaagaaacggtacccggattctaaggatctcaccatggtgctgaagacctacgatacttcttttctggatttcctgcgccggtgcttggtctgggaaccttccctgcgaatgacacctgaccaagcactcaagcatgcctggatccatcaaagtcggaaccttaagcctcagccaagacctcagacactgcgcaaatctaattcattctttccttcagaaacacgcaaggacaaggtgcagggctgccaccattccagccgcaaagccgatgaaatcaccaaagaaaccaccgaaaaaacaaaagactccccgaccaagcatgtgcagcactctggggaccaacaggactgccttcagcatggagccgacacagttcaactccctcaattggtcgatgcacccaaaaagtcagaggcggccgtaggagccgaggtgtctatgaccagcccgggacaaagcaaaaatttcagccttaaaaacaccaatgtgttacctcctattgtctag

SEQ ID NO: 115165 - DNA, 1560 bp, synthetic construct
  misc_feature 1..1560: note = Description of Artificial Sequence: Synthetic coding sequence
  source 1..1560: mol_type = other DNA
atgccagcctcagagttaaaggcctcagaaattccctttcatcccagcataaagacccaggatcctaaagcggaagaaaagtctccaaaaaaacagaaagtcactttgaccgcggcagaggctctcaagttgtttaagaatcagctcagtccctacgaacagagcgagatcctgggttacgccgaactgtggtttttgggtctcgaggctaagaaactggataccgctccggaaaagtttagcaagacatccttcgacgatgagcacggcttttatctgaaagtactgcacgatcacatagcgtaccggtatgaagttctcgagacaattggtaagggatcattcggccaggtggctaagtgcctagatcacaagaataacgagctggttgctctgaaaattattagaaacaagaagcggttccatcagcaggcgttgatggagctgaaaatcctcgaagccctgcgcaaaaaggacaaggataatacgtacaacgtggtccatatgaaagacttcttctacttcagaaaccacttctgcatcacctttgagttgttgggaattaatctatacgagctgatgaagaataacaactttcagggattcagtctgtccattgtccgtagattcacactgtccgtgttgaaatgcctgcagatgttatcggttgagaagatcatccattgtgacctcaagcctgagaatatcgtgctttatcagaaaggacaggctagcgtgaaggttattgatttcgggtccagctgttacgaacatcaaaaagtgtacacatatattcagagcaggttctatcgttctcctgaagtaattctgggccatccctacgatgttgctatcgatatgtggtcgctcgggtgcatcactgctgagctatatactggctatccccttttccctggggaaaatgaagtggaacagcttgcctgtatcatggaagtgcttgggctaccgcctgctggctttatccagactgcctcgaggaggcaaaccttcttcgattccaagggtttccccaagaacatcactaacaacaggggaaagaaaaggtacccagacagcaaggacctaaccatggtccttaagacgtacgacaccagctttcttgacttcttgagaaggtgtttggtctgggagccatctctgaggatgaccccagaccaagccctgaaacacgcatggatccatcaatcaaggaatctgaagccacaaccaagaccacagaccttgcgcaaatctaactcctttttcccctctgagacacggaaggacaaggtgcaggggtgccaccacagtagtcggaaagatgagataaccaaagaaaccaccgaaaagaccaaagacagtcctaccaagcatgtgcagcattcaggggatcagcaggactgtctgcagcacggggccgacacagtgcagctaccacagttggtggatgctcctaagaagtctgaggctgccgtgggcgctgaagtcagcatgacctcccccgggcaaagcaaaaatttttctctcaagaacacgaacgttcttccgcccattgtttag

SEQ ID NO: 115166 - DNA, 474 bp, synthetic construct
  misc_feature 1..474: note = Description of Artificial Sequence: Synthetic coding sequence
  source 1..474: mol_type = other DNA
atggtgctgaaaacatacgataccagtttccttgattttctgagaaggtgcttggtgtgggagcccagcctccgcatgacccccgatcaggccctgaagcacgcttggatacatcagtctcgaaatttgaaaccccagccccggccccaaacgctgcggaagtccaacagtttcttccctagtgagacccggaaagacaaggtgcagggctgccaccactcgtctaggaaggctgacgaaattacaaaggagacaactgagaaaaccaaggattcccccactaaacacgtgcaacatagcggtgaccaacaggattgccttcagcacggcgccgataccgtccagttacctcaacttgtggacgccccaaagaaatcagaagccgcagtcggagccgaagtcagcatgacttcccccggccagtcaaagaacttctctttaaagaacacaaatgtgttgccgcctatcgtgtag

SEQ ID NO: 115167 - DNA, 1011 bp, synthetic construct
  misc_feature 1..1011: note = Description of Artificial Sequence: Synthetic coding sequence
  source 1..1011: mol_type = other DNA
atgggcaactgtcttcaccgagctgagctgtctccttccactgagaacagctctcagttagacttcgaggacgtctggaactcgagttatggggtgaatgattcttttcccgatggggactacggggccaacctcgaagccgcagcaccatgtcactcttgcaacctcttagacgactctgctctccctttcttcatactgaccagtgtgttgggtatcctggcctcttcaaccgttttatttatgctgtttaggcccctgttccggtggcaactgtgtcccggctggccagtattggcacaactggctgtgggcagtgccttgttctcaattgtggttcccgtgcttgcccctggcctggggtcgacacggagttcagctctctgcagtctgggatactgcgtgtggtacgggtcagcgttcgcacaagccttattgctggggtgtcacgctagcctgggccatagactgggagccggccaggtacccgggctgacactgggcttgactgtcggaatctggggggtggccgccctgctgaccctgcctgtgactcttgccagtggagcgtcaggcggtttatgtactttgatatatagtacagaactcaaggccctacaggctacacacacggtggcctgcctcgccatcttcgtgttattacccttgggcctcttcggagccaagggtctgaagaaggcgctagggatgggcccgggcccctggatgaacatcctctgggcctggttcatattctggtggcctcatggcgtggtgctgggtctggactttctcgtgcgttcaaagctgctcctgcttagcacctgtttagcccagcaagccctggacttacttctgaatctggctgaggccctcgccatcctgcactgcgtagcaacacccctcctgctcgccctcttctgccaccaggcaacacggacactgctgccaagccttccattacctgagggatggtccagtcaccttgacactctcggaagtaaatcctag

SEQ ID NO: 115168 - DNA, 1017 bp, synthetic construct
  misc_feature 1..1017: note = Description of Artificial Sequence: Synthetic coding sequence
  source 1..1017: mol_type = other DNA
atggcctcctctgggtacgtactacaagcagagctatctccaagcacagagaattcctctcaactcgattttgaagacgtttggaacagtagctatggggtgaatgacagcttccctgatggggattatggcgccaacctggaagccgcggccccctgccattcctgtaatttactcgacgattctgcgctacctttcttcatcctgacttccgtgctggggatccttgcaagttcaactgtgctgttcatgctttttagaccactgtttcgatggcagctttgtccaggatggcccgtcctcgcccagctggccgttgggagcgccctattctccatcgttgtgcctgtgctggctcctgggctagggtccacgaggagtagcgcactctgtagtttgggctattgcgtctggtacggtagcgcatttgcccaggcattgctgttggggtgtcatgcctctctcggccaccggctgggggccggacaggtacctggcctcaccctggggctgaccgtagggatttggggagttgccgccttactcacccttccggtgacacttgcttcaggcgcgagtgggggactctgcacgctgatatattctacagaattaaaggcacttcaggctactcataccgtggcttgtctggcaattttcgtgctccttcctctcgggctcttcggggccaagggcttaaaaaaggcactgggcatgggaccgggaccctggatgaacattttgtgggcgtggtttattttctggtggcctcacggcgttgtgttgggtttggatttcctggttagaagcaagctgctactgctgtctacctgtctggcccagcaggccttagatttgctgctgaatctcgctgaggctctggcgattctgcactgcgtagcaaccccgttactgctggcacttttttgccatcaggcaacccgcacgctgctcccctcgctgccgctaccagaaggctggtccagtcacttagatactctcgggagtaagtcttag

SEQ ID NO: 115169 - DNA, 1011 bp, synthetic construct
  misc_feature 1..1011: note = Description of Artificial Sequence: Synthetic coding sequence
  source 1..1011: mol_type = other DNA
atgggaaactgtcttcacagggccgagctgtctccatcaacagagaattccagccagcttgactttgaagacgtatggaacagttcctatggggtgaacgactccttcccagatggcgattatggagcaaacctcgaggccgcagccccttgccactcttgcaacctactcgacgacagtgctctgcctttctttatcttgacgagtgtgctcggtatactggcgtcctctaccgtactgttcatgttgtttagaccactgtttcggtggcagctgtgcccgggctggcctgttctagcccagttggcggtcggttccgcactcttctctattgtggtgcctgtgctggctccgggcctgggttcgactagatcgagcgccctctgtagcctaggctactgcgtgtggtacggctcagcgttcgcccaagccctcctcctgggttgccacgccagcttaggccaccgcctaggagctggtcaggtccccggccttaccttggggctgaccgtgggcatctggggcgtcgccgccctcctgacactgcccgtgaccctagcctccggtgcatctggaggactttgtactctgatatactcaacagagttgaaggctctccaggctacccatactgttgcttgtctggccattttcgttcttctgcctctgggacttttcggagccaaagggctgaagaaagcactgggcatgggccccggcccctggatgaacattctgtgggcatggtttatcttctggtggcctcacggtgtcgtgctgggcctcgatttcttggtcaggagcaaacttctcttattgtcgacctgtctcgcacaacaggctttggaccttctcctaaacctagccgaggctctggccattctgcactgtgtagcaacccccctgttgctggcattgttttgtcaccaggccactaggactctgctgcccagtctgccgctgcctgaaggatggtccagccatcttgacaccctggggtctaagtcctag

SEQ ID NO: 115170 - DNA, 468 bp, synthetic construct
  misc_feature 1..468: note = Description of Artificial Sequence: Synthetic coding sequence
  source 1..468: mol_type = other DNA
atggcctcttccgggtatgttttgcaggctgaactgtccccttcgacggagaatagttcccagctagactttgaggacgtgtggaattcatcctacggagttaatgacagcttcccagatggggattatggcgccaatctggaggctgccgccccttgtcatagctgtaatctgctggacgatagcgctttgccattcttcatcttgacatcagtcctgggcatcctcgcatccagcacagtgctctttatgctgtttaggccactttttagatggcaattatgcccaggttggccagtgttggctcagttagccgtcgggtcagctctttttagcatcgtggtgccagtcctggcacctgggctgggctctacacggtccagtgcactgtgtagcctgggatactgcgtgtggtatggatccgcttttgctcaggcactgctgctggggtgtcacgcaagcttatag

SEQ ID NO: 115171 - DNA, 1011 bp, synthetic construct
  misc_feature 1..1011: note = Description of Artificial Sequence: Synthetic coding sequence
  source 1..1011: mol_type = other DNA
atggggaactgcctgcacagagccgagttgagccccagtaccgagaactccagccagctcgactttgaggatgtgtggaacagttcttacggagtgaacgactcctttccagacggggactatggagcgaacctcgaagccgcggcaccatgccactcttgcaatctgcttgatgattccgcactcccatttttcatattaacgagtgtgctggggattctggcatcctctacagtgctgttcatgctcttcagacctctattcagatggcaattgtgtccaggctggccagtgctggctcagctggcagtgggatcagctttgttttctattgtagtcccagtcttggcccctggcctgggttctacccggtcctccgccctgtgttcgctgggctactgcgtttggtatggatcagccttcgcccaggcgctgctgctaggatgccacgccagcctcggccaccgccttggggcaggccaggttccagggctaaccttgggacttactgtggggatttggggggtggctgcgctccttacactgccagtgacgctggcgtctggggcatctggcggactttgcacgctgatttactctacagagctgaaagccttgcaggccactcatactgtcgcctgccttgccatctttgtattactccctctgggtctgttcggcgccaaaggcctcaagaaagctcttggaatgggtcccgggccctggatgaacattctctgggcctggtttatcttttggtggccacacggggttgtcctcggccttgattttctcgtgcgtagtaagttactgctgctgtccacgtgtttggcccagcaggccctggatctgctcctgaatcttgccgaagcactggcaattctgcactgtgtcgccacacctctgctgctagctctgttttgtcatcaggcaactcgcacattattgccaagcttgcccctgccagaagggtggtcttctcatcttgacacccttggctccaaatcttag

SEQ ID NO: 115172 - DNA, 2010 bp, synthetic construct
  misc_feature 1..2010: note = Description of Artificial Sequence: Synthetic coding sequence
  source 1..2010: mol_type = other DNA
atggggagcaactcttcgcggatcggagatttgccaaaaaatgaatacctaaagaagttatctgggaccgaatctattagtgagaatgatccattctggaaccagctccttagctttagcttccccgcccctacctcgtcatctgagttaaaactgctagaggaggccaccatctctgtctgccgatccctggtggaaaacaacccccggacaggcaacctgggagccctgatcaaagtgtttctgtccagaacgaaggagctgaagctgtctgcagaatgccagaaccacatattcatatggcagacgcacaatgccctgttcataatctgctgtctgctcaaggtattcatctgtcagatgtctgaggaagagcttcagctgcactttacatacgaggaaaagtccccgggcaactatagctctgattccgaagatcttctggaggaactgctgtgttgtttaatgcagctgatcacagacattccgctcctggatatcacgtatgagatttctgtagaggcaataagtacaatggtggtgtttctttcttgccagctgtttcataaggaagtgttacgacagagcatttcacacaaatatctgatgaggggcccctgcctcccttacacatctaaactcgttaagactctgctttacaactttatacggcaggaaaaaccaccgcctccaggtgcccatgtctttccccaacaatctgatggcggtggattactctacgggcttgcgtcaggtgtcgcaaccgggctgtggactgtttttactctcggaggcgtggggagtaaagcagctgccagccccgagttatccagccctctggctaaccagagcttgctgctcctgttggtgctggcaaacctgacggatgcatccgatgcacccaatccctatcggcaggccattatgagtttcaagaacacccaggatagcagtccattcccttcctcgattccccacgcttttcagatcaactttaattccctgtacactgctctctgtgagcagcaaacctcggatcaagccactctgctgttgtacacccttcttcatcagaacagtaacatccgaacttatatgcttgccagaaccgatatggagaatctggttcttcctattctggaaattctgtatcatgtggaagaaaggaattcacaccacgtgtatatggctctcatcatcctcttgatcctgactgaagacgatgggttcaataggtccattcatgaagtcattctcaagaatatcacctggtacagcgaacgggtgctcaccgaaatttcgctcggtagcctgctcattctggtggtcataaggactattcagtacaacatgacccgcaccagagacaaatatcttcacacaaactgcttggccgctttggcgaatatgtctgcccagttccggtcactccaccaatacgctgctcagcgcatcatctccctttttagcctgctgtcgaagaaacacaacaaggtgctggaacaggcaacccagagtttaagggggtccctgtccagtaacgatgtgcccctcccggactatgctcaggacctgaacgttatagaagaagtgatccggatgatgcttgagatcataaacagttgtctcacgaattcacttcatcataacccaaacctggtatacgccctactttacaagcgagatttattcgagcagttcagaacacacccctccttccaggatattatgcagaatatcgatctggtgatttccttcttctcatctcggcttctccaagcaggagctgagctcagtgtggagagggttctggagataatcaaacaaggcgtcgtggccctgcccaaggacagactcaagaagttccccgaactgaagttcaagtacgtggaagaggaacaacccgaagaattctttatcccgtacgtgtggtcgttggtctataattccgccgtgggcttgtattggaatccccaggacatccagctgtttactatggactcggactag

SEQ ID NO: 115173 - DNA, 519 bp, synthetic construct
  misc_feature 1..519: note = Description of Artificial Sequence: Synthetic coding sequence
  source 1..519: mol_type = other DNA
atggctctgatcatactcctgattttaaccgaggacgacgggttcaaccggtctattcatgaagtaatcttgaagaatattacttggtactctgaacgggtgcttacggaaatctcccttggctccctcctgattttggtggtgattaggacaatccaatataacatgacccgaacacgtgacaagtatttgcacactaattgtctggcagccctggcaaatatgagtgctcaattcaggtccctccaccagtacgccgcacagcgaataatctcctacacatgtcggcacttgcggcgatacgtttatgtcttggacaagctctacttcccccactctcattgttccaccctgcaacactgtttcagcactctgtcagataacggtgaagaactgttgtctctgacatgtagccacattctgaggtcatacgctagctcacttttcagtttgctatcaaagaagcataataaggtcctggaacaggcaacgcaaagcctgcgcggatctctaagctag

SEQ ID NO: 115174 - DNA, 1440 bp, synthetic construct
  misc_feature 1..1440: note = Description of Artificial Sequence: Synthetic coding sequence
  source 1..1440: mol_type = other DNA
atgggatctaattcgtcaagaattggagacctccccaagaatgagtacctaaagaaattgagtgggaccgaaagcatcagtgagaatgaccccttctggaaccagttgctatcattttcgtttccagcgcccaccagttctagcgagctcaagttgttagaggaggccaccatcagcgtgtgccggtcgttggccggcctttggacggtttttactctgggaggtgtcggctcgaaagccgcggcatctcccgaactgtcaagccccctggcgaatcagagcctgctgctgctccttgtgttagccaacctcacggatgcaagcgatgcacctaacccttacaggcaggctatcatgagctttaagaacacacaagactcctcacccttcccaagcagcatccctcacgcttttcaaattaactttaatagcctttacaccgctctttgtgagcagcagacttctgaccaagctacactgctgctgtatactctgctccaccagaatagtaacatccgcacgtacatgctcgcacgaacagacatggagaacctggtgctgccaatcttagagatcctgtatcacgtcgaggaacggaattctcaccacgtttacatggcgctcataatactgcttatcctgaccgaagacgacgggttcaacaggtcaatccacgaggtcatacttaagaacatcacctggtactcagagagagttcttaccgagataagccttggctccttgctgattcttgtggtcatccgtaccattcagtacaacatgacccgcacccgtgataaatatttgcacactaattgtctcgccgccttggccaacatgagtgcccagtttcgatcccttcatcaatatgccgctcaaaggataattagtctgttctctctcttatcaaaaaagcataataaggtactggaacaggcaacgcaatcactccgagggtctctgtcctccaacgacgtgcccttacctgattacgctcaggacctgaacgttatcgaagaagtcatacgaatgatgttggaaattatcaattcatgtctgactaattctctccatcacaatccaaatttggtgtatgccctgctatacaagagggatcttttcgaacagttccgcacccaccctagcttccaagatatcatgcagaatatcgacctggttatctcctttttcagtagtcgcttattgcaagcaggggccgaactttccgtcgaacgcgtgctggagattataaagcagggagttgtggccttacctaaagatcgcctgaaaaaatttccagagctgaaatttaagtacgtcgaagaagaacagccagaggaattctttattccctacgtgtggtcactggtttacaatagtgctgtgggcctctattggaatccccaggacattcagttattcactatggatagtgactag

SEQ ID NO: 115175 - DNA, 3837 bp, synthetic construct
  misc_feature 1..3837: note = Description of Artificial Sequence: Synthetic coding sequence
  source 1..3837: mol_type = other DNA
atggcccaatctaagaggcacgtatatagcagaactccttctggtagtagaatgtctgcagaagcctcggctcgccctctccgagtgggcagccgcgtcgaggtgatcggaaaaggtcaccggggaacagtcgcctacgttggcgcgacattgtttgcaaccggcaaatgggtaggggtgattcttgatgaggctaaaggcaagaacgacggtaccgtgcagggacggaagtatttcacttgcgacgagggtcatgggattttcgtgcggcaaagccaaattcaggttttcgaggacggggcggataccactagtcccgagacccctgattcctcagcttctaaggtgctgaaacgagagggcaccgacactactgcaaagactagtaagcttcgtggcctgaaacctaagaaggcacccacagcgcggaagacaactactagacgaccaaagccaacaaggcccgcaagtacaggtgtggccggtgcttcttcctcgttgggtcccagcgggtcagccagtgctggagagttgtcgtcgagcgagccatccacaccagctcaaacaccactcgccgcccccataattcctacccctgttctgacaagtcctggcgccgttccacctcttcccagccctagcaaggaggaggaggggctccgcgctcaggtccgcgaccttgaagaaaaactggagacccttcgcctgaaacgcgctgaggataaggcgaagttgaaggagcttgagaagcacaagattcagctcgagcaagtgcaggagtggaaatccaaaatgcaggagcagcaagccgacctgcagcggcgtcttaaggaggctcgtaaggaagctaaggaagcactggaggccaaagaaagatatatggaggaaatggctgataccgctgatgctatagaaatggcgaccctggacaaagaaatggccgaagaaagggccgaatccctgcagcaggaagtggaagctttgaaagaacgtgtcgatgagcttactacagatctggagatcctgaaggctgaaatcgaggaaaaaggcagcgatggggccgcgagttcctaccagctgaagcagctcgaggagcagaatgcccggctcaaggacgccttggtcaggatgcgggacctgagttcttccgaaaaacaagaacacgtgaagctccagaaactgatggagaaaaaaaatcaggaattggaggtcgtccgacagcaaagggagcgcctgcaagaggagctgagccaggcggagtccaccatcgatgagctcaaggaacaggtcgacgccgcattaggagcagaggaaatggtagagatgctgaccgaccggaacctcaacctggaggaaaaggtgagagagctgcgtgagaccgtgggagacttggaggccatgaatgagatgaatgatgaactgcaggagaacgctcgggagacggaacttgagctgagggaacagttagatatggctggggcacgcgtacgcgaggctcaaaaaagggtggaagccgcccaggagaccgtagcagattaccagcaaaccatcaaaaagtacaggcaactcaccgctcacctgcaggacgtcaaccgggagctgactaatcagcaagaggcaagcgtggagcggcagcagcagcccccacccgagacatttgattttaagataaaattcgccgaaaccaaagctcacgccaaagcaatcgagatggagttacgtcagatggaagtggcccaagccaatcgtcacatgagcttactgacagcgtttatgcccgattccttcctgcggccagggggagatcacgactgcgtgttggtcctgctcttaatgcccagactgatctgtaaggccgagctcatcagaaaacaagcccaggagaaattcgaattatccgagaattgcagtgaaaggccaggcctgaggggggctgcaggtgagcagctcagctttgcagccggcctggtttattccctgagcctcctccaggcgacactccaccgctacgagcacgcactatctcagtgctctgtggacgtgtacaaaaaggtcggctccctctacccagagatgtcagcgcacgagcgatcactcgattttctgatcgagttgctgcataaagaccagttagatgaaacggttaatgtggagcctcttacaaaagccatcaagtactaccagcatctttactccatccacctggctgagcaaccagaggactgtaccatgcagctggctgaccacatcaaattcactcagagcgcacttgactgtatgagtgtcgaagtaggaagactgagagcatttctacaaggggggcaggaagcaacagatatagcacttttgcttcgggacttggagacgtcatgctctgacattagacagttctgcaagaagatcaggaggcggatgcctggcactgacgcaccaggcatccccgccgccctggccttcgggcctcaggtatccgacacactactcgattgcagaaagcacctgacttgggtggtggccgtgctgcaggaagtcgccgccgccgctgcccagttgatcgcccccctcgctgagaacgaaggccttcttgttgcagctcttgaggaactggctttcaaggcctccgaacagatttacggtacgccctccagcagcccttacgagtgcttacggcaaagttgcaatattttgatctccaccatgaataagctggcgaccgcgatgcaggagggcgagtacgacgccgagcgccctccgtcaaagcctccgcccgtggagctcagggccgcagctctccgagcggagataacagatgccgagggtctggggctgaagctggaagaccgcgagaccgtgatcaaggaattgaaaaagagcctgaagatcaaaggagaggagctgtcggaggctaacgttcggcttagtctgctcgagaaaaaactcgattctgcagctaaggacgccgacgagcgtatcgagaaagtacagacgaggttggaggaaactcaagccctgctgagaaagaaggagaaggagttcgaagaaacgatggacgctctacaggctgatattgatcagttggaagcggaaaaagcggagttgaaacagaggttgaatagtcagtccaaacgcaccatagaagggctgagaggccctcccccgagcggaatcgccaccctggttagcggcattgccggcgaagagcagcagcgcggcgcaatacctggacaggctcccgggagtgtccctgggcctgggttggtaaaagatagtcccctgctgctgcagcaaatttctgcgatgagactgcacatctctcagctgcagcatgaaaactccatcctcaaaggagcccagatgaaggctagtctggcctccctgcccccccttcatgtcgccaagctgtcccatgagggccctggaagcgagctgcccgccggcgccctctacaggaaaaccagccagttgctggagaccctgaaccaactatcaacacatacccacgtggtggatataacccggacgtctcctgcggccaaaagtccctcagcacagctgatggagcaagttgctcagctaaaatccctgagcgatactgtcgagaagctgaaggacgaggtcctgaaagagacagtgtcgcagagacccggagcaactgtgccaaccgacttcgctactttcccctcatctgcattcctgagagcaaaagaagaacaacaggacgacacggtgtatatgggtaaggtcacattctcatgcgctgccggcttcggccagcgccacagactggtcctgacccaggagcagttgcaccagttacacagcaggctgatctcttag

SEQ ID NO: 115176 - DNA, 3786 bp, synthetic construct
  misc_feature 1..3786: note = Description of Artificial Sequence: Synthetic coding sequence
  source 1..3786: mol_type = other DNA
atgtctgcagaagcctccgcgaggccactcagggttggatcaagggtcgaagttatcggcaaggggcaccgcggaactgtagcctacgtcggcgccacactatttgccaccggtaagtgggttggcgtcatccttgacgaggcgaaagggaagaatgatggtactgtacagggacggaaatatttcacctgtgatgaagggcacggcatctttgtgaggcagagtcaaatacaagtgtttgaggatggggccgacacgacgtcccccgaaaccccagattctagtgccagcaaagtgctgaaaagggagggtacagacaccacagccaagacctctaagctacgaggtctgaagccaaagaaagcacctaccgcccggaagggtaggagggtgcgaacgaagccaacccggcccgcttccactggtgtggcgggagcttcttcatctctcgggcctagcggatccgccagtgcgggggagttgagtagtagtgaaccgagcactccggcacagacgcctctcgccgctcccattataccaacccctgtcctgacctcaccaggcgctgtgccacccctgccttccccctccaaggaagaggaaggactcagggcccaggtgcgggatctggaggaaaaattggagactctccggcttaagcgcgccgaggacaaagccaaattaaaggaactggagaaacacaaaatccagttggaacaggtgcaggaatggaagtccaagatgcaggaacaacaggcagatctccagcggcgcctgaaagaagcccgaaaagaggccaaggaggccctcgaggcaaaggaaagatatatggaagagatggccgacaccgcagatgcgattgagatggctacactggacaaggagatggctgaggagagagcagagtcccttcagcaggaggttgaagctctgaaagaaagggtggacgagttaacaaccgatctggagattctcaaagccgaaatcgaggaaaaagggtccgacggggctgccagctcttatcaattgaaacagctggaggagcagaatgcacgtctgaaagatgcgttggtgagaatgagagatctttccagttcagagaagcaggagcacgtaaaactgcagaaacttatggaaaaaaagaatcaggaactcgaagtggtgaggcaacaaagagagaggcttcaggaggagttatcacaggctgaaagcactatcgatgagctgaaagagcaggttgatgccgctctgggtgccgaagaaatggtcgagatgttgactgacagaaatctcaaccttgaggaaaaggtgagagagctgcgagagactgtgggagatctggaggccatgaatgagatgaacgacgaattacaggaaaatgcccgagaaaccgaactagaattgagggagcagttagacatggcaggggcgcgagttcgcgaagcccaaaaaagagtggaagctgcacaggaaaccgtcgccgactaccaacagacgatcaaaaagtaccgtcagctgaccgcccatctgcaggacgtgaatagagagctcacaaatcaacaggaggcaagtgtcgaacgccaacagcagccaccacctgaaactttcgactttaaaattaagtttgctgagacaaaagcccatgcaaaagcaattgagatggagctccgccagatggaagttgcccaagccaaccgccatatgtcccttctgactgctttcatgcctgactcgttccttcgccccggcggagatcatgactgcgtacttgtgcttctgctaatgcctcgcctgatctgcaaggcggaattaattaggaaacaggcgcaggagaagttcgagctgtccgaaaactgttcagagcggcccggcctgcggggcgccgctggagagcagctgtcatttgccgcagggctggtttacagcctatctctgctccaggccacgttgcacaggtatgaacacgccctctctcagtgttcagtggacgtctataaaaaggtaggctccctttacccagaaatgtccgcccacgaaagatccctggattttctgatcgagctgttgcacaaggaccagcttgacgagacagtcaatgtggagcccctaactaaagccattaaatattaccagcacctctactctatccacttagcagagcagcccgaagactgcacaatgcagctcgccgaccacatcaagtttactcagtcggcacttgactgcatgtctgtggaggtgggcagactgcgtgcctttctgcaaggtggacaggaagcaacagatatcgctctgttgctgcgcgacttggagacatcttgcagtgacataaggcaattttgcaaaaagattcgaagacggatgcctggaacggacgccccgggaattcctgctgccttagcgtttgggccccaggtaagtgacacactgcttgattgtagaaagcacctcacgtgggtcgttgcagttctgcaggaagtcgccgctgccgctgctcaattgatcgctcctctggctgagaacgagggcctgttggtcgccgctctggaagagcttgccttcaaggcctccgaacaaatttacggtacgccgtcttcctctccgtatgaatgcctcagacagagctgtaatattttgatcagtaccatgaataaacttgctactgccatgcaggaaggggagtacgacgccgagaggccaccaagtaagcccccacccgtggaactgcgcgctgcagcgctgcgggctgagattactgatgccgagggactgggccttaagcttgaagaccgcgaaaccgtgatcaaagagttgaagaagagcctaaaaattaagggagaggagctgagcgaggcaaacgtgcgcctgagtctgttggagaagaaactggattccgcagccaaagacgcggacgaaaggatcgaaaaggttcagacgcggttggaggaaacccaagcccttttgcgcaagaaagaaaaggagtttgaggagaccatggatgcgctgcaggccgatatagaccaattagaagccgaaaaggcagagctgaagcagaggcttaacagccagtctaaacgtaccattgagggtttgagaggcccccccccgagcggcattgcaaccctggtgagcggcattgctggagaggaacaacagagaggcgcaatcccaggccaggctcctgggtccgtcccaggaccggggctggtgaaggacagccccctacttcttcagcaaatcagcgccatgagactccatattagtcaactccagcacgaaaactcaatcttaaaaggagcccagatgaaagcatcccttgccagcctccctcccttgcatgtggctaaattatcacatgaagggccaggtagcgagttgcccgccggcgctttgtaccgtaagacttctcaattgctggagacgctgaatcagctctcaactcatacccatgtggtagatataactagaacctctcctgccgccaagagtccatccgcgcagctgatggagcaggttgcgcagctgaaatccctgagcgacaccgtagagaagctgaaggatgaagtcctcaaggaaacggtatcgcagcgacctggcgctacagtgccgacagacttcgccacatttccctcttcggctttcttgagagctaaggaagagcagcaggatgatacagtatacatgggcaaggtgacctttagttgtgccgccgggtttgggcaacggcataggttagtgttaactcaggaacagcttcaccagttgcatagccgcttgataagctag

SEQ ID NO: 115177 - DNA, 3816 bp, synthetic construct
  misc_feature 1..3816: note = Description of Artificial Sequence: Synthetic coding sequence
  source 1..3816: mol_type = other DNA
atggcccaatcgaaacgtcacgtgtattcccggacaccgtcagggtcccgcatgtccgcggaggcaagcgctagacccctgagagtagggtcgcgcgtcgaagttatcggaaagggccaccggggaactgtcgcctatgtgggcgctactctgtttgctaccgggaagtgggtgggggtaatcctggatgaggccaagggtaagaatgatggaactgtgcaaggtagaaagtacttcacctgtgacgaagggcacggcatcttcgtgaggcagtctcagatacaggtgttcgaagatggcgctgatacaacctctccagagacgccagattcatcagcatcaaaagtgcttaagcgagaagggacagacacaaccgcgaaaacctctaaattggcccccacagccaggaaaaccaccacaagacggccaaaacccactcgtcctgcatctaccggtgtggccggtgccagttcatctctgggacccagtggttctgcttccgctggggagctctcatccagcgagccctccacccctgctcagactcctctggctgcacccatcattcctacccctgtgctgacttcgcctggggctgtgcctccattaccctctcccagtaaagaagaagagggcctaagggcgcaggttagggatcttgaagaaaaacttgaaaccctgcgcctgaagcgggctgaggataaggcaaagctgaaggagcttgagaaacataaaatccaactagaacaagtacaggagtggaaatcgaagatgcaggaacagcaggccgaccttcagagacggctgaaggaggctcgcaaagaggctaaggaggctctggaagctaaggagcgatatatggaagagatggccgacactgccgatgccattgagatggctactttagacaaggaaatggccgaggaacgcgctgaaagcctacaacaggaggtcgaggcgctgaaggagagggtagacgaactgacaactgacttggaaattttgaaagcagagattgaagagaagggctccgatggcgcagcctcctcataccagctgaagcagctggaagagcagaacgctagattgaaggacgcgctggtccgtatgagggatctttcttcttctgaaaaacaggaacacgtcaaattgcagaagctgatggaaaagaagaatcaggaacttgaagtggtccgccagcagagagaacggctacaggaagaattaagtcaggcggagtcaaccattgatgaacttaaggaacaggttgatgcagccttgggggccgaggagatggtggaaatgctcaccgaccgtaacctaaacctagaggaaaaagtacgcgagttgcgcgaaaccgtgggagatttagaagcaatgaacgaaatgaacgatgaactgcaggagaacgccagggagactgaactggagctgcgcgaacagctcgatatggcaggtgccagagtgcgagaagctcagaagagagtcgaggctgcacaggagaccgtggccgactaccaacagacaatcaagaaataccggcagctgacggcccacttgcaggatgtaaaccgcgaactgactaatcaacaagaggccagtgtcgaaagacagcagcaacctccccctgaaacatttgactttaaaataaaattcgccgagacaaaggctcacgcaaaagccattgagatggagcttcggcaaatggaggtagcccaagcaaaccgacatatgtcattattaaccgccttcatgcctgacagcttcttgcggcctggcggcgatcatgattgcgtcttagttttgctgctgatgccaaggctcatctgtaaagccgagctgatcagaaaacaagcacaagagaagtttgaactgtcggagaactgcagcgaaagacccggtctgcgtggcgccgctggtgagcagctttccttcgctgctgggctggtgtatagcctgtcactcctgcaggcaaccttacaccggtatgagcacgctctctcccagtgttcagtcgacgtgtacaaaaaggttggttccttgtaccccgaaatgtctgcgcacgagcgatcactggactttcttattgagctgctgcataaagaccagttggatgagaccgtgaacgttgagccgttgaccaaagctataaaatactaccagcatctctatagcatacatctcgccgaacagcctgaagactgcaccatgcaattagccgaccatatcaagtttacccagtctgcactcgattgtatgtctgtggaagtggggcgcctgagggcctttctccaaggcgggcaagaggcgaccgatattgccctgcttctgcgagatctcgagacttcgtgttccgacatcaggcagttttgcaagaaaattcgccgcaggatgcccggtaccgatgctcccggcatccctgcagcactcgctttcggaccacaagtgtcagatactttgttggactgtcgcaaacacctaacttgggtcgtggccgtgttacaggaggtggcggccgccgctgcccagttgattgctcctctcgccgagaacgaaggccttctcgtagctgccctagaggagcttgccttcaaggcaagcgaacaaatttacgggacacccagctcctccccttacgaatgtctcagacagagctgtaatattctaatttccacaatgaacaagctggctacagctatgcaggaaggtgagtatgatgcagaacggcccccaagcaaacctccacccgtggaactacgtgccgctgcgctgcgggcggagataacagatgccgaagggcttgggctgaaactggaggatcgggaaacggtcatcaaggagctgaagaagtccctaaagattaaaggagaagaactctccgaagccaatgtgcggctgagtctattagagaagaaattagactccgctgccaaggacgccgatgaacgcatcgaaaaagttcagacaagacttgaggaaacacaggccttgctcagaaaaaaggagaaggaattcgaggagacaatggatgccctgcaggctgacatcgatcaactggaggccgaaaaagcagaactaaaacaacggctgaacagccagtctaaaagaactatcgaaggcctcaggggacccccaccttccggtatcgccacccttgtatctggaatcgctggcgaagagcaacagagaggcgctatccctggacaagcccccggatcagtgcccggacccggtctggtgaaagatagtcctctcctgctgcagcagatttcggctatgcgcttacacatctcccagctccagcatgagaattcaatcctgaagggcgcccagatgaaagcttccctggcaagccttccacctctccacgttgccaagttatctcacgagggtcccggaagtgaacttcctgccggcgccctataccggaaaacaagtcagctgttggagacactaaaccagctgagcactcacactcatgtcgttgatataacacggacgagcccagctgctaaatcccctagcgctcaacttatggaacaagtcgctcagcttaagagcctttctgacacagttgaaaagttaaaagacgaggtgctaaaagagaccgtcagtcagagacccggcgcaactgtcccaaccgattttgccactttccctagctccgcctttctgcgagctaaggaagaacagcaggatgacaccgtgtacatgggtaaggttaccttttcctgtgctgcaggattcgggcagagacatcgtctggtgcttacccaggaacagctacaccagttgcactcgcgcctgatatcatag

SEQ ID NO: 115178 - DNA, 3435 bp, synthetic construct
  misc_feature 1..3435: note = Description of Artificial Sequence: Synthetic coding sequence
  source 1..3435: mol_type = other DNA
atgatgcgacaagcgcccactgcgaggaaaaccacaacccgtcggcctaagcccacaagacccgctagcaccggagtcgctggggcttccagctctctgggcccgtcagggagtgccagcgccggcgagttgagcagcagcgagccctccacccccgcacaaactcctctggccgccccaatcataccaactccagtgctgacgtccccaggtgccgtgcccccattgccctctccctcaaaggaggaggaggggttgcgcgctcaggtgagagatttggaagaaaagcttgagaccctcaggctcaagagagccgaggacaaagccaaattgaaggaactggagaaacacaaaattcagctggaacaagtgcaggagtggaaatcaaagatgcaggaacagcaggcagacttgcagaggcggttgaaggaagctcggaaagaagctaaggaggcactggaggccaaagaacgctacatggaggaaatggcggataccgccgacgcaattgagatggcgaccctggataaggagatggctgaagaacgagctgagtcattgcagcaggaggtagaggccttgaaggaacgcgtggatgaactcaccactgacctggagatccttaaggccgaaattgaggaaaagggctcagatggagctgcaagttcctatcagttgaagcaactggaagaacagaatgcccgattgaaagacgctctggtgaggatgcgcgatctgagctcgagcgaaaagcaagagcacgtgaagctgcagaaactcatggagaaaaagaatcaggaactcgaagtagttcgccagcagagggaaaggcttcaggaagaactcagccaagcggaaagcactattgatgagctgaaggagcaagtcgatgctgccttaggtgcagaggagatggttgaaatgctgaccgatagaaatctgaatctggaggagaaggtgcgggagttgcgcgagacggtgggggatttagaggccatgaatgaaatgaacgatgagctgcaggagaacgctagagagaccgaactggaactacgagaacaactcgatatggctggcgcaagggttcgagaagcccaaaagcgggtagaggccgcccaggagaccgtcgccgactaccaacagacaattaagaagtaccggcaacttaccgcccacctgcaggatgtgaaccgggagctaactaaccagcaggaggctagcgtggagagacagcagcaaccaccaccagaaaccttcgattttaagataaaatttgccgaaactaaagcgcatgctaaggcgatcgaaatggaactgagacagatggaagtggcacaagcaaatcggcatatgtcactccttacggccttcatgccagactcgtttctcagaccagggggtgatcacgattgtgtcctggtgcttctgctgatgcccaggttgatttgcaaggcggaactgattcgtaagcaggcccaggaaaagttcgaactttcagagaactgctcggagcgaccaggcctgcggggagctgctggagagcagttgagcttcgcagctgggcttgtgtactccctatccctgctacaggccacccttcacaggtatgaacatgcgttatcccagtgctcagtcgatgtctacaaaaaagttggctccctctatcctgaaatgtctgcacatgaacgctcactggattttctgattgagctcctccataaagatcaattggatgaaaccgtgaacgtcgaaccgttgacaaaagcgattaaatattatcagcatctgtattcgatacacctggcagaacagcccgaagattgtactatgcagctcgcagaccatattaaattcacccagagcgccctggattgtatgtcagtcgaagtgggtcgactgagggcctttctccagggcggtcaagaggcaactgatatcgccctgctgctccgcgatcttgagacatcatgctccgatatcaggcagttctgtaaaaagattaggcgcaggatgccaggcaccgatgcacctggcattccagctgcactcgctttcggtccccaggtgagcgacacactcttggactgtagaaaacacctgacctgggtggttgctgtcctgcaggaagtggcagcagctgccgcccagcttattgcacccctggcagagaatgagggacttctggtagcagcacttgaggaattggcgttcaaagcctctgaacagatttatggtacaccctcctcatctccatacgagtgtttacggcagtcgtgtaacattctgatctccacgatgaataaactcgctactgctatgcaagagggggagtacgatgccgagaggccaccctccaaaccgccccctgtggaactcagagcggcggccttgagggccgagattacagatgcggaaggcctcggactgaaactggaagatcgggagacggtcataaaggaattgaagaagtccctgaaaataaagggagaggaactgtccgaagctaatgtgcgcctctctctcttagagaagaagttggactcagctgcaaaggacgctgatgaaagaattgaaaaagtacagacccgtctggaggaaacacaggcgcttctccggaagaaggagaaggaattcgaagaaacaatggacgctctgcaggctgacattgaccaactcgaggctgagaaagctgaactgaagcaacgtctcaacagtcagtccaagaggacaatcgagggtttgcgggggccgccacccagcggcattgccaccctcgtcagcggcatcgcaggcgaagagcagcagagaggcgcgattcccggtcaagcacctggaagcgtgccaggacctggcctcgtcaaagattcacctctcctgctgcagcagatcagcgctatgaggctgcacataagccagctgcagcacgagaacagcatacttaagggggctcagatgaaggcttctttggcatccctccctccactgcacgtcgccaaattatcccacgagggaccggggtcagagctccccgcaggggccctgtataggaaaacctcccagctgctggagaccttgaaccagctgtctacgcatacgcatgtggtggatatcacccgcacctcccccgcagccaagtcaccttcagctcaattgatggaacaagttgcccagctcaagtccctgagcgacactgtcgagaaactcaaggacgaggttctgaaagagacagtatctcagagacctggcgccaccgtcccaaccgatttcgctactttccctagttctgcgttcctgcgtgctaaggaggagcagcaggacgacactgtgtacatgggtaaagtgaccttctcatgcgcagccgggtttggacagcgtcataggttagtactgactcaggaacaattgcatcagctgcactcgcggctgatttcatag

SEQ ID NO: 115179 - DNA, 3771 bp, synthetic construct
  misc_feature 1..3771: note = Description of Artificial Sequence: Synthetic coding sequence
  source 1..3771: mol_type = other DNA
atgtccgcggaagcctctgcgagacctcttcgcgtgggatcaagagtagaggtgatcggcaagggccacagggggaccgtggcttacgttggcgccacattgttcgctacagggaaatgggtcggggtgattctggacgaggcaaagggtaagaacgacgggacagtgcaaggtcgcaagtactttacttgtgatgaaggccacggaattttcgtgcggcagtcacagattcaggtgttcgaggacggagctgacactacttctcctgagacgcccgactcttctgccagcaaagtcctgaagcgcgaaggcacagacacaacggccaagacctcaaagctgagaggattgaagccaaagaaggcaccaacagccaggaagaccacgacacgcaggcccaaaccaacgcgccccgcgtctactggcgtggccggtgcctccagttccctcggtccctctggtagtgcctcggccggtgaactcagctcgagtgagccctccacccccgcacagactcccctcgcagcccctatcatacctacacctgttctgacttctccgggcgctgtgccacctctgccatcaccatctaaggaggaggagggcctgagagcacaggtgcgggatttggaagagaaactggaaaccttgcgcctgaagcgtgccgaggacaaggcaaagctgaaggaacttgaaaagcataagatccagcttgagcaggtgcaggagtggaaatctaagatgcaggagcagcaagcagacctgcagcgaagactcaaggaagctcgcaaagaggctaaagaagcgttagaggccaaagagagatacatggaggaaatggccgacacagcagatgccatcgagatggcgactctggacaaggagatggctgaggagcgggccgagagcctccagcaggaggtggaagcgctaaaagagcgtgtcgacgaattgaccacagacttggaaattctgaaggccgaaatagaggagaaaggaagtgatggagcagcctcttcttaccagcttaagcagctggaagaacagaacgctaggctgaaggatgccttggttcggatgcgtgatttaagcagctctgaaaaacaggagcacgtgaaattacagaagcttatggagaagaagaaccaggaactggaagtagtgcggcagcagagagagcgtctccaagaggagctgtcccaggctgagagcacaattgacgagctcaaagagcaggtagacgccgctttgggggcagaggagatggtggagatgctgacagaccgaaacctgaacctggaagagaaggtgcgggaacttagggagacggtcggagatctcgaggccatgaacgaaatgaatgacgagcttcaggagaacgcccgcgaaacggagttggaactgcgcgagcagttagatatggccggggcccgagtgcgtgaagcccagaagcgagttgaagccgcacaggaaacagtggccgactatcagcagactattaagaagtaccggcagttgacggcacatctgcaagatgtaaatcgtgagctcaccaatcagcaagaagcatccgtggagcgccagcagcagcccccccccgaaaccttcgacttcaaaatcaagtttgctgagacaaaagcacacgccaaggctattgaaatggaacttaggcaaatggaggtagctcaggcaaatcgtcatatgtccttacttaccgcctttatgcccgacagtttcctccggcccggcggggaccacgattgcgtgttagttctgctgctcatgcctcggctgatctgcaaagcagagcttatcaggaaacaggcacaggaaaagttcgagctaagtgaaaactgttctgagcggccaggcctgaggggcgcagccggggagcagctgagctttgccgctggacttgtgtactctctgtctctgcttcaagctacactgcacagatatgagcacgccctgtcacagtgctctgtcgatgtgtacaaaaaagtcggcagtttatatcccgaaatgtctgcccatgaacggtccttagactttctgatcgagctgctgcataaagaccaactggatgaaaccgtgaacgtggaacctctcactaaggccatcaaatactaccaacacctgtattccatccacctggcagagcaacccgaggactgcacgatgcagctcgccgaccatatcaaattcacacagagtgcgctagactgcatgtctgtggaggtgggtcgtcttcgggctttccttcagggcgggcaggaggccacggacatcgcactgttgctgcgggatcttgagacttcctgtagcgacattcgacaattctgcaaaaagattaggagaaggatgcctggaaccgacgctcccggtattcccgccgcactggccttcggcccgcaggtgtcagatactctcctggactgtcgtaagcatctgacctgggtggtggctgtgctgcaggaagtagccgctgctgcggcccagctgatcgcccccctagcagaaaatgaaggcctcttggtggcggctttagaagaactggccttcaaggcatcagagcaaatatatggcactcctagttccagcccctatgagtgtctccggcagtcttgcaatattcttataagcaccatgaataagctcgctaccgcaatgcaggagggcgaatacgatgccgaacggcctccttccaaaccgccaccggtggaactcagggcagccgcactgcgggccgagattacagatgcagagggattaggcctaaagcttgaagacagagagacggtcatcaaagaattaaaaaagtctctcaaaataaagggcgaggaattgagtgaggcgaacgtcaggctctcacttctggagaaaaagttggacagtgccgccaaggatgccgatgaaagaattgaaaaagtccagaccaggctagaggagacccaggcactactaagaaagaaagaaaaggaattcgaggaaactatggatgcactgcaggctgacattgaccaactggaggctgaaaaggccgagcttaagcagagactcaattctcaatccaagaggaccatcgaaggactccggggacctccaccttcaggtattgcaaccctcgtctctggcatcgccggcggcgcaattcctggacaggccccaggcagcgttccgggacccgggttagtaaaggactcacctttgctcctccaacagattagcgctatgaggctccatatctcgcaattacagcatgagaactcaattttgaaaggcgcccaaatgaaggctagcctcgcatcattacccccgcttcacgtcgcaaaactctctcacgagggcccgggctccgaactccctgcaggcgccctgtatcggaaaacgtcccaactgctcgaaaccttgaatcagctcagcacgcacactcacgtcgtcgacattacacgcacaagcccagccgcaaagagtccatccgcccagctaatggagcaggtggcccaactgaagagcctgtctgacaccgttgaaaagcttaaagatgaggttctcaaagagaccgtaagtcagcggccgggagcaaccgttccgaccgattttgctaccttccctagtagtgcgtttctccgcgctaaggaagagcagcaggacgacacagtctacatggggaaggtaactttcagctgcgccgcagggttcggacagaggcaccggctcgtcctgactcaggagcaactccatcagctgcattcccggctcatttcctag

SEQ ID NO: 115180 - DNA, 2673 bp, synthetic construct
  misc_feature 1..2673: note = Description of Artificial Sequence: Synthetic coding sequence
  source 1..2673: mol_type = other DNA
atgtctgctgaggctagcgctcggcccctcagggttggctcccgcgtggaggtcattgggaagggtcaccgtggaaccgtcgcttatgttggcgcaacactgtttgccactgggaaatgggtaggagtcattcttgatgaggcaaagggtaaaaatgacggaacagtccagggacggaagtattttacttgcgacgaaggacacggaatatttgtgcggcagtcccagatccaagtttttgaagacggggccgacacaacatctccagagactcccgattcatctgcaagtaaagtgttgaagcgggagggtaccgatacaactgcaaagacgagcaagctccctacccgcccagctagtacaggcgtcgcaggggcctcttcctctctgggaccctcaggctccgccagcgccggagaacttagctcctctgagcctagcacccctgctcagaccccccttgctgcccctatcattcctacacctgtgctcacctcacctggtgctgtgccgccgctgcccagcccttctaaggaagaggagggattgcgagctcaagtacgggatctggaggagaagctcgaaacccttcggctcaagagagcagaggacaaagctaagttgaaggaactggagaagcacaagattcagctggagcaggttcaagagtggaagtccaaaatgcaggagcagcaagcagacctgcagcggcggctgaaagaggctagaaaagaggccaaagaggccctcgaagctaaagaaaggtacatggaggaaatggccgatacagctgatgccatcgaaatggcgacactggataaggaaatggcagaagagagagcagagtcccttcaacaggaggtggaggctctcaaagaacgcgtcgatgagcttacaacggatctggaaatccttaaggcagagatcgaagagaaaggatccgacggcgccgcatcttcttaccaactaaaacaacttgaagagcagaacgctcgactcaaagatgctctcgtgcggatgcgagatctcagcagcagcgagaaacaagaacacgtgaagctacaaaagttaatggaaaaaaagaaccaagagctggaggtcgtcaggcagcagcgtgaaaggctccaggaagagctgagccaagccgaatctactatagatgagttgaaagagcaggtcgacgccgccctgggtgcagaagaaatggttgaaatgctgacggataggaatctgaatttggaggaaaaagtgcgagaattgagagaaacagttggggacctagaggccatgaacgaaatgaatgacgaactgcaggagaacgcgcgagaaacggagcttgaacttagagagcagctggacatggccggtgctagggtccgggaggctcagaagagagttgaggccgcccaggagacagtggccgactatcagcaaaccatcaagaaatacagacagctcacagctcacctgcaggacgtgaatcgcgagctgaccaatcagcaagaagcttctgttgaaagacagcagcagccaccacccgaaacctttgactttaaaatcaaattcgccgaaaccaaggctcacgctaaggccatcgagatggaactgcgccagatggaggtcgcacaagccaataggcatatgtccttgctgactgcattcatgcccgacagctttcttagaccaggaggcgaccacgattgcgttttagttcttcttctgatgcccagactaatttgtaaggctgagctgatccggaaacaggcccaggagaagtttgaactgtctgaaaactgcagtgaacgaccgggcctgaggggtgccgccggcgagcagctgtctttcgcagccggccttgtatactccctctccctcctacaggccacactgcaccgatatgagcacgccctgagccaatgttcagtggatgtatataagaaggtaggaagtctgtaccccgagatgagtgctcatgaaaggtctctcgatttcctcatagaattgctccacaaagaccagttggatgaaaccgtgaacgtggaaccactgactaaagctataaaatattatcaacacctgtactccattcacctcgcggagcaacccgaggactgtaccatgcagctggctgaccacattaaatttacgcaatccgcattagactgtatgagcgtggaggtaggacggctgcgggcttttttacagggcggtcaagaagctaccgacattgcactgctgttaagggatctagaaacatcatgttctgacatcagacagttctgtaagaagattcgacgccgcatgccaggaacagatgcccccggcattcccgcagctctcgcctttggtccccaagtgagcgacacgctcttggattgccgaaaacaccttacatgggtagtggccgtcctgcaggaagtggccgcagcggctgcgcaattgatagcgcccttagccgagaatgaaggccttctggtggctgccctggaggaacttgcctttaaggccagtgagcaggtcgggcttgacggctgggtcgaaggtgtgggacgagtcagcgaccaatgcggagccttcacatctgccctcggctcatgcaggagtatgggcccccccccggccgccccaatgagtgtgtgcgcatctcatgcaacttccagctctgtgccttag

SEQ ID NO: 115181 - DNA, 561 bp, synthetic construct
  misc_feature 1..561: note = Description of Artificial Sequence: Synthetic coding sequence
  source 1..561: mol_type = other DNA
atgctgatgggactcttacgaccctacatcttaggagaacgaggaactgtcatgaccccgagcggatcccgcatgtcggcagaggcctccgcacggccattgagagtgggtagccgcgtggaagtgatcgggaaggggcaccgcggaaccgtcgcatacgtgggggccacactgtttgccacagggaaatgggtgggcgtcattttagacgaagccaaaggaaagaacgacggcactgtccaggggcggaagtactttacgtgcgacgaggggcatggcatttttgtgcgccaatcacaaattcaggtgttcgaggatggagccgatactacctcaccagagacgcctgatagcagcgcctctaaagtgttgaagcgcgaaggcacagatactaccgccaagacgtccaagctaagaggcctcaaaccgaagaaagctcctactgctaggaagactaccactcgacgccccaagcctacccggccagcgtcaactggcgtggccggggcctcttcaagccttggaccatctggctccgcatcagctggcgaactgagctag

SEQ ID NO: 115182 - DNA, 3711 bp, synthetic construct
  misc_feature 1..3711: note = Description of Artificial Sequence: Synthetic coding sequence
  source 1..3711: mol_type = other DNA
atgagcgcggaggcaagcgcaagacccctccgggttggctctcgagtagaggtgatcggcaaaggccatcgaggcactgttgcttatgtcggcgccaccctgttcgctaccgggaaatgggtcggtgtgatactcgatgaagcaaaagggaagaatgatggaacagttcaggggcgaaagtattttacgtgtgatgagggccacggaattttcgtgagacagagccagattcaggtctttgaggatggtgccgacaccacgagccctgagacccctgattcgtctgccagcaaagtgctaaagagagagggcacagataccaccgcaaaaacctccaaacttcctactcggcccgcctccacaggcgtggctggcgcctcgagcagcctggggccttccggctctgcatctgcaggagaactatcttcaagcgaaccatcgactccggcccaaaccccactggccgcacccatcattccgactccagttttgactagtcctggtgctgttccccccctgccttcacctagtaaagaagaggagggactaagggctcaggtgcgggatctcgaagagaagctggagactttgcgattaaagcgggcggaggataaggccaaattgaaagagctggaaaagcacaagatccagttggagcaggttcaagaatggaaatccaaaatgcaagagcagcaggcggacctgcaaaggagactaaaagaggctcgcaaagaagcaaaggaagccctggaggccaaggaacggtatatggaggagatggctgacactgccgatgccatcgagatggccacactcgataaggagatggcagaggagagagccgaatctctccagcaggaggtggaggctcttaaggaaagagtagacgagttgaccaccgatctggaaattcttaaagcagaaatagaagagaagggatcagatggagccgctagtagctaccaactgaaacagttagaggagcagaatgctcgcctgaaggacgcactcgtgaggatgcgggatctctcatcatcggagaagcaagaacacgtgaaactccagaagctgatggagaagaagaaccaggaacttgaagtggttagacagcagagggaaagactgcaggaggagcttagccaggcagagtcgacaattgacgagctcaaagagcaggttgacgccgcacttggtgccgaggagatggtcgagatgttaacagatcggaatctgaatctcgaggagaaagtgagagagctccgcgaaaccgttggggacttggaagctatgaatgaaatgaacgatgaactacaggaaaacgcccgcgagacagagctcgagttgcgtgaacagctcgacatggccggggctcgagttagggaggcacagaagagggtcgaggcagcgcaggaaacagtcgcggactaccagcagaccataaagaaataccgacagctcacagctcacctgcaggacgtcaacagggaactcaccaatcagcaggaggcctctgttgaaaggcagcagcagccgcccccagagactttcgatttcaagatcaaatttgcggaaacgaaagcccatgcaaaggccattgagatggaattacgacagatggaagtggcacaggccaaccgccatatgtctctactgactgccttcatgcctgactctttcctgagacccggaggggaccacgactgtgtactggtcttactccttatgccacggctaatttgtaaggccgaactcatccgaaaacaggctcaggagaagttcgagctgagcgaaaattgttctgagcgcccaggactgcgtggcgcggcaggggaacagctgtcattcgccgccgggcttgtgtacagcctttcactgttgcaagccaccctgcatcgctacgaacacgccctctcacagtgttccgtggacgtttataagaaggttggcagtctgtatcctgagatgagtgcgcatgagcgctccttggatttcctgatcgagctattgcacaaagaccagttggacgagaccgtcaatgtcgagcccctgactaaagctattaagtattaccagcacctgtacagtatccacctcgctgaacagccagaggactgtacgatgcagcttgccgaccacattaaattcactcagagcgccctggattgcatgtccgttgaagtcggtcgcctgcgggccttcctgcaggggggtcaggaagccacggacatcgccctcctgttgagggacctggagacctcctgctcagatatccgccagttttgcaaaaagattcgccggcgaatgccaggcacggacgcccctggcatccccgccgcactggctttcgggccgcaggtaagtgacaccctgttagattgtaggaaacatcttacatgggtggtcgcagttttacaagaagttgcggctgccgctgcccagctgatcgccccgcttgctgaaaatgaagggttactggtggctgccctagaagaactagcattcaaagccagcgaacagatctacgggacacctagctcttccccttatgagtgtctgcgacagtcttgcaacatcctgattagcaccatgaataagctcgctaccgccatgcaggagggggaatacgatgcggaaagacccccctcaaagccaccacctgttgagctgcgtgctgccgctctccgcgctgagatcacagatgccgaaggcctcggcctgaagcttgaagatcgggagactgtgatcaaagaattgaagaagtctttgaagatcaagggcgaagaactaagcgaggctaacgtgcggctgtcactgctcgaaaagaaactagattccgccgctaaggacgcagatgaacgtatcgagaaggtgcagactcgcttggaagagacacaggctctcttgcgcaagaaggagaaggaatttgaggaaacaatggatgccctgcaagcggacattgatcagctagaagcagaaaaggccgaacttaagcagcgcctaaactctcaaagcaagagaacaatcgagggactcagaggacctccaccgagtgggatagcaacccttgtgtctgggatcgccggcggcgcaatccccggccaagctccaggatccgtgcctggtcccggtctggtgaaagactcaccccttctactacagcagatcagcgctatgcgtttgcacatttcccaattgcagcacgaaaactcaatcctgaagggggcacaaatgaaagctagtctagctagcctgcctccactccatgtagctaagctttcacacgagggcccgggctcagagttgcccgccggcgccctgtaccggaagactagccaactcctcgaaaccttaaaccagctgtccacccatacccacgtggtggatataaccaggactagtcccgccgcaaagtcaccatctgcacagctgatggaacaggtggcacaattaaagtctctttcggatacggtcgagaagctcaaggatgaagttttaaaggagacagtgagtcagcgaccaggagctacagtgcccacagattttgccactttcccttcttcagcatttctccgcgctaaggaggaacagcaagacgatacagtgtatatgggtaaagtgacgttctcgtgcgcggctggcttcggccaacgccatagactggtcctgacacaggaacagttgcaccagttgcatagcagactcataagctag

SEQ ID NO: 115183 - DNA, 3420 bp, synthetic construct
  misc_feature 1..3420: note = Description of Artificial Sequence: Synthetic coding sequence
  source 1..3420: mol_type = other DNA
atgatgaggcaggcacccactgcacgtaagacgaccaccagaaggccaaagccgacacgacccgccagcactggggtcgctggggcgtcttcatcactcggtcccagcggatctgcaagtgcaggagaactttcctcctccgagccttctacaccagcacagactccgctggcagcgccaattattccaactcctgtgctgacgtctcccggcgcagtgcccccgttacctagtcccagtaaagaggaagaggggctgcgagctcaggtcagagacctggaagaaaagctcgaaacgctcaggctgaagcgtgcggaagacaaagctaaactcaaggagctcgaaaagcacaaaatacagctcgaacaggtacaggaatggaagtccaagatgcaggagcagcaggctgacctccagcgaaggctgaaggaagcccgaaaggaagcaaaggaagccctcgaggctaaggaacgctatatggaggaaatggctgatacagcagatgcaatcgagatggccactctggacaaggagatggccgaggaacgtgcggaaagcctacagcaagaggtggaggcacttaaggaacgggtggacgaattgaccacagatttagaaattttaaaagccgagatagaagagaaaggctcagacggtgccgctagtagctatcagcttaagcagctggaggagcagaatgctagactcaaagacgctctggtgagaatgcgggatctcagctcttcagaaaaacaggagcatgtgaaattgcagaaactgatggagaagaagaaccaggagctcgaggtggttcgccagcagagggaacggcttcaggaggaactatcccaggccgagtcaaccatagacgagctgaaagagcaggtcgacgccgcacttggtgctgaggaaatggtggaaatgttaactgatcgcaatctgaatttagaggaaaaagttagagagcttagagagactgtcggggatctcgaagccatgaacgagatgaacgacgaactacaggagaatgcccgagaaactgagctggaactcagagaacagctggatatggccggtgcccgagtcagggaggcacaaaagcgcgtcgaggctgcccaggaaactgtcgccgactatcagcagacaatcaaaaagtacagacaattgactgcacacctgcaggatgttaatcgtgaactaacaaatcaacaggaggcaagtgtcgaaagacagcagcagccacctccagagactttcgatttcaaaattaaatttgccgaaaccaaggctcacgctaaagccatcgaaatggagctgcgtcagatggaggtagctcaggccaatcggcacatgagtctgctcacggcctttatgccagactccttcctccgccctggaggggatcacgattgtgttttggtactcttgctcatgccaagattgatttgtaaggccgagttaataagaaaacaagctcaggagaaatttgaactgtccgaaaactgcagcgagaggcccggcctgcgcggcgccgccggcgaacagctttcgtttgctgcaggccttgtgtacagtctctctctgctgcaggcaacattgcacaggtatgagcacgcactgagtcagtgctcagtcgacgtttacaaaaaagtgggtagcttgtatccggaaatgagcgctcacgaacgcagtcttgacttcctgatagaactgctgcataaagatcagctggacgaaacagttaacgtcgaaccactaactaaggctatcaagtactaccaacatttgtactccatacacctggccgaacagcccgaagactgcacgatgcagcttgccgaccatatcaagttcacgcaatctgccttagactgtatgagcgtggaggttgggaggcttagggccttcctgcaggggggtcaggaagcgacagacattgcactgctcctgcgggatctcgagacttcatgtagcgatatccgccagttttgtaagaaaattagacgtagaatgcccggcaccgatgctcccggcattccagctgcattggctttcggaccgcaggtgtcagatacactgctggactgccgaaagcatctaacttgggtagtggccgtgctgcaggaagtggccgctgccgcggcccaactgatcgcccccttagccgagaacgagggcctgctagtcgccgcccttgaggagctcgcctttaaagcttcagagcaaatatacggcacacccagctcttcaccttacgagtgcttgaggcagtcctgcaatattcttatctcaaccatgaacaaattagccacagctatgcaagaaggagaatatgatgctgaacgccctccaagtaagcctcccccagtcgagctaagggcagcggcactacgtgcagaaataacagacgctgagggtctcgggctaaaattggaagaccgcgaaaccgtcatcaaggaattgaagaagtcattaaagatcaaaggagaagagctctcagaagccaacgtgagactgtctctcctcgaaaaaaaattagactccgccgctaaagacgccgatgagcggatcgagaaagtacaaactaggctggaggaaactcaggccttgcttagaaagaaagagaaggagttcgaagaaactatggatgcccttcaggctgatatagaccagcttgaggccgaaaaagctgagctaaagcaacgcctgaacagccaaagcaagcgaacaattgagggtctgcggggtcccccacctagcggaatcgccacgttggtgagcggaatcgccggtggtgcaatccccgggcaggctccaggctccgtgcccggccccggactggtgaaggactcacccttactgctgcagcagattagtgccatgcgactgcacatttcacagctgcagcacgagaatagcattctgaaaggagctcaaatgaaagcctccttggcttcgctgcccccactacatgttgcgaagctgagccacgaggggcctggaagcgaattgccagccggtgcactttacagaaaaaccagccagctattagagaccttaaaccagctgtccacccacactcatgtggtggatataactcgcacaagtcccgcagctaaatctcctagcgcacagttaatggagcaagtggcacagctaaaaagtctgagcgatacagtggaaaagttgaaagatgaggtactgaaagagacagtttctcagcggcctggcgcaactgtgccaacagattttgccacgttcccgagcagtgccttcctgagggcaaaggaagagcagcaggatgacaccgtatatatggggaaagtgaccttctcatgtgccgcaggattcggccaacgccaccgcttggtgctgactcaagagcagttgcatcagctccattcccggctaatctcatag

SEQ ID NO: 115184 - DNA, 3762 bp, synthetic construct
  misc_feature 1..3762: note = Description of Artificial Sequence: Synthetic coding sequence
  source 1..3762: mol_type = other DNA
atggctcagtctaagcgccacgtgtactctcgcacaccctctggctcacgcatgtctgccgaagcctccgctaggcccctgagggtgggtagtagagtggaggtgatcggaaaggggcatcgtggcaccgtcgcttatgtcggggccacgctgttcgccaccgggaaatgggtgggtgtgatccttgatgaggctaagggcaagaacgatggtacagttcaaggacggaagtatttcacctgcgatgagggccacggtattttcgtgaggcagtcacaaattcaagtctttgaagatggcgccgacaccaccagcccggaaacaccggacagctctgcgagcaaggtcctgaaacgagagggaacggatactactgcaaagacttccaaactgcccacccgacctgctagtaccggagtcgctggagcttccagtagcttggggccctctgggagtgcatcagccggggagctcagttctagcgaaccctcgacccccgcacaaaccccacttgccgcgccaatcattcctacaccggtgttgacaagtcccggcgcggtgccaccgctcccttccccttcgaaggaagaggaaggcttgcgcgcccaggtaagagacctcgaggagaagctggagaccttgcgactgaaacgggcagaagacaaggctaaacttaaagaattggaaaagcacaagatccaattggaacaggtccaggagtggaaaagcaagatgcaggaacaacaggcagatctgcaaaggcggctgaaagaagcacggaaggaagctaaggaggcgctggaggctaaagagaggtatatggaagagatggcggacaccgcggatgcaatcgagatggctacattggataaggagatggcagaggaacgggctgagtcactgcagcaggaggtcgaggccctaaaggaacgggtcgacgagctcaccacagacctcgagattctaaaggcagagatagaagagaaagggagtgatggcgccgcatcaagctaccagttaaagcaattagaagagcagaacgcacgcttgaaggacgcgcttgttaggatgagagacctgagtagctcagagaagcaggaacacgttaaattgcaaaagctcatggaaaagaaaaatcaggagctcgaggttgtccgccagcagagggagaggcttcaggaagagctcagccaggctgagagtacaatagatgagctgaaggagcaggtggatgcagcacttggggcagaggagatggtcgaaatgctcaccgatcggaatctgaacctggaggagaaggtgagggaactgagagaaactgtcggcgacctcgaggcaatgaacgagatgaacgatgagttacaggagaacgctagggagacagagctcgaactacgagagcaattagacatggcgggggcccgagttagggaggctcagaagagggtggaggcagcccaggaaacagtagccgattatcaacagaccatcaaaaagtatcgacagttgaccgcacatcttcaggatgtcaacagagagcttactaatcagcaggaagcttcagtggaaaggcaacagcagccaccccccgagacattcgattttaagattaagtttgccgaaacaaaggcccatgctaaggccatcgaaatggagcttcggcagatggaggtcgctcaagctaataggcacatgagcctgctgaccgccttcatgccagacagctttctacgccccggcggagaccacgactgtgttctggtactgttacttatgcctcgcttaatttgtaaagctgaactgataagaaagcaggcccaggagaaatttgagctcagcgagaattgcagcgaaaggcccggcctaagaggagcagcaggcgaacagttgagttttgctgccgggcttgtgtattctctatcgctcctccaggccaccttgcaccgttacgagcatgcactgagtcagtgttccgtggacgtgtacaaaaaggttgggtccctgtacccggagatgtcggcacacgagcgaagtctggactttttaattgagttgctgcacaaagatcagctagacgaaaccgttaatgtggaaccattgacaaaagcgatcaagtactatcaacacctttattcgattcacctcgcggagcagccagaagactgtacaatgcaattggccgatcacattaaatttacccaatctgctctggactgcatgtcagttgaggtaggcagattacgggccttcctccagggaggccaggaggctaccgacatagccctcttgttacgggatctggagaccagctgttccgacataagacaattttgtaagaagataagacgcaggatgcccggcaccgacgcccccggtatccctgccgctctggcgtttggtcctcaggtcagcgacactctgctcgattgcagaaagcaccttacatgggtggtcgccgtgctacaggaggtggcagccgcagccgctcaactcattgccccgttggccgaaaatgagggcttgctcgtggcggccctcgaggaattggccttcaaagcctcggaacagatatatggaacgccaagcagctccccctatgaatgccttcgccagtcctgtaatattctgattagcacaatgaataaattagctaccgctatgcaggagggtgagtacgatgcagaacgcccccctagcaaacctccgcccgttgaattgcgtgctgctgcacttagagccgagattaccgatgccgaagggttggggctgaagctcgaagatcgagagactgtgattaaggagctgaaaaaatcactgaagatcaaaggggaggagctgtccgaggccaatgtgcgattgagtctgctagaaaaaaagctggacagcgccgccaaagacgcagatgaaaggattgagaaagtgcaaacgagactggaggagacgcaagccctgcttcgtaagaaagagaaggaattcgaggagaccatggacgcactacaggccgacattgaccaattagaggcagaaaaagccgagcttaagcaaagactcaattcccaaagtaagcgcactatcgaagggctgcgaggacccccaccttcaggaatcgcgaccctggtgagtggtatcgcaggaggggctatccctggccaggcgcctggctccgtccccggtccaggccttgttaaggatagtccattgctccttcagcagatatccgccatgagattacacattagtcaactccagcacgaaaactcgatcctcaaaggagcccagatgaaagcatcactggccagtcttccacctctgcacgtggccaaactgagccacgagggacccggaagcgagttgccagctggtgcactctacaggaagacttcacagctactcgagactcttaaccaactctcaacccatacgcacgtggtggacattacccgcaccagtccggccgccaaatcccctagcgcccagttgatggagcaggtagcgcagctcaaatcactctcagacaccgtcgagaagctcaaagatgaagtgttaaaggagaccgtgtctcagcgcccgggtgccacagtcccgacagactttgccaccttccctagcagtgcgtttctcagagccaaggaggagcagcaggacgatactgtgtacatgggtaaagtaaccttctcctgcgctgccggttttgggcagagacatcggcttgtactgacccaggagcagctgcaccagctgcattcgcggttaatcagctag

SEQ ID NO: 115185 - DNA, 1221 bp, synthetic construct
  misc_feature 1..1221: note = Description of Artificial Sequence: Synthetic coding sequence
  source 1..1221: mol_type = other DNA
atggccgatccaaaatacgccgaccttcctgggattgccaggaacgagcccgatgtttacgagaccagtgatttaccggaggacgaccaggccgaattcgacgctttcgctcaggaactggaggaactgacttccacgtccgtggaacacattatcgtgaatcccaatgccgcatacgataaatttaaggacaaacgcgtcggcacgaaggggctcgatttctccgaccgaatcggtaaaaccaaaaggaccggttacgagtctggtgagtatgaaatgttgggcgaagggttaggcgtgaaggagactccacagcaaaagtatcaacggctgctgcacgaagtgcaggaactgactactgaggtcgagaaaatcaagactaccgttaaagagtctgccaccgaggaaaaactgacacctgtccttctagccaaacagctcgctgcattgaagcagcagctcgtcgcttctcatcttgagaagttgctggggccggatgctgccatcaatttgaccgatcccgacggcgctctggctaagagactgttactgcagctggaagccaccaaaaacagcaaaggcggctcaggcggaaaaaccactggcacgccacccgattctagcctcgtgacatacgagttgcactcccgaccagaacaggacaagttctcacaggctgcgaaagtggccgagttggagaagcgcttaactgagctggagaccgccgtgaggtgtgatcaagatgcgcaaaatcccctgtcggcaggtctccagggcgcttgcctgatggaaactgtggagctgctgcaagctaaggtttccgccctggacttggctgtgctagaccaggtcgaggcccgattgcagagcgtgctgggcaaggtgaatgaaattgccaaacacaaagcatcagtcgaggatgccgacacccagtccaaagtgcaccagctgtatgagaccattcagcggtggtctccaatcgcatccaccttacccgagcttgtccagagactagtgaccataaagcagctgcacgaacaggctatgcaattcggtcagctgttaacacatctggacaccactcaacagatgatcgctaactctttgaaagataacaccacattactgacccaagttcagacaacaatgcgcgaaaatttggccaccgtcgaaggcaattttgcgagtatcgacgaaagaatgaagaagctgggaaaatag

SEQ ID NO: 115186 - DNA, 1137 bp, synthetic construct
  misc_feature 1..1137: note = Description of Artificial Sequence: Synthetic coding sequence
  source 1..1137: mol_type = other DNA
atgtacgctcagggaaccgaagacagccggacgctcgaggaattaacctcaacatccgtggagcacataattgtgaatccaaacgcagcctatgacaagtttaaagataaaagagtgggcacaaagggcctagattttagcgaccgcatcggaaagaccaaacggaccggctatgaatccggagagtacgagatgctcggggagggtctgggggtgaaagaaacaccacagcagaagtatcagcggctccttcacgaagtgcaggaactcactaccgaggttgaaaaaatcaaaacaacagtgaaggaatccgcgaccgaagaaaaacttacccctgtgcttctggcaaaacagctagccgctctgaaacagcagctggttgcatctcacctcgaaaaattgctcggacccgatgccgcaataaatctgacagacccagacggtgctttggcaaagaggctgctcctccagctggaggcaaccaagaactccaaagggggtagcggcggcaaaacaacagggacaccaccagacagctccctggtcacttacgaattacactctaggcccgagcaggacaagttttcacaagccgcaaaagtggctgagctggagaagcggctgacggaattagaaactgcagtgagatgcgaccaggatgcccagaatcccctgtccgccggccttcaaggggcctgtctgatggagactgtggagttgctacaggcaaaagtgagcgccctggatttggcagtactggaccaggtggaggcccgcttacagtcagttcttggaaaagtgaacgaaatagctaaacacaaggcctcagttgaagacgccgatacacaaagtaaggttcaccaactttacgaaactatccagcgatggtccccaattgcctccaccctgccagagctggtacaaaggctggtgactattaagcaactccatgaacaagctatgcagtttggacagttattgacccatctcgacacgacacagcagatgattgccaactcactgaaggataataccactcttctgactcaagtacagacaacgatgagagaaaacctcgctacagtcgagggcaacttcgcctcgattgacgagaggatgaagaaattggggaagtag

SEQ ID NO: 115187 - DNA, 945 bp, synthetic construct
  misc_feature 1..945: note = Description of Artificial Sequence: Synthetic coding sequence
  source 1..945: mol_type = other DNA
atgctcggggagggcctgggagtgaaggaaacaccccagcagaaatatcaacggttgctgcacgaagtgcaagagctcacaaccgaagtggaaaaaatcaaaactaccgtgaaggagtccgccactgaggaaaagctgacaccagttctcctcgccaaacagctcgccgcattaaagcaacaactggtggcctctcacctggaaaagcttctcggccctgacgcggccattaatctgaccgatcccgatggcgctctggctaagcgcttactgttacagctggaggccactaaaaactcaaagggtggaagcggcggaaaaaccactggtaccccccctgatagcagtctcgtgacatacgaattgcatagcaggcctgagcaggataagttctcccaggccgccaaggtggctgaattagaaaaaagactgaccgagcttgagaccgccgtccgctgcgatcaggatgcgcagaaccccctctccgctggactccagggagcgtgtcttatggaaacagtcgagctcctccaggccaaggtgtcagccctggatctggccgttttggatcaggtagaggctcgactccagagcgtgctcggcaaggtaaacgagatcgccaaacacaaggcttctgttgaggatgcagatacccaatcaaaagtacatcagttatatgagacaatccagaggtggagtccgattgcttcaacactccctgagttagtccaacgcctggtgaccattaaacagctccacgagcaggccatgcagtttggccagctgctgactcatctggacacgacccagcagatgatcgcgaattccctcaaagacaatacgaccctcctgacacaggtgcaaaccacgatgcgtgagaacctcgcaacagtcgagggaaacttcgcatctattgatgaaagaatgaagaaacttggaaaatag

SEQ ID NO: 115188 - DNA, 1221 bp, synthetic construct
  misc_feature 1..1221: note = Description of Artificial Sequence: Synthetic coding sequence
  source 1..1221: mol_type = other DNA
atggccgaccccaagtacgctgacttgccaggcatcgcacgcaacgaacctgatgtgtatgagacttccgatctcccggaggacgaccaggccgagttcgacgcgaccgtgcaacatttggaagagctgactagtactagtgttgaacacattattgtgaaccccaacgcggcgtacgacaagtttaaagacaaacgggttggcactaaaggtcttgacttttccgacaggattggtaagacaaagaggacggggtacgagagcggggaatacgagatgcttggcgagggcctgggagtgaaagaaaccccccagcaaaagtaccagcggcttctgcacgaggtgcaggaactgaccacagaggtggaaaagatcaagacaacggtcaaggagagcgcaacggaggagaaattgactccagtgctgcttgccaaacagctggccgccctgaagcagcaattggtggctagccacttagagaagttgttggggcctgatgccgccatcaacctgaccgatcctgacggggccctggccaagagactactgttgcagctcgaagccactaaaaattccaagggagggtcaggcggaaaaactaccggtacgccgcccgatagcagtttggtcacctacgagctgcacagcagaccagaacaagacaagttctctcaggcagctaaagtcgcggaactggaaaagcgccttacagagctggagactgcagtgcggtgtgaccaggacgcacagaaccctctgagtgcagggctccagggggcgtgtttgatggagacagtagaactgctccaagcaaaggtttctgcccttgatctcgctgtccttgaccaggtcgaggcgaggctgcagagcgtgctggggaaggtgaatgagatagcaaaacataaggcttccgtggaagacgcagatactcagtctaaggtgcatcagctgtatgaaacaatccagaggtggtctccaatagcgagcacccttcctgaattagtccagcgcttggtgaccattaagcagttgcacgagcaggcgatgcaattcggccagctactcacgcatctggacaccacccagcagatgatcgcgaattcccttaaagacaatacaaccttgctgacacaggtccagaccacaatgagggagaacctggcaactgtcgaaggtaacttcgcttcaattgatgagcgcatgaagaagttgggaaaatag

SEQ ID NO: 115189 - DNA, 1206 bp, synthetic construct
  misc_feature 1..1206: note = Description of Artificial Sequence: Synthetic coding sequence
  source 1..1206: mol_type = other DNA
atggcagaccctaagtatgccgatttgcccggcatagcacggaacgagcccgacgtatacgaaacatctgacctgcccgaggacgaccaggcagagtttgacgctgaggagctgacttccacctctgtggagcacatcatcgtgaatccaaatgccgcgtacgacaagttcaaagacaagcgggtcggaacgaagggactggacttctctgaccggattggcaagactaagagaacagggtacgagagcggtgagtacgaaatgctcggcgagggtcttggtgtcaaggaaacgccacagcagaagtaccagcggctgcttcatgaagtgcaggaactgaccaccgaggtcgagaaaatcaagacaaccgtgaaggaaagtgcaacagaggagaaattaactcctgtgttgcttgcaaaacagctcgcagcattaaagcagcagttagtcgcatctcacctcgagaagctcctgggccctgatgctgcaattaacctgactgaccccgacggcgctttggcgaagcggctccttctgcagctcgaagcaaccaagaactccaaagggggcagtggaggaaagacaactgggactccccccgacagttcactcgttacatatgagctgcattctagaccggagcaagacaagttttctcaggctgccaaagtggcagagctcgaaaagcgccttacggagctggagactgccgttcgttgtgatcaagatgcgcagaacccactttctgccggtctgcagggagcttgtttgatggaaaccgtcgagctccttcaagctaaggtctcagctctggatcttgctgtgctggaccaggtggaggccaggctgcagtctgttctcggcaaggtgaacgagatcgccaaacataaagccagtgttgaagacgcggacactcagtctaaggtgcatcaactctatgaaacaatccagaggtggtctccaattgcaagtacactccccgagctggtgcagcgtctcgtgacaattaagcagctgcacgaacaggccatgcaattcgggcagctccttacccacctggatacgacacagcaaatgattgccaatagcttgaaggataatacaacactgctaacccaagtgcaaacaactatgcgcgaaaacttggccacagtcgaggggaactttgcctcaatagatgagagaatgaaaaagttgggcaagtag

SEQ ID NO: 115190 - DNA, 561 bp, synthetic construct
  misc_feature 1..561: note = Description of Artificial Sequence: Synthetic coding sequence
  source 1..561: mol_type = other DNA
atggcgggcctgacagacctccaacgtctgcaggctcgtgtggaggaactggagcgctgggtgtatggccccggaggagctcgcggatcccgcaaggtggccgacgggctagtcaaagtccaggtcgcccttggaaatatttcctccaaaagggagagggtgaagattctttataagaagatcgaagatcttattaagtatctcgacccagaatatattgatcgaatcgccattccagacgcttctaaattacagtttatcctagcggaggaacagtttattctgtcccaagtggctttactggaacaggtgaacgcgttggtgcccatgctggactccgcccatatcaaagctgtaccagagcatgcggcaaggctgcagcgcctggcccagatccacatccaacagcaagatcagtgtgtcgaaatcacagaggaatctaaagctctgctggaagagtataacaaaacaaccatgctgctgtccaagcagttcgtgcagtgggatgaactcctttgccagctcgaagcagcaacccaagtcaaacccgcagaagagtag

SEQ ID NO: 115191 - DNA, 531 bp, synthetic construct
  misc_feature 1..531: note = Description of Artificial Sequence: Synthetic coding sequence
  source 1..531: mol_type = other DNA
atggctggcctgacagacttgcagaggctgcaggcacgagttgaggaactcgagagatgggtgtacggccccggtggcgccagggggtcgaggaaagtggcagacggcctggtaaaggtccaggtggctctaggtaatatatcatctaaacgcgagcgagtgaagatcctctacaaaaaaatcgaagatctcatcaagtacctggatccggagtacattgacaggatcgctatcccggatgctagtaagctgcaattcattctggcagaggagcagtttattctgtcccaggttgccttgttggaacaagttaatgcattggtacccatgctcgactccgctcacattaaggccgttcccgaacatgctgcaagattgcagcggctggcgcagatacacatccagcagcaggcgccatggggcgtgggagtacgagacgaagccggcagcctggtggaagacgtgggtttcgcccagtttctgtcagtactgcactttgggcccacaggccctgtctgtggcaatcactag

SEQ ID NO: 115192 - DNA, 486 bp, synthetic construct
  misc_feature 1..486: note = Description of Artificial Sequence: Synthetic coding sequence
  source 1..486: mol_type = other DNA
atggccggactcacggacctccagaggctgcaggctcgtgtagaagaactggaaagatgggtgtacggcccaggcggcgcccgcggtagcaggaaggtggctgatggtctcgtgaaagtgcaagtggctctaggcaatattagcagcaagcgtgagagagtgaaaatattatacaagaagattgaggatctcatcaaatatcttgatcctgagtacattgatcgtattgctattccagacgctagcaaactccagttcattttggccggaaacgcagggctgcacgtctatatgcatctccggatgtgggtggtcggcgaagtcaagcaccgggatggtctgagcatccagtcttcaggcggatacaaaccctggatgttgctgagtggtattgtggcttggttttgggtggaggatcctatggacccactcgtggatattgagtactctatcccattacatcaactccaggcaatggtcccatag

SEQ ID NO: 115193 - DNA, 315 bp, synthetic construct
  misc_feature 1..315: note = Description of Artificial Sequence: Synthetic coding sequence
  source 1..315: mol_type = other DNA
atggccggtctgacagatctccagaggttgcaggctagagtggaagaactggaacgctgggtgtacggacctggaggggccagagggtctcggaaagtggctgatggactcgtcaaggtacaggtggcgctaggcaatatcagttccaaaagagagagagtgaagatcctttacaagaaaatcgaagatctgattaaatacctggaccccgaatacattgacaggattgctatccccgacgccagcaaactgcaattcatcctagccgaaaggagctccctaagtttcccacgcctacactcgtggagcagatag

SEQ ID NO: 115194 - DNA, 477 bp, synthetic construct
  misc_feature 1..477: note = Description of Artificial Sequence: Synthetic coding sequence
  source 1..477: mol_type = other DNA
atggccggactaactgatctccaaaggctgcaagcacgagtggaggagctcgagcgctgggtgtatgggccggggggcgcccgaggctcccggaaagtggctgacggtctcgtgaaagtgcaggtcgctcttggtaatatatcaagtaaacgcgagagagtgaaaatcctgtataagaagatcgaggatctgataaaataccttgacccagaatatatagaccggatcgccattccagatgcaagcaaactccagtttatcctcgcagctgtaccagaacacgctgcccgacttcaacgcctggcacagatccatatccagcaacaggatcagtgtgtcgaaattactgaagagtccaaagctctcttggaggaatacaacaagactaccatgttactctccaagcagtttgtccagtgggatgagctgctctgtcagttagaggcagccacccaggtgaaacccgcagaagagtag

SEQ ID NO: 115195 - DNA, 456 bp, synthetic construct
  misc_feature 1..456: note = Description of Artificial Sequence: Synthetic coding sequence
  source 1..456: mol_type = other DNA
cagcggttacaagctagggtagaggaactggaacgatgggtgtatggtccgggtggcgcgagggggtcacgcaaagtcgcggacggtctagtgaaagtgcaggtagcgctggggaacattagctctaaacgcgaacgcgtcaaaatactgtataaaaagattgaagacctgattaaatacctcgaccccgaatacatagatcggatcgcgatcccagatgcctccaaacttcagtttatcctggcggctgtacccgaacatgcggcaaggttgcagagactagcccaaattcacattcaacaacaggaccagtgtgtggagatcaccgaagaaagcaaagccctgttagaggaatacaacaagacaactatgctactgagcaagcaatttgtccagtgggacgaactgttgtgtcagctcgaggccgccacccaggttaagccagccgaggaatag

SEQ ID NO: 115196 - DNA, 519 bp, synthetic construct
  misc_feature 1..519: note = Description of Artificial Sequence: Synthetic coding sequence
  source 1..519: mol_type = other DNA
atggctgggctgactgacctgcagaggcttcaggctagagttgaggaactagaaaggtgggtgtatggtcccggaggcgctagggggtctcgtaaagtggcagacggccttgtgaaagtgcaggttgccctggggaacatcagcagcaagcgtgagcgcgtgaaaattctctataaaaaaatcgaggacctcattaaatacctggatccagagtacatagacagaatcgccattccagacgcctctaaattgcagtttattctggccggcaacgctgggcttcatgtttacatgcatctgaggatgtgggtagtgggggaagttaagcacagagacggcctgtctatccaatcctccgggggatataagccgtggatgctcctgagtggaatagttgcatggttctgggtagaggacccaatggatcctctggtggatatcgaatactccattccattgcatcaactgcaggccatggtccctgctactgtcggggcgagccctgtattctaccagtag

SEQ ID NO: 115197 - DNA, 549 bp, synthetic construct
  misc_feature 1..549: note = Description of Artificial Sequence: Synthetic coding sequence
  source 1..549: mol_type = other DNA
atggagctgggcgagctgctttacaataaatccgagtacatcgagacagcctccggcaataaggtctctaggcaatctgtgttgtgcggctcacagaatatcgtgctgaacggaaagaccatcgttatgaacgattgtatcatcagaggcgatttagccaacgtgagggtcggacgccactgcgtggtcaaatcccggtctgtgatacgcccacccttcaaaaagttctcaaaaggtgtggccttcttcccacttcacataggagatcatgtatttatcgaagaagactgcgtcgtcaatgcggcccagatcggatcgtatgtgcacgtggggaaaaattgcgtgatcggacggaggtgtgttctcaaggactgctgcaaaatacttgacaatactgtgttgcctccagagacggtagtgccaccctttacagttttctctggctgcccgggactgttcagcggcgagcttccagaatgcacccaggagctaatgattgacgtgacgaaatcatactatcagaaattcctgcccctgacacaggtgtag

SEQ ID NO: 115198 - DNA, 255 bp, synthetic construct
  misc_feature 1..255: note = Description of Artificial Sequence: Synthetic coding sequence
  source 1..255: mol_type = other DNA
atggaactcggagagctcctgtacaataaatctgagtatatagagactgcttccggtaacaaggtttcacgtcagtctgtgctgtgtgggtcacagaacattgtcctgaacggaaaaaatttcgtaattagcgtctttctctccccctacatacgatgccattcagcctgccgggaccggaaaaggtcagatgagtcagttcgcctgtccgttaacaatcgtgagtggtgggggctcgttaattggaggatgtag

SEQ ID NO: 115199 - DNA, 1650 bp, synthetic construct
  misc_feature 1..1650: note = Description of Artificial Sequence: Synthetic coding sequence
  source 1..1650: mol_type = other DNA
atggagttcgctgagctgatcaagacaccccgcgtggataacgtagttcttcatcgacccttctaccccgctgtagagggtacgctctgtttgaccggacaccatttgattctctcttctaggcaagataataccgaggaactgtggcttctgcactccaacattgacgcaattgacaagcgtttcgttggctccctaggcacaatcatcattaaatgtaaggacttccgcatcatccagctggacatacccggcatggaagaatgcctaaacattgccagcagcattgaagccctgagtaccttggacagcatcactctcatgtaccccttcttttataggccaatgttcgaggtgatcgaagatgggtggcattcttttctgccggagcaggaattcgagctctactcttctgccacttcggagtggcgcttgtcttatgttaacaaggagtttgccgtgtgccccagttatcctcccatagtcaccgtcccaaagagtatcgatgatgaagcgcttcgtaaggtggccaccttcaggcatgggggacgctttcctgtgctctcttattatcataagaagaatgggatggtgatcatgcgttcgggtcagccgcttacagggacgaatgggcgtcgctgcaaagaggatgaaaagcttattaatgccacattgcgggcaggaaagcgaggctatatcatagatacccggtccttgaacgtcgctcagcagacaagggcgaaaggcggaggattcgagcaggaagcacactacccacaatggcgacgaattcacaaatctatcgaacgctatcacatcctacaagagagcttgatcaagctggttgaagcctgcaatgatcaaactcataatatggatcgctggctctccaaactcgaagctagcaactggctcacacacatcaaggagattctgacgacagcctgtcttgcagctcagtgcattgaccgggaaggcgcaagcattctgattcatggtaccgaaggaaccgactctactctgcaagtcacttctctggcccagattatcctggagccaagaagccgcacaatccgtggatttgaagcactcatcgagcgtgagtggctgcaggccggacaccccttccaacagcggtgcgcacaatccgcctactgcaatactaaacagaagtgggaggcccccgtctttcttctcttcctggattgtgtctggcagatactgcgccaatttccctgctccttcgaattcaacgaaaacttccttatcatgctgttcgagcacgcctacgcaagccaattcggaacctttctcgggaataacgagtcagagcggtgcaagcttaagcttcaacagaagacaatgagcctttggagctgggtaaaccagccctcggaactgagtaaatttacgaatccgttgttcgaggccaacaatctggtaatctggccatcggtggcaccacagagtctgcccttgtgggaggggatattcttgcgctggaatcgaagtagcaaatacctggacgaagcatatgaagagatggtcaatattatcgagtacaataaagagctgcaggctaaggtcaatattctgcgaagacagctcgcagaattggaaacggaggatggaatgcaggagtccccctag

SEQ ID NO: 115200 - DNA, 2556 bp, synthetic construct
  misc_feature 1..2556: note = Description of Artificial Sequence: Synthetic coding sequence
  source 1..2556: mol_type = other DNA
atggggaaccgtggtatggaggacttgatcccgttggtaaaccggctccaggatgccttcagcgcaataggccagaacgcagacctggacctcccacagatcgccgtcgtgggcgggcagtccgcaggcaagtctagcgttttagagaacttcgtagggagagatttcctacctaggggaagcggtatcgtgacgcgcaggcctcttgttctgcagctggtaaacgcaaccaccgagtacgccgagttcctgcactgcaagggcaaaaagtttaccgattttgaggaggtaaggctagaaatcgaggcagagaccgatagggtaacagggacaaacaagggaattagcccagtgcctatcaacctgagggtgtactccccgcatgtgctcaatctgacacttgtggacctgccggggatgaccaaagtcccggtgggcgatcagccacccgacatcgaatttcagattagggacatgctcatgcagttcgtgaccaaagaaaactgtctcatcctggctgtgagtccagccaattctgatttggctaattcagatgcactcaaggtggctaaagaagtggatccccagggccagcgtaccattggggttataactaaactggacctcatggatgagggcaccgatgcccgagacgtcctcgagaataaactattgccactgcggagagggtacattggagtagttaaccgctcccagaaggacattgacggaaagaaagatatcaccgccgcactcgctgcggagcgtaaattttttctctcccacccttcctatcggcatcttgctgatcgtatggggacaccttatttacagaaagtgcttaaccagcagttgactaaccacattcgtgatacgcttccagggctgaggaataagctccagagtcaactcttgtccatcgaaaaagaggttgaggaatacaagaattttaggcctgacgaccccgcccggaaaacgaaggccctcctccaaatggtccagcaatttgcagttgacttcgagaagagaatcgaagggtcaggcgaccagatcgatacttatgagctgtctggcggcgcccgcatcaacaggatattccacgagcgctttccatttgagctcgtgaaaatggagttcgacgaaaaagagctgcgcagagaaatatcttatgcaattaagaacatccacggcatccgtacaggactgtttacccccgatatggctttcgagacgattgttaagaagcaggtgaaaaagatccgggaaccttgtctgaaatgtgtggacatggtgatctcagagctgatctcaaccgtaaggcaatgtactaagaaactgcagcagtaccctaggctcagagaagagatggaacggatagtcaccacgcatatacgagaacgggagggcaggacaaaagaacaagtgatgttgttgatagacatcgaattggcctatatgaataccaaccacgaggatttcatcggcttcgccaacgcccaacagagatccaaccagatgaataagaaaaaaaccagtggcaatcaggacgagattctggtgattaggaaaggatggcttaccattaataacatcggaatcatgaagggcggcagtaaagagtactggtttgtgctgaccgctgaaaacctgtcctggtataaggatgatgaagagaaggagaagaagtatatgctgtctgtggataatctcaaacttcgcgatgtagagaaaggatttatgtcttctaagcacattttcgccctgtttaacactgagcaacgcaacgtgtacaaggattataggcagcttgaactggcctgtgagacccaggaggaggtggacagctggaaggcctctttcctgagagccggagtctatcctgagcgagtcggggacaaggaaaaagcttctgaaacagaggaaaacggaagtgactcttttatgcactccatggaccctcagcttgagcgacaggttgagacaatccgaaatttagtagatagttacatggcgatagtgaacaagaccgtgcgtgatcttatgcccaagactatcatgcatctgatgattaacaataccaaagaattcattttcagtgaactgctggccaacctgtactcctgtggggaccaaaataccctaatggaggaaagcgctgaacaggcacagcgaagggacgagatgctgcggatgtaccatgctcttaaggaagccctgtctattattggtgacattaacacaacaacggtgtcaacccctatgcctcctcccgtcgatgacagttggctgcaggttcaaagtgtcccagcagggcgtcggtccccaacgtcttctcccacacctcaaaggcgcgcaccagccgtgcctcccgctcggcctggcagtagaggacccgctccaggccccccccctgcaggtagtgcgttggggggcgcccccccggtcccgagcaggcccggggcatcaccggatcccttcggcccccctccgcaggtaccgtcccggccaaacagggcgccaccaggagtccctagaatcaccatctccgacccttag

SEQ ID NO: 115201 - DNA, 2595 bp, synthetic construct
  misc_feature 1..2595: note = Description of Artificial Sequence: Synthetic coding sequence
  source 1..2595: mol_type = other DNA
atgggcaaccgcgggatggaagacttaatccccctggttaataggctgcaggatgccttcagtgcaataggacagaatgctgacctggatctccctcagatcgctgtggtcggtggccagtctgctggaaagtcctcggtccttgaaaacttcgtggggcgggattttctgccccgcgggtccgggattgtaaccagaagacccctggtcctgcagctagtgaatgctaccacagaatatgctgaatttctccactgtaaggggaaaaaatttactgactttgaggaagtccggttggaaatcgaggctgagacagaccgtgtaacgggcacgaataagggaatctctccagttcctatcaatctcagggtttacagcccccatgtgctgaatctaacattagtagacttgcccgggatgacaaaggtcccagtaggtgaccaaccgccggacatagagttccagattcgggacatgttgatgcagtttgtgacaaaagagaactgcctgattttggctgtgagccctgcaaattctgacctcgcaaacagcgacgccctgaaggtggccaaagaggtggatcctcaaggtcaaaggaccatcggagtgattaccaagctggatctcatggatgagggtacagacgctcgggatgtgctcgaaaataagttactgcctcttcggagaggatacattggagtggtgaatcgatctcagaaagacattgacggtaaaaaggatatcactgcagccttggcagcagagaggaagttcttcctgagtcacccctcatatcggcacctggccgatcggatggggacgccttatttacagaaggtcctgaatcagcagctcacaaaccatatccgcgataccctaccaggcctccggaacaagctgcagagccagttgctgtcaattgagaaggaggtcgaggaatataagaatttccggcctgacgatcccgcacgaaagacgaaagcccttttgcagatggtgcagcagttcgcggttgacttcgaaaagagaatcgaggggtctggggaccagatagacacttacgaactctcggggggcgccagaatcaacaggatcttccacgaaagattcccatttgaactagtcaaaatggaattcgatgagaaggagctgcgccgggagatcagctatgctatcaaaaatatccacggaatccgtacaggactgtttactccagatatggccttcgaaaccatcgtcaaaaagcaggtcaagaaaataagagagccatgcctcaagtgtgtggacatggtgatcagtgaactgatctccactgttaggcaatgtactaagaagctccaacagtacccaaggctgagagaagagatggaaaggatagtgacaacccacatccgcgagcgcgagggtaggactaaggaacaggtgatgctcctgattgacatcgagcttgcctatatgaacactaaccacgaggacttcatcgggtttgccaatgcccagcagcgaagcaaccagatgaacaagaagaagacaagcggtaatcaggacgagatcttagtaatccgtaagggctggctgaccattaataacattggaattatgaagggtgggtctaaggaatattggtttgttctcactgcagaaaatttgagttggtataaggatgacgaggaaaaggagaagaagtatatgttaagcgtggataatcttaagcttcgtgatgtggagaaggggtttatgagtagcaagcatatctttgcgctgttcaatacggaacagagaaacgtatataaagattaccgccaactggagctagcctgcgaaacacaggaggaagtcgattcttggaaagccagctttttgcgagcaggggtttaccctgagagggtaggggataaggagaaggcctcagaaaccgaggaaaacggctccgacagttttatgcactcaatggatcctcagcttgagcggcaggtggagacaatcaggaatctggtggattcatatatggccatcgtgaataaaaccgtgagagatctgatgcccaagaccatcatgcatcttatgatcaataacaccaaggagtttatattttcagagctccttgccaatctgtacagctgtggggatcaaaacaccctgatggaggaaagcgccgagcaggcgcaaaggagagatgaaatgctcagaatgtatcatgcactgaaggaggcactgagtatcataggggatattaacactaccacagtgtctactcctatgccgccccctgtggacgattcttggttacaggtgcaatctgtaccagctgggcggcgttctcctacctcctcccctactccacaaaggcgcgcacccgccgtgcctcccgcaaggcccggttctaggggcccggcgccggggcctccaccggctggaagtgctctcggtggggcccctcccgttccaagccgacctggggcctcgccagaccccttcggccctccaccacaagtcccgtctcgacctaaccgtgcaccaccaggcgtgccgtcccggagcggccaggcgtctccatcccgccctgagtcgccccggccaccatttgatctgtag

SEQ ID NO: 115202 - DNA, 1989 bp, synthetic construct
  misc_feature 1..1989: note = Description of Artificial Sequence: Synthetic coding sequence
  source 1..1989: mol_type = other DNA
atggaggacttaataccattggtcaaccgtctgcaggatgctttcagtgccatcggtcaaaacgcagatctggacctgcctcagattgctgtggtaggcggacagagcgccgggaaatccagcgtgttggagaatttcgtgggtcgagacttcttgcctcgggggtccggtatagtcacaaggcgacccctcgtgctgcagttagtcaatgcaactactgaatacgccgagtttctccactgtaagggaaagaagtttacggattttgaggaggtgaggttggagattgaggcagaaacggatcgtgttactggtactaataagggtatcagtcccgttccaattaacctcagagtgtactctccgcacgttctcaacttgacattggtggacctgcccgggatgacgaaggtaccagttggcgaccaacccccagacatagagtttcaaatcagggatatgctcatgcaatttgtgacgaaggaaaactgcctcattttagcagtgtccccagccaactcagatttggctaactccgatgctcttaaggtagcaaaagaggtggaccctcaggggcagcggaccataggggtaatcactaaactggacctcatggatgagggtactgacgcccgggatgtgctcgagaataagctgttacccctgagacgcggttacattggagtagtgaaccgctctcagaaagatatagacggcaaaaaagacataacggcagccttggccgctgagagaaagttttttctctcacatcctagctaccgacatctggcagacaggatgggaaccccctacctgcaaaaagttctgaatcagcagctgaccaaccacattagggataccctccccgggctgcgcaataagcttcagtctcagctattgtccatagaaaaggaagtggaagagtacaagaatttccgccccgacgaccctgctaggaaaaccaaggcattactgcaaatggtccaacagtttgccgtggactttgaaaagcgtatcgaggggagtggtgatcaaatcgacacctatgagctgagtgggggcgctagaatcaaccgtatattccatgagcgcttcccgtttgagctggtaaaaatggagtttgacgagaaagagcttcgtcgggagattagttatgctattaagaatatacatggaatccgtacgggcttatttacgcctgacatggctttcgaaaccatcgttaaaaaacaggtgaagaagatccgggagccatgcctcaagtgtgtggacatggttataagcgaactcatttcaaccgtccgccagtgtaccaagaaactccagcagtatcctaggctccgcgaagagatggagcgaatcgtaactacccacattcgggaacgtgaggggaggacgaaagagcaagtcatgctactcatcgacatagaactagcatacatgaacactaaccatgaggatttcattgggtttgcaaatgcacagcagcggagtaaccagatgaacaagaagaagacatcagggaaccagatcacgctgcaagtaatccgtaaaggatggttgaccatcaacaacattggcataatgaaagggggatcaaaggaatactggttcgtgctcacggccgaaaacctgtcatggtacaaggatgatgaggagaaagaaaagaagtatatgctctccgttgacaatctcaagttaagggacgtggaaaaagggtttatgtcctctaagcatatcttcgcattgtttaacactgagcagcggaatgtgtataaagattacaggcaattagagcttgcctgcgagacccaggaggaggttgattcctggaaggccagttttcttagagctggcgtatacccggaacgggttggcgataaggaaaaggtgtctgtcccattttcatgtctcctgccaggaatctgctctcttgcacccgctccagctcgattctccagcaaaggacctggcgacgtgctgttctag

SEQ ID NO: 115203 - DNA, 2556 bp, synthetic construct
  misc_feature 1..2556: note = Description of Artificial Sequence: Synthetic coding sequence
  source 1..2556: mol_type = other DNA
atggggaaccgcgggatggaggacctgatacctctagtcaatagacttcaggacgctttttctgcaatcggccaaaacgccgacctggatctccctcaaatcgcggttgtcggagggcagtccgccggtaagtcctctgtgctcgaaaacttcgtcggccgcgactttctccctcgcgggtccggaatcgtgacccgacgcccactggtgctgcagctggtaaacgcgactaccgaatatgctgagtttcttcactgcaaagggaaaaaattcaccgatttcgaggaagtgcgattggaaatcgaggcggagaccgatcgcgtcacaggcactaacaaaggcattagtcctgtgccaatcaatcttcgggtatactctccccacgtattgaacctgaccctggtggatcttcctggcatgacaaaagtccccgttggagatcaaccacctgacattgagttccaaatcagagacatgcttatgcagttcgttacaaaggaaaactgcttaatcctggccgtatccccagcaaactccgatttagccaattccgacgccctcaaagtagcaaaagaagtggacccgcaggggcagagaacaatcggagtgatcaccaagctagatctgatggacgaaggaaccgatgctagggacgttctagagaataaacttctgccccttcgaaggggctatattggcgtggtgaatagaagtcagaaagacatcgacggcaaaaaggacatcaccgctgcgcttgctgctgaaaggaaattctttctgagccatcccagctaccggcacctggctgaccgaatgggtacgccatatctccagaaagtgctaaaccagcagctaacaaatcatattagagacaccctgcccggactccggaacaaactgcagagccaactgttgagtattgagaaagaggtggaggaatataagaattttagaccagacgatccagctaggaagaccaaggcccttctgcagatggttcagcaatttgcagtggactttgagaaaaggatcgaaggttcaggggaccagatcgacacctacgagttgagcggcggggcccggatcaacagaatcttccatgaacgatttccattcgaactggtgaagatggagtttgatgaaaaggagctgcggagggagattagttatgcgataaagaacatccatggcattaggaccggcttatttacccccgatctggcttttgaagctaccgttaagaagcaagtgcagaagctgaaggagccatctatcaaatgtgtcgatatggtggtgtctgagctgacagcaaccatccgtaagtgctctgagaaacttcagcaatatccaagactgagagaagagatggagcgaatcgtcacaacccatatcagggaacgcgaggggcggaccaaagaacaggttatgttgctgattgatatcgagcttgcgtatatgaacaccaaccacgaagacttcatcggctttgccaacgctcagcagcggtcaaaccagatgaataagaaaaaaacctcggggaaccaggatgaaatccttgtcataagaaaaggctggctgaccattaataatatcggtatcatgaagggtgggtccaaggagtattggttcgttctcaccgcagaaaatttgtcgtggtacaaggatgatgaagaaaaggaaaaaaagtatatgctatcagtggataatttaaaactgcgtgacgtcgagaagggattcatgtctagtaagcatatattcgctttgttcaacactgagcagagaaatgtgtataaggattatcgacagcttgagctcgcctgtgagactcaagaagaagtagattcctggaaggcctcgttcctgagagcgggcgtttatcccgaacgggttggagacaaagagaaagcatcagagacagaagagaacggatccgactcttttatgcatagcatggacccccagctggagcgacaggtagaaactattcggaaccttgtagattcgtatatggccatcgttaacaagacagtcagggacctcatgcctaagacgatcatgcatctgatgattaataatacaaaggagtttatatttagcgagctgctggccaacctctattcttgtggcgaccagaacacactaatggaggaatccgccgaacaggcccagcgacgcgatgagatgcttcgaatgtaccatgctctgaaggaggctttatctatcataggggacattaataccactaccgtgagcacaccaatgccccctcctgtggatgattcttggctccaggtacagagtgtgcccgccggacggcgtagccccacatctagtccaacacctcagcgtcgggccccggccgttcccccggcacgcccaggcagccgcggcccagctccggggcctccacccgccggatccgctttggggggtgctcccccagtgcccagccggcccggcgccagtcctgatccatttggacctccccctcaagtgccttcacgccccaatcgcgcgccacctggagtaccccgcataaccatcagtgatccctag

SEQ ID NO: 115204 - DNA, 2556 bp, synthetic construct
  misc_feature 1..2556: note = Description of Artificial Sequence: Synthetic coding sequence
  source 1..2556: mol_type = other DNA
atggggaacagaggcatggaggatttaattcctctggtcaacagattgcaagacgccttttcagctatcggccagaatgccgatcttgacctgccgcagatcgctgtagtaggcgggcagtctgccggaaagtcatcagtgttagagaatttcgtcggcagagatttcctccctcgtggttctggtatcgtaaccaggcgacccctggtcctgcaacttgtcaatgctactacagagtatgcggagtttttgcactgcaaagggaaaaaattcactgactttgaggaagttaggcttgaaattgaggccgaaacagaccgcgtgacaggtactaataagggcatcagtcctgtaccaattaaccttcgcgtgtatagtccgcacgtattgaacctgaccctggttgaccttcccggtatgacgaaggtgcctgtgggggaccagccaccggatatcgagttccagatacgcgatatgttgatgcagttcgtgaccaaggagaattgtttaatcctggcagtgtctcctgcaaactcagacctggctaactccgacgctcttaaagtcgctaaagaggttgatccccaggggcagcgtacaattggggtcatcactaagctggacttgatggacgaaggcaccgatgcccgggacgtactagaaaataaactactgcctctccgaagagggtatattggtgtggtcaacagaagccagaaggacatcgacgggaagaaagacatcactgctgcactggccgccgagcgcaaattttttctgtctcaccccagttacagacacctagcagataggatgggcacgccctatttacaaaaggtgctgaatcagcagttgaccaaccacataagagatacattgcctggtctgcgcaacaaacttcagtctcagctgttgtcgattgagaaagaggttgaggagtataaaaacttccgacctgatgatccagcacggaaaacaaaggccttattacagatggtgcagcagtttgctgtggactttgagaagagaatagaaggaagcggtgaccagatcgatacctatgaactatcaggcggcgcgcgcatcaaccgaatttttcacgagcgattcccctttgaactggttaagatggaattcgacgaaaaggagcttagacgtgagatttcctacgccatcaaaaacatacacgggatcaggaccggtctgtttaccccagatctggctttcgaggccaccgtgaagaaacaggtgcagaaactcaaggagccctcaatcaagtgtgtggatatggtggtgagcgaactgacagctaccatcaggaaatgtagcgagaaacttcagcagtatccgagattgcgggaggagatggaacggattgtcactacccacattagagagcgtgaaggtcgaactaaggagcaagtgatgctgctcatcgatatcgaactggcctacatgaacacgaatcatgaagattttattggattcgccaacgcacagcagaggagcaatcagatgaacaagaaaaagacaagtggaaatcaggacgagatcctagtcatcagaaaaggttggctcaccattaacaatatcggaataatgaaagggggtagcaaggaatactggttcgtgcttaccgcagagaatctgtcttggtataaggatgacgaagaaaaagagaagaaatatatgctcagcgtcgataatctgaaattacgcgacgtggaaaagggcttcatgtcttcgaagcacatcttcgcccttttcaatactgaacagaggaatgtttacaaggactatcgacaactcgaactcgcctgtgaaacacaggaggaggtagatagctggaaagctagtttcttgcgagcaggtgtctacccagaaagggtgggtgacaaggaaaaggcttccgaaacggaagaaaatggcagcgactcatttatgcacagtatggatcctcagctcgaacgtcaggtggaaacaatcaggaatttggtcgactcttatatggcgattgtgaataaaactgtgagagacctgatgccaaaaactataatgcaccttatgatcaacaacactaaagaattcatattttccgaactcctggctaacctctactcatgcggcgaccagaacacattgatggaagagagcgccgaacaggcacagcgacgggacgagatgctgcgcatgtatcatgcgctgaaggaggctctctcaattattggtgacattaatacgacaaccgtcagcacgcccatgccgccaccagtggacgactcttggctccaggtgcagagtgtccctgcaggccgccgaagccctacatcctctcccactcctcagcggcgagcaccagctgtaccaccagccaggccgggttccagaggtcctgccccagggcctcctcccgcagggtccgccttaggcggcgctccacccgtgcccagcagacccggtgcctccccggacccatttggacccccaccccaagtcccgtcacgacccaacagggcgccgcctggtgtccccaggataaccatctcagacccctag

SEQ ID NO: 115205 - DNA, 2595 bp, synthetic construct
  misc_feature 1..2595: note = Description of Artificial Sequence: Synthetic coding sequence
  source 1..2595: mol_type = other DNA
atgggcaaccgcggcatggaggatctgattccgctggtgaaccgtttgcaggacgccttcagtgcaatagggcaaaacgccgacctcgaccttcctcagatcgctgtcgtcggtgggcaatcagcggggaaaagtagcgtactggagaacttcgtgggacgggattttctgccacgtgggtcaggtatcgtaacccgcagaccattggtcctgcaattggtgaatgccactactgaatacgcagaattcttgcactgtaaagggaaaaagtttacagacttcgaagaggtgcggctcgaaatagaagctgaaaccgatagggtaaccggcacaaataaagggatcagcccagtgcctattaatttgcgcgtgtattctcctcacgttttgaatctgacactggttgacctgccaggcatgactaaggtgccagtcggagaccaaccacccgacatagagtttcagataagagatatgcttatgcagtttgtgacaaaggaaaactgcctcattctggcagtttctccggccaattctgaccttgcgaactccgatgctctgaaggtcgcgaaggaggttgacccccaaggccagaggacaatcggagtgattaccaaattggacctcatggatgaaggaacggacgctcgcgacgtactcgagaacaaactgctgcccttgcgccgaggatacatcggcgtagtcaatagaagtcagaaagacattgacgggaagaaagacattacagctgccctcgccgctgaacggaagtttttcctatcccacccgagttaccggcacctggctgaccgcatggggacgccctatctgcagaaggtactcaatcaacagctgacaaaccacatcagggataccttgccgggtttacgtaacaagctgcagtcccagctgttatcgatcgaaaaggaagttgaggagtataagaacttccggcccgacgaccctgcccggaagaccaaagcgttgctgcaaatggtacaacaattcgcagtggattttgagaagcgtattgaagggagtggggaccagatcgatacatacgaactctctggcggtgcccgaataaatcggatatttcacgaacggtttcccttcgaacttgtgaaaatggagttcgatgagaaagaactgcgtcgcgagatctcctatgccattaagaacattcacggcatccgcacagggctgtttacccccgatctcgcttttgaagccacagttaagaaacaagtccagaagttgaaagagcccagtattaaatgcgtcgacatggtggtctctgaacttacggccacaatacgcaagtgcagcgaaaagcttcaacagtacccgcgccttcgcgaggagatggaacggatagtgacaacgcacatccgcgagcgcgaaggacgcaccaaagagcaagtgatgttactcatcgacatagagttggcatatatgaataccaaccacgaggatttcatcggttttgccaatgcacagcaaagatccaatcaaatgaataagaaaaaaactagcggaaatcaggacgagatccttgttatccggaaagggtggttgactatcaacaacatagggatcatgaaaggaggcagtaaggagtactggtttgtcctaacggctgagaatctgagttggtacaaagatgatgaagaaaaggagaagaagtacatgttgtctgtcgacaatcttaagctcagggacgtggaaaaaggttttatgtccagtaagcatatatttgctctgttcaacactgaacagaggaatgtttacaaagattatcgacagctagagcttgcctgtgaaactcaggaggaggtcgactcatggaaagccagcttcctgcgggcaggcgtgtacccagagcgggtgggcgataaagaaaaagcttctgaaacagaggagaacgggtccgatagttttatgcattccatggatccgcagttagagcggcaggtggaaacaattagaaacctggtggattcatatatggccattgtgaataaaactgtgcgcgacctgatgcctaagactattatgcatttgatgatcaataacactaaagaattcattttctccgagctgctggctaatctgtattcctgtggggaccagaacaccctgatggaggaatccgcggagcaggcccagaggcgagacgaaatgctgcggatgtaccatgccctgaaggaagccctcagcattatcggtgacatcaatactaccaccgtctccacacctatgccacccccagtggacgattcgtggctgcaggtccagtcagtccctgcaggacgacgcagccccacctccagtcccacccctcaaagacgcgcccctgctgtacctccagccagaccgggttcgaggggccctgcgcctggccctcctcctgccgggtcagccttgggtggagcaccaccagttccttccagacccggagcttctcccgatcccttcggcccacccccacaggtcccaagtaggccaaatcgagcccctccaggagtgccttcccggtccgggcaggcctcaccctccagacccgagagcccgagaccgccctttgatctgtag

SEQ ID NO: 115206 - DNA, 1191 bp, synthetic construct
  misc_feature 1..1191: note = Description of Artificial Sequence: Synthetic coding sequence
  source 1..1191: mol_type = other DNA
atggagaggatcgtcaccactcacatacgcgaacgagaaggaagaactaaggagcaggtaatgttgctgattgacattgaactcgcctacatgaatacaaaccatgaggactttatagggtttgccaacgcccaacagcgaagcaaccagatgaacaaaaagaagacctccgggaaccaagatgaaattcttgtgattcgcaaagggtggctgactattaataatatcggcattatgaagggaggctccaaagagtactggttcgtgctgaccgccgaaaacctctcatggtataaggacgatgaggagaaggagaagaaatatatgctaagcgtggacaaccttaaacttcgagacgtggagaagggctttatgtcaagcaagcatatcttcgccctgtttaatactgaacagaggaatgtgtacaaagactatcggcaactggaactagcttgtgaaacccaggaggaggtcgactcttggaaagcctctttcctgcgggccggggtgtaccctgaaagggtgggagacaaagagaaggcctccgagaccgaagagaacggatccgacagttttatgcacagcatggacccacaactagagagacaggtggagaccatccgaaatctggtggactcttatatggcgattgtgaacaaaacagtcagagacctaatgcccaagacgattatgcacctaatgataaataacaccaaggagttcatctttagtgaattattggccaacctgtacagctgcggtgaccaaaacaccttgatggaagaaagcgccgaacaggcccagcgtagagatgaaatgctgaggatgtatcatgccttaaaggaggcccttagtatcatcggtgatattaatacaacaacagttagcacccctatgccaccacccgtagatgattcttggctacaggtgcagtctgttcctgccggccgcaggtcccccaccagctctcctactccacagcgtcgagcaccagctgtgcctccagctaggccagggtcccgaggccccgcgcctggcccccccccggcagggagcgctctaggtggagcccctcctgtgccttccaggcctggagcttcacccgacccatttggcccacctccccaagtgccgtccaggccaaacagggcccccccaggggtcccgcgaattactattagcgatccttag

SEQ ID NO: 115207 - DNA, 1728 bp, synthetic construct
  misc_feature 1..1728: note = Description of Artificial Sequence: Synthetic coding sequence
  source 1..1728: mol_type = other DNA
atggaggctctgattcccgtgatcaacaagctgcaggacgtattcaacaccgtgggggcggatattatacagctgcctcagatcgtggtggtcgggactcagtcttctggtaaatctagtgtgctagagtcacttgtgggcagagatctgctcccccgtgggactgggatcgtgactcgccgcccactgattctccaactagtccacgtctcccaggaagacaagcgcaaaactactggcgaggagaacggggtggaggctgaggaatggggcaagttcctgcacaccaaaaacaaattgtatactgactttgacgaaattcgccaggagatagaaaatgagactgagaggatctccggaaacaataaaggagtgtcaccggagccgattcatttgaagattttcagtcccaatgtggtcaatctgactctggtcgatctacccggcatgaccaaagtgccagtcggcgatcagccaaaggatatcgagttgcagatccgggagcttatcttgcggttcattagtaatccgaattccatcattctagccgttaccgctgcaaacaccgatatggctacctcagaagccctgaagatttcacgcgaggttgacccagatggtcggcggacactggctgtcatcactaaactcgacttaatggatgctggcacagatgctatggatgtgttgatgggcagggtgattccagtgaagcttggaattattggcgtggtcaacaggtcccaactggacatcaataataagaagtccgtgaccgactctatccgagatgaatatgctttcttgcagaaaaaatatccctccctagcaaaccggaacgggacaaagtacctggccagaacccttaatcgcttactcatgcatcacataagagactgtttgccagaactgaagacgcgcatcaatgttctcgctgcgcaatatcagtctctgctgaactcatatggagagccagttgacgacaagtctgccacactgctgcaactcatcactaaattcgccactgagtactgcaacactattgagggtacagccaagtacatcgagacatctgaactgtgcggcggcgctcggatttgctatatctttcacgagacatttggacggacactcgagtctgtcgatcccttaggggggcttaacacgatcgacatccttacagcaattcgtaatgcgactggcccacgccccgccctctttgtgcctgaagtgagcttcgagcttctggtgaaacgccagatcaaaagactggaagaacccagcctacggtgtgtggaactggtgcatgaggagatgcagcgtattatccagcattgcagcaattacagtacacaggagttgttgcgctttccgaagttgcatgacgctattgtggaagtggtgacttgtctcctaagaaagcgcctgcccgtcacaaacgaaatggttcataacttagtggctatagagctcgcctatatcaataccaagcatcccgactttgcggatgcctgcggacttatgaacaataatatagaggaacaaaggcgcaacaggctggcgcgggagctacccagcgccgttagccgtgataaagttgcgtcgggaggcggtggcgtgggcgacggggtacaggagccaaccaccggcaactggagaggtatgcttaagacctccaaggccgaagagttgttggccgagaaaaagaagaagaagaagaagaagtag

SEQ ID NO: 115208 - DNA, 2100 bp, synthetic construct
  misc_feature 1..2100: note = Description of Artificial Sequence: Synthetic coding sequence
  source 1..2100: mol_type = other DNA
atggaagccctcatcccagtaattaataagctgcaagacgtgtttaataccgtgggtgccgatattatccagcttccccagatcgttgtcgtcggaacccaaagctcaggcaagtccagcgtcctggagtctctcgttggaagagacttattacccagaggcaccggcattgtcacccggcgaccattaattctccaactggtgcatgtgtcacaggaggacaagcgaaaaacgaccggtgaagaaaatggagtagaggcagaagagtggggcaagtttttgcacacaaaaaataaactctataccgattttgacgaaatccggcaggaaatcgaaaatgagacagaaagaataagtggtaataacaagggtgtgtctcctgagcccattcacctgaaaattttctcgccaaatgttgtgaacctgactctggtagacctccccggcatgacaaaggtacccgtgggagatcaaccaaaagatattgagcttcagataagggagcttattctgagatttatatctaatccaaacagtattatcctggctgtcactgctgctaataccgacatggcaactagtgaggcgctgaagatttctcgggaggtcgacccagatgggagacgtaccctggctgttatcacgaaacttgacctgatggatgccggaactgacgcaatggacgtgcttatggggcgggtgattcccgtgaagctgggaatcatcggcgtggtgaatcgatcccagctggacatcaataataagaagtcagtgacagactcgattcgggacgagtatgccttccttcagaagaagtacccttctctggccaataggaatggcaccaagtaccttgccagaaccctgaacagattactcatgcaccatattcgtgattgtctgccggagctcaagaccagaatcaacgtcctagcagcccagtaccaatctctcctgaattcgtacggcgaacccgtcgacgacaagagcgcgacactcctgcagctaatcaccaagtttgcaacagaatattgtaacaccattgaaggaacagcaaagtatattgagacttctgagctgtgtggaggcgctaggatctgctacatctttcacgaaacctttggaagaactttagaaagtgtggatcctctgggggggctgaacacaattgacatcctaacagctatccgaaatgcaaccgggccaaggcctgcactgttcgtgcctgaagtgtccttcgaactgttagtgaaaagacaaattaaacgtctcgaagagcccagtttacgatgcgtggaattagtccatgaggagatgcagaggataattcaacactgcagtaactatagtacccaggaattacttcgattccccaaactccatgatgctattgtagaggtggttacttgtttgctgcgtaaaagacttccagtcactaacgaaatggtgcacaacctcgtggcgatcgaactcgcatacatcaataccaagcatcccgactttgctgacgcgtgcgggctgatgaataataatatagaggagcaacgtcggaatcgccttgctcgtgagttgccaagcgcggttagccgtgacaaggtggcctctggaggtggtggtgtgggtgatggggtccaagagcctaccactggtaactggagagggatgttgaaaacttccaaagcagaagaactcttggcagaagaaaagtctaagcccattcctatcatgcctgcttcaccacagaaaggccatgccgtgaacttacttgacgtacccgtgcccgtagcaagaaagctgtcggcaagggaacagcgagactgcgaggtgatagagcgcctgataaaatcatacttcctcattgtgagaaaaaatatccaggattccgtcccaaaagctgtgatgcacttccttgtgaaccacgtcaaggacacccttcaatctgagcttgtgggccaattatataaaagcagtcttctcgatgacctactcactgaaagtgaggatatggcacagcggcggaaagaggcagctgatatgttgaaggcactacagggagcctctcagatcatagcagaaattagggagacacatctgtggtag

SEQ ID NO: 115209 - DNA, 2376 bp, synthetic construct
  misc_feature 1..2376: note = Description of Artificial Sequence: Synthetic coding sequence
  source 1..2376: mol_type = other DNA
atggcatgtcgggaaggcgctggcagtaggcgcgcacgctccaatggctgtcgcttaccccgaagaggtcggagacgcggcggtcgccgtcggacggtgggccctggacctattcattgtcgagggaggagagccctgggaccccgcgtattccgcgtcatggaagccttgatccccgtgattaataagcttcaagacgtcttcaacactgttggggctgacatcatccaactgcctcagatcgtggtagttggcacccagtccagtgggaaatcttccgtcctcgagtccctcgtcgggagggacctcctgcccagaggaactgggattgtcacacggcggcccttgatcctccaactggtgcatgttagccaagaagacaagaggaagaccactggggaggaaaatgaccctgcaacctggaagaactccaggcacttaagtaaaggagtagaggctgaagaatggggaaaatttttgcatactaagaataaactgtatactgattttgatgagatccggcaagaaatcgaaaatgagacagaacggatttcgggcaacaataagggtgtttccccggaacccatccacctgaaaattttcagtcctaacgtggtgaatcttactctcgtcgacctgcccggaatgactaaggttcccgttggcgaccagccgaaggatatcgagctccagatcagagaactaatcctccgatttattagtaatcctaactcaataattctcgccgtgactgccgctaacaccgatatggccacctcagaggcgctgaaaattagccgggaggtggacccagacggtagaaggactctggccgtcatcactaagctggatttaatggatgccgggacggatgctatggatgtgctaatgggtcgcgtcatcccagtcaagttggggatcataggtgttgtgaaccgttctcagcttgatatcaacaacaaaaagtctgtgacagatagtattagggatgagtatgccttcctgcaaaagaaatacccttccctggcaaataggaacggaacaaaatacctggctaggacactgaatcgcttgctaatgcaccatattagggattgtttacctgagctaaaaacacggatcaatgtgctcgccgcacagtatcagtctctactgaactcctatggcgaacccgtggatgacaagtcagcgactcttttacagctgatcacgaagtttgctacggagtattgcaacaccatcgaggggacagccaaatatatcgagacatctgaactgtgcggtggagcacgaatctgttacatctttcacgagactttcggcaggactctggaaagcgtcgatcccttaggcgggctcaacaccatcgatatcctgacagccatcaggaatgctacgggccctcgtcccgcacttttcgtgcccgaggtctccttcgaactgctggtgaaaagacaaattaagcgtctagaagaaccttccctcaggtgcgtagagcttgtccatgaggagatgcagagaattatacagcactgcagcaattactctacccaggagctcctgcgcttcccaaagctgcacgacgccattgttgaggttgttacatgcctattgcgcaagcgtctacccgtcaccaatgagatggttcataatttggtggcaattgaacttgcttatataaataccaagcaccccgatttcgccgatgcttgtggcctcatgaacaataacatcgaagagcagaggaggaatcggctggccagggagttgccatcagctgtaagccgggataaaagcagtaaagtgccttccgctctggcgcccgcttcacaggaacccagccctgccgccagtgccgaggctgacggcaaagtcgcctccggcggcggcggcgtcggcgacggggtccaggagcctacgaccggcaattggcgaggaatgctgaaaacctccaaagccgaggagctcctcgctgaagagaagagcaaacccatccctattatgccagcctcccctcagaaagggcacgctgtgaacctcttggacgtgccggtgccagtcgctaggaagctgagcgccagggagcaacgcgactgtgaggttatcgagcgtctgataaagagttatttcctgattgtacgcaaaaacatccaggacagcgtacctaaggctgtgatgcatttcctggttaatcacgtcaaagacaccttacagtccgagctggtcgggcaactctacaaaagtagtctgctagacgatctgctcacagagtcagaagacatggcccagagaagaaaagaagcagcagacatgttaaaggctctccagggcgccagtcagattatcgcagaaatcagagaaactcacctctggtag

SEQ ID NO: 115210 - DNA, 1602 bp, synthetic construct
  misc_feature 1..1602: note = Description of Artificial Sequence: Synthetic coding sequence
  source 1..1602: mol_type = other DNA
atgttccacaaaaaaataaatggaaaacagcaagagaagaaaatgaccctgctccacggaaagactcaggacactttcctgaagggatggaagcagaaaaatggggttaattttttcacgccgaagattaggtcccagctggatatcaataacaaaaagagtgtcaccgactctattcgagacgagtatgccttcctgcagaagaagtacccatccctggcgaataggaacggtaccaaatacctggccagaacactgaacaggttgctcatgcatcatattagggactgccttccagaactgaagaccaggatcaatgtcttggccgcacagtatcagagcttgctaaactcttatggcgaaccagtggatgacaagagcgccacattacttcagcttatcacaaaattcgccacagagtattgtaacaccattgagggaacggctaagtacatcgagacctcagaactctgtggcggagcccgcatctgctatatctttcacgaaactttcgggcgcactctcgagtccgtggatccactgggcggcctgaatacgatagatatattgacagcgattaggaatgctacaggtccccgaccagcactgttcgtgcctgaagtctcctttgagctgctggtgaagcggcagattaaacgattagaggaaccaagtctgagatgcgtcgaactggtgcacgaagagatgcaaaggatcatacagcattgtagtaactatagcacccaggagctgctcagatttcctaagctgcatgacgcaattgtggaggtggtgacctgcctgctcaggaagcgcttaccggttactaatgagatggtccataacctcgttgccatcgaactcgcttatattaataccaagcatcctgatttcgctgatgcttgtggcctgatgaacaataatatcgaggaacagaggagaaatagactcgcccgagagctccccagtgcagtgtcgagagacaagtccagtaaggtgccgtccgcgctcgctcccgccagccaggagccctctcccgctgctagtgccgaggccgatggaaaactcattcaggacagtcggagagaaaccaaaaacgtggcctccggcggcgggggagtgggagatggagtccaggagccgactacaggtaactggcgtggtatgctgaagaccagcaaggcagaggaactgcttgctgaggagaagagcaaaccgatccctatcatgcctgcttctccccagaagggccacgcagtcaacttactggacgtaccagtgccggtcgcgcgcaagttgtccgcgcgcgaacagagagattgcgaagtgatagagcgacttatcaagtcctattttctgatcgttaggaaaaatatacaggactctgtgccaaaggcggttatgcattttctcgtgaaccatgtaaaggacactctacagtcagaattggtcggacaactgtacaaatcaagccttctcgatgatttattaactgagtccgaggacatggcccagaggcgaaaagaggcagctgacatgctaaaggctctgcagggggcttctcagattatagctgagatcagagaaactcatttgtggtag

SEQ ID NO: 115211 - DNA, 2133 bp, synthetic construct
  misc_feature 1..2133: note = Description of Artificial Sequence: Synthetic coding sequence
  source 1..2133: mol_type = other DNA
atggaggccttgattcctgtgatcaataagctccaggatgtcttcaacacggtcggcgccgatattatccaattgccccaaatcgtcgtggtgggaacacagtcatctggaaagagcagtgtgctggagagtctcgttggccgggatctgctccccagaggcacagggatagtcacccgccgcccactgatattacagcttgtgcatgtctctcaggaggataaaaggaagaccacaggggaggagaatggggtcgaggccgaagaatggggaaagtttttacatacaaaaaataaactgtatacagattttgacgagattcgacaggaaatagagaacgagactgagagaataagcggtaacaataaaggggtctctcccgaacccatacatctgaaaatttttagtccaaatgttgtcaacctcacacttgtggacttaccaggcatgaccaaggtgccagtaggtgaccagcctaaagatatcgagctgcaaattcgggaactgattctgagatttatctctaaccctaactctatcatcctggctgtgactgcggcaaacaccgatatggcaaccagcgaagccttaaaaatatcgcgtgaggtcgatcctgacgggaggcgaaccctggcagtgatcaccaagctcgatctgatggatgctggcactgatgctatggatgtccttatggggagggtgattcctgtaaagctcggcattataggagtggtaaatcgcagtcagctcgatatcaataataagaaatccgttacggacagtatcagagatgaatatgcttttttgcaaaagaagtaccctagcctggctaatagaaacgggactaagtatctcgctagaactctgaacaggttgctcatgcaccatatccgggactgcctccccgagctgaaaactcgcatcaatgtgctcgccgcccaataccagtcactgctgaattcctatggagagcccgtggatgataagtctgctacccttctccagctaatcaccaagttcgcgaccgaatactgcaacaccattgagggaactgctaaatatattgaaaccagcgaactgtgtggaggggctcgaatttgttatatctttcacgagacttttggccgtacgctggagagtgtggatcctcttggtggattgaacaccatcgacatcttgacagcgatccgcaacgctactggcccccggcccgcactcttcgttcctgaagtgagctttgaactgttagttaagcgccaaattaagcgtttagaagagccttccctgcggtgcgtagagctcgtgcacgaagagatgcagagaatcatccagcattgctccaattattctacccaggagcttctgcgcttcccaaagctccacgatgctattgtggaggtcgtcacttgcctgctgcgtaaacggctgcctgttacaaatgagatggtgcacaatctggtggcaatcgaactggcttacatcaacacgaagcaccccgacttcgcagatgcctgcgggctgatgaacaacaacattgaggaacagcgaaggaaccgcctggcacgtgaactcccaagtgccgtgagtcgcgataaactcatccaggattcgagaagagagaccaagaacgtggcctctggtggagggggtgttggcgacggagtacaggaacctactactggcaattggagggggatgttaaaaacgtccaaagctgaagaactgcttgcagaagagaaaagcaagcctatcccgatcatgcctgcaagcccgcaaaaagggcacgctgtgaatctgctggatgttcctgtacccgtcgcccggaagttatcggcgagagagcaaagggactgcgaggtgattgaaaggctgattaagtcttacttcttgattgtcagaaagaatatccaggattccgtgccgaaggcggttatgcacttcctggttaatcacgtgaaggacacactacagtctgagcttgtggggcagctttacaagagctcactcttggatgacctcttaaccgaatcggaggatatggctcagcgtagaaaggaagccgctgacatgctgaaggccctccaaggcgcctctcagatcatcgcagaaatcagggagacccacttgtggtag

SEQ ID NO: 115212 - DNA, 2178 bp, synthetic construct
  misc_feature 1..2178: note = Description of Artificial Sequence: Synthetic coding sequence
  source 1..2178: mol_type = other DNA
atggaagccctgatccccgtgattaataaattgcaggatgtgttcaatacggtaggagcagatataatacaactcccacaaattgtcgtagttggtacccaatcaagtgggaagtcaagcgtactcgaaagcctggtgggtcgtgacctgctaccacgaggcaccggcatcgtgacccgccgaccactgatactccaacttgtacatgtgagtcaggaagacaagcgcaagactactggggaggagaatggggtggaggcagaagaatggggaaaattcctgcacacaaagaacaagttatacacagacttcgatgaaatccgccaggaaatcgagaacgagaccgagcgcatttccggcaacaacaagggtgtctcaccagagcctattcacctgaagattttctctcctaacgtggtgaacctgacactggtggatctgccgggcatgactaaggtgcccgttggggaccagcccaaagatatcgagctccagattcgggaactgatactgagatttatatcaaacccaaattccataatccttgccgtaacggcagccaacaccgatatggcgacatccgaggcgttgaaaattagccgcgaagtagatcctgacggtcggcggaccttagccgtcataacgaaactggacctcatggacgccggaactgacgcaatggatgtgttgatgggccgggtcatacctgtcaaattgggcattatcggcgtggtcaatcgctctcagttagacatcaacaataagaagtctgttactgactccatcagggacgagtatgcctttttgcagaaaaagtacccgtccctggccaaccgcaatggaacaaaatatttggcccgcaccctgaatcggctcctgatgcaccatattagagattgtctgcccgaattaaaaacgcgcattaacgtgctagctgctcagtaccagtctctgctgaactcctacggggaacctgttgatgacaagagcgcgactttgttacaactgattactaagttcgctaccgagtattgtaataccatcgaaggaactgctaagtatatagaaaccagtgagctctgcggcggagccagaatttgttacatctttcacgagacctttgggcgaactctggagagtgtagaccctctgggcggactcaatacaattgatatccttaccgccatccgaaacgccactggcccccggccagcattgtttgttcctgaagtgtcttttgaacttctggtgaagcgccagatcaaacgcctcgaagaaccgagtctgagatgcgtcgagcttgtgcacgaagagatgcagcgcatcatccagcattgcagcaattattctacccaggagttgctgcgctttccaaagcttcacgacgccatcgtggaagtggtcacctgcctcctccgcaaacgcctgcctgttacaaacgagatggtccacaacttagttgccatcgagcttgcgtatatcaatacgaagcaccctgacttcgcggacgcttgcggtctgatgaacaacaatatcgaggaacagagacgaaatagacttgctagagagctcccttcagcggtttcaagagataagtcctccaaagtgccctcagcacttgctcccgcgagtcaggagccctcacctgcagcttctgcggaggcagacggcaaagtcgctagtggaggaggcggagtcggggatggcgtgcaagagcccacaaccggaaactggaggggaatgctcaaaacgtcgaaggcggaggaactgctggctgaagaaaaaagtaaaccaatccctattatgcccgccagtcctcaaaagggccatgccgtgaacctgctcgacgtgcctgtgcctgtcgcccggaaactgagtgcacgcgagcagagagactgcgaggtgatcgaacggttaattaagagctattttctgatcgttagaaagaacatccaggacagcgtacctaaggcggtaatgcacttcctcgtcaatcacgtcaaggacaccctccagtctgagctagtgggacagctgtataaatcaagcctcctcgatgacctcctcaccgagtcagaggacatggcacagaggcggaaggaggcggcagacatgctgaaggcgcttcagggggcctcccagattatcgctgagatcagggaaacccacctctggtag

SEQ ID NO: 115213 - DNA, 2211 bp, synthetic construct
  misc_feature 1..2211: note = Description of Artificial Sequence: Synthetic coding sequence
  source 1..2211: mol_type = other DNA
atggaggccctcatcccagtgattaacaaacttcaggatgtttttaacaccgtcggagccgacattatccagctgccccaaatcgtcgtcgtgggcacccagtctagcggaaagtcgtccgttcttgagtccttagtcggacgagacctgctgccccggggaacggggatcgtaactcgtagacccctcattctgcagctcgtacatgtgtctcaagaggataagagaaagaccaccggggaagagaacggcgtcgaggcagaggaatggggcaagttcctacacacgaagaataagctgtacacagactttgatgagatcaggcaggaaatcgaaaacgagacggagaggatttcaggaaataataagggggtgagcccggagcctatccatctgaagatcttctcacccaacgtggtgaatcttacactggtcgatctgcccggtatgactaaagtgcctgtgggagaccagcctaaggatatcgaactgcagatccgtgaattaatcctgcggtttattagcaaccccaactctataatcctggctgtgaccgccgctaacaccgatatggccacttcggaggctctcaaaataagtcgtgaagtggaccccgacgggcgtagaactttagctgtgattactaagctggacctgatggatgccggaaccgacgccatggacgtgttaatgggtcgggtgattccagtgaaactgggcattatcggggttgtgaatcgctcccaactggatatcaataataagaagagcgtgaccgattcgatccgggatgagtatgctttcctgcagaagaaataccccagcctggcaaacaggaacggcacaaaatacctcgcccgaactctgaatagactactgatgcaccacatcagagactgtttgcccgaactcaagactagaattaatgtgctcgctgcacagtaccaaagcctactgaactcttacggcgaaccagttgatgacaagagtgccacgcttcttcagctgattacgaagtttgccaccgagtattgtaatacaatcgaaggaactgctaagtatattgagacctccgagctttgtgggggtgcccgcatctgttacatctttcacgaaacttttggcaggacactcgaatcggtggacccactcggaggcttgaacaccatcgacatcctcaccgccattcggaacgctacaggacctagacccgcactgttcgtgcccgaggtttcattcgagctgctcgtgaagcggcaaattaaacgcctggaggaaccttcactcagatgtgttgagcttgtgcacgaagagatgcagcggatcatccagcactgttccaattactccacgcaggaacttttgcggttcccgaaactgcacgacgccattgtggaggtggtaacctgtttgttacgaaagcgactgcccgtaacaaatgagatggtccacaacctcgtcgccatcgagcttgcttacataaacactaaacaccccgattttgctgatgcctgcggcctcatgaacaataatattgaggagcagcgccggaaccgattggctcgagagctcccttcagccgtgtcccgcgacaagtcttctaaagtgcctagcgcgcttgcaccggcgtcccaggaaccctcccccgctgcaagtgccgaggccgacggaaaactgatccaagattccaggcgcgagaccaagaacgtcgcttctggtggcgggggggtgggcgacggcgttcaggaaccgactaccggaaattggaggggcatgttaaagacaagcaaagcggaggagctcctcgcggaggagaagagtaagccaatacctatcatgccagcatcgcctcagaaaggacacgccgtgaacctcctggacgtgccagtgccagttgctcgaaagctgagtgccagggagcagcgggactgcgaagtgatcgaaaggctcattaagagttacttcttaattgtgcgaaagaacattcaggattctgtacctaaagccgttatgcatttcttggttaatcatgtgaaggacaccctgcagtctgaattggtgggacagctgtataaaagcagcctcttggatgacctgcttaccgagtcagaagatatggcacagcgccgcaaggaggcagccgacatgcttaaggcactacaaggtgcctcacagattattgctgagatacgcgagacacacctctggtag

SEQ ID NO: 115214 - DNA, 2250 bp, synthetic construct
  misc_feature 1..2250: note = Description of Artificial Sequence: Synthetic coding sequence
  source 1..2250: mol_type = other DNA
atggaggccctgattccagtcatcaataaattgcaagatgtgtttaacactgtgggtgccgacatcatccagctgcctcagatagttgtcgtgggcactcagagtagcggcaagagtagcgtgcttgagtcccttgtggggagagatctgctaccacggggcactgggatcgttacccgtcgcccactgattcttcagctggtgcatgtgtcgcaggaggacaagcgcaagacaacaggcgaggaaaacgatcccgccacttggaaaaactccaggcacctgagtaaaggagtggaggccgaggagtggggcaaatttctccatactaaaaacaagctctacacagattttgatgagatacgccaagagatagaaaatgagacagaacgtataagtggcaataataagggcgtgagccccgagccaattcatctcaagattttctcaccgaatgtggttaatctgacgctggtcgacttaccaggtatgactaaagttccggtgggtgaccagccaaaggacatcgagttgcagattcgcgagttaatcctccgttttataagcaaccctaattccataattcttgcagtgactgcggcaaacactgatatggccacctctgaagctttgaagatttcccgcgaggttgaccccgacgggagacgcactttggctgtgatcacaaaacttgatttaatggatgctggcacagatgccatggatgtgctcatgggcagggtcattcccgttaagttaggaattatcggcgtcgtaaaccggtctcagctggatatcaataacaagaaatccgttactgactctatcagggacgaatacgcttttctgcagaagaagtatccttcccttgcaaacagaaacgggactaagtacttggcaaggacattgaaccgcttgctgatgcaccatatccgcgattgcttgccagaattaaaaacgcgcatcaatgtactcgctgcgcaataccagagcctgctgaactcttacggcgaaccagtggatgacaagtctgccactctgctgcagctgattacgaagttcgccacagaatactgcaatacgatcgaaggcacagcaaagtacatcgagacctctgagctctgcggcggagcccgaatctgctacatatttcacgagacttttggcaggactctggaatcagtcgaccccctcggaggtcttaatacaatagatatactgacagcgatccgcaatgcgaccggtcctcgacccgctctctttgtgccggaagtgtccttcgaacttctggtgaaacggcaaatcaagcggctggaagaacccagcctaaggtgtgtggaattagtgcatgaggagatgcagcggattatccagcattgcagtaactatagcacacaggagctcctgaggtttcccaagcttcatgatgccatcgtggaagtcgtgacatgtcttctgcgtaaacgcctacccgtgacaaacgaaatggtccacaatctcgtggccatagagctggcttatatcaacacgaagcatcctgactttgctgatgcctgtggcctgatgaataataatattgaagagcagcgcaggaaccgactcgcaagggagctgcccagcgccgtgtccagagataagtcctcaaaggtcccctctgctcttgcccctgcaagtcaggaaccatcacccgctgcgagcgccgaggcggacggaaagctcatacaggattcacggagggaaaccaaaaatgtggccagtggcggagggggggttggggatggcgtccaggaacctacaacgggtaattggcgggggatgctgaaaacctctaaagccgaggagctgctggccgaggaaaagagcaaacccataccaatcatgcccgcctccccgcagaaagggcatgccgtgaacctgctggatgtcccggtgccagtggcccggaagctcagtgcccgagaacaaagggactgcgaagtgatcgagcgcctgattaaatcctactttctgattgtacgcaaaaatattcaagatagcgtgcccaaggcggttatgcacttcctggtaaatcatgtgaaagataccctccagagcgaactcgtcggacagctgtataaaagctcccttctggacgatttactcaccgagagcgaagatatggctcagaggcgaaaagaggccgccgatatgcttaaggcactgcagggggcatcgcagattatagcagagatacgagagacacacctgtggtag

SEQ ID NO: 115215 - DNA, 2613 bp, synthetic construct
  misc_feature 1..2613: note = Description of Artificial Sequence: Synthetic coding sequence
  source 1..2613: mol_type = other DNA
atgggaaatcggggcatggaagagctgattcctctagttaataaattgcaggatgcattttcctcaatcgggcagtcttgtcacctggatctcccccagatagcggtcgttggcgggcaatcagcgggtaagtcttctgtcctggagaattttgtggggagagacttcctgccacgggggtccggcattgtaacacgccgcccccttatcttacagctcatcttcagcaaaacagagcatgcagagttcttgcactgcaaatcaaagaagttcacagattttgacgaggtaagacaggagatcgaggctgagactgatagggtcaccgggaccaacaaagggataagccctgtgcctattaacttgagggtgtactctcctcatgtcctcaacctcaccttgattgatctccccggcatcaccaaagttcccgtaggagaccagccccctgacatcgagtatcaaatcaaagatatgatactgcagttcatctctcgagagtcctcgctcatactggctgtgacccctgcaaatatggacctcgccaacagtgatgctcttaaactggcgaaagaagtggatcctcaaggcttaaggacaattggggtcataaccaagctggaccttatggacgagggcacggacgcccgagacgtcctcgagaacaaactgctccctctgcgccgcggctacattggggtggtcaatcgctctcaaaaggacatagaggggaagaaggacattcgggcagcgcttgccgccgaaaggaagttctttctttcgcatcccgcctaccggcacatggccgatagaatggggacaccacacctgcaaaagacgcttaaccagcagcttactaaccatataagagaaagcttgcctgcattgcggtctaagcttcaaagtcagctgctgagtctggaaaaggaagtcgaggaatataagaatttccgtcccgatgacccgacccgaaagacgaaggctcttctgcagatggtccaacaatttggggttgatttcgagaaaagaatcgagggatccggcgaccaggttgatacgttagaactgtccggaggagctaggattaaccgtatattccatgagcgcttccccttcgagttagtgaagatggagttcgacgagaaagacctgcgaagggaaatctcttatgccatcaaaaatatccatggtgtgcggaccggactgtttacccccgacatggctttcgaggctatcgtcaagaaacagatagtgaaactgaaggagccttctctgaagtgtgtggacctggtggttagcgagctcgcgaccgttatcaagaagtgcgcagagaagcttagtagttaccccaggcttagggaagaaacagagaggattgtcaccacttacatacgcgagcgcgagggacggaccaaagatcagatcctcctgctgattgacattgaacagagttacatcaacacaaatcacgaggactttattggcttcgccaatgcccaacagaggagcacacagctgaataaaaaaagggccatccccaaccagccagagacgctcgtgatccggaggggctggctcactatcaacaacatctctttaatgaagggcggcagcaaagaatactggttcgtcctgaccgccgagtcactaagctggtataaggatgaggaggagaaagagaaaaaatatatgttacccctcgacaatctcaaaattagggatgtcgagaagggttttatgagtaacaaacatgtgttcgccatattcaacacagagcagagaaatgtctacaaggacctgcggcagatcgaacttgcttgcgactctcaagaggatgtcgatagttggaaggcttctttcctacgtgcaggggtctatcctgagaaagaccaagcagagaatgaggacggggctcaggagaacacgttctctatggacccccaattggaacgacaggttgaaaccattaggaatttagtagactcttatgttgccattattaacaaaagcattagagatttaatgccaaagaccattatgcatcttatgatcaacaacaccaaagcctttattcaccatgagttactggcttatttgtattcttctgctgatcagtcctccctcatggaggagtcggcagatcaggcacagagaagagacgatatgttacgcatgtatcatgccctcaaggaggctttaaacataatcggcgatatttctacaagtacagtgtccacacccgtacccccacccgtggatgatacatggctacagtcggcctcctctcactctcccacaccacagcggcgtcctgtttcatccatacatcctcctgggaggccccccgccgtaaggggtcctacccccggcccgccgctaattccagtgcccgtcggcgcagccgcctccttttcggcccccccgataccatcacgaccagggcctcaatccgtcttcgcaaattcagacttatttcctgcacctccacagataccctctaggcccgtgagaatcccacccgggattccacccggcgtgccttccagaaggccacccgcagcccctagccgcccaaccataatccggccggctgagcctagcctcctggattag

SEQ ID NO: 115216 - DNA, 2601 bp, synthetic construct
  misc_feature 1..2601: note = Description of Artificial Sequence: Synthetic coding sequence
  source 1..2601: mol_type = other DNA
atgggtaaccgggggatggaggaactgatacctctggtcaacaaacttcaggatgcattttcctcaatcggccagtcttgccacctggatttaccacagattgccgtcgtcggtggtcaaagcgctggtaaatctagtgtcctcgaaaatttcgtggggagagacttcctcccacggggtagtgggatcgtcaccaggcggccgctgattctccagctcatttttagcaagacagagcatgcagagttcttgcattgcaagtcaaaaaaatttacggactttgatgaagtgagacaggagattgaagctgagacagacagagttaccggcaccaacaaagggatatcccctgtgcctataaacctgcgcgtttactcccctcacgtccttaatctgaccctgattgacctgcctggcattaccaaagtcccggtcggagaccagcccccagacatcgagtaccagattaaggacatgatcttacaattcatctcgcgggaaagcagcctcatactcgctgttacccccgccaatatggatctcgccaatagtgatgcattgaagttagcgaaggaagtcgacccacagggactgcgaactatcggggttatcactaagctggatctgatggacgaggggactgacgcccgcgacgtgctcgaaaataagctgcttcccttgagacgggggtacattggagtggtaaaccgctctcaaaaggacatagagggaaaaaaagacatacgtgcggcactggctgccgagcgtaagttctttctgagccaccccgcatataggcatatggctgaccggatgggcactccccatttacagaagacactgaaccagcagctaacaaatcatatcagagaaagcctgcctgcgctgagatcgaagctgcagtcccagcttctgagcctcgagaaagaggtggaggaatacaagaacttcaggccggacgatccaacccgtaagacaaaggctctgttgcagatggtccaacagttcggtgtcgacttcgagaagagaatagaaggatcaggcgatcaggtcgatactctggaactcagtggaggagctcggatcaatagaatctttcacgagcggttccctttcgagttagtcaagatggaattcgacgaaaaagaccttcgacgcgagatctcctacgcaattaaaaatatccatggggtgcggacaggtttgtttacacccgacctcgccttcgaggccatcgtgaaaaagcaagtggtgaaactcaaagagccctgcctgaaatgtgtggacttggttatccaggaactgatcaacactgtccggcagtgcaccagtaagctgagtagctatccccgcttgcgcgaagagactgaacggatcgtgaccacttacataagggagagggaaggacggacaaaagaccagatcctcctgctgatcgatattgaacagtcttatataaacaccaatcacgaagatttcattggatttgccaacgcccaacagcgcagtactcagctgaataaaaagcgcgccatcccaaaccaggtcattcgccgcgggtggctgaccatcaataatatttccttaatgaaagggggctctaaggaatactggttcgtgcttacggccgaatctctgtcgtggtataaggatgaggaagagaaggagaaaaaatatatgctgccactggacaacctgaagatcagggatgtcgaaaagggttttatgagcaataaacatgtgttcgctatattcaatacggaacagcggaatgtgtacaaggacctccggcagattgagcttgcctgtgactcccaggaggacgtggattcttggaaggcgagttttctgcgtgctggcgtgtacccagagaaggatcaggctgaaaatgaagacggagcccaggaaaacacatttagcatggacccacagttggaaaggcaggtcgagacgattcgaaatctggttgattcctatgtagccatcatcaataagtctattcgcgatttaatgcctaagaccatcatgcatctgatgatcaataacacgaaagcctttattcatcatgagctgcttgcttatctatattccagcgcagatcagagctcactgatggaagagagtgcagaccaggcccaacgtagggacgatatgctgaggatgtaccatgctttaaaagaagcactaaatatcataggagacatctccacatctaccgtgtcgactcctgttcccccaccagttgatgacacctggctacagtccgcctccagtcattctccgactccccagcggcgcccagtctctagtatccacccgcccggacgtccccccgctgtcagaggaccaactcctggaccaccgctgataccagtgccagtgggagccgccgcctcatttagtgctccccccatcccgtccagaccgggtccacagtctgtgtttgcaaattctgatcttttccctgccccaccacagattccctcgcgcccagtgaggattccgccagggatcccgcctggagtaccttccaggagaccacctgccgcacccagcagaccaaccatcattagacctgcagagcctagcctcctggactag

SEQ ID NO: 115217 - DNA, 2613 bp, synthetic construct
  misc_feature 1..2613: note = Description of Artificial Sequence: Synthetic coding sequence
  source 1..2613: mol_type = other DNA
atgggcaatagaggcatggaagaacttataccccttgttaataagctgcaggacgcgtttagttcgatcggccaatcatgccatcttgatctgccccagatcgccgtggtgggaggccaaagtgcgggcaaaagttccgtgcttgaaaattttgtgggccgggacttcctgcctcgcggctctgggattgttacaaggaggccacttatactgcagctgatcttcagtaagactgagcatgccgagttccttcattgcaaatcaaaaaaatttacggatttcgatgaggtgagacaggaaatcgaggccgaaacggatcgggtgacaggcactaacaaagggatttctcctgtcccaattaatctgcgcgtttacagcccccacgttcttaatctcaccttgatcgatcttccggggatcacgaaagtccccgtgggggaccagccgccagatatagagtatcagatcaaggacatgatcttacaatttatttcaagagaaagcagtttgatcttggccgttactcccgctaatatggatctcgccaactctgatgcactgaaattggctaaggaggtggatccccaggggctacgtacaattggcgttatcacaaaacttgacttaatggacgaagggaccgacgctagagacgtgctggagaataagcttctgccccttaggagaggctacatcggagtggtaaacagaagccagaaagacatcgagggcaagaaagacatcagagcagcgctcgccgccgagcggaaatttttcctgtcccacccagcttatcggcacatggcagaccggatgggcacaccccacctgcaaaagacactaaatcagcagctaacaaaccatattcgcgaaagccttcccgccctgcgctccaagctccagagccagttgctttcgttggagaaagaggtggaagagtataagaattttaggcctgatgaccccactagaaaaaccaaagccctgcttcaaatggtgcagcaatttggtgtggattttgagaagagaattgaaggaagcggcgatcaagttgatacactggagttaagtgggggggcaagaatcaacagaatcttccacgagcggttccccttcgagctggtgaagatggagtttgacgagaaagatcttcgcagagagattagctacgcaataaagaatattcacggggtacgaacaggcctctttactccagacctcgcgtttgaggccatcgttaaaaagcaagtcgtcaaactgaaggagccttgcctaaaatgcgtcgatctggtgatacaggagttgatcaacacagttcgacagtgcacatcaaaactgtcgagctacccccggctcagggaggagaccgagcggatcgtcaccacttacatcagagaaagagaggggcggaccaaagaccaaattctcctgctaattgatattgaacaatcttatatcaacaccaaccatgaggactttattggttttgccaacgcgcaacagagaagcactcagctgaataagaagcgcgcaattccgaaccagggtgaaattctcgtgatccggcgggggtggctgacgatcaacaatattagcctaatgaaggggggttctaaggagtactggttcgtgcttaccgcagagtctctgagttggtataaggatgaagaggaaaaggagaagaaatatatgctacccctggataaccttaaaattcgggacgtggagaagggcttcatgtccaacaagcacgtttttgctatctttaatactgagcagcggaacgtctataaggatctgagacagattgagctggcctgcgacagccaggaggatgtagacagctggaaggcaagcttcctgcgggccggggtttatcccgagaaagatcaggccgagaatgaagatggcgctcaggagaacacattctctatggaccctcaactcgagcggcaggtggagactattcgaaatctggtcgattcttatgtggccattatcaacaagtcaatccgcgatctgatgcccaagacaattatgcacttgatgattaacaacactaaggcgttcatccaccatgaattactagcgtacctgtatagcagcgccgaccaaagctccctgatggaagaatctgccgatcaggcccagagacgcgacgatatgctgcggatgtaccatgctctgaaagaggcgctgaacattatcggggatatttctacctctacagtgagcacacccgtgcctccgcctgtagacgatacttggctgcaaagcgcatccagtcattcacctacaccacagaggcggcctgtgtcatcaatccacccgccaggtagaccaccagctgtaaggggaccaacacccggtccaccactgattcccgtgcccgttggcgctgcggcatcgttttctgctcccccgattccttctaggcccggcccccagagtgttttcgccaactcagacctgtttccagcccctccccaaattccttctaggcctgttagaatcccccccggtataccgccaggtgtaccatctagacgaccccctgctgctccctctcgccctactattatacggccagcagaaccctcactgttagactag

SEQ ID NO: 115218 - DNA, 1461 bp, synthetic construct
  misc_feature 1..1461: note = Description of Artificial Sequence: Synthetic coding sequence
  source 1..1461: mol_type = other DNA
catgttacagtggccgctgccgacagctggaaaccccctgccagtgctcagcacgtcggaagggcgccgagagccggagcagccacttgctttctgggccctcggcctccttctcacctagggggacgggacttcctccctagggggtctggcatcgtgacacgaagaccactaattctccagcttattttttccaaaacagaacacgccgaatttctgcactgcaaaagcaagaaatttaccgatttcgacgaggtaaggcaggagatagaggcggaaacagacagagtgactggcaccaataagggcattagtccagttcccattaacctcagagtgtattcaccgcacgtgttgaaccttaccctgatcgatctgcctgggatcacaaaggtccccgtgggggatcaacctccagatattgagtatcaaataaaagatatgatcctgcagttcatttcccgggaatcctccttgattttggccgtgacgcctgccaacatggatctggctaactctgatgctttgaaattggccaaggaggtagaccctcaagggctgcggaccataggggtgataacgaagctcgatttgatggatgaaggcactgacgcaagagacgtgctggaaaataagcttcttcccctaagacgagggtacatcggtgtggttaacaggtcacagaaggacatagaggggaagaaagatatcagggctgcattagcagccgaacggaaatttttcctgtcgcacccagcctaccggcacatggccgataggatgggcacaccacatcttcagaagaccctaaatcagcagctaaccaatcacatccgagaatcactgccagctctgaggtctaagctccagtcccaactcctctctctggagaaagaggttgaagagtacaagaacttcaggcctgatgatcccacgcggaagaccaaagccttgctccaaatggtccagcagtttggcgtcgattttgagaagcgaattgagggcagcggggaccaggttgacaccttggaattgtccggaggggcacgcattaatcgcatcttccacgagagattccccttcgaactcgtgaagatggagtttgatgagaaagatctgagacgggagatctcttatgccataaagaacattcacggcgtcagaactggcttattcacccctgatatggccttcgaggccatcgtgaagaaacagatcgtgaagcttaaagagccatccctgaaatgcgttgatctcgtggtgtctgaactggccaccgtcattaaaaaatgtgccgaaaagctctccagctaccctaggctaagggaagagacggagcgtattgttaccacttatattagagaaagggagggaaggacgaaggatcaaatacttctcttaatagatattgaacagtcatacatcaatactaaccatgaggactttatcggcttcgcctag

SEQ ID NO: 115219 - DNA, 2613 bp, synthetic construct
  misc_feature 1..2613: note = Description of Artificial Sequence: Synthetic coding sequence
  source 1..2613: mol_type = other DNA
atgggcaaccgcgggatggaagaattaattccccttgtcaacaagctgcaggatgccttcagcagcatcgggcagtcctgccatctggacctccctcagattgcagttgttggagggcaaagcgcaggaaagagcagcgtgttagagaatttcgtggggagagactttctcccaagaggaagtgggatcgtgacccggcggcccctgatacttcagttaattttctctaagaccgaacacgccgaatttttacactgcaagtctaaaaagttcacagattttgatgaggtgcgacaggagatcgaagctgaaacagaccgcgtcactgggaccaacaagggtataagcccagtgcccattaacttaagggtgtacagcccccacgtcctgaatctcactctcatcgatctcccaggtatcacgaaggtacctgtaggggatcagccgcccgacattgaataccagattaaggacatgatactgcagttcatcagcagggagtcatccctcattctggccgtcacacccgcaaacatggacctcgcaaattcagacgcactaaaattagcaaaggaggtcgatccccaagggttgcggactattggcgtgattacaaaattggatttgatggacgagggcacagacgcacgcgacgtactagagaataagcttctgcctctgcggaggggctacataggtgtggtgaaccgatctcagaaggacattgaaggaaagaaggacatcagagctgcccttgccgcagagcggaagttttttctctcacaccccgcgtatcggcatatggccgatagaatggggacaccacatcttcaaaagacactcaatcagcagttgaccaaccacatccgggagtcgttgcccgctcttcgctccaagctccaaagccagctgctttctctggagaaagaggtagaggagtataaaaatttccgaccggacgacccgaccagaaagacaaaagctttgttgcagatggtccagcagtttggcgtggattttgagaagcggatcgaggggtcaggcgaccaggttgacactctggaactcagcgggggagctaggattaacagaatcttccacgagagatttccattcgagcttgtgaagatggaattcgatgagaaggacctccgacgggagattagttacgctatcaagaacattcatggagtgagaaccgggctcttcaccccagacatggcttttgaggcaatcgtcaaaaaacagattgttaaactgaaggagccatcattgaagtgcgtggatctagtcgtgtctgaacttgcaactgtcatcaagaagtgcgctgagaaactgagcagctacccccgcctacgagaagagacggaacggatcgtgaccacctacatccgggagagagagggacgtaccaaggaccagattctgcttctgatcgacatcgagcagtcctacatcaatactaaccacgaggattttatcggattcgcgaacgcccagcagcgcagtacacagttgaacaagaagagagcaattccaaatcagggggaaatactcgtcatcagaaggggatggctgactatcaacaacatctcactcatgaaaggggggagtaaggagtactggttcgtccttaccgctgagtctcttagctggtacaaagatgaggaagagaaggagaaaaaatacatgctccccttggataatcttaagatccgagacgtagagaagggatttatgagcaacaagcacgtgttcgcaatttttaacactgagcagcggaatgtgtataaagatctgagacagattgaactggcctgtgactcccaggaggacgttgactcctggaaagcatctttcttacgtgctggtgtgtaccccgagaaggatcaggccgaaaatgaggacggcgcacaggagaataccttttcaatggacccgcagctggaaaggcaggttgagaccatccggaacctggtggactcctacgtggctatcataaacaaatcaattcgtgatctcatgcccaaaaccattatgcatctcatgatcaacaatacgaaagcctttatccatcatgagctgctcgcatacctatattcgtctgccgaccagtctagcctgatggaagaatctgccgatcaggcgcagaggcgcgatgacatgctgagaatgtatcatgccctcaaagaagctctgaatattattggcgacatcagcacatccactgtgtccacacctgttccacctcccgtcgacgatacatggctccagtcggctagtagccacagcccaacgcctcagcgcagaccagtgagttctatacatcctccaggacggcctcccgcagtgcgaggaccgacaccaggccctcccttaattccagttccggttggcgccgccgcaagtttttcggcaccccccatccctagccgtccaggccctcagagcgtgtttgccaattccgatctgttccctgcacccccgcaaatccctagcaggcccgtcagaataccccccggcatccccccaggggtgcctagccggcgaccaccagctgctccttcccgaccaacaatcatcaggccggctgagccctcccttctggactag

SEQ ID NO: 115220 - DNA, 2601 bp, synthetic construct
  misc_feature 1..2601: note = Description of Artificial Sequence: Synthetic coding sequence
  source 1..2601: mol_type = other DNA
atgggcaatagaggaatggaggagctgattccgctggtgaataagcttcaagatgcctttagttccattggacaatcctgccaccttgacttacctcagattgccgtggtcgggggacagtctgccggcaaaagtagtgtgctggagaacttcgtgggcagggacttccttcctagaggctccggcattgtgacgcggagaccgctgatattacaactgatctttagcaaaaccgagcacgcggagtttctgcactgcaagagtaaaaaattcactgactttgacgaagtgcgacaggaaatagaggctgaaactgatcgcgtcactggcaccaataagggcatttctcccgtgccgatcaatctccgcgtctattcaccacacgtgcttaatctcacattaattgaccttcctggaataaccaaagttcccgtgggggaccagccccccgacatagaataccaaatcaaagatatgattctgcagttcattagtcgtgaaagttctttgatcttagctgttacaccagcaaacatggacctcgcaaactctgacgccctgaaactggccaaggaggttgacccccagggtctacggactatcggggtcatcaccaagctggatcttatggacgagggtactgatgcccgggatgtcctggaaaataagcttctgccattacgccgcggctacataggggtcgtcaaccgctctcaaaaagatatagaagggaagaaagatattagagcggccctcgcagccgaaagaaagttctttctgtctcaccctgcctataggcacatggccgatagaatggggaccccccatctacagaagaccctgaaccagcagcttaccaatcatattagagagagcctccccgcccttcggtcgaagctccagagtcagttgctttctttggagaaagaagtagaggagtacaagaactttcgcccggacgatcctacacggaaaaccaaggccctgttgcaaatggttcaacagttcggcgtagattttgagaagcgaatcgaagggtctggtgaccaagtggatacattggagctctccggtggcgcaaggattaacagaatatttcacgaaagatttccgtttgaactggtgaaaatggagttcgatgaaaaagatcttagaagagagatctcatatgctatcaagaatatacatggcgtgaggaccggactttttaccccagatatggcattcgaagccatcgtgaagaaacagattgtgaaactgaaagagccgtcacttaaatgcgtcgacctcgttgtttcagaattggctacagtaatcaaaaagtgcgccgaaaagctgtctagctacccgcgactgagggaggagacagaacgcattgtgacaacatacatccgggagcgagagggcagaaccaaggaccagatcctcctcctgatcgatatagagcagagttacattaatactaaccatgaggacttcatcggtttcgctaacgcacaacagaggtctacacagttgaacaagaaacgcgccattccaaatcaggtcatccggcggggctggcttacaataaacaacattagtctcatgaaggggggcagtaaggagtattggtttgtccttactgcagagagcctgtcttggtacaaggacgaggaggagaaggagaagaagtacatgctgccactcgataatctgaaaataagggatgtggagaagggtttcatgtcgaataagcacgtgtttgcgatatttaatactgagcaacgaaatgtctataaagatttgcggcagatcgaactggcatgcgattctcaggaagacgtcgattcttggaaagcgtcttttttgagggctggcgtgtatcctgaaaaggatcaggcagaaaacgaagacggggcccaggagaacactttcagcatggatcctcagcttgaaagacaggtggagactatccggaacctcgtggactcctacgtggccattatcaataagtccatccgggatttgatgccgaaaactatcatgcatctcatgatcaacaacactaaggccttcatacatcacgaacttttggcatacctttactccagtgcagaccaatcatctctcatggaggaatccgcagaccaggcccaacgcagagatgatatgctgcgtatgtatcacgcactaaaggaggcactgaacattataggggacatctccactagcaccgtgtcaacgcccgtgcctcctcctgtcgacgatacttggctgcagtctgcctcaagccacagccccacccctcagagaagaccggtgagtagtatccacccacccgggcgacccccagcagtgcggggtcccaccccggggccccccctgattccagtgccagtcggcgcggccgctagctttagtgcccccccaatcccaagtcggccggggccacagtctgtgttcgcaaattcagacctgttccccgctcctcctcagattccttcgagacctgtgcggatccccccgggcataccacctggtgtcccgtctcgtaggccccctgcagccccaagcagaccgactatcattcgcccggctgaaccatctctgttagactag

SEQ ID NO: 115221 - DNA, 1200 bp, synthetic construct
  misc_feature 1..1200: note = Description of Artificial Sequence: Synthetic coding sequence
  source 1..1200: mol_type = other DNA
atgttaccattagagccatatctcacacagacaagcgctgtccctcaaatgtcacactttatgtgtcacagccccacacataagccccagggtctgctcccatgggccccatttcatcaggcgagcgtaagtctttatcctataagtccctggccctccgagtccgtgtgcccccctacttgcccaggaggggctagttgttggtttccagcgggtaatgcctgggatcgggtggagttgggattcttaggatttggagctggcggagtgtccatagcagttccaggctttcccctgtcttgtgggcagggttgttgtgcaggggggtggctgggacacggcgctagatttccagctaagctgcgagcatttcctcaggttattagacgaggatggctgacgatcaataacatttctctaatgaaaggcggaagcaaagaatactggtttgttctgacggccgagtctttgtcgtggtacaaggatgaggaggagaaggaaaaaaagtatatgctaccgctggacaatctcaaaattagagacgtggaaaagggtttcatgtcgaataagcacgtcttcgcaatcttcaacacagagcagagaaacgtgtataaggacctccgtcagatcgagctggcctgtgattcccaggaagatgtagactcctggaaggcgtctttcctccgagccggggtctatcccgagaaagatcaagcagaaaatgaagatggagcccaggaaaacacttttagtatggaccctcaacttgaacgccaggtggagactattcggaaccttgttgattcatatgtcgccattatcaataagtcaatcagggatcttatgccaaaaaccattatgcacctcatgatcaacaatacgaaagcgtttattcaccatgaactcctcgcgtatctgtatagctccgcagatcagagcagtctgatggaagagtctgctgatcaggcccaaaggagagatgacatgctgcggatgtaccacgcgttgaaggaagcactcaatattatcggagatatttctacctccacagtgtctacccctgttccaccacctgtggacgatacctggctgcaatctgcttcttctcattcccccaccccacaacgccggcccgtgtcctccatccatcctcccgggaggcctcccgctgtgcgtggccctacgcctggacccccctag

SEQ ID NO: 115222 - DNA, 13284 bp, synthetic construct
  misc_feature 1..13284: note = Description of Artificial Sequence: Synthetic coding sequence
  source 1..13284: mol_type = other DNA
atgagctctaaggccgagaagaagcagcggctctccggtcgggggagttcccaagcaagctggtccgggcgtgctacgagagcagccgtagccactcaggaacaggggaacgcccccgccgtgtctgagccagagctccaggcggagctgcctaaggaggaacccgaaccgaggctggaaggcccgcaagcccagagcgaagagagcgtggaacccgaggctgacgtgaaacctttattcctgagccgagccgcactaaccggtctggctgacgcggtctggacccaggagcacgatgccatcttagaacactttgcccaagaccctaccgagtccatcctgactatcttcattgatccttgttttggtctgaaactggagctgggaatgcctgttcagactcagaaccaactggtctacttcattagacaggcccccgttccaatcacctgggagaacttcgaagctaccgtgcagtttgggactgtacgtggcccttacatcccggctctcctgaggcttttaggtggcgtattcgcaccccagatttttgctaatacaggctggcccgaatctatcaggaaccactttgcctcccacttgcataagttcctagcatgtctgacagatactagatataaattggagggacacactgtgctctacatcccagctgaagccatgaatatgaagccggaaatggtgatcaaagataaggagttagtgcagaggctggagacaagcatgatacattggaccagacagataaaagaaatgctgtccgcccaggagactgtggaaaccggcgaaaatctcggacctctggaagagatcgagttttggcggaataggtgtatggatctaagcggcatcagcaagcagctggttaaaaagggcgtaaagcacgttgaatccattctccatcttgcaaaatccagctatcttgccccattcatgaaactggcacagcagattcaggacggaagccgtcaggcccagagtaacctgacctttctctcaatactgaaggagccttaccaggagcttgcctttatgaagcctaaagacatttcatctaagctgccaaagctgatcagtctgattcggataatctgggtgaattcaccccactacaatactcgggaaaggcttacaagtctgtttcgcaaggtctgcgactgccagtaccactttgcacggtgggaagatggcaagcagggtcctctgccttgtttttttggcgcccagggacctcagatcactcggaacctgctcgaaatcgaggacatctttcataaaaatctccacactctccgggctgtccgcggcggtattctggatgtaaagaacacttgctggcacgaggactacaataagttccgcgcaggcattaaggatctggaggtgatgactcaaaacctgattacatctgctttcgaacttgtgcgagacgtgccacacggtgtgctcttactggacacatttcacagactggcatctcgtgaagcgataaagcgcacatacgacaagaaggcggtcgacctctatatgctgttcaacagcgagttagctctggtgaaccgtgagcgcaataagaaatggcccgacctcgaaccatacgtagcccagtactctggtaaagcgcggtgggtacatatcctgcgaaggagaatcgatcgagtgatgacttgcttagccggcgcccattttctccctcggattggcactggcaaggagtccgttcatacatatcagcagatggtccaggccattgacgagctagtacggaagactttccaagaatggacctcttccctggataaagactgcattcgtagacttgacactcccttgctcagaatatcccaagaaaaagccggcatgttggacgtgaactttgataagtccctgctaatcctgttcgctgaaatcgattactgggagcggctcctgttcgagactcctcattatgttgtgaacgtggctgaaagagcggaagacttacgcatcctgagagagaatctgttgctggtggccagggactataatagaatcatcgcgatgttatcccccgacgagcaggcactttttaaggaacgcatcagactgctggacaagaagattcaccctgggctcaaaaaattacactgggccttgaaaggagcatctgctttcttcatcactgagtgtagaattcatgcctcaaaggtgcagatgattgtcaatgaattcaaagcatccacgctgactattgggtggcgggcacaggaaatgagcgagaagctcttggtccggattagcgggaagagggtataccgtgacctggaattcgaagaggatcagagggagcaccgggccgcggtgcagcagaaactgatgaacctacatcaggacgttgtcacgataatgacgaacagttatgaagtattcaagaacgatggccctgagatccagcagcagtggatgttgtacatgatacgactggaccggatgatggaggacgccctgagactgaacgtgaagtggagcctgctagagctgtctaaagccatcaacggagacggaaagactagccctaaccccctgtttcaggtccttgtaatcctaaaaaatgatctccagggctcggtggcgcaggttgagttctcaccaaccctgcagactttagccggcgtagtcaatgacatcggaaaccacctgttcagcaccatatcggtgttctgtcacctcccggatatactgactaaacgcaagttgcacagagaacccatccagacggtagtcgagcaggacgaggacatcaagaaaatacagacccaaatatctagcggcatgacgaataacgcatcactgctgcagaattatctcaagacatgggatatgtatcgggagatttgggagatcaacaaggattcatttattcacaggtaccagaggctgaatccccctgtctcatctttcgtcgcagacattgcccgatacaccgaagttgccaacaacgtccaaaaggaggagactgtgacaaacattcaattcgtgctgctcgattgcagccaccttaaattctccttagttcagcactgcaacgagtggcagaacaaattcgccacgctgctgcgcgaaatggctgctggacggctgttggagctacacacttacctcaaggagaacgctgagaagatttcgaggccaccccagacgctggaggagctgggcgttagccttcaactcgtcgatgccttaaagcacgatctggctaatgtagagactcagatcccgccaatccacgagcagttcgccattctagagaagtatgaagtgccagttgaggacagtgtgttagaaatgctagattcccttaacggagaatgggttgtgttccagcagactttgcttgactctaaacaaatgctgaagaaacataaagaaaaattcaagaccggtctcatccacagcgcagacgatttcaagaagaaggcacataccttactggaagatttcgagttcaagggccatttcacaagtaacgtcggttatatgagtgccctcgatcaaattacccaagttagagctatgctgatggctatgagagaggaggagaattctctacgggcaaacctgggcatttttaagatcgaacagcctcccagcaaggacttgcagaatctcgaaaaagagttagacgccttgcagcaaatttgggaaattgcacgagattgggaagagaactggaacgagtggaagacagggcgatttctgatcctgcagaccgaaacaatggagaccaccgcccacgggctgttcaggagactgaccaagctagcaaaggaatataaagaccgaaattgggaaataatcgagacaacccgctctaaaattgaacagtttaaaaggacaatgcctcttattagcgacctgcggaaccctgccttgcgagagcggcactgggaccaagtgcgggatgagatccaacgagagttcgaccaagagtccgaaagttttacactcgagcagatcgttgaactgggaatggatcagcatgttgaaaagataggcgagatcagcgcctccgccaccaaggagcttgcaatagaagtcgcccttcagaatatcgcaaaaacttgggatgttacccagctggacattgtaccatacaaggataagggccaccaccggcttcgaggaaccgaagaggtcttccaggcccttgaggataaccaggtggctttgagcaccatgaaggctagtcggtttgtgaaagccttcgaaaaggacgtcgatcattgggagcgatgtctgtccttgatactggaggtcatcgagatgattctgacagtgcagagacagtggatgtacctcgagaatattttcttaggagaggatatccggaaacagctgcctaacgaatcgactctctttgaccaggtcaacagcaactggaaggctataatggatagaatgaacaaggacaataacgccctgcgatccactcaccatccaggcctgctggataccctgatcgagatgaacacaatcctcgaggatattcagaagagcctcgacatgtacctggagactaagcgacatatatttcccaggttttactttttgtctaatgatgacctgttggagatcctcgggcagagccgcaatccggaggctgtacagccacacctgaagaagtgttttgataacattaagttgctgaggattcaaaaagtcggagggccctcttccaagtgggaagccgtgggcatgttcagcggggacggagaatacatcgacttcctgcactcggtgtttcttgaaggccccgtcgagtcgtggcttggggatgtcgaacagactatgagagtgactctgcgtgatctcctgcgcaattgccacctggcgctgcgcaaattcctgaacaagcgcgataagtgggtcaaggaatgggctggacaggtggtcatcacggcttcccaaatccagtggaccgccgacgtgaccaaatgcttgctgactgcaaaggagcgggccgacaagaagattctgaaggtgatgaagaagaaccaggtgagtattttgaataaatatagtgaggctattaggggtaatctgaccaagattatgaggctgaagatcgtggcactggtaacgatcgaaatccatgctcgggatgtactagagaaactttataaatccggcctcatggacgtcaatagcttcgactggctgtcccagctacgcttctactgggaaaaggacctggacgactgcgtgattagacagactaacacgcagtttcagtacaactatgagtacctgggcaattctggcagattggtgatcaccccacttactgaccgatgctacatgactctgacaactgccctgcatcttcaccggggaggatcacctaagggcccagccggaacagggaaaacggagacagtgaaggatttaggaaaagcacttggtatctacgtcatcgtcgtcaattgctcagagggcctggattataagtccatgggcaggatgtacagcggcctcgcacagacaggggcatggggttgctttgacgaattcaacagaatcaatatcgaggtgctgtctgttgtcgctcaccagattttgtgcatcctctcagcgcttgcagctggcctcacccatttccattttgacggcttcgagatcaatctcgtgtggtcgtgcggaatttttatcaccatgaaccctggctacgctgggcggacagagctgcccgaaaacctgaaatccatgtttcggcccatcgctatggtcgtgccagactcaacattgatcgcagaaataatcctgttcggtgaaggatttggcaattgtaagatactcgctaaaaaggtgtataccttgtacagcctagcagtgcagcaactgtctaggcaggatcactacgacttcggattgcgtgctttaacatctctcctacggtatgctggtaagaagaggagactgcagcccgacctgacagacgaggaagtcctgctcctctctatgagggatatgaacattgccaagctaacttcagttgacgcccccctgttcaacgccatcgttcaggatcttttccccaatattgaattacccgttatagactatggaaaactgagagaaacagtggaacaagaaatccgagatatgggcctgcagtccactccattcactcttactaaggtcttccaactatacgaaaccaaaaactcacgccattcaacgatgatagtgggttgcacaggctctgggaaaaccgctagttggagaattctgcaagcaagcctgagctccctctgtagggcaggggatccaaacttcaatatcgtgagagagttccctctaaatcccaaggccctgagcctcggcgagctctatggggagtacgacctctccaccaatgaatggacagacggtattctgagttcggtcatgcgcaccgcctgtgcagacgagaagcccgacgaaaaatggatcttattcgacgggccagtggatactttgtggattgaaaacatgaatagcgttatggacgataacaaagtccttactcttatcaacggggagaggatcgccatgccagagcaagtgagccttctgttcgaagtggaagatctcgctatggcctcccctgctaccgttagcaggtgcggcatggtgtacaccgattacgcggacctgggctggaagccatatgtgcaaagctggcttgagaagcggccaaaggcagaggtggaacccctgcaaagaatgtttgaaaaactgataaataaaatgctggcttttaaaaaagataactgcaaggaactggtgccgttgcctgagtattccggtattacatccctgtgcaaactgtatagcgctctggcaaccccagagaatggcgtcaaccccgcagatggtgaaaactatgtgactatggtggaaatgacatttgttttttccatgatctggtccgtctgcgctagcgtggatgaggaaggcagaaaacgaattgatagctacctgcgagaaatcgagggaagttttcccaacaaggataccgtgtacgaatactttgttgatcccaaaatccgttcatggaccagctttgaggataaactccccaaaagctggaggtacccccctaatgctcccttttacaagataatggtgcctacagtggacaccgtgcgatataactacctggtgagttcccttgtggccaaccaaaaccccatactgttggtggggcccgtgggcacgggaaaaaccagcatcgctcagtctgtactgcaatccttgccatcctcacagtggagcgtgcttgtagtgaatatgtcagcccaaaccacctcgaacaacgtgcagtcaatcattgaaagcagggtagaaaagagaaccaaaggcgtgtacgttcccttcggaggtaaaagcatgatcacatttatggacgatctgaatatgccagctaaagacatgtttggctcccaacccccattggagctgatcagactatggattgactacgggttctggtacgatcgaacaaaacagacaattaagtatataagggagatgtttctgatggcagccatgggccctcctggaggcggcagaactgtaatttcgccaagattaagatctagatttaacattattaatatgacgttccccaccaaatcacaaattatccgaatctttggaaccatgatcaaccagaaactccaggattttgaagaggaagtcaagccaatcggaaacgtggttaccgaggccacactcgatatgtacaacacagtagtgcagaggtttcttcctactccaacgaagatgcattacctcttcaaccttagggatattagtaaggtgtttcaagggatgctgcgggccaataaggactttcacgacacaaagagcagtattacaagactgtggatacacgaatgctttcgtgtgttcagcgaccggctggtggacgcggcggacaccgaggcattcatgggcatcatctctgacaaactgggatcgttttttgatctcacattccatcatctttgtccttccaaaaggcctccaatttttggggacttcctgaaggaacctaaggtatacgaggatttgaccgacctgaccgttctgaagactgtaatggaaaccgccctcaacgagtataatctttcacccagcgtggtcccaatgcagttagtgctattcagggaggccattgagcacattacaaggattgtgagagtgatcggccaaccgcgaggaaacatgctacttgtcggtatcggcgggtcaggcagacagtctttagcgcgactagccagtagtatttgtgactataccacctttcagattgaggtcacaaaacattatcgtaagcaggagtttcgagacgatatcaagcgactctaccgacaggcaggggtggaactgaagaccacatcctttatattcgtggacacccaaattgctgacgaaagctttctcgaggatataaataatatactatcttccggcgaggtccctaatctttacaaaccggacgagttcgaggaaattcagtcgcacatcatcgaccaagctagggtggagcaggtgccagagtctagcgattcgttgtttgcctatctgatagagcgtgtgcagaacaacttgcacatcgtactttgtctttctcctatgggcgacccgttccggaactggattcgacaatatcccgccctggtgaattgcactactataaattggttctccgaatggccacaggaagcattgctcgaggtagcggaaaagtgtctgattggcgtggacttgggtacccaggaaaatattcaccgcaaagtagctcagattttcgtcaccatgcactggtccgtggctcagtattctcaaaagatgctcttggagctgcgtaggcataactacgtgacaccaactaagtacctggaactgttgtcgggatataaaaagctgctcggggagaagcgtcaggagctgctcgctcaagccaataaactacggactggactgttcaaaatagatgaaacaagagaaaaggtgcaggtgatgagcctcgagctagaagatgcgaagaaaaaggtcgctgagttccagaagcaatgcgaggaatatctcgttatcatcgtgcagcagaagcgcgaggccgatgaacagcaaaaagccgtaaccgctaattccgaaaaaatcgctgtggaggaaattaagtgccaggcccttgcagataacgcacagaaggatctcgaggaggcactgccagccctagaagaggccatgagagcacttgagtccctgaataaaaaggacatcggagaaattaaatcttacggcaggcctcccgcccaggtggagatcgtcatgcaagccgtaatgatcctgcgggggaacgagcctacctgggcagaagcaaagagacaattgggggaacagaactttattaaaagcctcatcaacttcgataaggacaacatttctgataaggtcttgaaaaaaatcggcgcgtattgcgcccaaccagacttccagcctgatataattgggagagtgtcattagcagcaaagagcctgtgcatgtgggtccgcgccatggagctctatggacgtctttaccgagtggtggaacccaagcgcattcgtatgaacgctgctctggcacaactcagagagaaacaggccgccctggcggaagcccaggaaaagctgcgtgaagtcgctgagaaactggagatgctgaagaagcagtatgacgagaagctggcacagaaggaggaactgcgtaaaaaatctgaggagatggagttgaagctggagcgggccggaatgctcgtttcaggcctggctggagagaaagcccgatgggaggagactgtccagggtctggaagaagacttggggtacttggtgggcgattgtcttttggcggcagccttcctgtcctacatgggcccctttctgaccaactatcgggatgaaattgtgaatcaaatttggatcgggaaaatttgggaactgcaggtgccgtgctcccccagtttcgccattgacaactttctgtgcaacccaacgaaggtgcgtgattggaatatccagggtctaccctctgacgcttttagcaccgagaatggcatcatcgtaactcgggggaatagatgggccttgatgattgacccccaggcccaggcgctcaagtggatcaagaacatggaaggcggccaagggctcaaaattatcgatctacaaatgagcgattatttgaggatattagaacatgccatccattttggctaccctgtcttgctgcaaaatgttcaagagtacctcgatcccaccctgaatccaatgctgaataagtctgtcgcaaggatcggtggcaggttactgatgaggatcggggacaaggaggtcgaatataataccaacttcaggttctatataacgaccaaactgagcaatccacactactctccagaaacatcagccaagaccaccattgtcaattttgccgtgaaagagcaaggcctggaggctcagctgttgggtattgtcgtgcgcaaggagcgccccgaactcgaggaacaaaaggactccttagtcatcaacatagccgccggaaaacggaaactgaaggagctggaggatgaaattctccgcctgctgaatgaggcgaccgggtcactgctggacgacgtgcagttggtgaataccctacacacatctaagatcaccgccacagaggtaactgaacaactcgaaaccagcgaaactacagaaatcaataccgacctggcacgagaggcatatcgaccttgtgctcagcgtgctagcattctctttttcgtgctgaacgacatgggctgcatagatcccatgtaccaatttagtttagacgcttatatcagcctgtttatcctgtcaattgacaagagccatcggtcaaacaagctggaggaccggattgattatctaaatgactatcacacttacgctgtgtatcgctacacttgccgcacattgttcgagagacacaagctgctcttctccttccatatgtgtgcaaaaattctcgagacatccgggaagttgaacatggacgaatataattttttcctgcgagggggcgtggtcctggatagggagggccagatggacaacccgtgtagcagctggctggcagacgcttattgggataatatcacagaattggacaagttgacaaattttcatggactaatgaacagttttgagcagtatccccgggactggcacctgtggtacactaatgccgcacccgaaaaggctatgcttcctggcgagtgggagaacgcctgcaatgaaatgcagagaatgctgattgtgcggtccctccgccaggaccgggtggccttctgtgtcacatctttcattattacgaatctggggtctaggtttattgagcctccagtccttaacatgaaatctgtgttagaagactccacacctcgaagccccctggtgttcattctctcccctggcgttgatccgacttcagccctcctgcagctggcagaacatatgggcatggcgcagcgctttcacgctctctcgcttgggcaggggcaagcacctatcgccgccagacttctgagggaaggggtgacacagggtcactgggtgtttctcgccaactgccatctgtcgctgtcttggatgccaaatctggacaaactcgtggaacagctgcaggtggaggacccgcacccttctttcaggctgtggctgtcgagcattcctcatcctgacttcccaatctccattctccaagtgtctatcaaaatgaccactgagcctcccaaagggctgaaagcaaatatgacccggctttatcagctgatgagcgagccacagttcagccggtgtagtaagcctgctaagtacaaaaagctgctgttctcactctgttttttccactcagtgctgctcgaaaggaagaaatttctgcaacttgggtggaacattatttatggctttaatgactcagattttgaagtcagtgagaacttgttgagtctttaccttgacgagtacgaagaaactccctgggacgccctcaaatatctgatcgcggggatcaattacggcggccatgtcactgacgactgggataggagattgctcacgacatacattaatgattacttctgcgaccaatcgctgtccacgccttttcacagactgagcgcactggagacctacttcatcccaaaagacgggtcccttgccagttataaagagtacatatccctgctccccggcatggaccctcctgaagccttcggacagcatcctaacgcagacgttgcgagccagattactgaagcccagacactttttgacaccctgctgtcactgcagccacagattacgcctacacgcgccggggggcagacgcgggaagagaaggtcctggaactggcagcagacgtgaaacagaaaatccctgaaatgatcgactacgaggggacccagaagctgctggcactggaccccagccccctgaatgtggttcttctccaggagattcagagatataacaccttaatgcaaaccatcctgttctcacttaccgatctcgagaagggcatccagggactgatcgtcatgagtacatccctggaggagattttcaactgcatctttgatgcacacgttcctcctctttggggcaaggcataccctagccaaaagccactggcagcttggacaagagacctggctatgcgggtagaacagttcgagttatgggccagtagagccaggccgcctgtgattttttggttatcaggctttacttttcccaccgggttcttgaccgccgtgctccagtctagcgccagacagaataacgtgtcagttgactctctgtcatgggagttcattgtctccactgtcgacgactccaacctggtctacccaccaaaagacggagtgtgggtgagggggctctatttggaaggggccggctgggaccgtaaaaactcctgcttggtcgaagccgaacctatgcagctggtgtgtctcatgcccacaatccacttccgccctgccgagtcacggaagaaatctgcaaaaggaatgtatagttgcccctgttattattaccccaaccgggctggcagctcagacagggctagcttcgtcattggcatcgatctcagaagtggggctatgactcccgatcactggatcaagcgcggtacggcactcctgatgagtctcgactcctag

SEQ ID NO: 115223 - DNA, 1782 bp, synthetic construct
  misc_feature 1..1782: note = Description of Artificial Sequence: Synthetic coding sequence
  source 1..1782: mol_type = other DNA
atggaaatagtttatgtttacgtcaaaaaaagaagtgagttcgggaagcagtgcaacttttctgacaggcaagcagaacttaacatcgacatcatgccaaatccagagctggccgagcagttcgtcgagaggaacccggtcgatacaggaattcagtgtagcatcagcatgtccgagcatgaagccaactctgaacgtttcgaaatggagacacgaggagtgaatcacgttgagggcgggtggcctaaagacgtcaaccctctggaactcgagcagacaataaggtttcggaagaaagtcgagaaggatgagaattacgtgaatgccatcatgcaacttggcagtatcatggaacattgtattaagcagaacaatgcaatagacatctacgaggagtatttcaatgacgaagaggcaatggaagtaatggaagaggacccctccgctaaaacaatcaacgttttccgggatccccaggagatcaagcgcgctgccactcatctgagctggcatcctgacgggaatcgcaagttggccgttgcttacagttgtctggactttcagagagctcccgtcggtatgtcaagtgattcctatatctgggatttggagaaccccaacaagcccgagttagctctgaagcctagctcccccctggtaaccctggaattcaaccctaaggatagccatgtgttgctcggcggctgctacaacggtcagattgcctgctgggacactcgcaagggcagcctggtagccgagctctccaccattgagtccagccacagagatccagtgtacggcacaatttggctgcaatctaagacaggaacggagtgtttcagcgccagtactgatggccaagtgatgtggtgggatatacgcaaaatgtccgagcctacggaggtggttattctggatatcaccaaaaaggagcaactggaaaacgcactcggtgccatctcactcgagtttgaaagcaccctacccactaagttcatggtgggtacagagcagggcatcgtgatttcttgcaaccggaaggccaagacttcagccgagaaaatcgtgtgtacatttcccgggcaccacgggcctatctacgcccttcaacggaatcccttctaccccaaaaacttccttactgtcggcgattggacggcacggatctggagtgaggattccagagagagtagtataatgtggaccaagtaccatatggcttatctgaccgatgccgcatggtcaccagtaagacctactgtatttttcacaactaggatggacggaaccttagacatttgggactttatgttcgaacaatgcgatcccaccctgtctctgaaagacaacggatgcctgatcgcctgtggatcccagctcgggactactactctacttgaagtttcaccaggcctctcaaccctccaaagaaacgagaaaaacgttgcttccagcatgtttgaacgggagacgcgcagagagaagatcctcgaagcccgccaccgggagatgcgcctcaaagagaagggcaaagccgagggccgagacgaagagcagactgatgaggagctggctgtcgaccttgaggccttggtgtccaaggccgaagaagaattttttgatatcatctttgccgaactgaagaagaaggaggcagacgccatcaaattgaccccagttcctcaacagccgtcccctgaggaagaccaggtggttgaagagggcgaggaggcagccggagaggaaggtgatgaggaggtcgaggaggatttagcatag

SEQ ID NO: 115224 - DNA, 2676 bp, synthetic construct
  misc_feature 1..2676: note = Description of Artificial Sequence: Synthetic coding sequence
  source 1..2676: mol_type = other DNA
gaaaaagataacggattggacgtcttcaagctgtccgatagggacttcctgcgctccatggagaacgcaattagatttggaaagccatgcctactggagaatgtaggagaagaactggaccccgcccttgagcccgttctcctgaagcagacttataagcagcagggtaacacagtcctgaagttaggagacactgtgatcccttaccatgaggacttcagaatgtacatcaccaccaagttacctaatccccactacacacctgagatttccacaaaactcacattgatcaacttcaccctgtctccctccggactcgaggaccagctgctgggccaagtggtcgccgaagagcggccagatctcgaggaggccaaaaatcagctcataataagcaatgctaaaatgagacaggagctgaaggatatcgaggaccagatcctctaccgcctgtctagtagtgaaggaaatccagtggatgatatggaactgattaaggtgctcgaagcgtctaagatgaaggccgcagaaattcaggcaaaggtgcggattgcagagcagactgaaaaagacatcgatctcacgcggatggagtacatccccgttgctatcagaacacagatcctcttcttctgcgtctctgatctagcaaatgtcgatcctatgtatcaatattcgcttgagtggttcctgaatattttcctgtccggcatcgcaaactccgagcgagccgacaacctgaagaagcggatctccaatataaatagatacctgacttactccctttacagtaatgtctgtcgaagtctctttgagaaacataaactgatgtttgcgttcctcctctgtgttcggattatgatgaacgaaggcaagattaatcagtctgaatggcggtatctgttgagcggcggcagcatttctataatgacagagaacccagctcccgattggctctcagatagggcctggagggatatcctggccctgtccaatctgcctaccttctcctcatttagctccgattttgtgaaacatctgtctgagtttagagtgatctttgactccctagagccgcatagggagcccctgcctggaatctgggatcagtacctcgatcagtttcagaaactgttggtcttgaggtgtctgaggggagacaaagttactaatgccatgcaggacttcgtcgcgaccaacctggagccacgcttcatagaaccccagactgccaacttgagtgtggttttcaaagactcgaactccaccacacctctaatctttgtgctgtcccctggaaccgatcccgcagccgacctctacaaatttgctgaggagatgaagttttctaagaagctcagcgctatcagcctgggccaggggcagggccctcgggctgaagctatgatgagaagttccatagaacggggcaaatgggtcttctttcagaactgccatctggcccctagctggatgcccgcccttgagaggcttattgaacacatcaatcccgacaaggtgcacagagactttcggctctggctgacctctctgccatctaacaagttccctgtatctatcctccagaacgggtccaaaatgactatcgagcccccaaggggtgtgagggccaatttgctgaagagctacagctccctgggagaagacttcctgaactcttgccacaaagttatggaattcaaatcgctcctgctcagtttgtgtttgttccacggaaacgcgctggagagacacaaattcgggcctctgggttttaatatcccctacgaattcactgacggcgacctgcgtatctgtatctcccagctgaaaatgttcctggatgaatatgacgacattccgtataaagtgcttaagtatactgccggagagatcaactacggcggcagagttactgacgattgggaccggcgatgcatcatgaatatactggaagatttttataatcctgacgtgctttcacctgagcactcatattccgccagtgggatctatcaccagataccaccaacctacgacctacacggctacctcagttacatcaaatcacttcccctgaacgatatgccagaaatattcggtcttcatgacaatgcgaatattacattcgcccagaacgaaactttcgctctgctgggcactattattcaactgcagccgaagagttcgtccgccggctcccaggggagggaggagatcgtggaggacgtcacgcagaatatacttctcaaggttcctgaacccataaacctgcagtgggtaatggcgaaataccccgtcttatacgaggagtctatgaacaccgtcctcgtccaagaagtgatccggtataatcggctcctgcaagtgattacacagactcttcaagacctccttaaagccctaaaggggctggtcgttatgtcttctcaactggagctgatggctgccagcttgtataataacaccgtgccagagttatggagcgctaaagcctatccctccttaaagcccttgagctcctgggtgatggatctgctccagagactcgattttctgcaagcgtggattcaggatggcattcctgccgtattttggattagcggtttcttttttccccaggcctttaatcgacatagcgccgagttctgtccgcaaatctgccatctgcattag

SEQ ID NO: 115225 - DNA, 12798 bp, synthetic construct
  misc_feature 1..12798: note = Description of Artificial Sequence: Synthetic coding sequence
  source 1..12798: mol_type = other DNA
atggaacagcctaacagcaaaggttattctctgggcagaactccacagggccccgaatgttcctcagcccctgccgtccaggtgggcactcatcgcgggctggagtacaacccaggcaagattctgcccggaagtgactatggcttgggaaatcctcctgctcttgatccaaaactccctcacttgccactgcctcccgccccccctacattgtcagatctaggccagccgcgcaagagtcctctgactggaactgacaaaaaatatcctctcatgaaacagcgaggtttctattccgatattctttctcccggcaccctggatcagttaggagaggtctgtcgtggcccacgcatgagtcagaatctgcttcgtcaagccgacctggataaatttacccccagagtggggagcttcgaagtcccagaagatttccaggagagaatggaacagcagtgcattggctcaactactcgcttactcgcccagactgactttccactccaagcctacgagccgaaaatgcaagtcccatttcaggtccttccaggccagcaccctagaaagattgagattgaacgtcgcaagcagcagtacctaagcctggatatcgagcagctcctcttcagccagggtatagatagtaataaattaatgcccagacacctggatcatcagcatccccagaccatcgaacagggtcacgatccaattttcccaatctacctgccactgaaagtgtttgataacgaagacttcgattgtcggacacccagagaatggataaatatggggctggaaccaggaagtctggataggaagccagtgccgggcaaagccctcctccctacggatgactttctgggccacgaagaccctaagtctcagaagctcaagtataagtggtgtgaggtgggtgtgctggactatgatgaagaaaagaagctctatttagtgcataaaaccgatgaaaagggtctcgttcgagacgagatgggccgacccatcctgaacgccggtgtgaccacagaggggcggcccccactgcaagtctgccagtactgggttccccgcatccagctgttattctgtgctgaggacccgtgcatgttcgcccagagagtggtccaggccaatgctctgaggaaaaatactgaggccctcctgttatataacctgtacgtggattgtatgccctccgacggtcagcacgtgatttcagagcagtccctttctaagatcaagcagtgggctctctctaccccccgcatgagaaagggacctagcgtcttggagcatctttcctcgctcgcaagggaggtctccttggattacgaaagaagtatgaataaaatcaactttgaccacgttgtaagctccaaacctgaaacatttagctacgtcacgcttccaaaaaaggaggaagagcaggtgcctgagcgaggcttggtgtccgtgcccaagtaccatttttgggaacagaaagaggattttacttttgtcagtctactcacgcggcctgaagtcatcaccgctctgtctaaagtgagggctgaatgcaataaggttacagccatgagtttgtttcatagcagcctctccaagtacagtcaccttgaggagttcgagcagatacagagccaaactttcagtcaagtccaaatgttcctgaaagattcgtggataagctcgctaaaagtcgccatgcgatctagcctcagagatatgtccaaagggtggtataacctgtacgaaaccaactgggaagtatacctgatgtccaaattacgcaaactgatggagttagtgaaatacatgttgcaggatacattacggtttctggtgcaggactccctggcctccttctcacagttcatatccgacacttgctgctctgtgctgaactgtactgacgacatggtgtggggtgacgatttaattaacagcccctaccggcccaggaagaatcccctgttcattatggacctcgtgctcgattcttccggagttcactactccacaccactcgagcagttcgaggccagcctcctgaatctttttgataagggcattctggcgacccacgccgtcccccagctggagaagctggtcatggaagacatattcattagcggagaccccctcctggaaagtgttggattacatgagcccttggttgaagagctgcgcgccacaatcgcctctgccgtgtctaaggcgatgatcccccttcaggcgtatgccaaggaatacaggaagtatctagagttgaacaataatgatatcgcatctttcttgaaaacctaccaaacgcagggccttcttgcccaagaggttcgggaggttgtgctcacccaccttcgggagaaggaaatactggatagcagtctgccaagttctatcatcatcggtcctttctatatcaacactgacaacgttaaacagtcccttagcaaaaagagaaaggctttggccacctcagtgttagacatcctcgccaagaacttgcataaagaagtagatagcatctgtgaggaatttaggtctattagtagaaagatttacgaaaagcctaacagcatagaggagttggcggagctgcgagaatggatgaagggtatacccgaaaggctggtagggctggaggaacgcatagtaaaggttatggacgattatcaggtgatggatgaatttctgtacaatctgagctctgatgactttaatgataagtggatcgcatcgaactggcccagcaagattctaggacagatcgaactcgtgcagcagcagcatgtggaagatgaggaaaagtttcgcaagatccagattatggatcaaaacaattttcaagagaaactggagggtcttcagctggtggtagccggcttttctattcatgtagagatttccagggcacatgaaatcgcgaacgaagtgcgtcgagtcaaaaaacagcttaaggactgtcagcagctggccatgctgtacaacaatagagaacggattttctctctccctattactaattatgacaagctgtcccgtatggtgaaggagttccagccttacctcgatctttggacaacggcaagtgactggctgcgctggtccgaaagctggatgaatgacccattaagcgccattgacgcagagcagctcgaaaaaaatgttgtggaggcttttaaaaccatgcataaatgtgtcaagcagtttaaggatatgccggcctgccaagaagtggctctggatatacgcgcccggattgaggaatttaagccttacatacctcttattcaggggctcaggaatcctggcatgcgtattcggcactgggaaactctcagcaatcaaatcaatatcaacgtgcgtccaaaggccaacctgactttcgcccggtgccttgagatgaacctgcaggatcacatagaatccatttcaaaggttgctgaagtggccggcaaggagtatgctatcgagcaagctcttgataaaatggaaaaagaatggagtaccattctcttcaatgtgctgccatacaaagccacagatacatacatcttaaagtcacccgacgaggccagccagttactggacgaccacattgtcatgactcagaacatgtctttcagcccttataagaaaccattcgagcaaaggattaacagctgggagaataaactgaagttaactcaggaagttttggaggaatggctgaactgtcagcgttcctggctgtacctggagcccattttttcatctgaagacattaatcagcagctgccagtggagtccaaaagatatcaaaccatggagaggatctggaagaaaatcatgaaaaatgcctatgagaatcgcgaggtgataaacgtgtgcagcgacctcagaatgcttgatagtctcagagattgtaacaaaatacttgaccttgtgcagaaaggactgtcagagtacctcgaaaccaaaaggtcagcctttccgaggttctattttctctctgatgacgagctcttagagatattaagtcagaccaaggaccctaccgcagtacaaccacacctgagaaagtgctttgagaatatagctaggcttctatttcaagaggacctcgagattacgcacatgtactccgccgagggcgaggaggtgcaactgtgtttcagcatctatccgagcagtaacgtggaggattggctgcgcgaagttgagagatccatgaaggcctccgttcatgatattatcgaaaaagcgatccgagcctaccctactatgccccggacacagtgggttctaaactggcccggacaggtcactattgcgggctgtcaaacgtattggacgatggaagttgctgaggcacttgaggccggcaaccttcgatcacagctctttccccaactctgccagcagctgagtgacctggtcgcccttgtacgcggtaaactgagtcgcatgcagcgggcggtgctgagtgctctaatcgtgattgaggtccacgccaaggacgttgtcagtaagctgatccaggaaaacgtcgtcagcgtgaacgattttcagtggatatctcagttaaggtactattggacaaataatgatttatatattagggcagtcaatgccgagtttatctatggatatgaatatctgggaaactcgggtcgattggtcattacacctctgacagacaggtgttatctgactcttactggcgcactccatttgaagttcgggggcgcaccagcaggccccgccggcacagggaaaacagagacaaccaaagacctggggaaggcactggccatccagacagtcgtgttcaattgtagcgaccagctcgacttcatggccatgggcaaattcttcaaaggactagccagcgctggagcttgggcgtgtttcgacgagtttaaccgaattgacatagaagtccttagcgtagtggctcagcagattaccactatacagaaagcacaacaacaaagggtggagcgcttcatgtttgagggagtcgagattccattagtgccaagctgcgcagtattcataactatgaatcccggctacgcaggcaggacggaactgcccgataatctgaaggctttattcagaccagtagccatgatggtccccgattacgcaatgatcacagagatcagtttgtactcattcggttttaatgaggcaagtgtgctggccaagaagattaccaccacttttaagttgagcagtgagcaattgtcatctcaagaccactacgatttcggaatgagagctgtcaaaacagttatctccgccgcaggaaacctcaagagagagaacccatccatgaacgaggagctaatctgcctcagggcgattcgcgacgttaacgttcccaaatttctgcaggaagacctgaagctgtttagtgggattgtatcagacttatttccgactatcaaagaggaagatacggattacggcatcctggacgaagctatccgcgaggcttgtcgcaacagcaacctcaaggacgttgaagggttccttaccaagtgtatccagctgtatgaaacgactgtcgtgcgccatggcctaatgttagtcggaccaacaggcagtggcaagtctacatgctacagagtcctagcggcagccatgacctccctcaagggccaaccttccatctcaggcggaatgtatgaggcggttaattattacgttctgaatcccaagagcatcacaatgggtcagctgtatggcgagtttgatctgttaacgcatgagtggaccgacgggatcttttcttcctttattcgcgcaggcgcaataaccagtgacacaaataaaaagtggtatatgtttgatggacctgtggacgcgatatggattgagaatatgaatacagtcttggatgacaataaaaaactgtgcctctcatctggagaaattatcaaactcaccgaagctatgacaatgatgttcgaagtgcaagacttagccgttgcaagcccagccacagtctctcgatgcggaatggtgtacctcgaacccagtattctgggcctaatgccttttatcgaatgttggctgcgtaaactgccgcctttgttgaagccatacgaagagcacttcaaggcgctatttgtttcctttttagaggagagtatatcctttgtccggtcgtctgttaaagaggtgatcgcctctactaactgcaatctgacaatgtcattactaaaattgctggattgtttttttaaaccgttccttcctcgtgaaggactcaagaaaattcccagcgagaagttaagccgaatcgttgaacttatcgaaccatggttcatcttcagcctcatctggagcgtgggagcaacaggtgactctagtggcaggacatcgtttagccattggctgagattaaagatggagaacgagcagctgacactcttattccccgaagagggcctcgttttcgactaccgtctcgaggacgccggcataagcggaacaaatgattctgaggatgaagaggaagagtacaagcaggtagcttgggtgaaatggatggacagctctgccccctttaccatggtgccagataccaactattgcaacattatcgttcctaccatggataccgttcagatgtcacacctgctggatatgctgcttaccaacaagaagccagttctgtgtatagggccaacaggcaccgggaagaccctgacaatatcagacaagttgctgaaaaatttggctctggattatattagtcatttcttaactttttctgcacggacaagcgccaatcagactcaagactttatcgacagtaaactcgataagcggagaaagggtgttttcggtcccccgctaggccgcaatttcatcttctttatagacgaccttaatatgccggccctagagacatatggagcacagcccccaatcgagctcctgagacagtggatggatcacggtggctggtatgatcgcaaaattattggggcattcaagaatctggtcgacatcaattttgtgtgtgccatggggccgccaggaggcgggaggaataccgtcaccccacggctcatgaggcatttcaattatctgagcttcgctgagatggacgaagtatccaaaaaacgtattttttccaccatactaggtaactggctggacggcctcctaggtgagaagtcctaccgagagcgggtcccgggcgctcctcacatcgcgcacttcactgaacccctcgtagaagccaccatcatggtttatgccacaataactagccagctcctcccaacccccgctaaatctcattataccttcaacctgcgggatctgtccaaggtctttcaaggaatgttaatggctgaccccgccaaggtggaagaccaggtccagttgttacgattatggtaccacgaaaattgcagagtctttagggatcggcttgtgaacgaggaggataggtcctggtttgaccaattgctcaagcggtgcatggagcagtgggaggtcacattcaataaggtttgtccgttccaaccaattctttacggagatttcatgtcgccaggaagcgacgtcaagagctacgagcttattacctccgagagtaagatgatgcaggtgatcgaggagtatatagaggactataaccaaataaataccgcgaagctgaaactcgtattgtttatggacgcaatgtcacacatctgccgcatttcccgaacacttcggcaggctctggggaacgccctccttttgggggtgggcggaagcggcaggagttctcttactcgcctcgcctcccacatggcagaatacgaatgttttcagatcgagctctcaaagaactacgggatgtctgagtggcgcgatgatgtgaagaaagtactgcttaaggccggtctccagaatttacctattacttttctcttctcagacacgcagataaagaacgagtcgtttttagaggacatcaacaacgtcctgaatagcggagacattcctaacctttacactgctgacgagcaggatcagattgtaagtactatgcgaccctatattcaagagcaggggctccaacccacaaaggcaaatctgatggctgcatatactggcagagttaggtccaatatccacatggtactgtgcatgtctcccatcggtgaggtgtttcgggctagactgcggcagtttcccagcttagtaaattgctgcaccattgattggttcaatgagtggccagctgaagctctgaagagtgtagctaccgtgtttctcaacgaaattcccgagctcgagagctcccaggaggagatacagggactgatccaagtgtgcgtctatatccaccaatctgtctcaaagaagtgcattgagtacctggccgaactgacgcggcacaattatgtgactcctaaatcatatctggagcttctccatattttcagcattctgatcggccagaagaaactagaactcaaaacagctaagaacaggatgaagtccggtctagacaagctcctgagaacttccgaggatgtagccaagatgcaggaggacctcgagagcatgcatcccctgctggaggaggccgccaaagacacaatgttgactatggagcagatcaaggtggatacagcaatcgcagaggagaccagaaacagtgtacagactgaggagattaaggctaacgagaaagccaaaaaggcccaggccatcgctgacgatgctcagaaggatctagacgaggcactgcccgctctggatgctgccttagcctcgctcaggaacctgaataagaacgatgtgaccgaggttcgagctatgcagcgtccgccccccggagtaaagctcgtgatagaggctgtctgcattatgaagggtatcaaacccaagaaggtgccaggcgagaagcccgggacaaaagtggacgattattgggagccaggaaaggggctgttacaagaccctgggcattttcttgagagcctgtttaagttcgacaaagataacattggcgacgtagtgataaaagctatccagccctatatagacaacgaagaattccagcccgccaccattgcgaaagttagcaaagcatgcacctcgatttgccagtgggtgagggccatgcataagtaccacttcgtggctaaggccgttgaacctaagcgacaagcccttctggaagcccaggacgaccttggggttacccagcggatcctcgacgaggctaaacagaggcttcgagaagttgaggatggcatcgcaaccatgcaagctaagtaccgggaatgtatcactaaaaaagaggagctcgagctcaagtgtgaacagtgcgagcagagactcggacgagctggaaagcttattaacgggctgtcagacgagaaggtgcggtggcaagaaaccgtcgaaaacctgcagtacatgctgaacaatatatcaggtgacgttttggtggcagcaggatttgtggcgtacctgggcccttttactggccagtacaggaccgtgttgtatgacagttgggtcaagcagctgagatcccacaacgtccctcatacgtctgaaccaacgttgatcggtactctgggaaatcccgttaaaattcgatcttggcaaatcgcaggattgccgaatgataccctgagtgtagagaatggggtcattaaccaatttagtcagcgatggacacattttatcgacccccaatcccaggctaacaagtggatcaagaatatggagaaggacaatgggctcgacgtatttaaacttagcgacagagattttttgcggtccatggagaacgcaatcagattcggtaaaccgtgcttactggaaaatgtaggtgaagaactcgatcctgcactggagcccgtgcttctcaagcaaacttacaagcagcaggggaacaccgtgctcaagctgggcgatacggtcatcccctatcatgaggactttagaatgtacattacaaccaagcttccaaaccctcactacactccggaaattagcacaaagctgactctgattaattttaccctttcgcccagtggcctggaggatcaactcttggggcaggtcgtagcagaggagagacctgatctggaggaagccaagaatcagctgataatctccaatgcaaaaatgaggcaagaacttaaagatatcgaggatcagatcctgtatcgtctgagctcttccgagggtaatcctgtcgacgacatggaattgataaaagtgctggaagcttccaagatgaaggcagccgagatccaggctaaggtgcgcatcgccgagcagaccgagaaagacatcgatctgaccaggatggagtatattcctgtcgctattaggacccagattctgttcttttgtgtctctgatctggcaaatgtggatccgatgtaccagtacagtctggagtggttcctgaacatctttctgtcaggcattgcgaactctgaacgagccgataatctgaaaaagcggatcagtaacatcaaccgctatctgacttactctctgtattcaaacgtgtgtaggtcactctttgagaaacataagctgatgtttgcttttttactttgtgtgcgcatcatgatgaacgaggggaaaattaaccagagtgaatggcggtacctcttgtctggggggtccatctcaataatgacagagaatccagcgcctgattggctgtccgaccgcgcctggagggacatactcgccctcagtaacttgccaacattttcatctttctcatccgacttcgtcaaacatctgagtgagttccgagtgattttcgacagtcttgagccccatcgcgagcccctgcccggtatctgggaccagtatctggaccagtttcagaagttactcgttctgcgatgcttgcgtggtgataaagtaacaaatgcaatgcaagacttcgttgcaaccaaccttgaacccagatttatcgaaccacaaacagccaacctttcggtggtctttaaagactcaaatagtacaacccccttgattttcgtcctgtctcctggcaccgatcctgccgcagatttgtacaagtttgcggaagaaatgaagtttagcaaaaagctgtctgctatatcccttggccaaggccagggacccagagctgaagcaatgatgaggagctccatcgaacgaggaaagtgggtattcttccagaattgtcacctggccccctcgtggatgcctgccctggaaaggttgattgaacatattaacccagataaggtccatcgagacttcagactctggcttacctcattgccatcaaacaagttcccggtgagcattctgcagaatggcagcaaaatgactatagagcctccacgcggcgtgagagccaacctgctgaaatcctactcatcgctcggcgaagacttcctgaactcgtgccacaaagtaatggaattcaaatcccttctcttgtcgctctgtctgttccatgggaacgcactggaaagacataagtttggccctctggggtttaacatcccctacgagtttacggacggggacctgcggatttgcatcagtcaacttaagatgttcctggatgagtatgacgatatcccctacaaagtgctcaaatacacagcaggggagatcaactacggaggtagggtgacggacgattgggatcggcgctgcatcatgaatatcctcgaagatttctataatcccgacgtcctttcccctgaacattcctatagtgctagtggcatctaccaccagattccaccaacctacgacttgcacgggtacttgtcctacatcaaatccttacctctcaacgacatgcccgaaatcttcggattacacgataatgcaaacataaccttcgcccagaacgagacatttgccctgctggggaccatcattcagttgcagccaaaaagctcatcagcagggagccagggaagagaggaaattgtggaagacgtaacgcagaatattttactcaaagtgccggagcctattaaccttcagtgggtgatggctaaatacccggtcctgtacgaggaatctatgaacacagttctggtccaggaagttatccgatataaccgtctgctgcaagtcattacccagaccctccaggacctgctcaaagctctaaaagggttagtggtgatgagctcccagctcgaacttatggcggcatccctgtacaataacacggttccagaactgtggagcgctaaggcctacccatcactgaaaccactttcaagctgggtgatggatttgctgcaacgcctggatttcctgcaggcatggattcaagatggtatacctgccgtgttttggatcagcggcttctttttccctcaggccttcctcaccggcacactccagaattttgcaagaaagttcgtgatcagtatagacaccatttcttttgactttaaagtaatgttcgaggcgcccagcgagctgacccagcgcccacaggtcggctgctacatacatggattgttcctcgaaggcgcacgctgggacccagaggccttccagctcgcagaaagccagcccaaggagttatacacagaaatggccgtcatctggctgctgcctaccccaaatcgcaaggcccaagatcaggatttctacctctgtcctatatacaagaccctgacgagagcggggaccctgagtaccactggacatagtaccaattacgttatcgccgtggagattccaacccatcaacctcaacgccattggatcaagcggggggtcgctcttatctgtgctctggattactag

SEQ ID NO: 115226 - DNA, 13416 bp, synthetic construct
  misc_feature 1..13416: note = Description of Artificial Sequence: Synthetic coding sequence
  source 1..13416: mol_type = other DNA
atggtccccgaagaggtggaagttgaaattgacgaaatcccagtgctatctgaggaaggcgaagaagaggaggaaacttattctcagaaggtggagagcgttgataaggtaagggccaagagagtgagcttgcggactgaatcactgggacagccactgaatcgagaggacgaggaaatggacaaagagatcagcgagaagctgccttctaaaaggaccgctaagcatatcatggagaagatgcacctccacatgctctgcacgcctctcccagaggaatttttggaccagaatgttgtgttctttttacgtaacacaaaagaggccatctcagaagcgacagatatgaaggaggcgatggagattatgcccgaaacactcgaatacggcatcattaatgcaaatgtcctacattttctgaagaatatcatctgccaggtcttcctgcctgccctgtccttcaaccagcatcgaacttcgactacggttggggtcacatcaggtgaagtaagcaattcctctgagcatgaatccgatctgcccccaatgccaggagaagctgtcgagtatcactcaattcaactcatacgtgatgaattcttgatgaatgtgcaaaaatttgcatccaatattcagcggaccatgcagcagttagagggcgagattaagctggaaatgcccatcatatctgtggaaggggaggtatcagaccttgcggctgaccccgagacggtggatatcttggaacagtgtgtgatcaattggctgaaccagatcagcaccgcagttgaagcccaattgaagaagacaccccagggcaaagggcccctggctgaaatcgaattttggagagagcggaatgccacgctgtcagccctgcacgagcaaaccaaactgccaattgtgagaaaggtgctggacgtcattaaagagagcgattccatgctggtggctaatcttcagcccgtgttcacagagttgttcaagttccatacggaagcctctgataatgtgcggtttctgagtacagtggagaggtacttcaagaatatcacccacggttctgggttccacgtggtgctcgatactatcccagccatgatgtcagccttacggatggtgtggattatctcacgacactacaacaaagacgaacgcatgatccctctgatggagcgaattgcatgggaaatcgccgagcgggtttgtcgcgtggtgaatttacgtacattgttcaaagaaaatagagcatccgctcaatctaagacattagaggcaaggaatactctccggctatggaaaaaagcttacttcgacaccagagctaaaatagaagcctccggccgggaagacaggtgggaattcgatagaaagcggcttttcgagaggacagattatatggcaaccatctgtcaggacttatctgacgtcctccagattctggaagagttttataacatctttggaccagagctgaaggccgtaaccggggatcccaaaaggatcgacgacgtcttgtgtagagttgacgggctcgttacccccatggaaaatctgaccttcgacccctttagtattaagtcttctcagttttggaaatacgtgatggatgagttcaagatcgaggttcttatcgacatcatcaacaaaatctttgttcagaacctggagaatccacctctatacaaaaaccatccacctgttgcaggggctatctactgggagagatcactgttttttcgtatcaaacacacgatcttgcgcttccaggaagtacaggaaatactagacagtgatagggggcaagaggtcaaacaaaagtaccttgaagtggggaggacaatgaaggagtatgaggatagaaagtatgaacagtggatggaggtgacagagcaggttctgcctgccctgatgaaaaagtctctactgacaaagtccagcattgcaaccgaagagccatcaacccttgagagaggggccgtgtttgctataaatttttcacctgcgttaagagaaatcatcaacgagactaaatacttggaacagcttggctttacagtcccggaattagctcggaacgttgcactgcaagaggacaaattcctgaggtatacggccggcattcagcgaatgttggaccactaccacatgctaattggtactctcaatgatgctgagtcagtgctgttgaaagaccatagtcaggagctgctgcgcgtgtttagatcaggatataagagacttaattggaactcccttggtatcggcgactatattacaggatgtaaacaagccatcggtaaatttgagagcttagttcaccagatccacaagaacgccgatgacattagcagcagattgaccctgattgaagccatcaatctgtttaagtaccctgccgctaaatctgaggaggaattgcccggagtgaaagagttttttgagcacatcgaaagggagcgggcctctgacgtggatcacatggtgcgttggtacctagcgatcggacccctcctgaccaaagttgaaggcctggtagtccacaccaacacaggaaaggccccgaaactcgcctcgtactacaagtactgggaaaaaaagatatacgaggtcttgacgaagctcatcttgaagaacctgcagagctttaattcactgattctagggaacgtaccactatttcacactgaaaccattcttaccgcaccggaaatcatacttcatcctaataccaatgagatcgacaaaatgtgcttccactgcgttcgtaattgtgtggagattacaaaacatttcgtgcgttggatgaatggatcctgcatcgaatgcccaccgcaaaagggggaggaggaagaagtggtaatcatcaatttctacaacgatatctccctcaacccacagataatcgaacaagccgtcatgattccccagaacgtgcatagaatccttattaatctcatgaagtatttgcagaagtggaaaaggtatcggcccctttggaaattggataaagcgatcgtgatggagaagttcgcggccaaaaagcccccttgtgtggcctacgatgagaaactgcaattctatagcaagattgcatatgaagttatgagacatccgcttattaaggatgaacactgtattcgcctccagttacggcacctggcaaacactgtccaggaaaatgccaagtcctgggtgatttctctgggcaagctactgaacgaaagtgctaaggaggagctttacaatctccatgaagagatggagcatctcgctaaaaacctgcgtaaaatccctaataccctggaggacctgaaattcgttctggcgacaattgccgagatcaggtcgaaatcactggtgatggaattgcgctaccgagatgtgcaggagcggtatcgcaccatggccatgtataatttgttcccacctgatgccgagaaggaattagtagataagattgagtctatctggagcaacctcttcaatgattcagtgaacgtcgaacatgcactcggggatattaagcgtacctttaccgagttaactagaggggagattatgaactaccgcgtccagatcgaggaattcgccaaacggttttattccgaagggcctggctctgttggtgacgacttggacaaaggagtcgagttactcggcgtctacgaacgggaactggcacgtcacgagaagagtcggcaagagctggcaaacgctgaaaaattgttcgatctcccaatcactatgtacccggagctcctgaaagtgcaaaaagaaatgtctgggctgcggatgatctatgaactgtacgaaggtcttaaggtagcgaaggaggaatggagtcagaccctttggattaacctgaatgtccagatcttacaggagggaatcgaagggtttcttagagctcttcggaaacttccccgaccagtgcgagggctcagcgtcacgtactatttggaggcaaaaatgaaggctttcaaggatagcatccctttgctgttggacctcaagaatgaggctctgagagacagacactggaaggaattgatggaaaaaacatccgtgttttttgaaatgaccgaaacctttaccctggagaacatgttcgcaatggagttacacaaacataccgacgtcctcaatgaaattgtcactgccgccattaaagaggtcgcaatagaaaaggctgtcaaagagatcctggatacttgggagaacatgaaatttaccgtggtgaaatattgtaagggaacacaggagcgcggatatatcttgggcagcgtggatgaaatcattcagtcattggatgataacacttttaacctccagagtatatcaggaagccgatttgtggggcctttcctacagaccgtgcacaagtgggagaaaactctgagtttgatcggagaagtgatcgaaatctggatgcttgtgcaaagaaaatggatgtatctggaaagcatctttatcgggggcgatatcaggtctcagcttcccgaggaagctaaaaagttcgacaacatcgataaggtcttcaagaggataatgggtgaaacacttaaagaccccgtcatcaagcggtgctgcgaggcccccaatagactgtccgaccttcaaaatgtgtcggagggcctcgagaagtgccagaagtctctcaacgactacctggattccaaaagaaatgcctttcccaggtttttctttattagcgatgacgagttactttccattctgggtagttcggatccgctgtgtgtacaggagcacatgataaaaatgtatgataacatcgcatctctcaggttcaatgatggggatagcggcgagaaattggtctctgcaatgatttcagccgaaggtgaggttatggagtttcggaagatcttgcgcgccgaggggcgggtcgaagactggatgaccgccgtgctgaatgaaatgaggagaaccaaccgcttgattaccaaggaagccattttcaggtactgcgaagacaggtcgagagtggattggatgttgctttatcaggggatggtcgtattggcagcctcccaggtctggtggacatgggaagtcgaagatgtgttccacaaagcacaaaaaggagagaagcaagccatgaaaaactacgggaggaagatgcacaggcagatagacgagctcgtcactcgtataaccatgcccctgtctaaaaacgacaggaaaaaatacaacacggtcctcatcattgacgtgcatgcccgcgacatcgtcgactcttttataaggggctccattctggaagcccgagaatttgattgggagagccagttaaggttctattgggacagggagcctgatgaattgaacatcagacagtgtactggcacgttcggatatgggtatgagtatatgggtctcaatggtcggttagtgattacccccctaaccgacaggatttatctcaccttaacacaggctttgtctatgtacctgggtggcgcacccgcagggcctgcaggaaccggaaaaacggaaactactaaagatttagcgaaggcgctgggactgctctgcgtagtgaccaactgcggcgagggaatggattatcgtgccgtcggcaaaattttctcaggcttagcacaatgcggcgcctgggggtgttttgatgaattcaatagaattgacgcctcagtactatccgtgatatcttctcagattcagactataaggaacgccctgatccatcagcttactacttttcaatttgagggccaggaaatcagtctggacagtaggatgggcatatttatcactatgaatcctggctacgctggacggacagaattacccgagtccgtaaaggccctgttcaggcctgtggtcgtgatcgtccccgatctccagcaaatttgtgaaatcatgcttttctcggaggggttcctggaagctaagacccttgctaagaaaatgactgtgctttataagcttgcccgtgaacagctgagcaaacagtaccactacgacttcggcctgcgagccctgaaatctgttttggtcatggctggggagctcaaacgaggctcctccgatctgcgcgaggacgttgtcctcatgagagccttacgggatatgaacctgccaaagtttgtgtttgaagacgttccactctttcttgggttaattagtgatctcttccccggcctcgattgtccacgagtgcgatatccagacttcaatgatgccgtggagcaggtgctggaagaaaatggctacgcagttcttccgatccaggtggataaagtcgtgcagatgtttgagacaatgctcacccggcacacaaccatggtggttggtccaactagaggaggtaagtctgtggtgataaacaccttatgtcaggcacagaccaaactcggactgacaacaaaactttatatcctaaaccccaaggcagttagcgtgattgagctctacggcatcctggacccgacaacaagagactggactgacggtgttctttccaacatcttccgagagatcaataaaccaaccgataagaaggagcggaaatacatccttttcgatggcgatgtcgacgcgctctgggtggaaaacatgaatagtgtcatggatgataacagactgctgacactggcgaatggagaacgtatccgtctgcaggcccactgcgcccttctattcgaggtgggtgacttgcaatacgctagtcccgccaccgtctcccgttgcggaatggtatacgtggaccctaaaaacctaaaatatcggccgtattggaagaaatgggtgaatcagatacctaataaggtagagcagtacaacctgaattctctctttgaaaagtacgtgccgtatctcatggacgtgatagtggagggaatcgttgatggcagacaggccgagaagctgaaaactatcgtccctcaaactgacctgaacatggtcactcagctggcaaaaatgctggacgcattgttagagggtgaaattgaagatctagatctgctagaatgttattttctggaagcgctctattgctcattgggggccagccttctcgaggacggtcgcatgaaatttgatgaatatataaaacgactcgcctccctgtctacggtagacacagaaggggtgtgggctaacccaggagagcttcccggtcaactgccgactctatatgacttccactttgacaacaaacgcaaccagtgggtaccgtggtctaagctggtgcccgagtatatccatgcgccggaacgcaagtttatcaatatcctggtgcacactgtagatacaaccagaacaacttggatcctggaacagatggtcaaaatcaaacagccagtgatttttgtgggggaaagtggaacatccaaaaccgccacgacccagaatttcctgaagaatctaagtgaggaaacgaacatcgtgctcatggtgaacttcagcagccgtaccaccagcatggatatccagcgcaatttagaggcaaatgtcgaaaaaagaactaaggacacctacggtccacccatgggcaaaagactactggtttttatggatgacatgaacatgccaagagtcgatgagtatgggactcaacagccgatcgccctccttaagcttttattggaaaaggggtacctctatgatagaggcaaggaactaaactgcaagtccattcgggacttgggcttcattgctgcaatgggcaaagctggtggggggagaaatgaagtcgacccccgcttcatcagcttattcagtgtattcaacgtgccatttccatcagaagagtctttgcacttgatttactcctccatcctcaagggccatacgtcgaccttccatgaaagcatcgtggcagtgagcggcaaactgacattttgcaccctggccctatacaaaaacatagtgcaggatctgccccctactccgagcaagtttcactacatattcaacctgcgcgatctgagccgggtttttaatgggcttgttctgacaaaccccgaaagattccagactgtcgcacagatggtgcgcgtgtggcggaacgagtgtttacgagtgtttcatgatcggctcatcagcgagactgataagcagctggtacagcaacacatcgggtccttagtggtggagcacttcaaggacgacgtggaggtcgtcatgcgggaccctatcctcttcggtgactttcagatggccctgcatgaaggcgaaccacgaatttatgaggacattcaagattacgaagctgcaaaggcccttttccaggaaatcctggaggaatataacgaatctaacacgaaaatgaacctggttctgttcgacgacgccctggagcatctaacaagggtgcaccgcatcataagaatggacaggggacacgccctacttgtcggtgtgggtgggagcggcaagcagtccctgagtagactggcagccttcactgcctcttgcgaggttttcgaaatcttgcttagccgaggatacagcgaaaattcgtttagggaggatttgaagtctctatatctgaaactcggcattgagaacaaggccatgattttcctgtttacagacgcacatgtggctgaagagggcttcctggaactcattaataatatgttgaccagcgggattgtgccagccctcttttctgaagaggaaaaggagtcaatcctttcccagataggccaggaggctttgaagcagggcatggggccagccaaggaaagcgtgtggcagtatttcgtgaataaaagcgctaacaacctccacattgtactggggatgagtccagtgggcgacaccctgaggacctggtgtcgcaactttccaggaatggtaaataataccggaatcgattggttcatgccctggcccccacaggctttacacgcagtggccaaaagttttctcgggtacaaccccatgattcccgcggagaatatagagaacgttgtgaagcacgtggttctagtgcaccagtctgtcgaccattactcacagcagtttcttcagaagctgagacgcagcaattatgtcactccaaagaactacttggacttcatcaacacgtatagtaaactattggatgagaagacccagtgtaatatagcgcaatgtaagaggctcgatggagggcttgacaaactcaaggaagcaactatccagctcgatgaactgaaccagaaactggcggagcaaaaaattgtgctggctgagaagagtgcagcctgcgaggcgctgctcgaggaaatcgctgtgaatacagccgtggccgaggagaagaaaaagctggcagaggagaaggctatggagatagaggaacagaataaggtgatcgccatggaaaaggctgaagctgagaccacgctcgccgaagtgatgccgattttggaggctgctaaactggaactgcagaagctcgataagtccgacgttaccgagataagaagcttcgccaaacctcccaagcaggttcagactgtgtgtgagtgcatcttgatcatgaagggttataaagaactcaactggaagaccgctaagggagtgatgtctgacccgaatttccttcgctcacttatggagatagattttgactcgatcacacagtctcaggtcaaaaatatcaagggcctgctgaagaccttaaataccactacagaagaaatggaagcagtgtctaaggccgggctggggatgttaaaattcgttgaggcagtgatgggatattgtgacgtgttccgtgagattaaacccaagagggaaaaagtcgccagactggagaggaatttttaccttaccaagagggaactggaaaggattcaaaacgaactggctgcaatacagaaagaactagaaacccttggggcgaagtacgaggctgccatcctcgaaaagcagaaacttcaggaggaggcagagattatggagaggcggttgatagccgctgacaaactcattagcggactgggcagtgaaaacatccgatggctgaacgacttggacgagctgatgcacaggagggtgaagttgctgggggattgcttgctctgtgctgccttcttatcttacgagggagcatttacgtgggagtttagggatgaaatggtgaatcggatatggcagaacgatatcttagagagggagatccctttaagtcagcccttcaggcttgagagtctgctcacggacgacgttgagattagccgctggggctcccaagggttgccccctgacgagctgtcagtccaaaacgggatcctgacaactcgtgcctcccgcttccctctgtgcattgacccccagcagcaggctctcaactggataaaacggaaggaggagaaaaacaacttacgagttgctagttttaatgaccctgactttctcaaacaactcgaaatgagcataaaatacggtaccccgtttctgtttagagacgttgacgagtacatcgatcccgtaatcgataatgtgttggagaagaatataaaggtgtcccaaggtcgccaattcattattctgggggacaaagaggttgactacgactcaaacttcaggttgtaccttaatactaagctggccaacccacgatacagtccatcggtattcggaaaggcgatggtgatcaattacaccgtgacccttaaaggattggaagaccagctcctgagcgtgctggtggcctacgaaaggcgcgagctcgaggagcaaagagagcatctcatccaggaaacttctgagaataagaacttgttgaaagatctggaggactctttgttgcgtgagctggccacttcgacagggaatatgctggacaatgtggacttggtgcacaccctcgaagagaccaagagtaaggccaccgaagttagcgagaagctgaaacttgccgagaaaaccgcacttgatatcgatagattacgggacggctacaggccagccgctaggcgtggtgccatactgtttttcgtcctgtcagagatggcactggtcaacagtatgtaccagtattctctgattgctttcctcgaggtgtttcgcctttcactgaaaaagagtctaccagactctattttgatgaagaggctgcgtaacatcatggacacccttaccttcagcatttacaaccacggctgtacaggcctgttcgagagacacaaactccttttctcattcaacatgaccattaagattgagcaggctgagggaagggtgccccaagaagaactggattttttcctgaaagggaatatatctctggagaagagcaaacgcaagaaaccatgtgcctggctttccgatcagggctgggaagatatcattctcctatctgaaatgttctctgacaatttcggtcagctgccggacgacgtggaaaacaaccagactgtctggcaggaatggtatgatcttgacagcttggagcagttccccgtgccgctgggttacgataataatattactccgtttcagaaactgctgatcttgcggtgttttcgcgtggatcgggtgtacagggctgttactgactacgtgaccgtgacaatgggcgagaaatatgtgcagccccccatgatcagtttcgaagccatcttcgaacaatccacaccccatagccctattgtttttatcctcagccccggaagcgatcctgctacggatctcatgaagctggcagagcggagtggatttggtggtaataggctgaaattcttggccatggggcagggtcaagagaaggtggcgctgcaactgctggagacggcagtagcccgcggtcagtggctgatgcttcagaattgccatttactggtgaagtggctgaaggacctggagaaatccctggagagaattaccaagccacaccctgactttcgactttggctcactacagatccgactaagggattccctatcggcatcttacagaaaagcctgaaagtagtgactgaaccccccaatggactgaaactgaacatgagagccacgtattttaagatatcccatgaaatgctagaccagtgcccacatccagcctttaagcctctggtttacgtcctagccttcttccatgcggtcgtgcaagaacggcgcaagtttggtaaaattggctggaatgtctactatgactttaatgagtctgattttcaggtgtgtatggagatcctgaatacctatctcacaaaggctttccagcaaagagatccaagaatcccatggggcagtttgaagtaccttatcggagaggtgatgtacggtgggcgtgcgattgactcctttgataggcgcatactaaccatatatatggacgaatatctaggcgatttcatcttcgatacctttcaaccctttcactttttcaggaataaagaagtggactacaagatcccggtgggcgatgagaaggagaaattcgtggaagcaattgaagctttgccgctggctaacacccccgaggtgttcggcctccaccctaacgccgagattgggtactacacccaagctgccagggatatgtgggcccacctgctggaactccagccccagaccggagaatcttcatcaggcatttcaagagatgattacatcggtcaggtcgcaaaagagattgagaacaagatgccgaaagtctttgaccttgatcaagtcagaaaaagactgggaaccggtttatcacccactagtgtggtcctcctacaggaactcgagcgctttaacaagctagttgtgagaatgaccaaatctctggccgaactgcaaagagctctggctggtgaagtgggcatgtctaatgaacttgacgacgtggctaggagtctgttcatcgggcatattccaaatatatggcgtcgcttagctccggacaccctgaagtccctgggcaattggatggtgtactttttgaggcggttttcgcaatacatgctgtgggtgaccgagagcgagccttcagtcatgtggctctcagggcttcacatccccgagagctatctgaccgctctggtccaggctacctgccgcaagaatgggtggcccttggaccgaagcacgttgtttactcaagtcactaagtttcaggacgcagacgaggttaacgagcgcgccggccaaggctgctttgtgtccggcctgtacctggagggcgcagactgggacatagagaaagggtgtctcatcaaaagcaagcccaaggtgctggtggtcgacctgcctattctgaaaatcatcccaatcgaggctcatcgcctcaagcttcagaatacctttagaacccccgtttataccactagcatgagaaggaatgccatgggcgtgggcctcgtgtttgaggcagacctattcaccacaagacacattagtcactgggtccttcagggcgtctgcctcacgctgaacagcgattag

SEQ ID NO: 115227 - DNA, 13572 bp, synthetic construct
  misc_feature 1..13572: note = Description of Artificial Sequence: Synthetic coding sequence
  source 1..13572: mol_type = other DNA
atggccgctcaggtcgcagcgagagaagcccgagacttccgcgaggccccaaccctacgattgacctctggcgccgggctggaggccgttggtgccgtcgagctagaagaggaggaagaaaatgaggaagaggccgctgcccgacgggccagaagcttcgcccaggacgctcgcgtcagattcctgggcgggcggctggctatgatgctgggcttcaccgaggagaagtggtcacagtacttagaatccgaggacaaccgacaagttctcggcgagttcctggaaagcacttcaccggcatgtcttgtcttctcttttgcagcctcaggaaggctggctgccagccaggaaatcccccgggatgcgaaccacaagctcgtgtttatctccaagaaaatcactgagagcatcggcgtgaacgacttttcccaggtggtgctgttcggcgaactgccagccctgtcccttggtcatgtgtcagccttcttagacgaaatactggtacccgtgctgagcaacaaaaataaccataagagctggtcatgttttacatctcaagacatggagtatcacatcgaagtcatgaaaaaaaaaatgtacatcttccggggaaaaatgtccaggaggacccttctgcccattcctaccgtggcaggcaaaatggatctggaccagaactgttcagaaaataagcctccttctaatgaacgcatcatcctgcacgccatcgagtccgtggtgatcgagtggagccatcagatacaggagatcatcgagcgggacagtgttcaacgcttgctaaatggcttgcacctgtctccccaagccgaactggatttctggatgatgagaagagagaacctctcttgcatctatgaccagttgcaggcccccgtagtcctcaagatggtgaagattctgactacaaaacaatcctcctattttcccacgttgaaagacatcttcctggctgtcgaaaacgccctgttagaggctcaagatgtggagctgtatttaagaccacttcggcgacacattcagtgtcttcaggagacagagtttccccagacccgcattctgatcgcccccctgttccacaccatctgcctgatatggagccactccaaattttacaatactcctgccagagtgattgtgctgctgcaagaattttgtaacttgttcattaaccaagccactgcatacctcagccccgaagacctgctccgcggagagattgaagagtccctagaaaaggttcaagtagccgtcaatatcttgaagacctttaaaaacagttttttcaattatcgcaaaaaattggcttcttacttcatgggccgaaaactgcgaccgtgggattttcagtctcaccttgtgttctgtagattcgacaagtttcttgatagactaatcaaaatcgaagatatcttcgccaccacacttgagtttgaaaagcttgagcgccttgagttcggtggaacgaagggtgctatcctcaatggacaagtgcacgagatgagcgaagagctgatggagttgtgtaaactgttcaagcagagcacgtatgatccatcagactgcacgaacatggaatttgaaagtgactacgttgctttcaagtcaaaaaccctcgagttcgatcgacgccttggcaccattatctgtgaggcatttttcaattgtaatgggctggaggccgctttcaagctgcttaccatctttgggaattttctggagaaaccagtcgtgatggaaattttcagtcttcactactccacactggttcatatgttcaatacagagttagacgtgtgtaaacagctttacaacgaacacatgaagcagatagagtgcggccatgtggttctgaataagaatatgccgttcaccagcggcaacatgaaatgggcacaacaagtgctgcagcgacttcagatgttctggtcaaatttcgcatcactccgttatctgttcctagggaaccccgaccatgccctagtctaccaaaaatacgttgagatgactactctcttagaccagttcgagtcccgtatttacaatgaatggaaaagcaacgtcgatgaaatctgtgagtttaatctgaatcaacctctcgttaaattctccgcgattaacgggctgctctgtgtgaactttgaccctaagcttgtggcagtcttacgagaagtgaaatacttgctgatgcttaagaagcaggacattcccgattccgccctggcgattttcaaaaagagaaatactattcttaagtacatcgggaacctggacctgctcgtgcagggatataataaactcaaacagactctgctggaggtggagtaccccttgatcgaagacgagcttcgggctatcgacgagcaactgactgcagccactacatggctgacatggcaagatgactgctgggggtacattgaaagagtgagggcagcgaccagcgagcttgagcaccgggttgaacgtacgcagaagaatgttaaggtgatccaacagacgatgcgcggatgggcacgttgcgtgctcccccccagaagagagcaccgccgggaagccgcgtttacgcttgaagacaagggtgatttattcacaaaaaagtacaaattgatccagggtgatggatgcaagattcacaacctggtcgaagaaaatagaaagctgttcaaggcgaacccctccctagacacctggaaaatttacgttgagttcatcgacgacatcgtcgtcgaaggcttttttcaagccattatgcacgatcttgatttttttttgaaaaatactgaaaaacagctcaagcctgctccctttttccaagcccaaatgatcctgctccctccggaaatcgtctttaagccgtccctcgatagggaagcaggcgatggtttttacgatctcgtggaggagatgctctgcaattcctttcggatgtcagcacagatgaatcggatcgccacacacctggagattaagaattaccagaacgatatggataatatgctgggcctggctgaggtccgacaagaaattatgaatcgagtggtgaacgttatcaacaaggtccttgattttagaaataccctggagacccacacatatctttgggtggatgaccgcgctgaatttatgaaacacttcttactgtacggacatgccgtctcttccgatgaaatggacgcacacgcaaacgaagaaattccagaacaacctccgaccctggaacagtttaaggaacagatagacatctacgaggcgctgtacgtccagatgagcaagttcgaggactttcgggtgtttgactcctggttcaaagtagacatgaagccatttaaggtgagcctcctgacaatcattaagaagtggagttggatgtttcaggaacacctgctgagatttgtgatcgattcactgaacgagctccaggagttcattaaagagacagacagcggcttacagcgggagcttaacgaaggtgaccatgatggtctggtggatataatggtgcacctgcttgctgtgagaagcaggcaaagggctactgatgagttatttgagcctctcaaagagacgattacactgctagaaagctacggacagaaaatgcctgaacaggtctacatacagctggaggagctgcctgagagatgggaaaccaccaagaagatagccgctacagtgcggcacgaggtgagcccactgcataatgccgaagtcactctgatcagaaagaagtgcatcctttttgacgccaaacaggcagagttcagagaacgttttcgacactacgcacccctgggcttcaatgctgaaaatccttacactgctctggacaaagccaatgaggagctggaggccctcgaggaggaaatgctacaaatgcaggagagcaccaggttgtttgaagtcgcactcccagagtataaacagatgaagcagtgccgcaaggagatcaagttgctcaagggactttgggatgtcatcatctacgtccgtcgatcaatcgacaactggacaaagacacagtggcgacagatacacgtggaacaaatggatgtcgagctccgcagattcgcgaaggcttctagcatcaccgagatttggagcctgaacaaagaggtaagggtgtgggacgcatacacgggcctggagggcactgtgaaggacatgacagcttctctgcgcgccattacagagctccagagtccagccttgcgggacaggcattggcaccagctcatgaaggccatcggcgtgaaatttctgatcaacgaggctacaaccctggcagacctcctggcactgcgcctgcacagagtcgaagatgatgtccggcgtatcgtggacaaagccgtcaaggaattagggactgaaaaggtgatcacggaaatatctcagacatgggcaactatgaagttttcctatgaagtccactatcgaacggggatcccattgcttaaatccgatgaacagttgtttgagactcttgagcacaaccaggtgcagctacagacgctgctccaaagcaagtatgtggaatacttcatagagcaggtcctatcttggcagaacaagctaaatattgctgatctcgtgatctttacgtggatggaggtgcagaggacctggtcccaccttgaatcaattttcgtgtgctcagaggatatcaggatacagctggtgaaagacgcgaggagattcgacggggtggatgcagagtttaaagagttgatgtttaagacagccaaagtggaaaatgtgctggaggccacgtgtaggcccaacttgtacgaaaagctgaaggatctccagagccggttaagcttgtgtgagaaggcactggcagagtaccttgaaactaagaggatcgctttccccagattctattttgtgtcaagtgcagatttgctggatattctaagcaaaggggcccagcccaagcaagtcacctgccacctcgcaaaattgttcgatagcatagctgatctgcagttcgaggacaatcaggacgtgtctgcccaccgggctgtgggcatgtacagcaaagagaaggagtacgtgccctttcaagcagaatgcgaatgcgtgggacacgtggagacgtggctgttgcagctggagcagaccatgcaagagacagtcagacattcaatcacagaggcaattgtggcctatgaggaaaagcccagggaactctggatcttcgatttcccagcccaggtggccctcacttcttctcagatttggtggaccactgatgtcggtatcgcatttagccgattagaggagggatacgaaaccgccctcaaggactttcacaagaaacagatatcccagctcaatactctcatcacgttgctgcttggggaactcccccccggcgacaggcaaaagataatgaccatctgcaccattgatgttcatgcgcgggacgttgtcgccaaactcatctcacaaaagcaggtagttgtgagcccccaggctttcacttggctcagccagctgcgacatcgatgggaagatacacagaagcactgtttcgtcaatatctgtgatgcccagttccaatatttctacgaatacctcggcaattcccccaggctcgtaatcacaccgctgaccgaccgctgctacattaccctgacacaatctctgcatttaactatgtcaggggcgccagctggtcctgctgggactgggaagacagagacgaccaaagacctgggcagagcactgggtatgatggtctacgtgttcaattgttccgagcagatggattataagtccatcggaaacatctacaaaggcctggttcagactggggcttggggatgcttcgacgagttcaaccgaattagtgttgaggtgctgtctgtggtggcggttcaggttaagatgatacatgatgcaatcagaaaccgaaagaagaggttcgtgtttctgggtgaagcgattacactcaagccatcggttgggattttcataactatgaaccccgggtacgccggaaggactgagctgcccgaaaaccttaaagcccttttcaggccatgtgccatggtcgcacctgatattgagctgatctgcgaaatcttactggtagccgagggtttcgtcgacgcacgagctctcgcgaggaagttcattacactttacaccctgtgtaaggaacttctttctaaacaagatcattatgattggggactgagagcaatcaagtcggtactggtggttgccggtagtctgaaacggggggacaagaatcgccctgaggatcaagttttgatgagagctcttcgagactttaacatgccaaagattgttacggatgatataccagtgtttcttggcttggtgggcgacctttttcccgcattagacgtaccccgccgacgaaaacttcattttgagcagatggtgcggcagtccactttggaactcaggctgcagcccgaggagagcttcatacttaaggttgttcagctggaggagctactggccgtccggcattccgtgttcgtggtgggcaacgccggcacaggcaaatcgaaaatcctgagaactctgaataggacgtacgtgaatatgaagcagaaaccagtgtggaatgatctgaatccaaaagccgtaactactgatgaattgtttggcttcattcaccacgctacccgggaatggaaagacggtaaaatcgtttattcttatttcattggtcttttcagctcaatattgcgcgagcaggcgaacctcaagcatgacgggcctaagtggatcgtgttggacggcgacatcgatcctatgtggatcgaatcgctcaacaccgtcatggacgataacaaagtgctgaccttggcctcaaacgaaagaatcgcacttacccccttcatgcgcctgctcttcgaaatccaccacctgagatctgctacccctgctactgtaagtagagccggcatcttgtacgtgaacccccaagacctcggttggaatccatatgtggctagctggatcgataggaggaggcaccagtccgagaaggccaatttgacaattcttttcgataaatacgtccccgcatgcctggataagctgcgcaccagctttaaaactattacttcaatccctgagtcctccttggtccagacactttgtgtgttgctagaatgtctccttacgcccgaaaacgtgccttccgatagccctaaggaggtctacgaggtctactttgtgtttgcctgcatctgggccttcgggggtaccctgctccaggatcagatctcagactatcaagctgatttctctcgttggtggcaaaaagaaatgaaagctgttaaattcccaagtcagggaactatcttcgattattacgtagatcataaaacaaaaaaattactaccctgggctgataaaattgcccagttcactatggacccggatgtgcccctgcagacagtcctggtccacaccacagagacagctcgcctccggtactttatggaactactccttgagaaaggcaagcccctgatgttggtgggtaatgcgggggtagggaaaactgtttttgtcggcgacacactcgcaagcttgtccgaggactacattgtgtctagagtgccattcaactattataccacaagcactgctctgcaaaagatcttggaaaagcctctggagaaaaaagccggccacaattatgggcccggggggaacaagaagctcatctatttcattgacgacatgaacatgccagaagtggatctttacgggacagtgcagccgcacactcttattcgccaacatattgattacgggcattggtatgataggcaaaaagttatgctgaaagagatacacaactgccagtacgtagcttgtatgaatcctatggtgggaagctttacgattaacccacggttgcagagacatttcaccgtgtttgccttcaatttcccgtctcttgatgccctgaatactatatacggccagatcttcagcttccacttccagcaacaggcgttcgcgccgtcgatccttcgcagcggaccaactctcattcaggcaaccatagccttccaccaaacaatgatgtgcaattttttacccacggccatcaagtttcattacattttcaacctgagggacctgtctaacgtgttccaggggatccttttcgcaagtcccgagtgtctgaaagggcccctcgacctgatccatctctggctgcatgaatctgcgcgagtgtatggggacaagctaatcgataagaaggactgtgacctgttccagcgtcggatgctcgaaacagcttataaatattttgagggcattgactcacacatgctgctacagcagccattgatctactgccatttcgcagacaggggaaaggacccgcattatatgcccgtcaaagattgggaggtactcaagacgattctgactgaaactctggacaactataacgagctgaacgccgctatgcatctcgtattgttcgaggacgcaatgcagcacgtctgccgaatttcccgcattttgagaaccccccagggttgcgccctgctagtgggcgtagggggctcaggaaagcagagcctcagcaggctggctgcctacctgcgtggcctagaagttttccaaataacacttacagagggatacggcatccaggaactgcgtgtcgatctcgcaaacctctatatcagaacaggagccaagaacatgccgaccgtttttctcttgacagacgcccaagttcttgacgaatccttcctggttctgataaacgatctactcgcatcaggagaaatccccgacctattctccgacgaagacgtggataaaatcatcagcggcattcataacgaggttcatgcactggggatggtggattcccgagagaactgttggaagttttttatggctagagtacgactccagttaaagattatcctgtgcttctctccagttgggcgaacgctgcgggtgagggcccgcaaatttccggccatcgtcaattgtactgcaatcgattggtttcatgcctggcctcaggaggccctggtgagtgtctctcggcgttttattgaagagaccaaaggaatcgaacctgtgcacaaagattcgatctccctgtttatggctcatgtacatacaaccgttaatgagatgtccacgagatactaccagaacgagcgacggcacaactatacaacacctaagtcattcctggaacagatttcattgttcaaaaatcttctgaagaagaagcaaaacgaagtaagcgaaaaaaaggaaaggctcgtgaacgggatccagaagctcaaaaccaccgcatctcaggttggagacctgaaagcgaggctcgcctcccaagaagctgaactgcagctgagaaaccacgatgcagaagctctgattacaaagatcggtctgcaaaccgaaaaggtttcccgggagaaaaccatcgctgacgccgaggagagaaaggtcacggccatccagactgaagtgttccagaagcagagagaatgtgaagcagacttgctcaaggccgagccggcactcgttgccgcgactgctgctcttaatacactcaacagggtgaaccttagcgagctgaaagcgtttcccaatccccctatcgccgtgacgaacgttacggccgccgtcatggtactcctagcgccacgtggaagggttcctaaggatagaagttggaaggctgcaaaagtgttcatggggaaagtggatgactttctgcaggcactgattaattatgacaaagaacacattcctgaaaactgtctcaaggtcgttaatgaacactacctaaaagaccccgaattcaacccgaacctcatccgcacgaaaagttttgcagccgctggcctgtgcgcgtgggtgatcaacatcataaaattttacgaggtgtactgcgatgtggagccaaagaggcaagccctggcccaggccaacttagagctcgcagctgccaccgagaaactggaagcaatccggaaaaagcttgtggatctggacagaaacctctccagactgaccgcctcctttgaaaaagccacagccgaaaaggtacgatgccaggaggaggttaatcaaaccaataagaccatcaagctggctaacaggctcgtgaaggaactggaggcaaaaaagattcgctggggccagtcaattaaaagtttcgaggcccaggagaagactctgtgcggcgatgtacttctgaccgcagctttcgtcagctatgtcggccccttcactcgccagtacaggcaggagcttgtgcactgtaagtgggttcccttcctgcagcagaaggtgtccataccactgaccgaagggctggatctgatctcaatgctcacagatgacgctacaatcgccgcctggaataatgaaggcctcccttcagacaggatgagcaccgagaatgcagctatactcacccattgtgagcgctggccactggtgattgacccacagcaacagggaatcaagtggatcaaaaacaagtacggcatggacctcaaggtgacccacctgggccagaaaggcttcctgaacgccatcgagactgctctcgcattcggggacgtcattttgatcgagaacctggaggagaccatcgaccccgtgctggatcctctcctgggcagaaacaccattaagaaagggaaatacattcgcattggagataaggagtgcgagttcaataaaaactttcgacttattctgcataccaaactggctaacccgcactataaaccggaactccaggcgcaaactacactgttgaactttaccgtaaccgaagacgggcttgaggctcagctcttggcggaagttgtgagtatcgaaagacccgaccttgagaaattgaaactggtcctcacaaagcaccagaacgacttcaaaattgagctgaagtacctggaagatgatttgttattgaggctgtccgcagccgaaggcagctttctagatgataccaagctcgtcgaacgcctcgaggccaccaaaaccacagtggctgagatcgagcacaaagttattgaggcgaaagagaatgagagaaagattaacgaggcaagagagtgctacagaccagtcgctgcacgggctagcctactgtactttgtgatcaacgatcttcagaagatcaaccccctgtaccagtttagcctgaaggcctttaacgtgctatttcaccgggccatcgaacaggccgacaaggtcgaagatatgcaggggaggatttccatcttgatggagtctatcacgcacgcagtgtttctttacacaagccaggccctgttcgaaaaagataagttaacttttttgagccagatggccttccagattctactgaggaaaaaggagatcgacccactcgagctggacttcctgctacggtttacagtggagcacacccatctgtcccccgtggattttctgactagccaatcctggtctgcgattaaggctatcgcagtgatggaagagttcagaggcatcgatagagatgtggagggttcagccaagcagtggcggaaatgggtggaaagcgaatgtccagaaaaagaaaaacttccccaagaatggaagaaaaagagtcttattcaaaagctgatcctcttacgcgcaatgcggccagacagaatgacatatgccctgagaaactttgtggaggagaagcttggcgcaaagtacgtggagcggacaaggttggatctggtaaaggcatttgaagagtcctcacctgccacaccaatcttctttattctttcccctggtgtcgatgccctgaaagaccttgagattttgggaaaacggctcgggtttacgatcgattccggaaagttccacaacgtttctttaggccagggacaggaaactgtcgccgaagttgctttagagaaagcatctaaaggaggccattgggtaatactgcagaatgtgcacctggtggccaagtggctggggacactggagaagctgcttgagcggttttcacagggatcccacagggactatagagtcttcatgtctgcggagagcgccccaacccctgacgagcacatcattccacaggggctgcttgagaattcgattaaaataacaaacgagccaccaaccggaatgcttgcaaacctacacgcggccctctataatttcgaccaggatactctcgagatctgcagtaaagaacaggagtttaaatccattcttttttctctgtgttattttcacgcttgcgtcgccggacgcttaaggttcggacctcaggggtggtcccgctcgtacccctttaatcccggtgatctgacaatttgcgcatccgttttatacaattatttggaggccaattctaaggttccctgggaggaccttagatatctgttcggcgagattatgtatggtggccatattacagacgactgggataggaaactgtgccgtgtgtacttggaggaattcatgaacccaagccttacagaagacgaactcatgttggcccccggcttcgctgcacctccctaccttgattatgccggataccatcagtacatcgaagaaatgttgccgcccgagtccccggccctttatggactacatcctaacgcggagatcgagttcctgaccgtcactagtaacacattattccggactctgttggagatgcagccacggaatgctctgagtggggacgaattaggccagtcaacagaagagaaagtgaaaaacgttctggatgacatcctggaaaagctccccgaggaatttaacatggccgaaatcatgcagaaaaacagcaacagatctccttacgtgctggtatgttttcaggaatgtgaacgcatgaacatcctgatccgggagatcaggatcagtttggaacagttagacttgtccttaaaaggcgagctcgctctgagccccgcagtcgaagctcaacagtttgcgctttcatacgacactgtacccgacacatggagtaagcttgcatatcctagtacgtatggattggcccagtggttcaacgacctcctgctcagatgcagagagctcgacacctggacccaggatctgacactgcccgctgtggtgtggttgtcaggcttctttaacccgcaaagtttcttgacagccatcatgcaaactatggctaggaagaatgaatggccactggacaagactaggttgactgccgatgtcaccaaaaagactaaagaggactacggtcaccctcccagagaaggtgcttatctgcatgggctctttatggaaggagcccggtgggatacccaggcgggaacgatcgtggaggctaggctgaaggagctggcctgccccatgcccgtgatctttgcaaaggccacgcccgtggacagacaggaaaccaagcaaacgtacgagtgccctgtttacaggaccaaacttaggggtcctagctacatatggactttccggttaaaaagtgaggaaaagacagccaagtgggtcctagcaggcgttgcattattgcttgaagcctag

SEQ ID NO: 115228 - DNA, 1374 bp, synthetic construct
  misc_feature 1..1374: note = Description of Artificial Sequence: Synthetic coding sequence
  source 1..1374: mol_type = other DNA
atgtctgatgcaaacaaggcagccattgcagccgaaaaagaggctctgaacctgaaactgcctccaatcgtgcatttgcctgagaacatcggtgtggatacgcccacacaatccaagctcctcaagtatcgcagaagcaaagaacagcagcagaagatcaaccagctggtcatcgacggcgctaaaaggaacctggataggactcttggaaagcgaaccccattgctcccaccaccagattacccacagacaatgactagtgaaatgaagaaaaaaggtttcaactatatttacatgaagcagtgcgtggaatccagtccacttgttcccatacagcaagagtggcttgaccatatgctaagattgatccctgaatccctaaaggaagggaaggaaagagaggaacttctggagtcccttatcaatgaagtgtctagcgacttcgagaacagcatgaagcgctatctagtgcagagcgtgctggtcaagcctccagtgaaatcgttggaagacgaagggggtcccttacctgagtctccggttggtctcgattattccaacccttggcatagcagctatgttcaggcccggaaccagattttcagcaatttacatattatacacccgactatgaaaatgttactggatttggggtacaccacattcgctgatactgtacttctggactttacagggattagagccaagggtcccatcgactgcgagagcctcaagacagaccttagcatccaaacacgcaacgctgaggagaagatcatgaacacgtggtacccgaaggtcataaatctctttacaaagaaggaagccctggagggggtgaaacccgagaaactcgacgcgttctactcgtgtgtgtctaccctaatgtctaatcagttaaaggacttgctccggcgcacggtagagggattcgtgaagctgtttgatccgaaggatcaacagcgactgcctatctttaagattgagttgacgttcgacgatgataagatggagttctacccgactttccaggatcttgaagacaacgttctatcacttgttgagagaattgcagaggccctccaaaatgtccagactatcccctcctggctgtcagggacttcaacaccagtgaacctggatactgagctgccagaacacgtgcttcactgggccgttgatactcttaaagctgcggtacaccgaaacctggagggtgcacgaaaacactacgagacatacgtggaaaagtataattggctgctggacggaaccgcggtggagaacatcgagacgtttcagactgaggaccacactttcgatgagtacactgaggagctcgactgttgggttgtttgggaggtgtatttctag

SEQ ID NO: 115229 - DNA, 2040 bp, synthetic construct
  misc_feature 1..2040: note = Description of Artificial Sequence: Synthetic coding sequence
  source 1..2040: mol_type = other DNA
atgttcttactgactggcggcgtgagccttaagtcggccgaaaagaatccagatcccacttggctacaagataagagctgggaggagatatgcagagctagcgagtttcccgctttccgcgggctacgccagcacttttgcgagcacatctacgagtggcgggagatctacgattccaaggagccacataacgcgaagtttcctgcacccatggacaaaaacctcaatgaactccagaagatcattatcctgaggtgtctccgcccagataagattacacccgccatcaccaactatgtcacggataagctcggcaagaaatttgtggagcctcctccgttcgacctgaccaagtcctatttggactctaactgcaccatcccgcttatttttgtcctaagccctggagccgatccgatggcttcactacttaaattcgcgaacgataagtctatgtctggaaacaaattccaggctatctctctgggccaaggtcagggccccatcgccgccaagatgatcaaggccgctatcgaggagggaacttgggtttgcctgcagaattgccacctggcagtttcctggatgccaatgttggagaaaatctgtgaagatttcactagcgagacctgtaactcttctttcagactatggctcacgagttacccgtcatccaagttcccagtgaccatcctccagaatggcgtgaaaatgaccaacgaacctccgaccggcttaagacttaacctcctacagagctacctcactgatcctgtcagcgatccagagttctttaaaggctgtcggggtaaagaattgctcttcataaatgaatacgataccataccatttgaagccatcagctatctgactggagagtgcaattatgggggcagagttaccgacgattgggataggcgactgttgctgaccatgctggcagatttctataacctgtatattgtggaaaaccctcattataaatttagcccatccgggaactattttgctcccccgaaggggacttatgaagactatatcgaatttatcaagaaactgcctttcacgcagcaccctgaaattttcggattgcatgaaaatgttgacatttctaaagacttgcagcagacgaaaaccctgttcgagagcctgctgctaacacagggaggttcgaaacagaccggggcctcgggaagtaccgaccagatcctactcgagatcacaaaggacatcctgaacaagctgccctctgattttgacatagagatggccttgagaaaatatcctgtccggtacgaggaatcaatgaatacggtcttggttcaggagatggagagatttaacaacttaatcataacaattcgaaacactttaagggatctggaaaaggccatcaaaggtgtggtggtgatggactcagccctcgaagcactcagcggatccctgctggtcggaaaggtacctgagatctgggctaagcggagttatccttcgctgaaacctctggggtcatacattaccgactttctggcaagactgaacttcctgcaggattggtataacagcggcaagccctgcgtgttttggttgtccggattcttctttacccaggctttccttacgggcgccatgcagaactacgctcgcaagtacacaacaccaatcgacttgttggggtatgaattcgaagtcatccccagtgataccagcgacacaagcccagaggatggcgtgtacatccacggcctctacctggacggtgctaggtgggaccgggagtctggactgttggctgagcagtaccccaaactgctgttcgatctgatgccgattatctggatcaaaccaactcagaagagtcgcataataaaatctgatgcctacgtgtgtcccctgtacaagacttccgagcgaaagggcacattgtcaactaccggtcactctaccaacttcgtgattgccatgctgttaaagactgaccagcccactcgacactggatcaagcgcggggtggcgctgctatgccagctcgatgattag

SEQ ID NO: 115230 - DNA, 9279 bp, synthetic construct
  misc_feature 1..9279: note = Description of Artificial Sequence: Synthetic coding sequence
  source 1..9279: mol_type = other DNA
atgagcgacgccaataaagctgcaattgcagcggagaaagaggcactgaatctgaagctccctcccatcgtccacttgccagaaaatatcggcgtcgacactcccacacaatccaaactcctgaaatatagaagaagtaaagagcagcagcagaaaataaaccagctcgtgatcgacggggccaagagaaatctggatcggactctgggaaaacgtacgcccctactccccccaccagattaccctcagactatgaccagcgaaatgaagaaaaaggggtttaattacatttacatgaaacagtgtgtcgagagcagcccgctcgtgccaatccaacaagagtggcttgatcatatgctgaggttaatacctgaatctctcaaggagggaaaagaacgcgaagagcttttggaatcactcataaacgaggtgtcgagtgattttgagaactccatgaagcggtacctggtgcaaagcgtcctggttaaaccccccgttaaatcactcgaggacgagggcgggcccttaccagaaagtcctgttggcttagattactccaatccctggcattcaagctatgttcaggcacggaaccagatattttccaacctccatatcattcacccgacgatgaagatgctcttagacctcggctacaccaccttcgctgatactgtcctgcttgactttaccggcataagggccaagggtcccattgattgtgaatctctcaaaacggacttatctattcaaactcggaacgctgaagaaaagatcatgaacacctggtaccctaaggtgataaacctctttacaaagaaggaagcccttgagggagttaagcccgaaaaactcgatgctttctacagctgcgtatcaactctaatgagcaaccagctcaaggatctgctgaggcgaacagtggagggttttgtaaagttgtttgatccaaaggatcagcagcgcctgcccatcttcaaaatagaactaaccttcgacgatgataagatggagttttatcctacctttcaagatttagaggacaacgtcctcagcctggtggagcgcatcgcagaagctctgcagaacgtgcagaccattcccagctggctctcgggaacatcaactccagtgaatttagacactgaactgcccgagcacgtcttacactgggccgtggacacccttaaagccgcagtgcaccgaaatcttgagggcgcgcgcaagcactatgagacatatgttgaaaagtataactggttgcttgacggaaccgctgtggagaacatagaaactttccagaccgaagatcatactttcgacgaatacacagaattcattgaaaaattccttagcctggccagcgaaataatgctgctcccgcagtggatccattacaccatggttagactggattgcgaagatctgaagacaggactgactaataaggccaaggcgtttgctaacatactgcttaacgatatcgccagtaaatatagaaaggaaaacgaatgcatatgctctgaatttgaggcaatcaaggagcacgccctgaaggtgcctgagacaacggaggagatgatggatttgatatcgtacgtcgaaaaagcccgaaccgtggggatcgaagagctcatactgcgaattcaggagagtaagcggcagatgtcctatttccttgacgtgtttctgtttccacaagaggacctcgccctgaacgccaccgtgctgatgtggccccggaagattaacccaatctttgacgagaatgacgagctgatcgagaatgccaaacacaagaaagaaaacgaactcatggccaaaagagaaaagctgatcctcgaaattgagaaggagagtcgcaggatggaggagtttaccgagttcgccgagcttgaaaggatgcagcagtatgtgacagatgtgagacagctgcaaaagcgcatccaggaaagcgaggaggctgtgcaatttattaacaaggaggaagaactctttaaatgggagttgacaaagtacccagagctggataagctcaaagtcaacatcgagccgtaccagaagttctttaatttcgtgctgaaatggcagaggtccgagaagaggtggatggacggcgggttcctcgacctgaatggcgagagtatggaggcggatgttgaggagttcagcagagagatatttaagaccctcaagttcttccagactaaactaaagaaggaactgcaagagaagcggaaggcagctcgcaaacgatctctggaggaggagaaaatcgaggaagagcccaaggataacgcaaccataactatgtgccgaatgcgtgccaggcactggaaacaaatctctgagatcgtgggctatgacttaacacccgattcaggcactacgttgcgtaaagtgctgaaactgaatctgactccataccttgaacagttcgaggtgatcagtgcaggcgcttccaaggaattctcattggaaaaggcgatgaacaccatgatcgggacttgggaagacatcgcattccacatcagcctctaccgcgacactggtgtttgtattctaagttcggtggatgaaatacaggctatcctggacgatcagatcatcaaaacacagactatgagagggagcccgtttatcaagcctttcgagcatgagatcaaggcctgggaggaccgcctgatacgcattcaagaaactatcgatgagtggctcaaggttcaggctcagtggctctacctcgagcctatcttctgcagcgaggatatcatgcagcagatgccagaagaaggacgacagttccagacagttgataggcactggcgggacatcatgaagttttgcgccaaagatccaaaggtgctcgccgcaactagcctcactggactgctggagaaactgcagaattgtaatgaactgttagagaagattatgaaggggctcaacgcctacttggagaaaaagaggctgttcttcccaagattctttttcttgagcaatgacgaaatgctcgagatcctgtctgaaactaaagaccctcttcgcgtgcaaccacatctgaagaagtgttttgaagggatcgcaaagctggagtttttgcccaacctggatatcaaggctatgtattcctccgagggtgaacgcgtggagctgattgccctcattagcacgtctgccgcccggggagcagttgagaagtggctgatccaagtcgaagacctgatgctgagaagcgtgcacgatgtgattgcagcagccagattggcttatcctgagagcgcccgacgtgattgggtgagggaatggcctggccaggttgtgctgtgcatttcccagatgttttggacgtctgagacacaggaggttattagcggtggtacagagggtctgaagaaatattacaaggaactccagaaccagttaaatgagatcgtggaactggtgaggggtaaactgtccaagcaaacaaggacaacactgggcgccctggttaccatcgacgtacacgccagggatgtggttatggacatgatcaaaatgggtgtgagtcatgatacagatttcctctggctggctcagctccggtattactgggaaaacgagaacgctcgagtgagaattattaactgtaacgtcaaatacgcttacgagtatctgggtaactctcctcgactcgtcattaccccactcaccgatagatgctacaggacgctcattggtgcgttctacttgaatttggggggcgcacctgagggcccagcagggactggaaagacagaaacgaccaaagatctcgctaaggctctggcagttcagtgcgtagtctttaactgttcagatggactggactaccttgcaatgggtaagttcttcaaggggctggcttcatcaggtgcctgggcttgctttgacgaatttaacaggatcgaactggaagtactctcagtggtggcccagcagatcctctgtatacagcgcgccatccagcaaaaactggtcgtctttgtcttcgaaggcaccgagttaaaactcaaccctaactgcttcgtggctataacgatgaacccaggctacgcaggccggtcagaactgcccgacaatctaaaagtgttattccggaccgttgccatgatggttcccaattacgccttgattgctgagatcagtctttacagttacggcttcctgaacgccaggcccttgtccgtgaagatagtgatgacgtatcgtctctgctccgaacagctgtcctcccaattccattacgactacggtatgagggctgttaaggctgtcctagtcgccgccgggaacctaaagctgaagtacccaaatgagaacgaggacattctcctgttgcgaagcataaaagatgttaatgagccgaagttcctgtcccacgatatccctctgttcaatggcataaccagcgacctctttcctggcattaaacttcctgaggccgactaccatgaatttctagagtgtgctcacgaggcttgcaatgtccacaatctgcaaccagtcaaattctttctggaaaaaattattcagacttacgaaatgatgatcgtgaggcacgggtttatgttagttggcgagcctttcgctgccaagaccaaagtgctgcacgtactggcagacacccttactctgatgaacgaacacggctatggggaagaggagaaagtgatttataggaccgttaatcccaagagcatcacgatgggccagcttttcggtcagttcgacccggtgtcccacgagtggaccgatgggattgtggcgaacacctttcgggagttcgcattatccgagacccccgaccgcaagtgggtcgtgttcgacgggccaattgacacactgtggatagagagtatgaacaccgtgttagacgacaacaagaagctctgtctgatgagtggagaaataattcagatgtctccacagatgagcttgatctttgagaccatggacctctcacaggcaagccctgctacggtgagtcggtgcggaatgatttacttggagcccagtcagttggggtgggaacccctggtttcaagctggctcaatagcctcaagggtcccctgtgtgagcccgagtatcaagccctcctgcggggattgttcgcttggttgatccccccctcattaaatcagcgagtggagctattccagcttaactacctgtatacaactatagtgagcaaaatacttaagatcttaatcacatttcggatctcgaattattttaaatatgtcccgcttaaaacccagtgtacgtttataaaattcttcttgcaccagcaggcttgcttcattttttccctcatttggtctattggtggttcatgtgataccgacgggcgtagagtgtttgacacctttattcgcttgatcatcctcggcaaggacgatgaaaacccagtgccagattcagtggggaaatgggagtgtcccttcgacgaaaagggccttgtgtatgactacatgtacgaactgaaaaacaagggtagatgggtacactggaacgagctgattaagaacacaaacttgggcgataaacagattaaaatccaggacattatagtccctacaatggacactatcagatacacttttttgatggatctgtcaataacctacgccaaacccttattgttcgtcggtcctaccgggaccggtaagtccgtatatgttaaggacaagctgatgaaccacctggagaaagaccagtactttccattttacattaatctgtccgctcgcacatcagcgaaccaggtgcagaatataatcatggcaagactggataaaaggaggaagggagtattcggtccgcctatgggaaaaaagtgtatcatttttatcgatgacatgaatatgccagccctcgagaaatacggagcacagccacctatcgaattgttacgccagttctttgattgcgggcactggtacgaccttaaagacacaagtaaaataaccttagtcgatatagaactgatcgctgctatgggcccaccaggcggggggcggaatcctgtaaccccgaggtgtattaggcacttcaatatttgctccatcaatagtttcagcgatgaaaccatggtgagaatattctcctcaattgtagcgttctatctgcgtacccacgagtttccgccagagtacttcgtgatcgggaaccaaatcgtaaatggaactatggagatatataagcagtctgtcgagaatctcttgcccacacctactaaatctcattacacatttaatctgagagatttctccagagtgataagggggtgcttactgatcgagagagatgcagtggccaacaagcacaccatgattagactctttgtccatgaggtgctcagggtgttctatgatcgtctgataaatgacgacgacaggcggtggttgttccagctgaccaagactgtaattaaagatcactttaaggaatcgtttcactccatcttctcccacctgcggaaacaaaatgctcctgtgacagaagaagatctcaggaatttgatgtttggggactacatgaaccccgacctggagggggacgaccgcgtctacatcgaaatccccaacatccaccacttcagcgatgttgtggatcagtgccttgatgagtacaaccagacacacaagacgcggatgaacctggtgattttccggtacgtactggagcatttatcaaggatttgtcgcgtgctcaagcagagcggaggcaacgctctccttgtggggttgggtggttctgggcggcagtccctcacacggctcgcaacctcaatggctaagatgcacatctttcagcctgagatcagtaagagctacgggatgaacgagtggcgagaagacatgaagtccttcatcgcagttccagtgaccaatagaatcgtcgacaataagagcaaaatcctagagaagcggttacgctatctgaatgatcacttcacatataacctttactgcaatatctgtcgaagtctgttcgaaaaggacaagctgctcttcagtttcctcctgtgcgcaaacctgcttctggcccgtaaagagatcgagtaccaggaactcatgttcctcctgaccggaggggtctcccttaagagtgccgagaaaaacccagatccaacatggctgcaggataaatcctgggaagagatttgtcgtgcctccgagttccccgccttcagaggcctacggcagcacttctgcgaacacatttacgagtggcgcgagatttatgatagtaaagagccccacaatgctaagtttcccgctccaatggataaaaacctcaacgagctccagaaaattattatccttaggtgtctgcgccctgataaaatcactcctgccatcaccaactatgttaccgataagctcggcaaaaaatttgtggagcctcccccttttgaccttacaaagtcgtatctggactccaactgcaccattccactaatcttcgtgcttagccccggagccgatccaatggcttctctgcttaagtttgccaacgataagagcatgtctggtaacaagttccaagccatttctctgggccagggccaaggcccaatagccgctaaaatgatcaaagccgccatagaagaaggcacctgggtgtgcttgcagaattgtcacctggctgtaagctggatgccaatgctggagaagatatgtgaggactttacatctgaaacttgtaacagttcctttcgcctgtggctcacgtcatacccctcctcaaaatttcccgttacaatcttgcagaatggtgtgaagatgactaacgaaccacctacaggcctgcgtctaaacctgctgcagagttacttaaccgacccagtgagtgaccctgagtttttcaagggttgtcgggggaaggaactcgcttgggagaaactgctgtttggcgtgtgtttctttcatgccctggtgcaggagcggaagaagtttgggccactagggtggaatatcccatacggattcaacgagtccgacctgaggatcagtatcagacagctccagcttttcattaacgagtacgataccatcccctttgaggccatttcctacctgaccggcgagtgcaattatggagggagagtgactgacgattgggacaggcgcttgctgttaaccatgctagctgacttttacaatctctacattgtcgaaaatccgcactacaaattttcaccctcgggcaattatttcgctccacccaaaggaacctatgaggactacatagagtttatcaagaagttacccttcacccagcaccccgagatcttcggcctgcacgaaaacgtggacatttctaaagacctgcagcaaaccaaaacactttttgagagcttgctgctgacccaggggggaagcaagcaaactggagcatctggctccactgaccagatcctgctcgagatcactaaggacatcctaaataaactgccatccgattttgatatcgaaatggctctgagaaagtatccggtcaggtatgaggagagcatgaacaccgtcctcgtccaggagatggagcgtttcaacaaccttattatcaccatcaggaacactttgagagacctcgagaaagctatcaaaggggtggtcgtcatggattctgctcttgaggctctgtccgggtcactcctggtgggcaaggtccccgaaatctgggccaagagatcctatccatctctgaagccgcttggatcctatattacagacttcttagcacgccttaacttcctccaggattggtataattcaggaaagccctgcgtgttctggctgtctggattcttttttacccaggcatttctcacaggggccatgcagaactatgcacgaaaatataccactcccattgacttgctgggatacgagttcgaggtgatcccctctgacacctccgatacgtctccggaggatggagtttatatccatggtctttatctggatggagccagatgggatcgggagtcagggcttttagcggagcagtaccctaaactgctcttcgacttgatgccaataatttggataaaacccacccagaaaagcaggatcattaaatcagatgcgtatgtttgtcccctatataaaacatctgaacggaaaggcaccttgtctacaacaggtcacagtaccaatttcgtgattgctatgctcttaaagaccgaccaacctacgcggcactggatcaagcgaggagttgctttactttgccagctggatgactag

SEQ ID NO: 115231 - DNA, 2355 bp, synthetic construct
  misc_feature 1..2355: note = Description of Artificial Sequence: Synthetic coding sequence
  source 1..2355: mol_type = other DNA
atgagtgacgctaacaaagcagctatagccgccgagaaggaagcacttaacctgaaacttcctccaatcgtccacctgcctgagaatatcggggtcgatactcccacacagtcaaaacttctgaagtacagacgatctaaggagcagcaacaaaagattaaccagctcgtgatcgatggcgctaagcgaaacctagaccgaaccctaggtaaaagaacaccgctgcttccaccaccagactacccccagactatgacctcagagatgaaaaagaaaggatttaattatatatacatgaagcagtgtgtcgaaagtagtcccctggttccaattcagcaagaatggctggaccacatgctgcgactcatcccagagtccctgaaggagggaaaagaacgggaagagctgttagagtctctgataaatgaggtcagctccgacttcgaaaattctatgaagcgctaccttgtgcagagcgttcttgtcaagccgcccgttaaatcactggaagacgaaggggggcccctcccagaaagcccggtggggttggactacagcaacccttggcactcttcctacgttcaagctcggaatcagatattttctaacctgcacattatacacccaactatgaagatgcttctggacctgggctacaccacatttgcggacacagtgcttcttgactttacaggcatcagagccaagggaccgatcgactgtgagagcctcaaaaccgatcttagtatacagacacggaacgccgaggaaaagatcatgaatacttggtaccctaaggtgataaaccttttcaccaaaaaggaggctttggaaggggtgaagccagagaagttggacgccttttatagctgtgtgtcgacactgatgtccaatcagttaaaagacttactgcggaggacagtggagggctttgtcaagctgttcgaccctaaagatcagcagcggcttcccattttcaagattgagctgacatttgacgatgacaagatggagttttaccccaccttccaagacctagaagataacgtcctcagtctggtggagcggattgctgaggccctgcagaatgtgcagaccattccttcatggctgtctggcactagcactccagtcaacttggatacagagctcccagagcacgtattgcactgggccgtggacaccctgaaggcagcggtgcacaggaacttggagggcgctcggaagcactatgaaacgtacgtggagaagtacaactggcttctcgacggaacggctgtggagaatattgagacttttcagaccgaagaccatacttttgatgagtacacagaatttattgaaaagtttctctctctggcctctgaaatcatgctgctcccccaatggattcattacaccatggttagactggattgcgaggatctcaaaaccggtctcacgaataaagccaaagcattcgcgaacatattgcttaatgacatcgcttcaaagtacaggaaagagaacgagtgcatatgttcagaattcgaggcaatcaaggagcatgcgctgaaagtgccggagaccacagaggaaatgatggatctcatctcttacgtggaaaaagctaggactgttggcattgaggaactaatcctccgaatccaggagagtaagcgtcaaatgtcttacttcttggatgtcttcctgtttccacaggaggacctcgccttaaacgcgactgtactcatgtggccaaggaagattaatccgatcttcgacgagaatgatgagctcattgagaacgccaagcataaaaaagaaaatgagctgatggcaaaacgagagaaactgatactggaaatcgagaaggaaagtcgccggatggaagaattcactgaatttgccgaactggagcggatgcagcagtatgtgacggacgttcgtcaactgcagaagcgcatccaggagagtgaggaggctgtccagttcatcaacaaagaagaagagctcttcaaatgggagctgactaagtatcctgaactggacaaactgaaagtgaacattgagccataccagaagttttttaacttcgtgctcaaatggcagcgctctgagaagagatggatggacggcgggttcctcgacctgaatggagagagcatggaagcggacgtggaggagttttcacgggagatctttaaaacgttgaagtttttccagaccaagctgaaaaaggaactgcaggagaaaagaaaagcagcacgaaaacgtagcctcgaggaggaaaaaatcgaagaggagcctaaagacaacgctacaatcacaatgtgttccacggtcatggagcagatcaaggcttttaaggtctag

SEQ ID NO: 115232 - DNA, 687 bp, synthetic construct
  misc_feature 1..687: note = Description of Artificial Sequence: Synthetic coding sequence
  source 1..687: mol_type = other DNA
atggagacctttattcccattgatctgacaaccgagaatcaggaaatggataaggaggagaccaaaacaaaacccaggctgctccgctacgaagaaaaaaaatatgaggatgtcaagccattggaaactcagcctgccgaaatagccgagaaggaaaccctcgagtataagacggtgcggacattcagcgagagcctcaaatccgaaaaaacagaagactacctgcgagaatccataatccagcaacacatggtcagtccagagcctgcatcccttaaggagaaaggcaagtccagacggaaaaaggaccagacccatgcctgcccaaatgtccgcaaggctaggccggtctcctatgatagaacagaaccaaaggatgacgacgtcatccggaatataattaggctcagagagaaattgggttggcagaccatcttgccacagcacagcctgaaatatggttccagcaaaatcgccatccagaagatcacgcttaaaaaacccttggaagacgatggagagttcgtttactgcctgcctaggaaaagccccaagtcactgtacaacccctatgaccttcaggtggtgtccgctcacacggctaagcactgcaaggagttttgggtgattaccgcatctttcatctccaaacgctatctggtgatctgcggagccgtatacatttag

SEQ ID NO: 115233 - DNA, 687 bp, synthetic construct
  misc_feature 1..687: note = Description of Artificial Sequence: Synthetic coding sequence
  source 1..687: mol_type = other DNA
atggagacatttatccccattgatctcaccacagagaatcaagagatggacaaagaggaaaccaaaaccaagccccgactgctgaggtacgaagaaaaaaaatatgaggatgtgaagcctttagagacccagcctgctgaaatcgccgaaaaggagactcttgaatacaagactgtgcgaaccttcagtgaatcccttaaatccgaaaagaccgaggactatctcagggagtccatcattcagcaacatatggtgtcgcctgaacctgcttcgctgaaagaaaagggaaagtcacgccggaagaaagaccagacacatgcttgccctaacgttcgtaaagctaggcccgtttcttatgatagaaccgagcctaaggacgatgacgtcattaggaatattattcgcctgcgggagaagctgggttggcagacaatattaccgcagcatagtctgaagtatggaagctcaaaaattgctattcagaaaataactctaaagaagccccttgaggatgatggcgagttcgtgtactgtctacccagaaaaagtcccaagtctctatacaacccgtatgacttgcaggtcgttagcgcgcatactgctaaacactgcaaagagttctgggtcattacagcctcttttatttccaagaggtatttggtgatttgcggtgccgtatacatttag

SEQ ID NO: 115234 - DNA, 1362 bp, synthetic construct
  misc_feature 1..1362: note = Description of Artificial Sequence: Synthetic coding sequence
  source 1..1362: mol_type = other DNA
atggagacatttatcccaatagacctcaccactgagaaccaggaaatggacaaagaggaaacaaaaaccaagccccgcctactccgatatgaagagaaaaaatacgaagatgtgaagccactcgagacccagcccgccgagatcgctgaaaaagagacccttgagtacaagaccgtccgcactttttccgaatccctgaaatcagagaagaccgaggattacttacgtgaatccatcattcagcagcatatggtgtcacctgagcctgctagtctcaaagaaaagggtaagagccggcgaaagaaggaccagacccacgcctgtccaaacgtccggaaggcccgcccagtgtcttacgatcgaaccgagcccaaagacgacgacgtgattcgaaacatcatccgcctccgggagaaacttggctggcagacaattttgccccaacattctttgaaatatggcagctcaaagatcgcgatccagaaaattaccttaaagaagccactagaggacgacggagaattcgtttactgcctccctaggaaatcccctaaatctctgtacaatccctacgacttacaagttgtatcagcccatactgctaaacattgtaaggaattctgggtcatcaccgcttcgttcatctcaaaggttatcaacatagtggggagtgtcaaagaggttgagctcattcctacccttgagtggctgtccgaacggagacactattacctcctgagacaatttaagatttttagtgatttccgcatgaataaagcttttgttacctggaagctgaacgtaaagagaattaaaacggaaaagtctagaagtttcctatatcatcacctttttttggccgatgacctgttccagacatgtctcgtatacataagaggcctctgcgaggacgctatcaacctaaaaaattacaatgatcacgagaataacctgtcggccatctgcctcgtgaagttggattcctctcgtacttactcattggacgaattttgcgaagaacagctgcagcaggccacccaggctcttaagcagttagaagatataagaaataaagctatttccgagatgaaatccacatttctcaaggtggccgagaagaacgagattaaagagtatttcgagtccaaactgagcgaagatgatacaacccactttaagcttcccaaataccggagactgctggagaccttctttaagttcgtgatgttggttgattatatctttcaggaactcattcgtcagctgatgaataccgcggtcactttgcttctggaattgtttaatggctctgcaggaatgcccttctccgtggagaagaagaacgaaaacttgattcggtag

SEQ ID NO: 115235 - DNA, 13548 bp, synthetic construct
  misc_feature 1..13548: note = Description of Artificial Sequence: Synthetic coding sequence
  source 1..13548: mol_type = other DNA
atggagacttttattcctatcgatctaacgaccgagaaccaggaaatggacaaggaagagacgaagacgaagccacggctcctccgttatgaggaaaaaaagtacgaggacgtcaaacctctggaaacacagccagcggagatcgccgagaaggaaactctggagtataagactgtcagaacattctcagaatcattgaagtctgagaaaacagaggattacctgcgcgagtccatcatccagcagcacatggtgtcccccgaacccgctagtcttaaagaaaaaggaaagtcgcgccgaaagaaagatcagactcacgcatgccccaacgtgagaaaagccaggccagtgagttatgatcgcaccgaacccaaggacgacgatgtcatccgcaacattatccggctgagggaaaagctcgggtggcagacaatcctcccccaacactccttaaagtacgggagttctaaaattgccatccagaaaatcaccctgaagaagcccctggaggatgacggggaatttgtgtactgcctgcccagaaagtcccccaaaagtctgtacaacccatacgaccttcaggtcgtgagtgcacacacggccaaacactgcaaggaattttgggtcatcaccgctagttttatcagcaaagtgatcaacatcgtggggtccgtgaaggaggtggagctcatcccaaccctggaatggctctcagagcggaggcattactacctgctccgacagttcaaaatattttcggactttaggatgaataaagcatttgttacctggaaattgaacgtgaaacgcatcaaaactgagaagtctagaagttttttgtatcatcatctgtttctagccgatgatctgttccagacctgcctcgtgtacatccgcggactgtgcgaggatgctattaatttaaaaaattacaatgaccatgagaacaacctgtccgccatctgcctggtgaaattagactcctctcggacatactctctggacgagttctgcgaagagcagctacaacaggcgacacaggcattaaagcagttggaggacatccgcaacaaagccattagcgaaatgaaatctacttttctgaaggtggcagagaaaaatgaaattaaggaatactttgagtccaagctttctgaggatgataccacacatttcaagctgccaaaatatcgaagacttcttgaaactttttttaagttcgtcatgctggtggactacatatttcaggagcttattcgccagttgatgaacaccgctgtgacccttttacttgagctgttcaatggttcagccggcatgcccttttcagtggagaagaagaacgagaaccttatcagaacattcaaggacaatagcttccctaccggcaaaactacaaatgactgcgaagaacttgtggacaattccaagttacatgccatcagcgtgcaaaaaagtgaggtaaaaactgacaccgacatcaatgaaattctgaattctgtagaagtgggaaaagacctgaggaaaacctatgctccaatattcgaggtgaacctgtgcctgaggatcccggccgaatctgactcctcagaaaattcaaaggagaatttccacgaaagcgatcagtgccctgaggaatgtgtaatgtttgaagacgagatgagcgagaacaaggacaattgcgtcaaaaagcactctagcgaggagctcctccccaaggccaagaagagtaaggaaatttcttacaatcttgaggatataatctctgatacggaaatcgaaactgaattcgaaaataagtatatgtattatgaattcccagaattcccaactaatctgtttatcgatcccaaccgtctggagttctctgtgaagattcaaaacatgctaaccaacatggagaagtgtattacaacaataaccccactctgtcaggacccacaactaagcatatttattgatctggtctctatcatggacctgcccaataagaccggctctatcatacactacaaagaacagacacgttggcccgactgtcacattttgtttgagactgaccctgcctaccagaacataatcgtcaatctcctcacaattatcggaaacagtatgggccttgtgaatgcttattcccacaaattcatcaagtactgcaccatgaccgaaaaagcaaaaattatgtctatgaaaatctcctctatgggagagcttacctcaaaagagtttgaagctatacttaaccgcttccgaaactatttcagacacatcgtgaacatggcgatcgagaaacgaataggtatattcaatgttgtgtctctggattatcaaagtgagtgtcttctgtacatagataacgtgatacatatgtcccacactctgatccagagtgtaatcgaaaaaaaaaacaagaacctgctcgaagtcgttgagtcttcactgcagcagctggagtgtgatcccacagagatcgaggagttcctggagcactttatctttttgaacgccattagttcaaaaatttccaagctggagaaggaattcttgacaatgtcgcagctctatagtgtcgctaagcaccaccagattcatatcagtgaagaacaaattgctattttccaggtgctgctgttgaagttttctcagctgaagagctctatgaaattgagcaagatcaacaaggacacggcaatcaccaagtttagggacaacctcgaggcctgcatctcaggactgcacgtcgacgtaggcaacctgaaggccaagatcaggacccctctattgctttgcgctggaacacaggtatccactgccatggaaatgattcaaaccttgtctggggaggccgcgtctttgactaataaggccaaggcctattcgcattatcaggattgcttttccgatagtcaaagtcacatgcacagcgtcaacgttgaagaaattacacaaattgtgctgtccgagatatctgatattgaaggagacctgactctgcgcaaaaaactatgggaggcacaagaagaatggaaacgggcatcctgggagtggaggaactcctctctgcaatccatcgatgtggagtctgtccaaagaaacgtgtccaagctcatgcacataatctcagtgctcgaaaaaggcctacctaaatccgatatggtaacccatttaaagcaagtggtgaccgaattcaaacaggaactgcctatcattattgccttgggcaacccgtgccttaagccacgtcattgggaggcgctgcaggagataattggcaagtctgtgccactggacaagaattgcaaggtcgagaacctgctggctctgaaaatgttccagtacgagaacgaaatcaatgacatgtcaacatcagccactaacgaagccgcgctcgaaaagatgctctttaaaattattgatttctggaacactaccccattgccactgatcttgcaccatacagaaatctactctatctttatcatccccagcatcgatgacatttctgcccagctggaggaatcgcaggttattctcgcgactatcaaagggtccccgcatatcggtcccattaaagatctcgtgaatgaatgggaccagaatctcaccctgttttcctacacactggaggagtggatgaattgtcagagaaactggctgtacctggagccagtgttccactcatctgagatccggcgccagttgcctgctgaaaccgagctgttcagtcaggtgattagtatgtggaaaaagattatgtcaaagattcagaacaagcagaacgccctgcagattacaacatccgccggcgtgttggaaatactccagaactgcaacatccatctggaacacatcaagaagtcactggaagactacctggaggtgaagcggctcatctttcccaggttctactttctctccaacgcagagctacttgatatcctggccgatagtagaaatcccgaaagcgtgcagccccacttggttaagtgctttgaaaatattaaacagctattaatatggaaacaggatataggcccaccggcggttaaaatgctgatatctgctgagggcgaaggtctagttctgcccaaaaaaatccgggtgcggagcgctgtggaacagtggttagtgaatgtcgagaagagcatgttcgatgttctgaaaaaagaaaggtacatatacaacataatcttactcttccagtcacagataatgttctataacgattgcgtgaagtcattcgttagctcttactctagggagaaactggagaaggtgcatgctggacttatgtgtcacctggaggaagtcgctgacctggtggtcctggacacaagcaattctcggaccaaagccatcctgggtgccttactcatcttgtatgtccattgcagagatattgtgatcaatttactgctaaagaatatctttaacgctgaggatttcgagtggactcggcacttgcagtataaatggaatgagaaacagaagctgtgctatgtgtcacaagggaacgcttcttttacatatggctatgagtatctcgggtgcacatcacggctcgttattacacccctgacagatcgttgttggctgacactgatggaagccctgcacttgaatctgggggggtgccccgccgggcctgcgggaaccggtaagactgagacagtcaaggatctggccaagagcctggggaaacactgcgtggtttttaattgctttgaagacctagattacaagatcgttaggaagttctttttcgggctggtccaaagtggcgcatggtcctgctttgatgaatttaatttaatagacctggaggtgctctccgtgattgcatcccagatcctgactatcaaggccgccaaagacaattacagtgctcggttcgtactcgagggcaaggaaattcgcatcaatatgtcttgcgcggtatttattaccatgaatcctagatatgggggcggtgttgagctgcccgataacctcaagtctctatttcggccagtggccatgatggtgccacactaccagatgatagctgagatcatcctgttttcgtttgggtttaaatccgctaactctttgtccggaaagctcacaaatctttacgagctcgctaggaaacaactgtcccagcaggaccactacaattttggtctgcgttcactgaagatcgtgttgattatggcaggaacaaagaagcgggagttcaaatgtctgagcgaagcagacgagacacttatagttatcgaagccatccgtgaggcttccctgcctaaatgccctcccgaagacgtgcccctgtttgaaaacatcattggtgatatcttcccggaggtcactgtgctgaaagtgaaccagctagctcttgagaaagtgatatacaccgctacacagcagctgggcctgcaaaactggagttcacagaaagaaaaaatcatccaattctacaatcagttgcaagtgtgtgtgggcgtcatgttggtgggcccgaccggcggcggtaagaccaccgtgcgacggatcctggagaaggccctgaccttgttgccaatagcagattttctgagcgtggctgagaggaaatctgcgtcgaaaatttcagaaaggaaaggcaaggtggacatctgcgttctgaaccctaagtgcgtgaccttgagcgagctgtatggacagctggatcccaacaccatggaatggactgacgggctcttgtctgccacgattaggagctacgtgtactttaatactcccaagaatacgaagaaggacattgatttgcgcttgaaatcaagaatttcagacttaagcaacgtcttcaagctagattcatccgacacaacggagaccgacgataatatctttgaagaaatcgaaaaggtggtgaagatcccagaaaatcacaactttgactggcagtggattatcttggacggcccagttgacactttttgggtggagaacctgaactcggtcttggacgacacccgcaccctgtgccttgccaatagcgaaagaatcgctcttacgaataagatcagagtcatatttgaagtggataatctctctcaggcctccccagccacagtctcgcggtgcgcaatggtatacatggatcccgtggatctgggctgggagccctatgtcaaatcttggctgctaaagacttccaagatcatctcgcaatctggcgtggactgcctcgagtttatgattaagaatagtgtcaccgatggactgcagttcattaggaatcgccaaaaatttcagccatacccaatggaggacatcactgtggtcataactctgtgcaggattctagatgctttctttgactttatgggaaagaatggcggcttcgaacaaagcgatgacctgaatgacacctcaagcaaggaagctaacagccagcgggagtctgtcacgtttaaagacattgagaagagagacgagaatacatggtaccccgagaagaaccccgataagctaaccaagatcattcaaaaactgtttgtattcgccttcacttgggccttcgggggcgccctcaatcgggaagacgagcaccgcgagaacattcctttttgccccagtctcgagccggattccctggccaaagtaacctatgactttgacaaactggtgcacgaattgtttggaaattcctcgcaggttggttggaagcactggggccagtctcagggacgcagacgcaagggaaactgtatcaacctgccaacgggagagtgttcaatcttcggctatttcgttgatattgagcaatgcgaatttatcccctggtcagacctggtgccgaacgaccagaccttaatccaacgaggtacttcattgctgacaaatctgcagcgatctggcggcaattttctgaagattaccgagtgtggcgaatgtatcaactatacagcgactcgcgacacaacttgcctgtcattcttgatgtctttgctgcttaagaactcatgccccgtactgctcaccggggaatccggcgtaggcaagactgccgctattaaccagatgcttgagaagctggagggacctggagcattcgatataaaacatggctctatccttggcgacacactactgtatagtgaaatcaagaaatccagttcactcaagcagaatatcaccattctcataccggagacgcataagactgcaacaggctcctctgataaccccactaagaagcccgaagttagaacaaataaaaaactactgaaaaataacgatcacaagggagttgtggtcagtactatcaatttctccacaaacgtaaccgccgcaaagaccaaggagatgattctgaagaagctcatcagaaggacaaaagacacactgggtgcgccgaaaaacaatagaatcctgatctttatcgacgacatgaacatgccagtgtcggatatgtatggcgcacagcccccattggaacttatcaggcagcttctggatctggggggcgtgtatgacactgaaaaaaacacctggaagaatattcaagacctcagtatcgtcgcagcatgtgtacccgtggtaaatgatatatcaccccgcctgctgaaacatttctctatgctggtgctgccacatccaagccaggacatactctgcaccatcttccaggcccaccttggcatctatttttctatcaacaattttacccccgaggtgcagaaatcaaaggaccagatcatctcctgttcactggccatctaccatcaggtgcggcagaacatgctgccgacccccaccaaatgccattatatgtttaacctcagggacatgttcaaactgcttctgggtttactccaggctgatcgtacggtcgtcaactctaaggagatggccgctctactgttcgtccacgaggccacacgcgtttttcatgatcgcctcattgattttaccgacaaatcactgttctacaggctgctgtcccgggaactggagaattgttttcaaattgggatcgatgggtgcggcaaaaaaacctgcgccactctcgcttgctacctgacagataataagctttacagggtccctatctcccacaagtgtgcctatattgagttcaaggaggtcttcaagaaagtgtttatccacgcgggcttgaaagggaaacccaccgtactgatggtgcccaatctgaatattgagcaggatagctttctggaagatcttaattatatcatcagctccggcaggatccctgacctgtttgagaacgtcgaactcgattctatcgcaatgaagatcaggtacctgacagaacagtctggccacatggataatcgccagagtctcttgtcgttcttccagaaaaggatttacaaaaacctgcatatcttcgtgattatgtcgcccgaaggtccatctttccgtcaaaattgccgggtttacccaagcatgattagcagctgtaccattgattggtacgagcgatggcccgaggaggcactcctcattgtagcaaattcgttcttgaaagaaaaagtaaactttgagaatcgagaaaacctgaaggagaagcttgctccaacctgcgtccagatccacaagtcgatgaaagacctgaataggaaatattttgaggaaacaggccgtttctactacactacacctaacagttatctacagtttatggaaacttttgcacatatactccgtgcacgagaggaggaaatgcaaaccaaaagagatagatttcacatgggtctcagcacaatacttgaggcaaccaccctggttaccgaaatgcaggaggagctccttatcttgggccctcaagtggagcagaagactaaggaaactgaaaccctcatggagaagctaaggaaggattcacaggtcgtcgaaaaagtgcagatgcttgtaaagcaggacgaagagatcgttgccgaagaagtccgcattgtggaggactacgcgcagaaaaccgcaaacgagctgaaatccgttctgcctgcattcgacaaggccattgtcgctctgaatgcattggacaaggccgacgtggccgagctgcgcgtgtatacccggcccccctttttagtcctcacggtgatgaacgccgtttgcattcttctgcagaaaaagccaaattgggcaaccgcgaaactgcttctctctgagaccggctttttgaagaagttgataaacctagacaaggactctatccccgacaaagtgtttgtgaagctcaagaaaatcgtgaccttgcccgattttaacccccacaaaattagtttagtgagcgtggcatgctgcagcctatgccagtgggtgatcgcgctgaataactaccatgaagttcagaaggtagtggggcccaaacagattcaagtcgccgaggcccaaaatgtcttgaaaattgcccgccagcggttagctgaaaagcagcgaggactccaactggtggaggagcacctgcttttcctgcaagcagcttataaggacaccgtagctgaaaaacagttgttggcaaaccgcaagacaatggctagccgcagatttcagtgtgccagtgtgctgctgaccgtgctggaagatgagaagacaaggtggcaagagactattaatcaaatcgacaacaagctggagggtatcctgggcgatatccttttgagtgcggcttgcatcgtgtatagcggtatactgactccagagttccgtcagctcatcgtgaacaaatgggaaaccttttgcattgaaaacggcatcagcctaagctcgaaattttcactgatcaaagtaatggctcagaagtatgagatcagccggtggcataaccaggggttaccgcatgggcagtatagcgtcgagaacgctatcctgatcaagaatggccagcagtggccgctcttaatcgatccacaccgtcaggcacataagtggataaggcagatggagggctcccggttgcagaagctgtcaattgaggactccaactataccaaaaagatcgagaacgccatgaagaccggaggcagcgtacttctgcagaatttacttgagactctagcccccggtcttaaagccatactgaaaaaggacatctatcagaaaaagggacactattttatacgcgtaggggatgccgagttcgaatataattccaactttcgactgtacctatctactgagatcgacaaccctcatttcttgccatctgtgtacaactttgtgacgatgattaactttactgtgacgttccagggtcttcaggaccagctcctgagtacagtggtcacgcacgaagtgccacacctggaggaccagcgaagtaagttgcttgagtctattagccttgacgccataacactggaggaattagaggagaagacgcttaacctgttgcagaaggctctaggctcaatcctcgacgacgataaaatcgtcgacactctccgtaagagcaagatgacttctaatgaaatctcaaaacgcatcgaagctacaaagaaggccgagtctgagatccaggccatcagaaagaactatctgccaattgccactagaggggctctcttgtattttcttgtcgccgacttgacacagataaactatatgtatcagttcagcctggactggttccatcaagtttttgtgtcttcggtggtctctaagtccaaagagcaggaacacagttttaaaagagaaaaggttagtccaaaggaagtgcatgagtttatcagcatctccaaggagcccaatttggagaatgaaaaaaatcttcttgataagcatattaagtccgccatcgatatgctgacaaaatccatttttaaagtggtctcctcagcgctgttcaacgaagacaagctctgtttctccttccgtctgtgcacagttattatgcagaataatgccaacggtaatctgatacaagatgatatcggatttctacccgaagaagagtggaacatctttctctactcaggcattctaatcaatattaaaagcgctctatctcaaagtagattgacgtctacctttgagataggcgagtcccagcatctccaatggcttagcgatagccggtggcggcaatgtcagtacgtttctacacatttggaaccattttccctcctgtgcaaatccctgctcagcaacgtgtcgcaatgggacactttcaagaacagcaaggctgtctactcacttatatccactccgtttagcagtgagaatgcatcgcttgaggagaacacaaagccacccgaggagactgagctgcttaatgaaaataaagaaacatgcaatccgatcaattttccctgggagaagctcaccagcttccagcgtctgattctcgtgaaggtgctgcgccccgaaagcctgaataattcagtccgcaagtttattacagagaaaatggggaataagtatctccagcgaaccggggtaaaccttaaggacgcctacaaggggtcaaatgcacggacccctttgatcctgatccagactcacgggatagatctgacgaatatcctgttaagattcgctcaggaactgaaggggacaacgcaccacgtcacaataatttccctgggacgcgaccaggcggccaaagcagaggacctgatcctaaaagcgctgactaagacacaacaatgggtcttcttgcagaactgtcatcttgcaacaagtttcatgcctagactgtgtactatcgtggagtctttcaacagccccaatgtaactatcgatcctgaattccgcctgtggctttcatccaaatcttatagttccttccccatccctgtgttgaagaaagggctgaagatagccgtggagtcaccccaaggactcaagagtaacctgctgcagacgttcggctgtacaggtagtggcgaagtgacagaggagattttcgaaaatcccgactgcgggcaatggtggaagaagctactgttcagtttgtgtttcttcaacgccgtgattaatgaacggaagaattacggaatcttgggctggaacattgcatacaagtttaatagctctgacttgggagtcgcaattaaagtcctagagaattctttaagagggcagcccagtattagctggcaggcactgcgatatcttatcggggaagtgatttacggggggcgcgtcatagataactgggacaaacggtgcctgaaaactctgctatacaagttttgcaatcctgaagtgctgaaggacgatttctccttcagcaggtccgcaagtatcaaggattatatccacatcattcagtcattgcctgacgatgatctgcctgaagtactgggcatccacccagaggccataaggtcttgctgggagacccagggagaaaagttcattgaaaacctgattgccatgcagcccaaaactacgaccgccaatttgatgatccgcccggagcaatcaaaggatgaactggtcatggaaatcctatcagaccttttaaaaaggctcccgctcacagtggaaaaggaagagatagctgtcggcaccccgtccacgctcaaatctatgatgtccagctctatctgggaaagcttgagtaaaaatctgaaggaccacgaccctctcatccactgtgtcctgttgacctttttgaagcaggaaattaaacgatttgataaattgttatttgtgatccacaagtccctcaaagaccttcagctagccatcaagggcgagatcatcttgactcaggaacttgaagagatctttaactccttcctcaacatgcgtgtgcccaccctctggcagaagcacgcttataggagttgcaaaccgctgagttcttggatcgatgatctgattcagcggctcaactttttcaacacgtgggctaaggttgcttatactgctattcaacgtagatacatgagattcgtgacagtgtggaaacaatctataccttctacctcccagaaatgcaaacaccctgaggatagtgagaacaatttctttgagggatttcccagccgatattggctacctgccttcttctttcctcaggcgtttctagcggctgtgttgcaagattatggacgcagcagaggaatagctgttgacgcactgacatttactcaccacgtgattagcaatacaaccgacaaggacgagaagttttctgtgtttatgcccaagaagttgaatatagtgagaagggcatttaagggtagtgcttcatcgcacactggggtctacattttcggcctatttatcgaaggcgcgaggtggaatagggaacaaaagatcctagaagactccctgccactcgagatgtgctgtgacttccctgatatctactttctgccaacaaagatctccacaaaaacacccaatgcctctaatcagacagacagcgagctctacgcatttgagtgccccgtgtaccaaacgccggagcggagtaggattttggccacgactggcctccccaccaacttccttacctcggtctatcttagcacgaagaaaccccccagccactggatcacaatgagagtggcgctgttgtgcgaaaagaatgaaaagtag

SEQ ID NO: 115236 - DNA, 13548 bp, synthetic construct
  misc_feature 1..13548: note = Description of Artificial Sequence: Synthetic coding sequence
  source 1..13548: mol_type = other DNA
atggagaccttcatccccatcgatctcaccacagaaaatcaggagatggataaggaggagactaagaccaagcctcgcttgctgagatatgaggagaagaagtacgaagacgtaaagcctctggaaactcaaccggccgagatcgccgagaaagaaaccctcgaatacaagacagtgcgtacattctctgaatcactcaagtccgagaagactgaggattacttacgtgagagtatcatacagcagcacatggtgagtcctgaaccagcatccctgaaggagaagggtaaatcccggcgaaagaaggaccagacacacgcctgtcccaacgtacggaaggcacgacccgttagctatgataggacagaacccaaggacgacgacgtgattcggaatatcattcgccttcgcgagaagctggggtggcagactattctgccccagcacagtcttaaatacggcagcagtaagattgccatccagaagatcacgctaaaaaagccactcgaggatgacggtgagtttgtgtattgcctgccacgaaagagccctaagtccctctataacccatatgacctgcaggtagtttccgcgcataccgctaagcattgtaaggagttctgggtgattaccgctagctttatatctaaagtgattaacatagtcggatcagtaaaagaagtggagctgatcccaacactggaatggctcagtgaaagaaggcactactatcttctaaggcaattcaagatcttcagcgattttcgaatgaataaggcatttgtgacctggaagctgaacgtaaagcggataaagaccgaaaaatctcgaagtttcctgtatcaccatctgttcctggcagacgatctcttccagacatgcctagtctatatccgcggtctgtgtgaggatgccattaatctcaaaaactataacgaccacgagaataatctctctgccatttgtctggtgaaactggattcgagcagaacctacagcctggatgaattttgcgaagagcagctccaacaggctacccaggcattgaagcagttggaggatatccgcaacaaagccatcagcgagatgaaatccacctttctaaaggtcgccgaaaaaaatgagattaaagaatatttcgaatccaaactgagcgaggatgacaccacacactttaagctgccgaagtacaggcgcctgctggaaacatttttcaagtttgtgatgctggtggattacatattccaggaactgatcaggcagctcatgaatacagcagttacactgctgctggaactgttcaacggaagcgccggtatgcctttttccgtggagaaaaaaaatgagaacctgatacgcaccttcaaagataatagtttccccactggcaaaaccactaacgattgtgaagaacttgtggataattctaagctccatgccatcagtgtccaaaagagtgaagtaaagactgacaccgatataaatgagattctgaatagcgttgaagtgggcaaagacctgcgaaaaacatacgcacccatatttgaggtgaatctttgcctcagaatcccagctgaatcagacagctccgagaactctaaggagaattttcacgaatccgatcagtgcccagaggagtgcgtgatgttcgaggacgagatgagcgaaaacaaggataactgtgtgaagaaacattctagtgaagagttgcttccgaaagccaaaaaatcaaaggagattagctataatttggaggacatcattagcgataccgaaatcgaaacggaatttgaaaacaagtatatgtactatgagttccccgagtttccaacgaatttattcattgaccccaatcgcctggaattttctgtaaaaattcagaacatgctgacaaacatggaaaaatgcataacaactatcaccccactctgccaggatcctcaactgtcaattttcatcgatcttgtctccatcatggacttgcctaacaaaacaggttcaattattcattataaggagcagactaggtggcctgactgccatatcctatttgagaccgatcccgcttatcagaatattatcgtcaatctgctcactatcatcggcaactctatgggattagtgaacgcgtactcgcacaaatttattaaatactgtactatgactgagaaggcaaaaatcatgtccatgaagatcagctccatgggcgagcttacctcaaaggaatttgaagcaattctgaatagattcaggaattactttcggcatatcgtgaacatggccatcgagaaaagaatcgggattttcaatgtggtgtcactggactaccagagcgagtgtctcttatatattgacaacgtcattcatatgtcacacacactcatccagagcgtcatagagaaaaagaataaaaatctcctcgaagtggtggagtcaagtctccaacaattggagtgcgatcctaccgagattgaggaatttctagagcatttcatcttcctaaatgccatatctagcaagattagtaaactcgagaaggagtttctaactatgagtcagctgtattccgtggctaaacaccatcagatccacatctcagaggagcaaattgctatcttccaggtgttgctcctcaaattcagccagcttaagagctccatgaagttaagtaaaattaataaggataccgccattactaagttccgcgacaatttggaggcctgcatctcaggcctgcacgtagacgttggcaacctcaaggctaagatccggacgcctttattgctgtgcgccggcactcaggtttctaccgccatggagatgatccagacactgtccggtgaagccgctagcctcaccaacaaggcgaaagcttacagccattatcaggattgcttttctgattctcagtcacacatgcatagcgtgaatgtggaggaaatcactcaaattgtcttatctgaaatctccgacattgaaggtgacctgactctccggaaaaagctttgggaggctcaggaggaatggaagagggcctcctgggagtggcggaacagttctttacagtcaattgacgtcgaaagcgtccaacgaaatgtgtccaaacttatgcatattatttccgtgctggagaaagggctgcctaaatcagatatggtaactcatctgaagcaggtagtgacagagtttaagcaggagcttccgatcattattgccctaggaaatccatgtctgaaacctcgccactgggaagctctccaagaaatcattgggaaatctgtccccctcgataagaactgtaaagtagaaaatctcctagctctgaagatgttccaatatgagaatgaaatcaatgacatgagcacaagcgccacaaatgaggcagctctcgaaaaaatgctgttcaaaattatcgatttctggaatacaactcccttgccactgatattgcatcacacggagatatattctatctttatcatcccaagtatcgacgatatctccgcccagttagaggaatctcaagtcattctggccactattaagggatccccgcacattgggcctatcaaggacctggtgaatgagtgggatcagaacctgaccctcttttcttacaccctcgaggagtggatgaattgccaaaggaattggctgtacttggaacctgtgttccactccagcgaaatccggcgccaacttccagctgaaaccgagctgttctctcaggttatcagcatgtggaagaagataatgtctaaaatccagaataagcagaacgccctgcagataaccactagtgctggagttctcgaaattcttcagaattgtaatatccacctggagcacattaagaagagcctggaggactacctggaagtaaagcgccttatctttcctaggttttacttcttgagcaacgctgagcttctggatatattggccgactctaggaatcccgagtcagttcagcctcacttggtgaagtgtttcgaaaatataaaacagctactcatatggaaacaggatattggtccacctgctgtgaaaatgctgatctctgccgaaggcgagggactggtcctcccgaagaaaattcgcgtccggagcgcagtggagcagtggttagttaatgtggagaagtccatgtttgacgttctgaagaaggagcgctatatttacaacattatccttctcttccagagccagattatgttctataacgattgtgtgaagtcattcgtgagctcgtactcacgcgaaaagctcgaaaaggtgcacgccggacttatgtgccatttggaggaagttgcggacctggtggtgctggacacgtcaaatagcagaaccaaggctattctcggcgccctgttgatcctctacgtgcattgtcgcgatattgtgataaatctgctgctgaaaaatatttttaacgcggaagacttcgagtggaccaggcaccttcagtataagtggaacgaaaaacagaaactttgctacgtaagtcagggcaacgccagctttacttacggatatgaatacctgggatgcacctccagactcgtaattacgccactgaccgatcgctgttggctgacactgatggaagctctgcatctgaacctgggagggtgtcccgcgggccctgcgggcaccggcaagactgagacggtcaaggacctggccaaatccctaggcaaacactgcgttgtgtttaactgcttcgaagatctcgactataaaattgtccgtaagtttttcttcggcctggttcagtccggggcttggtcctgcttcgatgagttcaatctcatagatcttgaagtcctgtccgttattgcaagccagatccttaccattaaagccgccaaagataattattccgcccgattcgtcctggaaggaaaggaaataaggatcaacatgtcttgtgcggtgtttattacaatgaacccaaggtacggggggggtgtggaactccctgataacctgaaatcactgtttcgtcccgtagctatgatggtgcctcactaccagatgatcgcagaaatcattctgttctcttttggcttcaagagcgccaattcactaagcggtaagttaacaaatctctacgagctggcaagaaaacagctgtcccaacaagatcattataacttcgggctccgctcactaaaaatcgtcctgatcatggcggggactaagaagagggagttcaagtgcttgtccgaggctgatgaaacacttatagtcattgaggcgatcagggaagcctcgttacccaaatgcccccccgaggacgtgcccctttttgagaacataatcggtgacatctttcctgaagttacggtgcttaaggtcaatcaactggctctagaaaaggtgatttatacggcgacacagcaacttggtttgcagaactggagcagccagaaggagaaaataattcaattttataaccagctccaagtatgtgttggcgtgatgctggttggccctaccggaggcgggaaaaccactgtgcggaggatcctggagaaggcactgacattgctgccaatcgcagacttccttagtgtcgccgaacggaaatccgccagtaagatctctgaacggaaggggaaggtggatatctgcgtgctgaacccgaaatgcgtcaccctgtccgagctctatggccagctggatcccaataccatggagtggaccgatggtcttttatctgctacgattcggagctacgtatacttcaacacgcctaagaacaccaaaaaggatatagacctgaggttgaagagtagaatctcggatttatccaatgtattcaaacttgactctagtgacactacagagactgacgataatatctttgaagaaatagaaaaggtcgtgaagattcctgagaatcataactttgactggcaatggattatactagatggcccagtcgatactttctgggtggagaatctgaattcggtcctcgacgataccaggacactgtgtctggccaactcggagaggatcgcactgacaaataagattcgggtgatcttcgaggtggataatctgtcgcaggcctctccggcaacagtgtctcggtgcgcgatggtgtacatggatcccgtggacttaggatgggaaccatacgtgaagagctggttgctgaagaccagcaagatcatcagccagtctggtgtagactgtctggaattcatgataaaaaacagcgtcactgatggcctgcaatttattcgaaatcgtcaaaagttccaaccctatcctatggaagatattactgttgtcattaccctgtgtcggatcctggatgcatttttcgacttcatggggaaaaacgggggctttgagcaatcggacgatctgaatgatacctcaagcaaggaagcaaacagccagagggagagcgtgacatttaaggacatcgaaaaacgggacgaaaacacctggtatccagaaaagaatccggacaagctgaccaaaatcatccagaagctattcgtgttcgccttcacgtgggcattcggaggggccttgaatagagaagacgagcacagggagaacatccccttctgtccgtccctggaaccagattcattggcaaaagttacatacgactttgataagctggtacacgaactgtttggaaatagttctcaggttgggtggaagcattggggtcagagccagggcaggagaaggaagggcaactgcattaatctccccactggcgaatgtagcatcttcggctacttcgtggatattgagcagtgtgaatttataccttggagtgatctagtgcccaatgatcagaccctcatccagcggggcacaagtctcctgaccaatctgcaaagaagtgggggaaacttcttgaagataaccgagtgtggggagtgcatcaattacaccgccacaagggacacaacatgtctaagctttctcatgtctctgctgcttaagaactcatgtccagttttgctcacaggcgagagcggggtggggaagactgccgcgatcaaccagatgctcgaaaaactggaagggccaggggcgttcgatatcaaacatggaagcatcctgggcgacactctcctgtattccgagataaagaagtctagctctctgaaacaaaatatcacaatcctgatcccagagacccataaaaccgccaccggcagttctgataacccaaccaagaagcccgaggtgcgcactaacaaaaaattgcttaagaacaatgaccacaaaggtgttgttgtctcaacaatcaatttttctacgaacgtgactgcagcaaaaactaaagaaatgattctgaagaagcttatcagacgaacgaaagatacgctcggcgcccccaagaacaatagaatcctgatctttattgatgatatgaacatgccagtaagcgacatgtacggcgctcaacctcctctggaattaatcaggcaactgttggacctggggggcgtgtacgataccgagaaaaatacgtggaaaaacatccaggacctctccatagtggccgcttgcgtcccagttgttaacgatatatccccccgcctcctaaagcacttttcgatgctggtcttaccacacccttcccaggatatcctgtgcacaatttttcaggcccatctggggatatacttctctatcaataattttacccccgaggttcagaaatctaaagatcagatcatcagctgctcgcttgctatttatcaccaggtacgacaaaatatgctccccaccccaacaaaatgccattacatgttcaacctccgggacatgttcaaattgctgctcggcctgctccaggccgatagaactgtcgttaacagcaaagagatggcagccttgctgtttgtgcacgaagccacacgggtgtttcacgacaggcttattgactttaccgataaatctctcttttaccgactactctcccgtgaactggagaactgcttccaaatcggcattgatggttgcggaaagaaaacttgcgccaccctggcttgctacctgacagataataagttgtaccgagtgcctatatcccataaatgcgcatatatcgagtttaaggaggtctttaagaaagtgtttatccatgcaggcttaaaggggaagcccaccgtgctgatggtgccgaacctcaacatcgagcaggatagttttctggaagatttaaattacataatctcaagcgggagaattccggacctttttgagaacgtagaactggactccattgccatgaaaatccgctatttaacagagcagtccggccacatggataatcggcagtccctgctgagttttttccagaagcggatctacaaaaacttacacatctttgtgatcatgtcccctgagggaccctcattccgacagaattgtagagtatacccctccatgattagctcctgcaccatcgactggtacgaaagatggcccgaggaggccttgcttatagtggccaacagttttttgaaggaaaaggttaactttgaaaaccgagagaaccttaaggagaagcttgcccctacatgcgtacagatccacaagtccatgaaagatctcaataggaaatacttcgaggaaacgggtcgcttctactataccactcccaattcatacctgcagttcatggagacgttcgcgcacatactgcgagcccgcgaagaagagatgcagaccaagagagaccgctttcacatgggattgtctaccattctggaggcgactacgctcgtcacagaaatgcaggaagaacttctcatattaggcccccaggtggaacagaagaccaaagaaacagagacactcatggagaaactccgaaaggatagccaagtcgtcgaaaaggtgcagatgctggtgaagcaggatgaggagatcgtggcagaagaagtccggatcgttgaggattatgctcagaaaactgctaatgaactcaaatctgtgctgcctgccttcgataaggccatcgttgctctgaacgccctggataaggcagatgtggccgaacttcgcgtatacacccgccctccctttttggtcttgacagtcatgaatgccgtatgcattttgctgcagaagaaacccaactgggcaaccgctaaattgctgcttagtgaaacaggcttcttgaagaagctcattaatctcgataaagattctattcccgataaggtgtttgtaaagctgaagaaaatcgtgacactgcctgatttcaacccccacaagatctcacttgtgtcggtggcctgctgtagtctgtgtcagtgggtgattgccctgaacaactatcacgaggtgcagaaagtagtcggccccaaacaaatccaagtggcagaagcccagaatgtgttgaagattgctcgccagagactggctgaaaagcagcgagggctgcaacttgttgaagagcacctcctgttcctccaggccgcctacaaagacacggtcgccgagaaacaattgctggccaataggaaaacgatggcaagcagacgctttcagtgcgcaagtgtgctcctgactgtactggaagatgagaagacccgatggcaggagacaatcaaccagatagacaataaactggaagggatccttggagacatcttgctcagcgctgcctgtatcgtctattccgggatcctgactcctgagttcagacaactaatcgtaaataaatgggagactttttgcatagagaatggtatcagcttatctagtaagttctcgttgatcaaggttatggctcaaaaatacgagatctctcgatggcacaatcaaggcctgccacacggccagtactctgtagagaatgcgatccttattaagaacggtcagcaatggccacttcttattgatcctcataggcaggcccacaagtggatccgccaaatggaagggtccagattgcagaagctatctattgaagacagtaattacacgaagaaaatcgagaatgcgatgaagaccggcggttccgtattgctccagaatcttttggaaacccttgctcccggactcaaggccatactcaagaaggatatataccaaaagaaggggcattactttatccgtgtgggcgatgcagaatttgagtacaactccaatttccgactgtatctaagtaccgaaattgataatccacactttctcccttctgtgtacaatttcgtgactatgatcaactttaccgtgacattccagggcctgcaggaccagctgctttctactgtagtgacacacgaagtgccacatctggaggatcagcggagcaaactgcttgagagtatttccctggatgccatcaccctcgaagagctggaggaaaagacattgaaccttctgcaaaaggcccttggtagcatactggacgatgacaagatagtcgatacacttcgtaagtctaaaatgacgagcaacgagattagcaagcgaattgaggcgacgaagaaggccgagtctgaaatccaggcaattaggaaaaattacctcccaattgccactcgtggggctctcctttacttcttggtggccgatctgacacagataaactatatgtaccagttttccctggattggttccatcaggtctttgtctcttcagtggtctccaaatcaaaagagcaagaacactccttcaagcgtgagaaggttagtccgaaagaagtgcacgaattcatttccatatctaaagaacctaatttggagaacgaaaagaaccttctcgacaaacatatcaagtctgcaattgacatgctgacgaaatcaatatttaaagttgtgtcgtcagccctgttcaatgaagacaagctctgcttctcatttcgtctatgcactgtaatcatgcagaataacgccaatggaaacctgattcaggacgatattggcttcttgccagaggaagagtggaacatttttctgtactctgggatcttgatcaacatcaagagcgccttgtctcagagtcgcttgaccagcacattcgagataggtgagagtcagcatttgcagtggctatccgattctcgctggaggcagtgccagtacgtcagcacccacctcgagccttttagcctgctttgcaaatcactgttgtctaatgtgtcacagtgggacacatttaagaattccaaggccgtttatagccttatctcaaccccattctcctccgaaaatgcctccctggaggaaaacaccaagcctccggaagagaccgagctcctgaatgaaaacaaggagacttgtaatcctatcaattttccttgggaaaagttgacctcatttcagaggctgatactggttaaggtcttgcgaccggagtctctaaacaactctgtcagaaagttcattacagaaaaaatgggaaacaaatatctgcagcggactggcgtgaatctgaaggacgcgtataaagggtcaaatgcacggacccccctgatcctgattcagacgcacggaatcgacctgacgaatatcctgctgcggtttgcccaagagttgaaagggactactcatcatgtgacaattattagtctgggccgagatcaggccgccaaggcggaagaccttatcctgaaagctcttacaaagactcaacagtgggtgttcctccagaattgtcatctggctacaagtttcatgcctcgactgtgcaccattgtcgagtctttcaacagccccaatgttactatcgatccagaatttaggttatggctgagtagcaaatcttattctagcttccccatacctgtgctcaaaaagggcctgaagatcgcagttgagtctcctcagggcttaaagtccaacctgctccagacatttggctgcacaggtagcggtgaagttaccgaagaaatcttcgagaatcctgactgcgggcagtggtggaagaaactgttgttctcgctgtgtttcttcaacgcagtcatcaacgaacgcaaaaattacggcatcctcggttggaatatagcatacaaattcaattccagcgatctgggtgtcgccattaaggttttggaaaatagcctcagggggcagccaagcatttcttggcaggccctgaggtatctcatcggtgaagttatttatggtggtcgagtgattgacaactgggataagagatgcctgaaaacgttgctttacaagttttgtaatcccgaggttttgaaggatgacttctcattctcacgctccgcttcaataaaggactacatacatattattcagtccctgcctgatgacgacttacctgaggtattaggcattcaccctgaggcgatccggtcttgttgggaaacccaaggagaaaaatttatagagaacctcatagccatgcagccaaagaccaccactgcgaacctgatgatccggccggagcagtcaaaggatgaactggtgatggaaatcctatccgacttgctgaaaaggctcccattgacagtagagaaagaggaaatcgccgtaggaacaccaagcacccttaaatccatgatgagtagctctatatgggaaagtctcagtaaaaacctcaaagaccatgatcccttaattcattgtgtgttgctcacattcctgaagcaggagatcaagaggtttgacaagctgctttttgtaatacacaagtctttaaaggacctccagctggctattaagggcgagataatcctgacacaggagctggaagaaatatttaactcgtttcttaatatgcgggtcccaacattgtggcagaagcatgcttataggagttgtaagcctctatcaagttggatcgatgatttgatacagagattgaacttttttaatacatgggccaaggtggcttataccgctattcagagaaggtacatgcggttcgttactgtgtggaaacaatccatccccagtaccagtcaaaagtgtaagcaccccgaggattccgagaacaatttctttgaaggattcccctctaggtactggctgcccgcattttttttcccacaagcattcctcgccgccgtccttcaggactatggacgttcacgaggcatcgccgttgacgccctgacatttactcaccacgttatctctaatacgacagataaggatgagaagttcagtgtatttatgccaaagaagctgaacattgtccggcgggccttcaaaggttctgcctcctcacatacaggtgtgtacatcttcggattatttattgaaggcgcgcgttggaacagagaacagaagatcctggaagacagcctccccctggaaatgtgttgcgacttccccgatatttacttccttcctacaaagatttctacgaagactcccaacgccagcaaccagaccgatagcgaattgtatgccttcgagtgtcccgtgtaccagactcccgagcgctccaggatcctcgccacaactgggctacctaccaacttcctcacgagtgtctacctgagtacaaagaaacccccttctcactggattaccatgcgggtagctctcctgtgcgagaagaacgagaagtag

SEQ ID NO: 115237 - DNA, 10524 bp, synthetic construct
  misc_feature 1..10524: note = Description of Artificial Sequence: Synthetic coding sequence
  source 1..10524: mol_type = other DNA
atggggcgccgaagccagtggatctgggccatgagatgtcagatgctggttccagtgctgtctttacacattgggctcgctagggccctcgggtgcggctgcattgcgagcaaaattgagtgtctgatccgctgcaacgctccattcccccttctggatgccgtaggaagtgtggcatcgcaagaactccagagtctcactgggactgtgggcgtcaccagcggtgccgctgcttatcctagatggaatctcgcacgagcacgagcgccacctcacctcccagggacccaggatcctctccgccgcgtcagggatccgacaccgattgttgcgtcaagcccgggtcggaggaggggatcctggtcaggcggctatggccaggaagcatctgagcccggtgtcgtcggtctgtgctgcgctgtgctgcctatacacccaagcctagccctggccggagtgggcgggcctgaccttagaaggttccaggaaggtcctcagaggcccagtgatcacggggcggctgaaaaacacatggaaactttcatcccgattgacctgacaacagagaaccaggaaatggacaaggaggaaaccaagacaaaacctcggttgcttcggtatgaggagaagaaatatgaggacgtcaaacctcttgaaacccagccggcagagatcgctgagaaagaaaccctagaatacaagacggtacgcacattcagcgagtcactgaagagtgagaagacagaggaacccaaagatgacgacgtcatccgcaacatcatccggctccgggaaaagctgggttggcaaacaatcctccctcaacatagtcttaaatacggcagtagcaagatagccatccagaaaattactctaaagaagcccctggaagatgacggcgagttcgtctattgcctccctaggaaatcaccaaagagtctgtataatccttatgacttacaggtcgttagcgctcatacggctaaacactgtaaagagttctgggttatcactgccagttttattagcaaattagattcttccaggacttactcactggacgaattctgcgaagagcagctgcagcaggctacccaggccctgaaacaactggaagacattcggaataaggccatttccgaaatgaaaagcacctttcttaaagttgccgaaaagaacgagatcaaagagtacttcgaaagtaagctctccgaggacgatactacccactttaagctgccaaagtaccgtcgcctgctcgaaaccttttttaaatttgttatgttggtcgattatatatttcaagaattgattcgccagcttatgaacacagctgtaacacttcttctagaactgtttaatggatcagctggtatgcccttttccgtagaaaagaagaatgagaacctgatacgaacgtttaaggataattcctttcccaccggcaagaccaccaacgactgcgaggagttagttgacaattcaaagctacacgccatctccgtacagaagtctgaggtgaaaacggatacggacatcaatgagattcttaacagtgttgaggtcgggaaggatttgaggaaaacatacgcccccatttttgaggtcaatttgtgcctccggattccagccgaaagcgatagcagcgaaaattcgaaggagaacttccatgagtctgaccagtgcccagaagagtgcgtgatgttcgaggatgaaatgtcagagaataaggacaactgcgtgaagaaacacagcagtgaagagttgctcccaaaagctaagaaaagcaaagaaatatcttacaatctcgaagatattattagtgccacaatcactcctctgtgtcaggaccctcagctgagtatcttcatagacttggtttctattatggatctgccaaacaagacaggcagtattatccactataaagaacagactcgctggccggactgccatattctgtttgaaaccgaccccgcttatcagaatattattgttaatctgttaacgataattgggaattctatggggttggttaacgcatattcgcataaattcatcaaatactgcaccatgacagaaaaagctaagataatgagtatgaagatttcctctatgggagagctgacgagcaaggagttcgaggcaatcttgaataggtttaggaattacttccggcacatcgtgaacatggccattgaaaagcgtattgggatcttcaacgtggtcgtggaatcctcattgcaacagctggaatgtgaccccactgagatcgaagagttcctagaacatttcatttttctcaacgctatttcctctaagatatcaaagttagaaaaagagtttttgaccatgagtcagctgtacagtgtggccaaacaccaccagattcatatctctgaggaacagatcgccatttttcaggtattattgttaaagttcagtcaactgaagtccagtatgaaactctctaagattaataaggacactgctataactaaattccgggacaacctagaggcctgcattagtggacttcacgtagacgttggcaatctgaaggcaaagataaggacgccactgctgctgtgcgctggaacacaggtgtctactgccatggaaatgatccagacactatctggcgaagccgcctcgctaaccaataaagccaaggcctacagtcactaccaagattgtttttccgactctcagtctcacatgcactcagttaacgttgaggagatcacccagatagttctgtccgaaatctccgacatagaaggagacctgactctgcggaagaagctctgggaagcccaagaggaatggaaacgggccagctgggagtggcgcaacagctcactccagagtatagacgtggaatccgtgcaaaggaacgtttccaaactgatgcatataatctccgtattagagaaagagatttacagtattttcatcattccatctatcgacgacatttcagctcagctggaggaaagtcaggtgattctggccacgatcaagggttccccccatatcggcccgataaaatcccagattatgttctataatgactgtgtaaaaagctttgtttcatcgtatagtagagagaagctggaaaaagtacacgcagggctcatgtgccatttggaggaggtggcagatcttgttgtcctcgatacctcaaacagtaggaccaaagctattctcggcgccctgctgatcctgtatgtccactgtagagacattgtgatcaatcttctgctcaagaacattttcaatgctgaggacttcgagtggacgcgacacctgcagtacaaatggaacgagaagcagaaactgtgctatgttagccagggcaacgcctccttcacatatgggtatgaatatctcgggtgcacgtccaggctggtgatcacgcctcttaccgaccgctgctggcttactctcatggaagctctgcacctcaatttggggggatgccctgctggcccggccgggaccggcaagactgaaactgttaaagacctagcaaagtgtgccctttttgcgttcaagtgtaacacagccttgatcaaacttcccaacagcctgattgtgctcacatgctttggcctcgaaaagaccgtgttggtgatgaacaccgtaatgagcttccgctttgtgcttgaaggcaaggagattagaatcaatatgtcatgcgctgtctttattactatgaacccaaggtacggtgggggggtggagctgccagataacttaaaatccctctttcgcccggtggctatgatggttcctcattaccaaatgatcgcagagattatactgttctcctttgggtttaaatccgcaaacagtttatccggtaagcttactaacctctacgaactggcccgcaagcagctgagtcagcaagaccactataacttcgggttacggtcgttgaagattgtcttaataatggctgggacaaagaaaagggaatttaaatgtgacacgagtgactccctgagtgaagcggacgagaccttgatagtcatcgaagccattcgggaggccagcttgcctaagtgtcctccagaggacgtgcccctctttgagaatattattggagacatctttcctgaggtcacagtcctgaaggtgaaccaactggctcttgaaaaggtaatctatacggcgacccagcagttgggactccaaaactggtctagtcagaaagagaagatcatccagttttacaaccagctacaggtttgtgttggcgtcatgctggtgggccctacaggtggtggcaagaccaccgtgcgcaggatcctggaaaaggctctgaccctcctgcctattgcagacttccttagtgtcgccgagcgaaagtccgccagtaagatctccgagcgcaaaggcaaggtggacatatgtgtgttgaaccccaaatgtgttacccttagcgaactctacgggcagctggacccgaatacaatggagtggactgatgggttactttctgctactattcgatcttacgtgtacttcaatacacccaagaatactaaaaaggacattgatttgaggctgaagtccaggatcagcgacctgtctaacgtgtttaagctcgattcttccgatactacagagacagacgacaatatcttcgaggagatcgaaaaagtggtgaagatacccgaaaatcacaatttcgactggcagtggataattctggatggccccgtggacacattctgggtggagaatctgaactcagtgttggacgatacgcggacactgtgtctcgcgaactcggagcgtatagccctcactaacaaaatacgcgttatctttgaggtggataacctctctcaggccagtccggctaccgtgagtcgctgtgcaatggtctacatggatccggttgatttggggtgggagccctatgtgaaaagctggctcctgaaaacgagcaagataattagtcaatccggagttgactgcctggagtttatgatcaagaactctgtgaccgacggcctgcagtttatccggaacaggcaaaagttccaaccctatccgatggaagacattaccgtcgtgattactctgtgtcgcatcttggacgcttttttcgacttcatggggaagaacgggggcttcgagcaaagtgacgatctgaatgacacttcctccaaggaagccaattcacagcgggagtctgttacgttcaaggatatagagaagcgggatgagaatacttggtatccagaaaagaatccggataagcttactaaaatcatccaaaaactgttcgtctttgccttcacatgggcattcggaggtgccctcaacagggaggacgagcacagagaaaatatcccattctgcccatctctggaacccgactccttagcgaaagtcacatacgactttgataaacttgtccatgaattgttcgggaattctagtcaagttggcatcaacctgcccacaggtgagtgttcaatctttgggtattttgttgacatcgaacagtgtgagttcatcccgtggagcgatctcgttcccaacgatcagaccctcattcagcgtgacaatcccaccaagaagcccgaggtccgcacaaacaagaaactgttaaaaaataacgatcacaaaggggttgttgtttccaccataaacttctcgacaaacgttaccgccgccaagacgaaagagatgatcttaaagaagctgataaggagaaccaaggacacactcggggctcctaagaataaccgcattcttatttttatcgacgatatgaatatgcccgttagtgatatgtatggggcccaaccccctctggagctcatcaggcagctcctagatcttgggggggtttacgatacagaaaagaatacgtggaaaaacatccaagatctctcaattgtcgctgcatgtgtcccagtggttaacgacatctcaccacgacttctaaagcactttagcatgctggtactcccacacccctcccaggacattctctgtacaattttccaaatcggtatcgacgggtgtggaaagaaaacatgtgccactttagcttgctatcttactgacaataaattgtaccgggtgcctattagtcacaagtgtgcatacattgagttcaaggaagtattcaagaaggtttttatccatgccgggctcaagggaaagcccactgtactgatggtaccaaacttaaacatcgagcaggattcctttctggaggacctgaactacatcatctcctccggacgcattccagacttgtttgaaaacgtggaacttgacagtattgctatgaagatacggtacctgacggaacagagcggacacatggacaaccgccagtccctgctgtcatttttccagaagcgtatctacaagaacttgcatatatttgtcattatgagccctgaaggccctagctttaggcagaattgtcgtgtctacccaagtatgatctccagctgcactatcgactggtacgagagatggccagaggaggccctgcttatcgtggctaacagctttttaaaggagaaagtaaacttcgagaatagggagaatctgaaggaaaagcttgctcccacatgcgtccaaatccataagagcatgaaagacctcaatcgcaagtacttcgaagagaccggtcgcttctactacacaacccctaactcttacttgcagttcatggagacctttgcgcacatcctcagagcacgcgaagaggagatgcagactaaacgagatagattccacatgggacttagcactatcctcgaggccacaactctcgtgacagaaatgcaggaggaactcctcatcctcggaccgcaggtggaacagaaaacgaaggagactgagacgctcatggagaagcttaggaaggactcccaagtagttgagaaggttcagatgctggtgaaacaggacgaagagatagttgcagaggaggtccggatcgttgaagattatgcccagaagacggccaacgaactgaagtccgtgttgcctgcttttgataaggccattgtggcacttaacgcactggataaagcggacgtcgcggagctgagagtctatactcgtcccccttttcttgttctgactgtcatgaacgctgtttgcattctcctccagaagaaacctaattgggccaccgcaaaacttctcctgtccgagactggcttcctaaagaagctgatcaatttggataaagactctattccggataaagtgtttgtgaagctgaaaaagatagtgaccctcccagactttaatcctcataagattagcttagtgagcgtggcctgttgcagcctttgccagtgggtgattgcccttaacaattaccacgaggtgcagaaggtggtaggcccgaaacagatccaagtggccgaagcccagaacgttttaaaaattgcaaggcagagacttgctgagaagcaacgggggctgcagctcatcagccgctggcacaatcagggcctgccccatggacagtatagtgttgaaaatgccatcctcatcaaaaacggacagcagtggcctttactaattgaccctcatcgacaggcgcacaaatggattcgccaaatggaaggcagccggctgcagaaactgagtatcgaagattcaaactacaccaagaaaatagagaacgccatgaaaaccggaggctccgtattgttacagtcctgccaagctagcacatggcggaagaagctctatctgagcactgaaattgacaatccacactttttgccttccgtgtacaattttgttacaatgatcaatttcactgtgacgtttcaggggctgcaggatcagctgctgagcaccgttgtaacccatgaggtgcctcacctagaggaccagcgatccaaacttctcgagtctatctctctggatgctataacacttgaggaactggaagaaaaaacactgaatctgttacaaaaagctctgggatctatactggatgatgataaaatcgtagacactcttcgcaagagtaaaatgactagtaacgaaatttcaaagcgaattgaggcaacgaaaaaagccgaatctgagattcaggctatcagaaaaaattatctcccgatcgctacacgcggtgccctgctttattttttagtggctgaccttacccagattaattacatgtatcagttttccctggattggtttcaccaagtgtttgtgagtagcgtggtgagtaagagcaaggaacaagaacactcatttaaaagggaaaaagtcagtccgaaggaagtgcacgaattcatatcaatttctaaagagccaaacctggagaatgagaaaaacctcttagataagcatatcaaaagcgcgattgacatgctcactaagagcattttcaaagtcgtaagttccgctctgtttaacgaggataaactttgcttcagcttccgcctttgtacagtgatcatgcagaataatgccaatggcaatttgattcaggatgacatcggatttctgcctgaagaagagtggaacattttcctatattctggaatcttaattaacattaagtctgccttgtcccaaagtagactgacctctacatttgaaataggtgaatcccaacaccttcagtggcttagcgatagtcgttggcggcaatgtcagtacgtttccacccacttggagccattctccctgctgtgtaaatctctcttatctaacgtgtctcagtgggacacgttcaagaactccaaagctgtctactctctgatatctacccccttttccagcgagaacgcttcactcgaagaaaataccaaacccccagaggaaaaacacactttctgtttgctgttgcgtgcgatcaatcatactgggaccgatctcggacccgtaggccggggccagtggctgaccagcactgcctgcgaccgtcataccgacgtttgcagcttctcatttgccctcaatgatggcgtgccggatgtcgagcacgttcaggacattttctatgggcactgtgtggacaagtaccatgtaaaagttcttcgtcccgaaagcctaaataatagtgtgagaaagttcattacagaaaagatgggcaataaatatcttcaacgcactggcgtcaacctgaaggacgcctacaaaggctccaacgctcggactcccctgatcctcattcagacgcacggcagcgcctccattaaagattacatccatattatccaaagcctgccagacgacgaccttcccgaggtcttaggcatccatccagaggcaattaggtcctgctgggagacccagggagagaaatttatcgaaaacctaattgccatgcaaccaaaaacaactaccgctaacctgatgataagaccggagcagtctaaagacgagttagtgatggaaatcttgtcagacttgctcaagcggctgccactcacagtggagaaggaggaaatcgcggtgggaacaccctctacgctcaaatccatgatgtccagctcaatttgggagagcttgtcaaaaaacctgaaagatcacgaccctttgatccactgtgttctgttgacatttctgaagcaggaaatcaaaaggtttgataagctccttttcgtcattcataaaagtctgaaggacctgcagttggccattaagggggagataatccttacccaggaactcgaggagatatttaacagcttcctgaatatgagggtccctactttgtggcaaaagcacgcctatagatcctgtaagccgctcagcagctggatcgatgatctcatacaaagactcaatttttttaatacgtgggctaaggtggcctatacagctattcagagacgctacatgcgattcgtcacagtctggaagcagagtattcctagtaccagccagaaatgtaagcaccctgaagactcagagaataactttttcgaagggtttccctcaaggtactggttgcccgcgttcttttttccgcaagcttttctagctgcggtgttacaggattacgggcgcagccggggaatcgcagtggacgcccttacgtttactcatcacgtgatcagtaacactaccgacaaggacgagaagttttctgttttcatgccgaagaaacttaatatcgtcaggcgggcctttaaagggagtgcttcctcccacactggggtgtatatttttgggctattcatcgagggtgcacggtggaacagggagcaaaaaatcttggaggatagcctcccccttgaaatgtgctgcgatttcccggacatctactttctcccaacaaagatcagcaccaagacaccaaacgccagcaaccagaccgactcagagctttacgctttcgagtgtcctgtttaccagacccctgagcgctcgaggattctggctactacaggcttgccaaccaacttcctgacgtccgtctacctcagcaccaaaaagccgccctcacattggatcaccatgcgggttgccctgttgtgtgaaaaaaacgaaaaatag

SEQ ID NO: 115238 - DNA, 2619 bp, synthetic construct
  misc_feature 1..2619: note = Description of Artificial Sequence: Synthetic coding sequence
  source 1..2619: mol_type = other DNA
atgagttccaaagcggagaagaagcagaggctctccggtaggggcagcagccaggcttcttggtcagggcgggcaaccagagctgctgtagctacacaggaacagggcaatgctccagcagtgagcgaacccgagttacaggccgaacttcctaaagaggaaccagagccgcggttagagggacctcaagcccagagcgaggagagcgttgagcccgaggcggatgttaagcctctgtttctgtccagagcagccctcaccggactagcggatgccgtctggacacaggaacacgacgccatactcgagcacttcgctcaggatcctacagaaagcatcctgaccatttttatagacccgtgcttcgggctcaagctcgagctgggcatgccggttcagacccaaaaccaacttgtatattttatccgccaggcgcctgtgccgattacctgggagaatttcgaagcaaccgtccagttcgggaccgtccggggcccttacatcccagccctgctgaggctcttaggtggagtatttgctcctcagatttttgccaacacaggctggccggagtcgatcaggaatcactttgccagccacttgcacaaattcctggcctgtctgactgatacacggtataagctggagggacatacagtcctctacattccagctgaggctatgaatatgaaacctgaaatggtcattaaagacaaagaactagtccaaaggctcgaaactagcatgatccactggaccagacagatcaaggaaatgttgtccgctcaggagactgtggagaccggcgagaatctggggcctttggaggagatcgaattttggcgaaatagatgtatggacctgtcaggaattagcaaacagctggtgaagaagggagtgaaacatgtggaatccattctccatctagcaaagtcctcgtacttggctccttttatgaagttagctcagcagattcaggacggcagcagacaggcccagtccaacctgacatttttaagcatactgaaagaaccttatcaagagctggcattcatgaagcccaaagatatctctagcaaattacccaagctcatttccctaattcgcatcatctgggttaattcaccccattacaacaccagggagcgccttacctcactttttaggaagatgtctaacgagatcatacgactctgttgccatgcaatttctctggatcgaatcttcgagggctacgtgagctccagcaaagaagacctccagggatgcatactgtgttgccatgcttggaaagaccattacgtgcaggctgtacagatgcatattcagttttcatcgaggggatgggtgcttgaccagacatcaatcttcgcccaggtggatgcattcgtgcagcgatgtaaggaccttatagaagtttgtgattgtcagtatcatttcgctaggtgggaggatggaaagcaagggccactgccctgttttttcggcgcacaggggccccaaatcacaagaaacttactcgaaattgaggacatttttcacaaaaacctgcacactctcagagccgtacgtggcggtatcctggatgtgaaaaacacatgctggcacgaggattacaataaattcagggccgggattaaggatctcgaagttatgactcaaaatctgataacttccgcatttgagcttgtacgggatgtgcctcacggagtccttctgctggatacatttcatcgcctggccagccgagaggctattaaaagaacatatgacaagaaggccgttgatctgtatatgctgttcaactccgagttggctctagtaaacagggagagaaacaagaaatggcctgacctggagccatacgtggctcagtactccggcaaagcccggtgggtgcacattctccgacggcgcatcgatcgcgtgatgacatgtctcgctggcgcccactttctcccacgcattggcaccggcaaggaatctgtgcatacataccagcagatggtgcaggccatcgacgaacttgttcgcaagacattccaggaatggacaagttccctagataaagactgcatcagacgactcgatacacccttattaagaataagccaggagaaagcaggtatgcttgatgtgaacttcgacaagtatagatcccatctcgccccattcccgtacacgcctctgctgcagctgagccaggaatttcactcacatctgctgactccattgtttataatcttgtcattgtcccataccatttgcctcttgagctccttttacttttttttcagcagcttcatctttgttagccctcaccttcccccttgttaccagcactttaactttacaacctacttgaaaacccagcagaataagacaatgatcggacaggcgagatggcttacacctgtgatccctgctctctgggaggcagaggtgggagcttctttggaacctagatccttgaggaccgcatgggcaacctggcagaatcccgtcagcgcaaaaaacactaagattagctgggcatggtggcataaaccagttgtctcagctacatgggagggcgaggtgggagggtcccctgagcctggccgacagaggctacaatag

SEQ ID NO: 115239 - DNA, 12591 bp, synthetic construct
  misc_feature 1..12591: note = Description of Artificial Sequence: Synthetic coding sequence
  source 1..12591: mol_type = other DNA
atgagtagcaaagctgagaaaaagcaacgattgtccggaagggggagcagccaagctagttggtccgggcgtgccactcgggctgccgtggccacgcaggaacagggaaacgcacccgccgtatccgagcctgaactgcaggccgagctgccaaaggaagaacccgagccaaggctggaaggaccacaggcccaaagcgaagaatccgtagagcccgaggctgacgtgaaaccgctgttcctgtcaagagccgcgctgacgggattggctgacgccgtctggacacaagaacacgatgcaatcctagagcactttgctcaggatcctactgagagtattctgactattttcattgatccatgctttggccttaagctcgaactcgggatgcccgtgcagacacagaatcagctggtgtacttcatacggcaggcccctgtgccaataacctgggaaaattttgaggcgactgtccaattcggaaccgtccgtggcccatatataccagctctgttgcgtctcctaggcggtgtgttcgcccctcagatttttgcaaacaccggatggcccgagtctatacgtaatcactttgcatcccacctgcataaatttttggcctgtctaaccgatacacgctacaagcttgaggggcataccgttttgtacatccctgctgaggcaatgaacatgaagcctgaaatggtgatcaaggataaggagcttgtgcagagattggaaacttcaatgattcactggactagacaaattaaggaaatgctgtctgctcaggagacagtcgagaccggcgaaaatttgggccccttggaggaaattgagttctggagaaatcgctgcatggacttgtcaggcatttccaagcagcttgtgaagaagggcgttaaacacgttgagagtattcttcacctggccaaatcaagctaccttgctccttttatgaaactcgctcaacagatacaggacggttcaaggcaggcgcaaagcaacttgacttttctctccattctgaaagaaccctaccaggagctggcatttatgaagccaaaagacataagcagcaagctgccaaagctgattagccttattcgcataatctgggtgaacagcccacactacaacacacgggagagactgacatcactgttccgcaaagtatgcgactgtcaataccatttcgctcgatgggaagacgggaagcagggccccctgccctgtttttttggagctcagggtccccagatcactaggaatcttttagagatcgaagacatcttccacaagaatctgcatacactgagggccgtaagaggcggaattcttgatgttaagaatacctgctggcatgaagactataataaattccgggcgggaatcaaagatctagaagttatgacccaaaacctgattacttcggctttcgagctggtgcgagatgtaccacacggggtcctacttctcgatacatttcataggttggcaagtcgagaagctatcaagagaacatacgataaaaaggcggtggacttgtatatgctctttaactccgaactggcactggtcaatcgcgagagaaacaagaagtggccagatctcgagccctatgtggcccagtacagcggtaaggcgcgctgggtgcatattctgagaagacggatcgaccgggtgatgacatgcttagcaggggcccactttttgcctagaatcgggaccggcaaggaaagtgtgcacacataccaacagatggtacaagccatcgatgagctcgtgcggaaaacttttcaggagtggacaagcagcctggacaaggactgcataagaaggctggacacacccctgctgagaatatctcaggaaaaagcggggatgttggatgtgaacttcgacaagagcctgctaatactgttcgccgaaattgactactgggaacgcctgttgtttgaaaccccccattacgtggtgaacgtcgcagagcgagctgaggacctccggattctgagggagaacctgctgctcgtggctagggactataaccgcataatcgccatgctgagtccagatgagcaagcactattcaaggagaggattaggctactggataaaaaaatccacccaggattgaaaaagttgcactgggcgctgaaaggggcctctgcatttttcattactgagtgtaggatccacgcctcaaaggttcaaatgatcgttaatgagtttaaagctagtaccctcactattggttggagggcccaggagatgtcagaaaagctgctcgttaggattagcggtaagcgagtgtaccgtgacctggagtttgaagaggaccaaagagagcaccgggcagcggtgcagcaaaagctgatgaatctacaccaggacgtggtaacaatcatgactaatagctacgaggtttttaaaaacgatgggcctgaaatacagcagcagtggatgctgtatatgatacggctggacagaatgatggaggacgccctccggctcaacgtgaagtggtctttactagagctttctaaggctataaacggtgatggaaaaacctctccgaacccgctgtttcaggtgctcgtgatcctaaagaacgatctccagggaagcgtggcccaagtcgaattctcacccactctgcagacactagccggggtagttaatgacattgggaatcacttgttcagcacgatctccgtcttctgtcacctgcccgacattctgacaaaaagaaagcttcaccgtgaaccaattcaaactgtggtcgaacaagatgaggatattaaaaagatccagactcagatctcctctggtatgaccaataatgcgagccttctgcagaactacctaaagacatgggatatgtatagggaaatttgggaaattaacaaggattcatttatacaccggtaccagaggctgaaccctcccgtctcctcttttgttgctgatatcgctcggtatacggaagtcgcaaataacgtgcagaaggaggagaccgtcacaaatatacaatttgtgttattggattgctcccatttaaagttcagtctagtccagcattgcaatgagtggcagaataagtttgccacactgttacgagaaatggctgcaggacggttactggaactgcatacttacctgaaggagaacgccgaaaagatctcaagacctccccagactctcgaggagctaggcgtctcccttcaactagtagacgctctgaagcatgaccttgcaaacgtggagacacagatccctccaatacacgaacagtttgccatactggagaagtacgaagtgccggttgaagacagcgtccttgaaatgctggatagcctgaacggggaatgggtggtgttccagcaaaccttactcgactctaagcagatgcttaagaaacacaaagagaaattcaagaccggcctgattcactctgccgatgactttaaaaagaaggctcacacactcttggaagactttgagttcaagggccatttcacatccaatgtgggttatatgtcagcgctagaccaaattactcaggtgcgggccatgctgatggctatgagggaggaagagaatagtctgcgtgccaacctaggcatcttcaaaatcgaacagccaccttccaaggaccttcagaatctcgaaaaagaactggatgctttgcaacaaatctgggaaatcgctcgagactgggaagagaactggaacgaatggaaaaccggacggttcttgatcctgcaaaccgagaccatggagacgactgctcatgggctctttaggaggctaactaagctagccaaggagtacaaagatagaaactgggagataatcgagactacacgaagtaaaatcgaacagtttaagcggaccatgcctcttatctctgacctcaggaacccagcgttgcgtgaaaggcactgggatcaagtacgggacgagatccagcgggagtttgaccaggagtccgagagtttcactctagagcagatcgtggaactggggatggatcagcacgtggagaaaatcggagagatatcagccagcgcaacgaaggagctcgcaatcgaggtggctctacagaacattgctaaaacatgggacgtgacacaactggacatcgttccttataaagacaaaggccaccacagactgagaggcacagaagaagtgttccaggccctggaagataatcaggtggccctatccacgatgaaggctagccgctttgtcaaagcattcgaaaaggatgtcgatcactgggagagatgtttgtccctgatcctggaggttattgagatgatcttgacagtgcagaggcagtggatgtatcttgagaatatctttctgggggaggatatccgcaaacagctccccaacgagagcacactatttgaccaggtcaattccaattggaaggccatcatggataggatgaataaggataataacgcactgcgctccacccaccaccccggcctcttggacaccctaattgagatgaacaccatcctcgaagatatacagaagtcattggatatgtatctcgagaccaagaggcatatctttcctcggttttatttcctttcaaatgatgacctcttggagatcctgggccagtctcgcaatcccgaagcagtccagccccatctgaaaaaatgcttcgacaacataaagctgcttagaatccaaaaggttggtggtccctcgtccaagtgggaggcagtcggaatgttctccggggacggagagtacatcgattttttacactcggttttccttgagggacctgtcgaatcttggctgggggatgttgaacaaacaatgagagtcactctgagggatctgctgcggaattgccatctcgccttgaggaagtttcttaataaaagggacaaatgggtgaaggagtgggctggccaagttgtgatcactgctagtcaaatccagtggaccgctgatgtgacaaagtgtttgttaacggcaaaggagcgtgccgacaagaaaatcctgaaagtcatgaaaaagaaccaggtgtctattcttaataagtactctgaagctatccgaggtaatctgacgaaaataatgaggttgaaaattgtcgccctggtgaccatcgagatccacgcacgtgacgtactggaaaaactgtacaagagtggccttatggatgtgaattcattcgactggctcagtcagttacggttctactgggaaaaagatctcgatgactgcgtgattcgtcagactaatacccagtttcagtacaactacgaatatctgggcaattcaggtcggctggttattacgcctctgacggatcggtgttatatgaccctgaccacagccctgcatctccacaggggtggatcccctaagggacctgccgggaccggaaagacggagacagttaaggacctggggaaagcgctgggcatttacgttattgtggtgaactgcagcgagggtctggattacaaatccatgggtaggatgtactctgggttggcccagactggggcgtggggctgctttgacgagttcaatcgcatcaatatcgaagtgctctccgtggtggctcaccagatcctctgcatactgtccgctctcgccgctggcctgacgcatttccattttgacggcttcgaaatcaacctggtgtggtcgtgtggcatcttcataactatgaaccccggatatgccggccgcacagagctgccggaaaacttaaagagtatgttccgccccattgccatggtagtgcccgactccactctcatcgccgaaattattctgtttggtgagggctttggtaattgcaagattctggccaagaaggtgtatacactgtattccctggcggtgcaacagctttcccgccaggaccattatgatttcggactgcgggcacttaccagcctgctaaggtacgcaggaaagaagcgcagattgcaaccagatttaactgacgaggaggtgttgctgctctccatgcgggacatgaacattgccaaactcactagtgttgatgcccctctttttaatgctattgttcaggatttatttcctaacatcgagctgccagttatcgattacggaaaacttcgggagaccgtagaacaggagattagggatatggggctgcaaagcactcctttcactcttacgaaggtattccagctgtatgagacgaagaatagccgacattccacgatgatcgtgggttgcacgggctctggcaagacggcgtcatggcggatcctccaagccagcctgtcctcactgtgccgggccggtgatcctaatttcaacatcgtgagggagttccccttgaatcctaaggctctatcccttggagagctgtatggcgagtacgacctgagcactaacgagtggacagacgggatattatcctcagtcatgcgcacggcttgtgctgacgaaaagccagatgaaaagtggatactctttgatggccccgtggatacgctgtggattgaaaatatgaacagcgtgatggatgacaataaagttctgaccttgattaatggagaacggattgccatgcccgagcaggtgtcgctcctgtttgaagttgaagacctcgctatggcctcccctgctactgttagtaggtgcggcatggtttacaccgattatgccgatttggggtggaaaccttacgttcagtcttggctggagaagagacctaaagctgaggtggagcctttgcagagaatgtttgaaaaactaattaacaagatgcttgccttcaaaaaagataactgtaaagaactcgtgcctctgcccgaatattccggcattacatctctgtgcaaactgtactcagcactggcgacccctgagaatggtgtgaatcctgcagacggtgagaattatgttaccatggtggaaatgacatttgtgttctcgatgatctggagcgtgtgtgccagtgtggacgaagagggtaggaagcggatcgactcgtacctccgcgaaatagagggttcattcccaaacaaagacactgtgtacgagtacttcgtggatcccaaaataaggagttggacatctttcgaagacaagctccccaagtcctggaggtacccccctaacgcccccttctataaaattatggtcccgaccgtagataccgtgcgctacaattacctcgtgtcttcacttgtggcaaaccagaaccccattctgctagtgggccctgtaggtacaggcaaaacgagtatcgcccaaagcgtccttcaaagtctgcccagtagtcagtggtccgtgttagtagtaaacatgagcgcccagaccacctcgaataacgtacagtccataatcgagagccgggtggagaagcgcacaaagggtgtgtatgttccctttgggggaaagtcaatgattacgttcatggatgatctcaacatgccagctaaagatatgtttggttcacagccgcccctcgagctgatcaggctctggatagactatggcttctggtatgatagaacaaagcagactatcaagtacatccgggagatgtttttgatggccgccatgggcccccccggtggaggacgaaccgtgattagtccacgcctgaggtccaggttcaatattatcaatatgacctttccgacgaaatcccagatcatccgaatcttcggcacaatgataaatcagaagctgcaggacttcgaagaagaagttaagccgatcggcaacgtggtgacagaagcaaccctggacatgtataacacagtcgtacaaagattcctccctacacccacaaagatgcactacctttttaatcttcgggacatttctaaagtgtttcagggcatgctgcgcgctaacaaggactttcatgacactaagagctccatcacaagactgtggatacacgagtgctttcgggtcttctctgaccgactggtggatgctgctgatactgaggcctttatgggcatcatctcagataagctaggttcctttttcgatctgacttttcatcacctgtgcccttctaaacggccgcccatctttggtgatttcctgaaagagccaaaggtgtacgaagatctcacagatcttacggttctaaaaaccgtgatggagacagctctgaatgaatacaacctgagtccttctgttgtgcctatgcagctggtgctgtttagggaggctattgaacatattacacgtattgtgcgcgtcatcggacagcccagaggaaacatgttacttgtcgggattggaggcagtgggcggcagtctttagcccgtctcgcaagctcaatctgcgactacaccacttttcagatcgaagtcacgaaacactacaggaagcaggaattccgcgacgatatcaaaagactttatagacaagccggagtagaacttaaaaccacaagctttatttttgttgacacgcagatcgcggatgagagttttctggaagacatcaataatatcctatccagtggggaagtgccaaatttatacaaaccagacgaattcgaagaaatccagagccacatcatcgaccaagccagagtcgagcaggtgcccgagtcctctgacagcctctttgcctacctgatcgaaagggtccagaataacctgcacattgttctgtgcctctccccgatgggcgatccctttagaaattggattcggcaatatccagcactggtcaactgcaccactattaactggttttccgagtggccccaggaagctctgcttgaagtcgccgaaaagtgtcttatcggcgtcgatctgggaacgcaggagaacattcacaggaaagtcgcacaaatcttcgtaacaatgcattggtcggttgcacagtactcacaaaagatgctgttagagctccggagacataactatgttactccgactaagtatctggaacttctgagtgggtacaagaagctccttggcgagaaacgccaggaacttctggcacaagcaaacaagttacggacaggcctcttcaaaattgatgagactagggaaaaggtgcaggtgatgagtcttgagctggaggacgcaaagaaaaaggttgccgagttccagaagcaatgtgaggaatacttggtgataattgtgcagcagaagcgggaagccgatgagcagcagaaagcccttgagagtctcaacaagaaagacataggcgaaatcaaatcctacggcaggccacccgcccaggtggagattgtcatgcaagccgtcatgatcttgcgcggtaacgaaccgacatgggctgaagccaagcgtcagttaggagagcagaatttcataaagagtctaataaatttcgacaaagacaatattagtgacaaagtgctcaaaaaaattggcgcatattgcgctcaacccgatttccagcctgacatcatcgggagagtgtccttggccgctaaaagcctctgtatgtgggttcgggccatggagttgtacgggaggttgtaccgggtagttgagcccaaacgcatacgcatgaatgctgctctggctcaactcagagagaaacaggcagccttggctgaagcacaggagaaactgcgggaagtcgctgaaaaactggagatgctcaaaaagcagtacgatgagaaactggcccagaaggaggagctgcgcaagaagtccgaggaaatggagctgaaactggagagagcgggcatgctggtgtccgggttggccggtgagaaagctcgctgggaggagaccgttcagggtcttgaggaggatctgggatacttggtcggcgactgtcttttggctgctgcctttcttagctacatgggacctttccttaccaattaccgtgatgagattgtgaatcagatctggattggaaagatctgggaattgcaggtgccatgcagtcccagcttcgcgattgataacttcctttgcaatcctaccaaagtgcgggattggaacattcaggggttgccgtctgacgccttctctactgaaaatggtataatcgttacacggggaaatcgctgggcgcttatgattgatccccaagcacaggccttaaagtggattaagaatatggagggaggccagggcctcaagataatagacctgcagatgtctgactacctccggatactggaacacgccattcatttcggctacccagtgctgctccagaacgtgcaagaatacttagatcctacactgaaccccatgcttaacaagagtgtagcccgcatcggcggcaggttactaatgaggataggcgataaggaggtagagtataacacaaatttccgtttttatatcacaacaaagctttctaatcctcattacagtccagaaacatctgccaaaaccaccatagtgaattttgcagtcaaagaacagggtttggaggcacagttactggggatagttgttcgcaaagagaggccagagcttgaggagcagaaggattccctggtgattaatatcgccgccggtaaacgaaaactgaaggaactggaggatgaaatccttagactgctaaatgaggctactgggtcccttctcgacgacgtgcagctggtaaataccctgcacacaagtaaaattaccgcaacggaggtgacggaacagctggagacttccgagaccaccgaaatcaacacggacctggcaagggaggcctacagaccatgtgcacagagggccagcattctgttcttcgttttgaatgacatgggatgcattgaccccatgtatcaatttagcctcgacgcatacatctctctgttcatcctatctatcgataagtcccaccggtccaacaaactggaggacagaattgactatcttaatgactaccacacctatgccgtgtacagatatacgtgtaggactctgttcgagagacataaactgctgttttcttttcatatgtgcgctaaaatcctcgagacctcaggaaaactgaacatggatgaatacaacttttttctgcggggcggcgtcgtcctcgaccgcgagggtcagatggataatccgtgtagcagctggttggccgacgcatattgggataacataaccgaactggataaactgacaaactttcacggcctgatgaactctttcgagcagtacccgagagactggcacttgtggtatactaacgcagctccggaaaaggcaatgctgcccggagagtgggaaaacgcatgcaatgaaatgcagcgcatgctaattgttcgtagtctccgtcaggaccgtgtggcattctgcgtgacaagtttcatcataacaaatctgggaagtcggttcatcgagcccccagtgcttaacatgaaatccgtgctcgaggacagcacccctcgctcccccctggtatttattctgagcccaggcgtggaccctacgtccgctctcctgcagctggcagagcatatgggcatggcacaacgctttcacgccctcagtctcggacagggacaggctcctatcgctgcacggctactgcgcgagggcgttactcagggccactgggtgtttttggcgaattgtcacctttccttatcctggatgcccaaccttgacaagctggtggaacaactgcaggttgaagaccctcacccatcatttcggttatggttgagtagtatacctcaccccgacttccctatctccatacttcaagtgtccattaagatgaccaccgagccaccaaagggcctaaaagcaaatatgacaagactgtaccagttaatgtcagagccccagttcagtcgctgcagcaaaccggctaagtataagaagttgctgtttagcttatgtttttttcacagcgtgttgctggagagaaaaaagtttctgcagctgggatggaacatcatttacgggttcaacgactccgattttgaggtcagtgagaacttgctgtcactctacttggatgaatacgaggaaaccccctgggatgctttaaaatatcttatcgcagggatcaattacgggggacacgtgaccgatgactgggaccgccgactcctcaccacgtacattaatgattacttctgcgaccagagcctctcaaccccttttcatcgattaagcgctctagaaacttacttcatccctaaagatggatctctggcgagctacaaggaatatatctctctcttgcccggcatggacccacctgaagcatttggacagcatccaaatgccgatgttgcatcccagattaccgaggcccagacgctgtttgacactctcttatcactgcagccccagatcacacccacccgggctggaggccaaacacgtgaagagaaggtgcttgagttagctgcagacgtcaagcagaagattccagaaatgattgattacgaagggacccaaaaactacttgcgcttgacccctccccgctgaacgtcgtgttgctgcaagagatacagcgctataacactctgatgcaaactatcttgttctctcttaccgatctggaaattccctcttgcgtatcccacaagtcagaacgagtagtgctcgagctcagcgccgtcaaacacccccgacagtag

SEQ ID NO: 115240 - DNA, 13284 bp, synthetic construct
  misc_feature 1..13284: note = Description of Artificial Sequence: Synthetic coding sequence
  source 1..13284: mol_type = other DNA
atgagtagcaaagcggagaaaaagcagagacttagtgggagaggttccagtcaagcctcttggtccggtcgggcaacgcgggcagcagtagccacccaagagcagggaaacgcacccgccgttagcgagcccgaactgcaggctgagctacctaaagaagagcctgagccgagactggaagggcctcaggctcaatctgaggagtcagtagagcccgaggcggatgtgaaacccctcttcctgagtagggctgctctgaccgggttggcagatgccgtgtggacacaggaacatgatgccatcctcgagcacttcgcgcaggacccaacagagtcaatcctgaccatcttcattgatccatgctttgggctgaagcttgaactggggatgccggtacaaacccagaatcaactggtctactttatacggcaggcacctgtcccaattacctgggaaaacttcgaggccacagtccagttcgggacagtaaggggtccttacattcccgcactgctgcgcctgttagggggggtattcgccccccagatcttcgcaaatactggatggcctgaaagtatcagaaatcacttcgcttctcacctgcacaaattcctggcttgtctgacagacacacggtataagttagagggccacacggtcctgtatattcccgctgaggctatgaatatgaagcccgagatggtaatcaaggacaaagagctggtgcagaggctagagaccagtatgattcactggaccaggcaaatcaaggaaatgctgagcgctcaagaaacagtggaaacaggtgagaacctgggacctctagaggagatcgagttctggcggaatcgctgtatggacctctccggtatctcaaaacagctcgtgaaaaagggagtgaagcatgtggagagcatcttgcacctcgccaaatcttcctatttggcgccttttatgaaattggcacagcaaatccaggatggcagccgccaggctcagagcaatttgacctttctgtccattctcaaggagccgtatcaagaactggccttcatgaaaccaaaggatatttcaagcaaactgcctaagctcattagcctgatccgcatcatctgggtcaacagcccccactataataccagagagcgcctgacttccctattccgcaaagtttgcgattgccagtatcactttgccagatgggaagatggtaagcagggaccattgccgtgcttttttggagcccaaggccctcaaattacccgaaacctgcttgagatcgaggacattttccacaagaacctacatacactgcgggcggtgaggggaggtattctggacgttaagaatacttgttggcacgaagactacaacaaattcagagctggcatcaaagaccttgaggttatgactcaaaacctcatcacctcagccttcgaactcgtacgtgacgtacctcacggagtgctcctgcttgacacatttcatcgactggctagccgggaagccattaaacgcacctatgataagaaggcagttgacctatacatgctgtttaactctgagttagcgctggtgaaccgagaaagaaacaagaagtggccagacctggaaccctatgtcgcccagtattctgggaaagccaggtgggtacacatcctgagacggagaatagaccgcgtcatgacttgcctggcaggcgctcactttctcccacgcatcgggacaggaaaagagtctgtccacacctatcagcagatggtccaagccatcgatgaactggtcaggaaaaccttccaggagtggacttcctcactagataaggattgcatcagaagactggacacccctttgctgagaataagtcaagaaaaggctgggatgctggatgttaacttcgacaagtctctgttaattctattcgctgaaatagactactgggaacgactgctgttcgaaacaccccactatgtggtcaacgtcgctgaaagagcggaagacctgcgcattctccgcgagaatctcctgttggtagcccgagactataaccgcattatagccatgttgagtccagatgaacaagccctatttaaggaacggattcgcctactcgacaaaaaaatccacccaggtctgaagaagctgcactgggctttaaagggggcctccgccttcttcatcacagagtgccgtatacacgcctccaaggtccaaatgattgttaacgaattcaaagccagtactctcacgattgggtggagggcccaggagatgtccgaaaaactgttagtgcgcatatctggtaagcgtgtctatcgcgatttagagtttgaggaggaccagcgggaacatcgggccgccgtgcaacagaaactgatgaacttgcaccaagatgttgtcacaatcatgactaactcatacgaggtgtttaaaaacgacggacctgaaattcaacaacagtggatgctttacatgatcagactcgatcggatgatggaggatgccctgcggttaaatgttaagtggagcctcttggaactctccaaagcaatcaatggggacggtaaaacctcacccaacccactgttccaagttctggtgatcctgaaaaacgatttgcagggtagcgttgcacaggtggaattcagcccaaccctccaaaccctggcaggggtggtcaatgatatcgggaatcatctcttttctactattagcgtgttttgtcacttgcccgatatactgacgaaacgcaagcttcaccgagagccaatccagaccgtggttgagcaggacgaggatatcaaaaaaattcagactcagatcagctccggaatgactaataacgctagtttgctgcaaaactaccttaagacttgggacatgtatcgggagatctgggaaatcaacaaggatagcttcatacatcggtatcagaggctcaatccaccagtatcgtcctttgtcgctgatatcgctcgctataccgaggtggctaacaatgtccaaaaggaagaaacagtgacaaacattcaatttgtcttgctcgactgcagccaccttaagttttcccttgtgcaacactgtaatgaatggcaaaacaaattcgcgacactgttgcgagagatggccgcgggtcggctgcttgagttgcacacatacttgaaggaaaacgctgaaaaaataagcaggcctccacagaccctggaggaactaggagtgagcctgcagctcgtggatgccctcaaacatgacctcgctaacgtggaaacccagatccctcccatccacgagcaattcgcaatcctggagaagtatgaggttccagtggaggacagtgtcctggagatgctggattctttgaacggggagtgggtggtgttccagcagaccctgctcgacagcaaacagatgttaaagaagcacaaagaaaaattcaaaaccggcctgattcacagcgccgacgatttcaaaaaaaaggcccatacactgttggaggactttgaattcaaaggtcacttcacttccaacgtcggttatatgagtgcgctcgaccagatcacccaggttcgcgccatgcttatggctatgcgggaagaagaaaactcactccgggctaacctggggattttcaaaattgagcagcctccctccaaggatctgcaaaacctggagaaggagctcgatgctttgcagcagatttgggagattgctagggactgggaagagaattggaacgaatggaagacaggaagattcctcatcctgcaaacggaaaccatggagactaccgcacacggcttgttcaggcggctgacgaaacttgctaaagaatacaaagatagaaactgggaaattatagagacaactcgcagcaagattgagcagttcaagcgcaccatgccgctaatcagcgacctgaggaatcccgcactgagagagcgacactgggatcaggtacgagacgagattcagcgggagttcgaccaggaaagcgaatcctttaccctcgagcagattgtagagttagggatggaccaacacgtcgagaagattggggagatcagtgcctcggccactaaggagctggccattgaggtggcgctacagaacattgctaagacctgggacgtgactcagcttgacattgtaccatacaaagataaaggtcaccaccggctcaggggaacagaagaagtctttcaggcattggaagacaaccaagttgccctttctacaatgaaggccagccgttttgtgaaagctttcgagaaagacgttgaccattgggagcgttgtctgtcccttatacttgaggtcatcgagatgatactaactgtgcaacgacaatggatgtacttggaaaatatttttctgggcgaggatatccgtaagcaactccctaacgaatccaccctgtttgaccaggtgaactccaactggaaggcaatcatggaccgtatgaacaaagacaacaacgctctgagaagcacacaccacccaggcctattagacacccttatcgagatgaacacaatccttgaggatatccagaaatcccttgatatgtatctagagacgaaacgacacatcttccctcggttctactttctgtccaacgacgacctcctcgagatccttgggcaatctcgcaatcccgaagctgtgcagccccatctgaaaaagtgctttgacaatattaaactgctgcggattcaaaaagtcgggggcccaagcagcaagtgggaggcagtgggaatgttttccggggacggtgaatatattgatttcctgcattccgtctttctggagggtccggtcgagagttggctgggcgacgtcgagcagacgatgcgggtgaccctcagggatctcttgagaaattgccacctggccctgcgcaagttcctgaacaagagagataagtgggtgaaggaatgggccgggcaagtggttattactgcatcacagattcagtggaccgccgacgtgacaaagtgcctcctcacggccaaggaaagagccgacaagaagatcctgaaggtgatgaaaaagaatcaggtgagcattttgaataaatactctgaggctattcgggggaaccttacaaaaatcatgcgtcttaaaatcgtggctctcgtcaccattgaaattcatgcccgcgatgtcctcgagaagctgtacaaatccggtttaatggatgtgaatagttttgactggttaagccagttgcggttttactgggaaaaagatcttgacgactgtgtgatacgccagacaaacacccagtttcaatacaattacgaatatctgggcaattccggacgtcttgtgatcacaccactgacagatagatgctatatgacactgactaccgcactgcatctgcatagggggggaagtcctaaaggccccgcaggcactggcaagacagagacagtgaaggatctcggaaaagcactaggcatttatgtgatcgttgtgaactgctctgaaggcctggattataagagtatgggacgaatgtatagcggcctagctcagaccggagcttggggttgttttgacgagttcaaccggattaacatcgaggttctgagtgtggtagctcaccaaattctgtgtattctctccgctctcgccgctggtctgacacatttccatttcgacgggttcgagatcaatctcgtatggagctgcgggatatttatcaccatgaaccccgggtatgcaggtcgcaccgagctgccagagaacttgaagagtatgtttagacccatcgcaatggtggtgccagatagcaccctgatagccgaaattattcttttcggcgagggcttcggaaactgcaaaatattggccaaaaaggtatacactctgtatagtctggctgtacaacaacttagccggcaggaccactatgacttcggtctgcgtgctcttacctcgcttcttcggtacgcgggaaaaaagaggaggctgcagcctgatctcacagatgaagaagtcctgctcctctctatgcgcgacatgaatatcgccaagcttacatcagtggacgccccattgtttaatgccatcgttcaagacctgtttcctaacatcgaactccccgtcatagattacggcaagctgcgggaaactgtggagcaggaaattcgtgatatggggctgcagtcgacaccctttacactgacgaaagtgtttcagctgtatgagacgaagaattcccggcactccacaatgatcgtcggatgcacaggcagcggcaaaacagctagttggaggatcctgcaggccagtttgtcatctctatgtcgcgccggcgatccgaactttaacatcgtaagggagttccccttaaatcccaaggcactgtccctcggcgagttgtacggagaatatgatttgagcacgaatgaatggacagacgggatccttagctcggtgatgcgtacagcatgcgctgacgaaaagcccgacgagaaatggattttattcgacggtcccgtagacacgctttggattgagaatatgaattccgtgatggacgataataaagtgctgaccctcataaatggcgagcggatcgccatgccggagcaagtgtcattgctgttcgaggtggaagacctggctatggcctcaccagccacggtgtccaggtgcggaatggtgtatacggattacgccgacctcgggtggaagccgtatgtccaatcatggctcgagaagcggcctaaagccgaggtggaacctcttcagaggatgttcgagaaattgattaataagatgcttgcctttaaaaaagataactgcaaggaattagtacctctccccgagtactctggcatcactagcctgtgcaagctgtactcggcgttagccactcccgaaaatggggtcaacccagccgacggggaaaactatgttaccatggtcgagatgacatttgtgtttagcatgatttggagcgtgtgtgcttcggtcgacgaagaaggaaggaagcgcatcgattcctacctccgagaaatcgagggctcattccccaataaagatacagtctatgagtactttgttgatccaaagatacggtcttggacaagttttgaagacaagctcccgaagagctggagatatccccctaacgcccctttttacaagatcatggtgccaacagtcgacacagtgcgctacaactacctcgtatcctctctggtggccaaccagaacccaatcctactggtgggaccagtagggaccgggaagacctccattgcccagtccgtgctgcagtctttgcccagtagccaatggtcagtgctcgtggtcaatatgagcgctcagacaacttctaacaatgtgcaatctattattgagagcagagtggagaaacgaacaaaaggcgtgtatgtgcccttcgggggaaagtctatgattacttttatggacgacctcaatatgccagcaaaagacatgttcgggtctcagccccccctggagctcatccggctttggatagattacgggttttggtatgacaggacaaagcaaaccatcaaatacattcgcgagatgtttcttatggcagctatggggccccctgggggcggtcgcactgtcatttctccccgcctgaggtcaaggttcaatatcatcaatatgacgttccctacaaagagccagatcatccgcatttttggaacaatgatcaaccagaaattgcaagattttgaggaagaagtgaaacctatcggtaatgtggttactgaagccacactggatatgtacaatacggtcgtgcaacggttcctcccaacacccaccaagatgcactacctctttaacttacgtgatatttcaaaggtgttccaaggtatgctcagagccaacaaagacttccacgacacgaaaagtagtatcacgcgtctctggatccatgaatgttttcgggtgttctccgataggctggtggatgccgcagatactgaggcctttatggggataatctcagacaaactgggctcatttttcgacttgacttttcatcacctctgtccctcaaaacggccgccaatcttcggggacttcttaaaggaacccaaagtttacgaagacctcaccgatctaactgtgctcaaaactgtgatggagacggccctgaacgagtacaaccttagcccaagtgttgtgccaatgcagctggtgttgtttcgcgaggccatcgagcatataacccggatagtcagggtgatcggccaaccgcgcggaaacatgctgctggtgggaatcgggggttctggcagacaaagccttgcccgactcgcatcaagcatttgcgactacactacctttcagatagaagttaccaagcattaccgcaaacaagagttcagagatgatatcaagcgtctgtaccggcaggccggtgtcgaattaaaaactacctccttcatcttcgttgatacccagatcgcagacgagtcattcctcgaagatattaacaacatattatcatcaggggaggtgcccaatctgtataaacccgatgagttcgaagaaattcagagtcacatcatagaccaagcaagggtcgaacaggtgccagaatcatccgacagtttatttgcttacctcatcgagcgcgtccagaataacctgcacattgtgctctgtcttagcccaatgggtgaccctttcaggaactggattagacagtaccccgcactggtcaactgtaccactattaactggttttcggagtggccccaggaggctctcctggaagtggctgagaagtgccttatcggggtcgaccttggaacccaagagaacatccatcgcaaagtcgcacagatatttgtcacaatgcattggtctgtcgcccagtactcacagaaaatgttactggaactgcgtagacacaactacgtaacgccaacaaagtatctcgaattactgtccggctacaaaaaacttttgggcgagaagaggcaagagctcctggcccaggccaacaagctgaggactgggctgttcaagattgacgaaactagggaaaaggtgcaggtcatgtcgctcgagctggaggacgctaagaaaaaagtcgccgagttccaaaaacagtgcgaggaataccttgttattattgtgcaacagaagcgggaggcggacgagcagcagaaggcagtcacagctaattctgagaaaatcgctgtggaagaaatcaaatgccaagctctcgctgacaatgcccagaaggatttggaggaggctttgcctgccttagaagaggccatgcgagctctggaatccctcaacaaaaaggatattggagagatcaaatcatatggtcggccacccgcccaggtggagatagtcatgcaggctgttatgatcttgagaggtaacgaacctacatgggcggaagccaaaaggcaattgggtgagcagaattttattaaatccctgataaattttgataaagacaacatcagcgataaagttctcaagaaaattggtgcgtattgcgcgcagcccgacttccagccagatattataggccgtgtcagtcttgcggcgaaaagcttatgcatgtgggtgcgtgccatggagctgtatgggagactctacagagtggttgaacccaaacgaatccgcatgaatgctgctctggctcaactacgcgaaaagcaggctgctttggctgaagcacaggagaagctgcgcgaagtcgcggagaaactcgaaatgctgaaaaaacagtacgatgaaaagttggcgcaaaaggaagagctgcgcaagaaatcagaggagatggaacttaagttagagagggcaggaatgttagtgagtggtcttgctggagagaaagcgaggtgggaagagaccgtccaaggccttgaggaagatcttggctaccttgtgggagattgtttgttagcagcggcgtttctaagttatatgggcccgttcctcactaattatcgtgatgaaatcgtgaaccaaatctggatcggtaaaatttgggagttacaagttccttgttctccctccttcgccattgacaatttcttgtgcaatcctacaaaggttagggattggaatattcaaggactgccatctgatgcgttcagcactgaaaacgggatcatcgttactagaggtaaccgttgggctctgatgattgacccacaagctcaggcgctcaagtggatcaagaacatggaaggcggacaaggattgaaaataatcgatcttcagatgtcagattacttgaggattcttgaacatgccattcactttggttatcccgtgttgctacagaatgtgcaggagtacctggaccccacactgaaccccatgctcaataagagcgtggcccgcattggaggtcgactcctcatgcgaattggcgataaggaggtggagtataatacaaatttccgattttacatcacaaccaagttgagcaacccccactactctccagagactagcgcaaaaaccacaatagtcaatttcgccgtcaaggagcaaggcctcgaagcgcagctcctggggatcgtcgtcagaaaggagcgtcccgaactcgaggagcaaaaagatagtttggtgatcaacatcgccgcaggcaagcggaaactgaaggagctggaggacgagatcttgcgactcttaaacgaggccaccggatccttactggatgatgtacagttagttaacaccttgcatacatcaaagattaccgccaccgaggtgacagagcagcttgaaaccagcgagacaacagaaattaataccgacctggccagagaagcataccgcccatgcgcccagcgggcctctattctcttctttgtcctgaatgatatgggatgcattgacccgatgtaccagtttagcctagacgcctacatcagcctctttattctgtcaatcgacaagtcacataggtcaaataaacttgaggacaggattgactacttgaacgactaccacacttacgcggtgtaccggtatacttgtcgaacactgttcgagagacataagctgctgtttagtttccatatgtgcgctaagatactagagacctcagggaagcttaacatggacgagtacaatttcttcctgagagggggcgtagttttagacagggagggtcagatggataacccatgttcaagctggctagccgacgcctactgggataacattaccgaactggacaagctaaccaattttcacggcctcatgaatagctttgagcagtatcccagggattggcacctctggtatactaatgcagcgcctgaaaaggccatgctacctggcgagtgggagaacgcttgtaatgagatgcaaaggatgctgattgtacgctccttgcgacaggatcgggtcgcattctgcgttacatccttcattattacaaatctggggtcccgctttattgaacctcctgtgcttaatatgaaaagcgtgctcgaggatagcacccctagatcccctctggtgttcatcctttccccgggcgtggatccaacctcagctctgttgcaactggcagaacatatggggatggctcagcggtttcacgcactctcactgggtcagggtcaagcgcctatcgcagcacggttacttagagagggagtcacccagggacattgggttttcctggccaactgccatctgtccttgtcttggatgccgaaccttgataaactggtcgagcaactgcaggtggaagatccccatccctcttttaggctgtggttaagttcgattccacatcccgacttcccaatttctatcttgcaggtgtccatcaaaatgacaactgagccacccaaaggcttgaaggcaaatatgacacgcctgtaccagttgatgtccgaaccacagttctcccggtgcagcaagcccgctaagtataaaaagctcttgttctccctgtgcttcttccacagcgtgctgctggagaggaaaaagttcctgcagttgggctggaacattatttacggttttaacgactcggactttgaggtcagcgagaatcttctgagtctctatctggacgaatacgaggagactccttgggacgcgcttaagtacctcatagctggcatcaattatggagggcacgttaccgatgattgggataggcggctcctcaccacttatatcaacgattatttctgcgatcagtcactgagtacacccttccacaggctaagcgcactcgagacctatttcatccctaaggacggatctctcgcatcttataaagagtacatcagccttttgccgggcatggatcccccggaagcttttggtcaacaccccaacgcagatgtggcttcccaaatcaccgaggcgcagaccctctttgacacccttctgagcctgcagccccaaatcacgcccacaagagctggggggcaaacacgggaggaaaaagtgttagagctggctgcggacgtcaagcagaagatacccgagatgattgactatgagggtacgcagaagttgttagccctggacccttcacctcttaatgtcgtgttgctgcaggagattcaacggtacaacactcttatgcaaaccatactgttttcgttgactgacctcgaaaaggggattcagggcttgattgtcatgtcaacatcccttgaagaaatctttaattgtatcttcgacgctcacgttccccctttatggggtaaagcttaccccagtcagaaacccctggccgcttggacacgagacctagccatgcgggtcgagcaattcgaactatgggcatctagggcccgtccccctgtgatattttggcttagtggtttcacatttccgactggtttcctgactgcagtgctgcagagctcagcccgtcagaataacgtctcagtggactcgttgtcctgggaatttatcgttagtacggtcgacgacagcaacctcgtctatcctcccaaggacggtgtgtgggtgagaggactctacctggagggagcaggatgggataggaagaactcttgtctggtcgaggccgaacccatgcaactggtatgcttgatgcctacaattcactttcgtcccgctgagagcagaaaaaagagtgccaagggcatgtactcatgtccatgttactactatcccaaccgggcaggttcttccgatagggcctcctttgtgatcgggatcgatctgcggtcaggcgcaatgacacccgatcattggattaaaagggggacggctctgctcatgagtctggattcatag

SEQ ID NO: 115241 - DNA, 12351 bp, synthetic construct
  misc_feature 1..12351: note = Description of Artificial Sequence: Synthetic coding sequence
  source 1..12351: mol_type = other DNA
atgggcgccacgggacggctggagctcactctggctgcgcccccccacccagggcccgcattccagcgatccaaggctagagagactcagggggaggaagagggtagcgaaatgcaaatagccaagtcagattctatacatcatatgtcccattctcaggggcagccagaattgccacctcttcccgctagtgccaacgaagaaccatccggtctctaccagaccgtgatgtcgcactctttttaccctcctctaatgcagcgaaccagttggaccctggccgcaccctttaaggagcagcaccaccatcgaggtccatctgacagtatcgctaacaactacagtttgatggcccaggatctgaagctgaaggatctgctgaaagtgtaccaacccgccactatctctgtgcccagagacagaacaggccaaggattgccaagttcgggcaaccgctccagtagcgagcccatgcgcaaaaagactaaattttcttccaggaacaaggaggattctacaagaattaaactcgcctttaaaacgtccatattttccccgatgaagaaggaggtgaagaccagcctgacatttcctggttcacggccaatgtcccctgaacagcaacttgatgtgatgctccagcaagaaatggagatggaatcaaaggagaagaagccatccgaatctgaccttgagcggtattattattaccttactaacgggatcaggaaagacatgatcgcccccgaagagggagaggtaatggttcgtatctccaagctcatctccaatactctgctcacatctcccttccttgaacccttgatggtggtcctcgtgcaagagaaagagaatgattattactgctccctcatgaagagtattgtggattacatcctaatggatccaatggagcgtaagcgcctgtttatcgagtctatccctcgcctatttccacagagggtgatacgggcgccagttccgtggcattcagtatataggtccgccaaaaagtggaatgaggagcatctgcataccgtaaacccaatgatgctgaggctgaaggagttatggttcgctgagttcagagatcttcggtttgtgcgcaccgccgagatactggcaggcaaattgccgttacaaccccaggagttttgggatgtgattcagaagcactgcttggaggcacaccagacattgctcaataaatggatccccacttgcgcacagctgtttacaagtagaaaggaacactggattcactttgcccctaagtccaactatgacagcagccggaacattgaggaatattttgcgtctgttgctagctttatgtccctgcagttgagggagctcgttatcaaatccctcgaggatttagtgtcactgttcatgattcataaagatggcaatgactttaaggagccgtatcaggagatgaagtttttcatcccccagctgataatgatcaagcttgaagtgagcgagccaatcattgtttttaaccctagctttgatggttgctgggagttaattcgagattcttttctagaaatcattaagaattctaatggaatacccaaactcaagtatattcctcttaagttttcattcacagcagctgcagccgaccgccagtgtgtgaaagccgccgagcccggcgaacccagtatgcatgcggcagccacagccatggcagagttaaaaggctacaatttactgctcgggaccgtgaacgctgaggaaaaactcgtatccgattttctgatccagacattcaaggtcttccagaaaaaccaggtgggaccttgcaaatatctgaatgtgtataagaagtacgtcgacctactggacaacactgcagaacaaaacatcgcggcttttctgaaagagaaccatgacatcgacgacttcgtaacaaagatcaacgctataaaaaagcgcagaaatgagatagcctcgatgaatatcacggttccactggcaatgttctgccttgacgctactgccctaaaccatgacttatgtgagcgggcccagaatctgaaggaccaccttattcaatttcaagttgacgtcaatagggacaccaacactagtatttgcaatcaatactcacacatcgccgataaagtgtcagaagtgccggctaataccaaagaattagtgagtcttatagaatttctcaagaagagtagtgccgtcactgtgtttaaactacgaaggcagctgagggatgcctccgagaggctcgaattcctcatggattatgctgatctgccttaccagatcgaagatattttcgacaacagccgtaacctactccttcacaagagggaccaagcagagatggacctcattaagcggtgttctgaattcgaattgaggctcgaaggctatcaccgcgagctggagtcatttcgaaaaagggaggttatgacaacagaagaaatgaagcataatgtagaaaagctcaacgagctgtccaaaaacctcaaccgtgcttttgctgagttcgaactgattaacaaagaagaagagctgctggaaaaagaaaaaagtacctacccactgctgcaggcgatgctgaagaataaggtgccttatgagcagctgtggtccactgcatacgagttttctatcaagtccgaagaatggatgaatggccccctttttctgctcaacgcagaacagatcgccgaagaaattggcaatatgtggcgtaccacctacaaactgatcaagaccctgagtgatgtgcccgcgcccagacggctcgcagaaaacgtgaagattaagatcgataagttcaaacagtacatccctatactgtctatttcgtgtaatcccgggatgaaggaccgacattggcagcagatctctgagattgtaggttatgaaattaagcccactgaaacgacttgtctcagcaatatgctagaattcgggtttgggaagttcgtggaaaaactcgagcccatcggcgcagctgcaagtaaagaatactcattagaaaaaaatctggaccgcatgaagcttgattgggttaatgtgacgtttagcttcgtgaaatatcgcgataccgacaccaatattttatgcgcaatcgatgacattcagatgttgttagacgatcatgtgatcaagacccagaccatgtgcggaagtccttttatcaaaccaatagaggcagaatgtaggaaatgggaggaaaagctcattcggattcaggataatcttgatgcatggctgaaatgccaggcaacatggttgtacctcgagcctatattttctagtgaggacattatcgcccagatgccagaggaaggccgtaaattcggtattgtcgattcatactggaagtctctgatgtctcaggcggtcaaagataatcggattttagttgccgccgaccagccaagaatggccgaaaaacttcaggaggccaattttttattagaagacatccagaagggactgaatgactacctggagaaaaagcgcctgtttttcccaagattcttctttctcagcaatgacgaacttttggagattctgtcagagaccaaagatcctctgagagtacagccacatctaaagaaatgtttcgagggcatcgctaagctggagtttaccgataaccttgaaatagtgggcatgatttccagcgagaaagaaaccgtgccctttattcaaaagatataccccgcaaacgctaagggcatggtcgaaaagtggttgcagcaggtcgagcagatgatgttggccagcatgcgggaggtcattgggttgggaatcgaggcctacgtgaaagtccctcgaaatcattgggttctccagtggccaggccaggtggtgatctgcgtgtcaagtatcttttggacacaggaagtttctcaggccctcgccgaaaataccctgctggacttcctcaagaagtcgaacgaccagatagcccaaatagtccaacttgtccgcgggaagctgtcgtcaggcgccagactaacactgggcgccttgaccgttattgacgtccatgctcgggatgtcgtcgcaaagctatctgaggatagggtctctgacctgaatgactttcagtggatctcccagctgcgctactattgggttgccaaggatgtacaagttcagataataactaccgaagccctctacggatatgagtacctaggaaatagtcctagattggtcattaccccgttgaccgacagatgctatcgaaccctgatgggcgccctcaagctgaacttaggcggcgctccggaaggacctgcgggtactggtaaaaccgagaccactaaggacctggccaaggcgctggcgaaacaatgcgttgtctttaactgtagcgatggcctggattacaaggctatgggcaaattttttaagggactggcacaagccggggcctgggcctgtttcgatgagttcaatagaatcgaggtggaggttttgtcagttgtggcccagcagattctaagcattcagcaggccatcatccgaaaactgaagacctttatatttgaaggcactgagttgtctttgaatcccacctgcgcggtgtttatcactatgaacccaggctatgcgggccgcgcagagcttcccgacaaccttaaggctctatttagaactgtagcaatgatggtgccggattatgctctcattggcgaaatttccctgtacagcatgggctttctggattcaaggagcttagcacagaagatcgtggccacgtataggttatgcagcgagcagctctcgtctcaacaccactatgactacggcatgcgcgctgtgaagagcgtgcttacagccgccggcaacctgaaactgaagtatccagaagaaaatgaatcagttctgctcctgcgagcccttctggatgtgaatcttgccaagttcctggcccaggacgtacccctcttccaagggatcatttcagatctctttccgggcgttgtactcccgaaaccagactacgaggtgtttctcaaggttctgaacgacaacattaaaaagatgaaactccagccagtgccatggtttatcggcaagattatacagatctatgaaatgatgctcgttaggcacggctacatgatcgtaggtgatcccatgggtgggaagacaagcgcatataaggtcttagccgccgcactgggtgacttgcacgctgcaaaccagatggaggagttcgctgtagagtataagattatcaatccaaaagctattacaatgggccaactttacggatgtttcgaccaagtgagccatgagtggatggatggggtgctggctaatgccttccgcgagcaggctagcagcctgtccgacgaccggaaatggatcatttttgacggacccgtagatgcgatctggatcgaaaacatgaacactgtgctcgacgataacaagaaactgtgcctcatgagcggggaaatcatccagatgaacagtaaaatgtcgctgatctttgagccagccgatttggagcaggcctctccagcaacagtatcccgctgtggcatgatttacatggagccgcaccagcttggctggaagccactcaaggattcttacatggacactctgccatccagtctgaccaaggagcacaaggagttagttaatgacatgttcatgtggcttgtgcaaccttgtctggaattcggaagactgcactgtaagtttgtagtacagaccagtccaattcacctcgcctttagcatgatgaggctgtacagctcattattagacgagatccgcgcagtggaggaagaagaaatggaactcggagaggggttgtcctctcaacagatcttcttgtggctccagggcctgttcctattctccctggtgtggaccgtcgcaggcacaattaatgcagattcaagaaagaagttcgatgttttcttccgcaatctgatcatgggcatggatgataatcatccgaggcctaaatccgtgaaattgactaagaacaatatctttcccgaaaggggctcaatttacgatttttactttatcaagcaggcaagtggccattgggaaacctggacccagtatatcacaaaggaagaagagaaagtaccagctggagcgaaagtgagcgagcttatcatccccaccatggaaacggcgcgtcagtcattctttctcaagacatacctggaccacgaaatccccatgctgttcgtcggacctacaggaaccggcaagtcagcaattactaacaatttcctgctgcacctgcctaaaaacacttacctgccaaactgcatcaatttcagtgcacgcacttcggctaatcaaactcaagatataattatgtccaagctggaccggaggcggaagggattgttcggccctcctatagggaagaaagcagtggtcttcgtcgacgaccttaacatgccagccaaggaggtttatggtgcacagccacctatcgaactactaagacaatggattgaccacggatactggttcgataaaaaggatacaacgaggctggatatagtcgatatgttgttagtgaccgcaatgggaccccccgggggcggtagaaatgacattaccggacgattcaccaggcacttgaacattatcagtataaacgcctttgaggatgacatactaactaaaattttcagcagcatagtggattggcacttcggtaagggtttcgatgtcatgttcctgaggtatggtaagatgctcgttcaggccacaaaaacaatctacagggacgcagttgagaattttctgccaacacctagcaagagtcattacgtgttcaacctgcgagacttcagccgcgtgatacagggagtgctgctctgcccacatacccacctgcaagatgttgagaaatgcattcgcctgtggatccatgaggtgtaccgcgtgttttatgatcgcttgatcgataaggaagacaggcaggtgttttttaacatggtgaaagaaaccacttccaactgctttaagcagaccatcgagaaggttctgatacatctttcaccgactggaaagattgttgatgataatatcagaagtctgtttttcggtgattatttcaaacctgaaagcgaccagaaaatttatgatgaaatcactgacctgaagcaactcacagtggtaatggaacactacctggaggaattcaataatatatccaaggctccaatgagcctggtgatgttcagattcgcgatcgaacacatctctcggatttgccgggtgctgaagcaggataagggacacctacttctcgtcggtataggcggcagcggacgtcagtccgccgctaaactgtctactttcatgaacgcgtatgaattatatcagatcgaaatcacaaagaattacgccggaaacgactggcgcgaggacttgaagaaaattatcctccaagtgggcgtggcgaccaaatcaacagtctttctgtttgctgataaccaaattaaagatgagagttttgtggaggacatcaatatgctgttgaacacaggagatgtgcccaacatttttcctgccgatgagaaggcagacatagtggaaaagatgcagaccgcagcccgcactcagggggaaaaagtggaggtgacgcctttgtcgatgtacaattttttcattgagagggtgatcaacaagatctcttttagcctcgccatgtctcccattggcgacgcctttcgcaaccgtctcagaatgtttccttccttgatcaactgctgtacaatagactggttccagagctggcccactgatgccctggaactggtggccaacaagtttttggaagacgttgagcttgacgataacatccgggtcgaggtggtctctatgtgtaagtatttccaggaatccgtaaagaaattatctctggactattataataaactcagaaggcataattatgttactcctacttcctacctagagctgatccttacgttcaagacacttttgaacagcaagcgtcaggaagttgcgatgatgcgcaaccggtacctgactggcctccagaaattggactttgccgcttctcaggtggccgtgatgcagagagaactcaccgccctgcagcctcaactgatcttgacctccgaagagacggctaaaatgatggtcaagatagaagccgagacccgagaggctgacggcaagaagctgttagtgcaggccgacgaaaaggaagccaacgtggccgcagctatcgcccagggtattaagaatgaatgtgaaggcgacctggctgaagccatgccagcactcgaagccgcccttgcagcactcgatacactgaaccctgctgacatcagtttagtgaagtcaatgcagaatcctcctggacccgtcaagctggtcatggagtctatttgtatcatgaaaggcatgaaacctgaacgcaaaccagatccgagcggaagcgggaaaatgattgaggattactggggcgtgtctaagaaaatattgggtgatctcaagttcttggagagcctgaaaacgtatgataaggataacattcccccacttaccatgaagcgtatcagggagcggtttattaaccatcccgaattccaacccgctgtaatcaagaacgtgtcctctgcttgtgagggcttgtgtaaatgggtgcgggctatggaggtgtacgatagagtcgctaaggtagtggcacccaagagggagcgcctccgggaagctgaggggaaactggctgcccagatgcagaagttaaaccaaaaaagggctgaactgaaattagtggttgaccgccttcaggcactgaatgacgatttcgaggagatgaatactaaaaaaaaagatctagaggagaatattgagatatgttcccaaaagctggttcgggcggagaaattaatatctgggttgggcggcgagaaagatcgatggactgaagccgctaggcagctaggcatacggtacactaatctgaccggtgacgtattgttgtccagcggaacagtcgcctaccttggtgccttcaccgtggactatagggtgcagtgtcagaaccagtggctggcagagtgcaaggataaggtgatccctggcttcagcgatttctctctctcacacaccctgggcgacccgattaagatccgtgcatggcagatcgcagggctgccagttgacagtttctcaattgataatggcataatagtgtcaaacagtagacggtgggcgttaatgatcgatccgcatggccaggccaacaaatggattaagaatatggaaaaagctaacaaactggctgtgatcaagttctccgatagcaactacatgcgaatgctggagaatgcacttcagttgggaacaccagttctcatcgaaaatatcggtgaagagcttgatgcctcaatcgagcccatcctcctgaaggccacctttaagcagcagggcgtggaatatatgcgccttggcgaaaatatcatagaatacagtagagactttaaactttacattaccacccggctgaggaacccacactatctgcctgaagtggcagtgaaagtgtgccttttaaatttcatgataacccctctcggcctccaagaccaactgctaggtatcgtcgccgctaaggagaaaccggagctcgaggagaaaaagaatcagttaattgtcgaatcagctaagaataagaagcatcttaaagagatagaggacaaaattctcgaagtgctgagtatgtcgaagggcaatatactggaggatgagactgccattaaagtgcttagctcttcgaaggtgctttccgaggagatcagcgaaaagcagaaggtggccagtatgaccgagactcagatagatgaaacacggatgggctataagcctgtggcagtccactcagcgacgattttcttttgtattagcgacctggcaaacatagagcctatgtatcagtactcgctgacttggtttatcaacctgtatatgcacagcctgacgcacagcactaaatctgaggaattgaatcttcggattaagtacattatcgatcacttcacactgtctatttacaataacgtgtgtcgttctctctttgagaaagataagctgctgttcagcctgttgttgacaataggcattatgaaacagaaaaaagagattaccgaagaggtatggtattttctgctcacaggagggattgccttagacaatccctacccaaacccagccccacagtggctttccgagaaagcctgggcagagatcgttagagcatcagccctgcccaagctgcacgggctgatggagcatctggagcagaatcttggagaatggaaactgatatacgactccgcatggcctcacgaagagcagttgcctggcagctggaagttttcccagggccttgagaagatggtgatcctgcgctgtctaaggcccgacaagatggtgcccgccgtccgagagtttatcgctgaacatatgggaaagctctacatcgaggcgccaactttcgacttgcagggctcatacaatgacagctcttgttgtgcccctcttattttcgtactgtccccctcagcagatcccatggcgggtctgctgaagtttgcagacgatcttggcatgggagggaccaggactcagacaatatctctcggccaagggcagggacctatagctgctaagatgattaacaatgccataaaggatggcacctgggttgtgttacagaactgccaccttgccgcatcttggatgcccacgctagagaaaatctgtgaggaggtcattgtccccgaaagtacgaatgcccggttccgactgtggctgacttcgtacccttccgaaaagttccccgtgagcatcctgcagaatggcattaaaatgacaaacgagccacctaaaggacttagggctaaccttctgcggagctatctcaacgacccaatctcagacccagtattcttccagagctgcgcaaaggcagtcatgtggcagaagatgctgttcggtctctgcttctttcacgccgtggtacaggagaggaggaactttggacccctgggctggaatatcccatacgagtttaacgagtctgacttacgcatttctatgtggcagatccaaatgtttctgaatgattacaaggaggttccctttgacgcgcttacttatctgactggtgaatgtaattatggcggtcgtgtaactgacgataaagacagacgactactcctgtcgttgctcagtatgttctactgcaaggagattgaggaagattactactctttagcccctggagacacatattacatccccccacacgggtcataccagtcatacatcgattatctgcgcaatctgcctataactgcacatcctgaagttttcgggttgcacgaaaatgctgatattaccaaagacaaccaggagaccaaccaactgttcgagggggtgctgctgactttaccgcgccagtccgggggaagtggaaagtcccctcaggaagtggtggaggagctggctcaggacatcctgagtaaactcccaagggatttcgatctggaggaagtcatgaaactgtatcctgttgtttatgaagaatcgatgaacactgtacttcggcaggaactgatccggtttaataggctgactaaggtcgttcgcaggtcacttattaatctgggacgcgcaataaaagggcaggtactgatgtcatctgaactggaggaggtcttcaatagtatgctggtgggaaaggtaccagctatgtgggctgcaaaatcatatccgagcctcaagccactgggaggctacgtggcagaccttctggcccgcctaacttttttccaagagtggatcgataaggggccccctgtggttttctggatcagcggattctacttcacccagtcctttctgaccggggtatctcagaattacgcaaggaaatatacgatacccattgatcatatagggtttgagttcgaggttaccccccaggagacagtgatggagaataacccagaggacggggcttatataaaggggctcttcctggagggtgcaagatgggataggaagacaatgcagataggtgagtccctgcctaagatcctgtacgacccgttacctattatttggctgaagcccggggaatccgctatgtttcttcatcaggatatctacgtctgccctgtgtacaaaacatcggctcgccgcggtacactatccaccaccggccatagcacaaattacgtgctcagcatcgagctaccaaccgacatgcctcagaagcattggattaacaggggagttgcaagcctgtgtcaactggataactag

SEQ ID NO: 115242 - DNA, 2262 bp, synthetic construct
  misc_feature 1..2262: note = Description of Artificial Sequence: Synthetic coding sequence
  source 1..2262: mol_type = other DNA
atgggcgacatggactgtagctctcagaaaatcgcaaagtccgatagcattcaccatatgagtcactcccagggacagcccgaactcccacccctgcctgcatccgccaacgaggagccctcgggtctgtaccaaactgttatgtcacactcgttctaccctccactgatgcagcgcacctcatggaccctggccgctccttttaaggaacagcatcatcatcgcggtccctcggacagcattgcaaataattatagcttgatggctcaagacctcaagctgaaggacctactgaaagtctaccaacccgctaccattagcgtccctagggatcgcaccggccaggggctgccatcttcaggcaatcgttcctcctctgagcccatgcggaagaaaacgaaattctcaagtaggaacaaagaggactctacccggatcaagctggcattcaaaactagcatcttctccccaatgaaaaaggaggtcaagacctccctgaccttccctgggtcacgacccatgtctcccgagcaacaactggacgttatgctgcaacaagagatggagatggaatccaaggaaaagaagccttccgaatctgatttagaacgctattattactacctaaccaacggcatcagaaaggacatgattgctcctgaagagggcgaagtcatggtccgaatctccaagctcatctccaatacactgctgactagccccttcttagaacctctcatggttgtccttgtgcaggaaaaggaaaatgactattattgctctctgatgaaatctatagtggactacattctgatggatcctatggagcgaaagcgtctgtttattgagtcgattccccgcctgttcccgcagcgggtgatcagagcacccgtcccctggcattcagtttatcggtcggccaagaagtggaacgaggagcatctgcataccgtcaatccgatgatgttgaggcttaaagagctgtggttcgctgagttcagagacctgcggtttgtgagaacggccgagatcctggctgggaaactccctttacagcctcaggaattctgggacgtcatccagaaacattgcctggaggcccatcagacgcttttgaacaaatggatcccaacctgcgcccaactcttcacctcccggaaggagcactggatccacttcgcccctaagtcaaattacgatagttcccgcaacattgaagaatacttcgcatcggttgctagttttatgagcctgcagctccgcgaactcgtcatcaaaagtttggaagacctggtgtccttattcatgattcacaaagacggaaacgattttaaagaaccgtaccaggaaatgaagttctttatacctcaactaatcatgatcaagctggaagtgagtgaaccaatcatcgtgtttaatccttctttcgacgggtgctgggagctcattagagacagcttcctcgagattatcaagaacagcaacggaattcctaaggtggagtcagtgctcttccccgaactgaaagggtacaacttgctcctggggactgtgaatgccgaagaaaaattagtttcggatttcctgatccaaactttcaaagtctttcagaaaaaccaggtgggcccctgtaaatacttaaatgtttataaaaagtacgtcgatctgcttgataacacagcagaacaaaatatcgctgcatttctgaaggaaaaccacgacatagacgacttcgtcaccaagattaatgcaatcaaaaagcggagaaacgaaatcgcttctatgaacataacagttcctttggcaatgttttgcctggatgcgactgcccttaaccatgacctgtgcgagagagcccagaaccttaaagaccatttaattcagttccaagtggacgttaacagagacactaataccagcatttgcaatcagtattctcatatagccgacaaagtgagtgaagtgcctgccaacaccaaagaattagtgagcttaatcgagttcttgaaaaagtcttcagccgtgaccgtgttcaaactccgtagacagttgagggacgcttccgagcgtctggaattcctcatggattatgccgatctgccttacgaagatattaaactcaactcgaccctgttcttatggcctgatcagattgaagatatctttgacaattcccggaatctcttattacacaagagagaccaggcggaaatggatctcattaaacgctatcgtgaatctctgggcctgtcctggaagtag

SEQ ID NO: 115243 - DNA, 5664 bp, synthetic construct
  misc_feature 1..5664: note = Description of Artificial Sequence: Synthetic coding sequence
  source 1..5664: mol_type = other DNA
atgggtgcaaccggccgtttggagctcacattggcggcccctccgcacccagggccagcattccaacggtccaaagccagagagactcagggtgaggaggagggctcagagatgcagatcgccaaatccgacagtatacaccacatgagtcactcgcagggacagcctgaactgccccccctgccggcctccgctaacgaagagccctccgggctgtatcaaaccgttatgagccatagcttttacccgcctctgatgcaacgaacttcctggacactggccgctccttttaaggaacagcaccatcaccggggccctagcgacagcatcgccaataactacagtctgatggctcaagacctgaagctaaaggacctgctgaaggtttaccagcccgccaccataagcgtgccacgagaccggacgggccagggcctgccgtcctctgggaacagatcatcctccgaacctatgagaaagaaaacgaagttttcgagtcgtaataaagaagatagtacccggataaagttagcattcaagacaagcatcttttctccgatgaagaaggaagtgaaaacttctcttacgttccctggcagccgaccaatgagtccagagcaacagctggacgtcatgctccaacaggaaatggagatggagagcaaggaaaagaagccatcggagtcagacctagaaaggtattattattacctcacaaacgggatcagaaaagacatgatcgcaccggaggaaggggaagtcatggttcgaatttccaagttaatatccaacaccctgctcacttcaccttttctcgagccacttatggtcgtgctggtgcaggagaaagaaaatgattattactgtagtctgatgaagagcatcgtggattatatcctgatggacccaatggaacggaagcgcttattcatcgagtcaatcccaaggctctttccccaacgcgtgattagggcgccagtgccatggcactcagtataccgttctgcaaaaaaatggaatgaagagcacctgcacacggtcaaccccatgatgctccggctgaaggagctatggtttgcagagttcagagatctcagattcgttcgcacagccgaaattctggccggcaagctgccgctccaaccccaggaattctgggatgttattcaaaaacactgtctggaagcccatcagaccctgttaaacaagtggataccgacatgcgcccagctattcacgagcagaaaggaacattggatccatttcgctccaaaatccaactatgattccagccgaaatatcgaagagtattttgcatcggtggcatctttcatgagcctgcagctgcgggagctggtgattaagtccttagaagatctggtttcactgtttatgatccacaaggacgggaatgatttcaaggaaccctaccaggagatgaaattttttatccctcagctgatcatgattaagctggaggtgagtgaaccaattattgtttttaacccaagttttgatgggtgctgggagttgatccgcgactctttcctggagatcattaaaaattctaatggaatcccgaagctgaaatacattccgctgaagttttccttcaccgcagcggccgcagaccgacagtgcgtgaaagccgccgagccgggagaaccaagtatgcacgctgccgccactgctatggcagaacttaagggctataacttactgctaggcactgttaatgctgaggaaaaactggtgagcgatttcctaattcagacctttaaggtcttccagaagaatcaggtgggcccctgtaagtacctcaacgtgtacaaaaagtatgttgatctgctggataatacggctgagcagaatatcgccgcttttcttaaagaaaatcacgatatagacgactttgtgactaaaataaacgcaattaagaagcgacgaaacgagatcgcttctatgaacatcacagtccccctggccatgttctgcctggatgctactgccctgaaccacgacctgtgcgagcgcgcacagaatctaaaggatcatctgatacagtttcaggttgacgtgaatagggataccaacacgagcatatgtaaccagtactcccacattgctgacaaagtatctgaggtgccagctaacactaaagagctcgtgtctttaatcgaatttctgaaaaagtcatccgcggtgactgtattcaagctacggcgccaactgcgggatgccagcgaacgactagaatttctgatggattacgcagacctcccctaccagattgaagatatcttcgataattcccggaacttgctcctccacaaaagggaccaggctgaaatggacctcatcaaaaggtgctcggagtttgagctaaggctcgaaggatatcaccgcgagctggagagcttccgcaaaagagaagttatgaccactgaggagatgaagcataacgtggagaagctaaacgaactgtccaagaaccttaatcgcgctttcgcagagtttgaacttataaataaagaggaagaattgctcgagaaggagaaatctacttatccactcctgcaggcgatgctgaagaacaaggtgccctatgagcagctctggtcaacggcatatgagttcagtatcaaatcagaagagtggatgaatgggcctctgttcctcctcaacgccgagcagatcgctgaagagattggcaatatgtggcgcactacctataagctgattaagaccctgtctgacgtgcctgctccccgtcggctggccgaaaacgtgaagatcaaaatcgataagtttaagcagtacatcccgattctgtctatctcctgtaatcccggcatgaaggaccggcattggcagcagataagcgaaatcgtggggtacgagatcaagccaacagaaacaacttgccttagtaacatgttagaattcgggttcggtaagttcgtggaaaaattagaacctatcggtgccgccgcctcaaaggagtactctctggagaagaatctcgacaggatgaagctcgactgggtgaacgtgaccttttcgtttgtgaaatacagagacacggatactaatatcctctgtgccattgatgacatccagatgctcttggatgatcacgtgataaagactcagacaatgtgcggcagtccattcatcaaaccaatcgaggccgagtgccggaaatgggaagaaaagctgattcgaattcaagataacttggacgcatggctgaagtgccaagccacctggctgtacctcgagccaatcttctcctccgaggacatcatcgcccagatgcccgaggaaggccggaagttcggcatcgttgatagctattggaagagcctcatgtcacaggcggtaaaagataacagaattctggttgccgcagatcagccaaggatggccgagaagcttcaagaggctaacttcctcttagaagacattcagaagggcctgaatgactaccttgagaaaaagaggttgttcttcccacgctttttctttctctcaaatgatgagctcctggagattctctccgagaccaaggaccccctaagagtccagccacatctgaagaagtgctttgaggggattgctaaactggaattcaccgacaacttggaaatagtgggcatgatcagctcagaaaaagagacagtgccatttatacagaagatctaccctgctaatgccaaaggcatggtcgagaaatggctgcagcaagtcgagcaaatgatgcttgcatccatgcgggaggtgatagggctgggcattgaagcatacgtcaaggtacccagaaaccactgggtgctacagtggccaggtcaagtggtgatttgtgtgtcatccatcttttggacacaggaagtaagtcaagctctggcagaaaacacactcttggatttcttgaaaaaaagtaatgaccagattgcccagatcgttcagctggttagaggcaagctcagctcaggcgctcgtttgaccctcggtgctttgacagtgatcgacgtgcacgccagggatgtagtggccaagctgagcgaagaccgtgtgagcgacctgaatgatttccagtggatctctcagctaaggtactactgggtggccaaggacgtacaggttcagatcatcacgacagaggcattgtacgggtatgagtacctgggaaactcaccccggttggtcatcaccccactgactgaccggtgctaccggaccctgatgggtgccctgaagctcaaccttgggggagctcccgaaggacccgccgggaccggcaagacagaaactacaaaggaccttgcaaaagcactcgctaaacagtgtgtggtgttcaactgttctgacggcttggactacaaggccatgggtaagtttttcaaaggactcgcccaagccggagcctgggcctgctttgacgagtttaatcggatcgaagttgaagtgctgtctgtagtggcccagcagatcttgagcatccagcaggcaatcattcggaagctcaagaccttcattttcgaaggtacggagctctctctgaaccccacctgtgccgtgtttatcacaatgaatcctggctatgctgggagagcagagctgccagataacttgaaggccctgttccgcacagtggccatgatggtgcccgattacgcactgatcggcgaaatttccctgtatagcatggggttcctagacagccggtctctggcacagaaaattgtcgccacctacaggctttgctccgaacagctgtcaagccagcaccattatgactacggtatgagggccgtgaagtcggtgctgactgctgcggggaatctcaaactgaagtatcctgaagagaatgagtctgttttgcttctacgggccctgttggacgtgaatctcgctaaattcctcgcgcaggatgtgcctctgttccagggaataatctccgatctgttccccggggtggtgctacctaaaccagactatgaagtctttctaaaggtccttaatgataatatcaagaagatgaaactgcagccagtaccctggtttatcggtaagataattcaaatctacgaaatgatgctggtccgccatggctacatgatcgtcggggacccaatgggtggaaagaccagtgcttacaaagtcctggcggctgccctgggcgatctgcacgcagcgaaccagatggaagaattcgcagtggagtacaagataataaatcccaaggccattactatggggcaactttacggctgctttgatcaggtcagccacgaatggatggatggggttctggccaatgcatttcgagaacaggcaagctccctcagcgatgaccgcaagtggattattttcgacggaccagtagatgctatatggattgagaatatgaacaccgtactcgacgacaacaagaaactttgcctgatgtctggtgagatcattcagatgaattcaaagatgtcgctgatttttgaacccgctgacctcgagcaggcctctccagccaccgtttcaagatgtgggatgatatatatggaaccccaccaattgggctggaagcctctcaaggattcttatatggatacattgccctccagcctgactaaggaacacaaggagctgatgaagtcagggcagtag

SEQ ID NO: 115244 - DNA, 462 bp, synthetic construct
  misc_feature 1..462: note = Description of Artificial Sequence: Synthetic coding sequence
  source 1..462: mol_type = other DNA
atgctgcacatgggactggcccatgtgaagaggatgccaaggtcatctagactacagtgcaaagaggcccaggcttttttctccttgcagtccggcacctacagagttttgagcacacccctgaagctgggcgtgtgggaggagaagaaacattgggcggccctgttgcagcccgtgtcactcggccggaaatggaaaaaacgaccttgcaacttggacgactatgtttgggggcagcttaaatatatcccccttaaattctccttcacagctgctgcagctgacaggcagtgcgttaaagctgcagaacccggggagccatccatgcacgccgcagccaccgccatggctgggacgcgcgccgggacaacattcgatgagctgcaatgtcaggaggatatggtatgtacgcggtttgaaaacaaagcctatgtaaatactaatgatttcacccgccagtag

SEQ ID NO: 115245 - DNA, 13875 bp, synthetic construct
  misc_feature 1..13875: note = Description of Artificial Sequence: Synthetic coding sequence
  source 1..13875: mol_type = other DNA
atgttccggattggtagacgccagctctggaaacattctgtcacgagggtcctgacccagcgcttaaaaggcgagaaagaggccaagagggctctgctcgacgctaggcataattacctgtttgccatcgtcgcatcttgtctagatctaaataaaaccgaggtggaagacgcgatacttgaaggcaaccaaatcgagcgaatcgatcagttgttcgcggtgggcggtcttcgccacctgatgttctactatcaggacgtggaggaagcggagactggacaacttggctccctgggcggtgtgaacctggtgtcaggaaaaatcaagaagccgaaggtgttcgtgaccgaaggcaacgatgtcgcgcttactggtgtttgcgttttttttatacgcacagatccaagcaaggctattacacccgataacattcaccaggaggttagcttcaacatgttggatgccgctgatgggggtctgttgaactcagtccggcggttactgtctgacatattcatccccgccctgagggccacctcccacggttggggtgagctggagggtctgcaggacgcagctaacattcgccaggaatttctgtcctccttggaaggctttgtgaatgtgctgtctggagcccaggaatccctgaaagaaaaagtgaacctgagaaagtgtgatattctggagttgaagacacttaaggaacctaccgattacctgacccttgcaaacaatcccgagacactggggaagattgaggactgcatgaaggtgtggattaagcagaccgaacaggtcctggctgagaacaatcagctcttaaaggaggccgacgacgtaggcccaagggccgagttagagcattggaaaaaaagactgtctaagtttaactacctcctggagcaattgaagagccccgacgtaaaggcagtgctcgccgtgctggcggctgccaaatcaaaactgttgaaaacctggcgagaaatggacatcaggattactgatgcaacaaacgaggccaaggacaatgtaaagtatctgtacactctcgagaagtgttgtgaccccctctactcctctgaccctctgtcgatgatggacgctattccaacgctcattaacgccatcaagatgatttattccatttcacactattacaatacgtccgagaagatcacgtctctgttcgtgaaggtcacaaaccagatcattagcgcatgcaaggcttatatcacgaacaacgggacagcttctatttggaatcagccacaagacgtggtggaagagaaaatcctgagtgcgataaagttaaagcaggaataccagctgtgcttccacaaaactaaacagaagttaaagcaaaaccctaacgccaaacagttcgatttctcagaaatgtatatttttggaaaattcgaaacttttcacaggcggttagctaaaattattgacatcttcacgactctgaagacttatagcgtgctgcaggattctaccatcgagggtcttgaggacatggccacgaagtaccagggaatcgtggccacaattaagaagaaggagtacaattttctcgatcagcgaaagatggattttgaccaagactacgaggaattttgcaagcaaacgaacgacctccacaacgaactgaggaagtttatggacgtcaccttcgcgaagattcagaatacaaaccaggctctgcggatgttgaagaagtttgagcgcctcaatattccgaacctgggcatcgatgataagtatcagcttatattggagaactacggagccgacattgacatgatcagtaagctgtatacaaaacagaaatatgaccctccgctcgcccggaaccagccgccaatagccgggaagattttgtgggcacgccaactgtttcacagaattcaacaaccaatgcagctcttccagcagcacccagcagtcttgtccaccgctgaagctaaaccaataattcgtagctacaacaggatggcaaaagtgctgttggaatttgaggtattgttccacagagcctggctgaggcaaatcgaggaaatacacgtcggactggaagcttccttgttagtgaaagccccaggtactggggagctctttgtgaatttcgacccacaaatccttattctctttagggaaaccgaatgtatggcgcagatgggactggaggtctccccactcgcaacttccctcttccagaagagagacagatacaaaagaaactttagcaatatgaaaatgatgctggcagagtatcagagggtgaaatctaagatccccgccgcaattgaacaactgatcgtgccacacctggccaaagttgacgaggcactgcaacccggactggccgcacttacctggacgagtctgaacatcgaagcctaccttgaaaatacattcgccaaaataaaggaccttgagcttctgttggaccgggtgaatgatctaatcgagttccggattgacgctatcctcgaagagatgagcagcactccattatgccagctcccgcaagaggagcccctgacctgtgaggagtttctacaaatgacaaaagacctttgcgttaacggagcgcagatcctccacttcaaatcctccctcgttgaggaggctgtcaacgaattggtgaatatgcttttggacgttgaggtgttgtcggaggaagagtccgagaagatcagcaatgagaacagtgtaaactataagaatgagtcctcggcaaaacgcgaagaaggaaacttcgacactcttacatccagcatcaatgccagagccaacgcactgttattaacaaccgttacacggaaaaaaaaagaaaccgagatgctaggcgaggaagcccgggagcttctctcccattttaaccaccaaaacatggacgcattactgaaagtgactcggaacactctggaagctatccggaagaggatccacagcagccacactattaattttagggactccaattctgccagcaacatgaagcagaatagcctccctatttttcgggcaagcgtcactctcgctataccgaacatagtcatggcccctgccctggaggacgtgcagcagactctgaacaaggccgtggagtgcattatttccgtccctaagggagtccgccagtggtcgagcgagctcttaagcaagaaaaagatccaggagcgtaaaatggcagctctgcagtctaatgaagattccgactccgacgttgagatgggcgagaacgagctccaggatactcttgaaattgccagcgtgaacctgcccattccggttcagacaaagaattattataagaatgtctcggagaataaggaaatcgttaagctggtgtctgtactgagcacgataatcaactccaccaaaaaggaggtgatcacttctatggattgcttcaagaggtacaaccacatctggcagaagggtaaagaagaggccatcaagacgtttataactcagtctcctctgcttagcgagtttgagtctcagatcctgtatttccagaatctggagcaagaaattaacgccgaacccgagtatgtgtgtgttggctccatcgcgctttatactgccgacctcaaattcgcactcaccgcggagactaaggcatggatggtggtcattggccggcactgcaacaagaaatacaggagtgagatggaaaacatcttcatgctcattgaagagtttaacaaaaagttaaaccgacctattaaggatctggacgacatccggatcgctatggcagcccttaaagaaatccgggaggagcagatcagtatcgacttccaagtgggccccatcgaagagtcctatgcattactgaatagatacggtcttctaattgccagggaagaaatagacaaggttgacacactgcactatgcctgggagaagttgctagcgagggcaggggaagtccagaataaactcgtaagcttgcagccaagtttcaaaaaggagctaatttcagctgtcgaggtctttttgcaggactgtcaccagttctatctggattatgacctgaacgggcccatggctagcgggctaaagcctcaggaagcgagtgatagactgatcatgtttcagaatcagttcgataacatttaccgtaagtacatcacctacacaggtggcgaagagctctttgggctcccagccacccagtacccacaactgctcgagattaaaaaacagttaaacctactgcaaaagatttataccctgtataacagcgtgattgaaacagtaaatagctactacgatattttgtggagtgaagttaacatcgagaagattaataatgagttgctggagttccagaatcggtgcagaaagctaccacgagccctaaaggactggcaggcctttttggatttaaagaaaattatcgatgacttcagtgagtgctgccccctcctggagtacatggcaagcaaggccatgatggaaaggcattgggagcgaattacaacacttaccggtcatagcctggacgtgggaaacgagtcttttaaacttcgaaacattatggaagccccgctgcttaaatataaggaagagatcgaggatatctgtatcagcgccgtaaaagaaagagacatcgagcagaaacttaagcaggttataaacgaatgggataacaaaacattcacctttgggagctttaagacccgcggtgaacttctgctgagaggagatagtactagtgaaattattgctaacatggaggactctctgatgctgctgggttcactcctcagtaatcggtataacatgcctttcaaggctcagattcaaaagtgggtgcagtatctgagtaactctactgatattatagaatcctggatgacagtgcagaatctatggatctatctggaggctgtgtttgttggaggtgacatagcaaagcagctaccgaaagaagctaagagattcagcaacatagacaagagttgggtgaaaatcatgacccgcgctcacgaggtgccctccgtggtgcaatgctgcgtaggcgatgaaactcttgggcaattgctgccacacctgttagatcagctcgagatttgccaaaaatcactgacaggatatttggaaaaaaagcgcctgtgtttccctcggtttttcttcgtgtcagacccagctctgctggagattcttggccaggcgtctgacagtcacaccattcaggcccacttgctgaatgtatttgataacattaaatcagtgaaatttcatgagaagatctatgaccgcattctctccatcagcagtcaggagggcgaaaccattgagctagacaagccagtaatggccgaaggaaatgtggaggtctggctgaatagtcttctggaagaatcacagtcatcactccacctggtaattcgtcaggctgcagctaatattcaagagacggggtttcagctgacagaattcctcagctcctttcccgctcaagtcggcttgctgggcatacaaatgatatggacgcgggacagcgaggaagctcttcggaacgcaaaattcgacaaaaaaatcatgcaaaaaacaaatcaagcctttctcgagttactgaacaccctgattgacgtaacgacaagggacctgtccagcactgagcgagtgaaatatgagacactcattacaatccacgttcatcagcgcgatatcttcgatgacctttgtcatatgcatattaagagccctatggattttgagtggctgaagcagtgtaggttctatttcaacgaagattccgacaaaatgatgatccacattaccgatgtcgcatttatttaccagaacgagtttctcggatgtacagaccgtctggtcataacaccactcactgaccgctgttatattactctggcccaggctttaggtatgagcatgggtggagcaccagccgggcccgctggaacagggaagacggagactacaaaggacatgggccgatgcctgggaaagtacgtggtggtgtttaactgcagtgatcagatggactttcgtgggctgggccgtatcttcaaaggactagcccaatccgggtcgtgggggtgctttgatgagtttaatagaattgatttgcccgtgctctctgtggccgctcagcagatttcgatcatccttacctgtaagaaggaacacaaaaaatccttcattttcacagatggagacaacgtgacaatgaacccagaatttggcctgtttcttactatgaatcctggatacgctggcagacaagaacttcctgagaacctcaaaataaatttcaggagtgtggccatgatggtgccagacagacagatcatcattagagtaaagctggcctcctgcggctttatcgataacgtggtattagctcggaaattttttaccctgtataagctctgtgaggaacagctttctaagcaggtgcactacgactttggcctaaggaatatcctgagcgtgcttcgtaccttaggggctgcaaagagagctaatcctatggacacagaatccactattgtaatgcgagtgctgagggacatgaacttaagtaaactaattgatgaagacgagccactgtttctatctctgattgaggatcttttcccaaatatcctacttgacaaagccggttacccagaactcgaagccgccatctccaggcaagttgaagaagcaggcctgatcaatcaccctccctggaagctgaaagtgatccagctgtttgaaacacagagagtgcgccacggcatgatgacactaggtccttcaggcgctgggaagactacatgcatccacacattaatgagagcaatgactgactgtggaaaaccacacagagaaatgcgcatgaatcccaaagcaattactgcccctcagatgtttggtcgcctagatgtggccaccaacgattggactgatggtatcttcagcaccctgtggaggaaaaccctgcgtgcgaagaaaggcgagcatatatggataatactggatgggccagtggacgccatctggattgagaatctgaattccgtgttggatgacaacaagaccctgactctcgctaacggggaccgaatccctatggctcccaactgcaaaatcatctttgagccccacaacattgacaacgctagtccagctaccgtgagtcgaaatggaatggtgttcatgagctcatcaatcctggattggtcacccattcttgaaggtttcctgaagaagcgaagccctcaggaggccgagattctgcgccagctatacacagaaagttttccagatttgtacaggttctgtatccagaacctagagtacaaaatggaggtcctcgaggcttttgttattacccagtccataaacatgttacaaggtctcatccctctaaaagaacaaggaggggaggtgtcccaggcccacttaggtagactgttcgttttcgcacttctgtggagcgctggcgccgcacttgagctggacggtcgccgcagactggaactctggttgcgctcacgtcctactggcacactggagctgcccccccccgccggcccaggcgacacagcctttgattactatgtggcaccagatggaacatggacccattggaatactaggacacaagagtacctgtatccctctgatacaacgccagagtatggcagcattctggtgccaaacgtcgacaatgttcgcaccgattttctgattcagacaatcgccaagcagggcaaagctgtgctacttatcggggagcagggtactgctaaaaccgttatcattaaaggttttatgtccaaatacgaccctgagtgtcacatgatcaagtcactgaatttttccagtgcaacaactcctctgatgttccagcggacaatagaaagctacgtggataagagaatggggacgacctatggcccacctgcaggaaagaagatgacagtgttcattgatgatgtgaacatgcccattatcaatgagtggggagaccaggttacgaatgagatcgttcggcaactgatggagcagaatgggttttacaacctcgagaagcccggcgagttcacctcaattgtggatatacagttcctggcagcaatgattcaccctgggggaggacggaacgatatcccccagaggctgaagagacagttttcaattttcaattgcaccctcccatcagaggccagtgtggacaaaatctttggcgtgattggggtcggccactattgtacacagagaggcttttccgaagaagtgcgtgattcggtgacaaagttggtgccactcactcggcggctctggcaaatgacaaagattaagatgctgcctactcctgccaaatttcactatgtatttaatttgcgcgatctgtcccgcgtgtggcaaggtatgctaaatacgacaagcgaggtgattaaagaacccaatgacttgctcaagctgtggaaacatgaatgcaaacgggtgatcgccgatcgatttactgtctcatccgatgtgacgtggttcgataaagccctggtgtctttagtggaggaggagtttggagaggagaagaaactactggttgattgtggtatagacacctacttcgttgatttcttaagggacgccccggaggccgcaggggagactagcgaggaggcagacgccgaaacaccaaaaatttacgagccaatcgaatccttcagtcacctgaaggaacggctaaatatgttcttacagctttataacgaatctatccgaggggcagggatggacatggtcttctttgctgatgccatggtgcatctggtgaagatttccagagtgataagaacaccccaagggaatgccctgctggtgggcgtggggggttcaggcaaacagagtctgactcgacttgccagctttatcgctggatacgtgtcttttcagattaccttgacacggtcctataataccagcaatctaatggaggacctgaaggtgctatatcgaactgccgggcagcaaggtaaaggcattacatttatcttcacagacaatgagatcaaagatgagagttttctggagtacatgaataacgtgctatctagcggcgaggtgagcaacctcttcgcaagggatgaaatcgatgagattaactctgatctggcatcagtcatgaaaaaggaattcccgcggtgcctccctaccaacgagaatctccatgattactttatgtctagagtccgacagaacctgcatatcgtcctatgctttagcccagtgggagaaaagttcaggaaccgggcacttaagtttcccgctttaataagcggttgcactatcgattggtttagccggtggccaaaagatgccctcgtcgctgtgtccgagcacttcctgaccagttatgatatcgattgttccctggagattaagaaggaagtggttcagtgcatgggttccttccaggatggtgtggcggaaaaatgcgtggactactttcaaaggtttagaagatcaacacatgtgacgccgaagtcttacctgtcctttatccaaggatataaatttatatacggcgagaagcatgttgaggttcgaacactggcgaaccggatgaacactggcctcgaaaaactgaaggaagccagtgagtccgtggccgcattgtctaaagagcttgaggccaaggaaaaggaactgcaggtcgccaacgacaaggcggacatggtgcttaaggaggtcaccatgaaggcccaggctgccgaaaaggtcaaagccgaggtacagaaagttaaagacagggcccaagccatcgtggatagcatcagcaaggacaaggccatagccgaggagaagcttgaagccgctaaacccgctctggaggaagccgaagctgcccttcagaccattcgtccaagcgacattgctactgttagaaccctcggccgtccgccacacctaattatgcgtataatggactgtgttctgctcctcttccaacgcaaggtgagcgctgtgaagattgacctggagaagagctgtactatgccgtcatggcaggaaagcctgaaactcatgactgccgggaactttctccagaacctgcagcaattccccaaggacaccattaacgaggaggtcattgagttcctctctccttactttgagatgcctgactataacattgagacggccaagagggtgtgcggaaacgtcgcgggactgtgcagctggactaaagccatggccagcttcttttctatcaacaaagaggtactgcccctcaaagccaatctcgtggtccaggaaaacaggcatctgcttgccatgcaagatctgcaaaaagctcaggctgaattggacgataaacaggcggaactagacgttgtccaggcggagtacgaacaggcaatgaccgaaaagcagacactgctggaggatgccgagaggtgcaggcacaaaatgcagaccgcctctacattgatcagtggactcgctggcgagaaagaacggtggactgaacagagccaggaatttgccgcacagactaagagactggtcggcgacgtcttgctagcgaccgccttcctgtcttactctggcccctttaaccaggaattcagggatctcctattaaatgactggcgtaaggagatgaaggcaaggaagatcccatttggcaagaacctgaatctgtctgagatgcttattgacgccccaactattagcgagtggaaccttcaggggcttcccaacgatgacttatctatccagaatgggataatcgtaacaaaagctagccggtaccctcttttgatcgatccccaaactcagggaaaaatctggatcaagaataaagagtctcgtaacgaactccagatcactagcttgaaccacaagtacttccgcaatcatctggaggattccctgtccctcggcagaccattgttgatagaggacgtaggcgaagagttggaccctgcacttgataatgtgcttgagagaaacttcataaagacagggtcaacatttaaagtgaaggtgggcgataaagaagtcgacgtgctggacggatttcgcctatatattactacaaaacttcctaatcccgcttatacccccgaaatctccgctagaacttcgattatcgattttaccgttacaatgaaaggactggaagaccagctactgggacgagtaatcctcacagagaagcaagaactggaaaaagaacgaacacacctgatggaggatgtgaccgccaacaagagacgcatgaaggaattggaggataacctgttgtaccgtctgacctcaacacaagggagcctcgtggaggatgaatctttgatcgtggtcttgtcaaatacgaagaggaccgctgaggaagtcacacagaaactggagatatctgcagaaacggaggttcagattaatagcgcacgggaggaatatcgcccagtggctacgcgcggcagcattctttactttctgattaccgaaatgaggctggtgaatgaaatgtatcaaacgtccctgaggcagtttttagggctctttgaccttagtctggcccggagcgtgaagtcacccatcacatctaagcgaatcgcaaatataattgaacatatgacgtacgaggtgtataagtatgccgcacgtgggttatatgaagaacacaagttcctgttcacactactgttgaccctaaagattgatatacagagaaacagggtgaagcacgaagaatttttaaccctgattaaaggcggcgcctctctagatctgaaagcgtgccctcccaagccttccaaatggattctagatattacatggctgaacctggtggaactgagtaaactgaggcagttcagcgacgttctcgaccagatcagcaggaacgagaaaatgtggaagatatggttcgacaaagagaaccctgaggaagagcccctgcccaatgcctacgataagagcctggattgttttaggagattgctactaatcagatcatggtgcccggaccgcaccatcgcccaggctcgcaaatatatagtggacagtatgggagaaaagtacgcggaaggagtcattctggatctggagaagacctgggaggagagtgatccccgcaccccactgatctgtctgctctctatgggctccgaccccaccgattctattatcgccttaggaaagaggttgaagatcgaaacgaggtacgtctccatgggtcagggtcaagaggtgcacgcacgtaaacttcttcaacaaaccatggctaatggcggctgggctttacttcaaaattgccatctcgggctcgacttcatggacgagctgatggatattattatagaaaccgagctcgtgcatgacgcttttcgtctttggatgactactgaagcgcacaaacagttccctatcacgttactgcagatgtcgattaagttcgcaaatgaccctccgcagggcctccgcgcggggctcaagcggacttattctggggtatcccaggatctgctggatgtgtccagtggctcccaatggaaaccgatgctgtatgcagtagcattcttgcattctacggtgcaagagcgcagaaaatttggagcgcttggatggaacattccctacgaatttaaccaggccgattttaatgcgactgtccagttcatccaaaaccacctcgatgacatggacgtgaagaagggcgtaagctggaccaccatcaggtacatgatcggagagatccagtacggaggccgcgtaaccgatgattacgataagcggctcctgaacaccttcgcaaaagtctggttctcagagaatatgttcggacccgatttctccttctatcagggatacaacattcccaagtgctcaacagttgataactatttgcagtatatccagtccttgccagcatacgattcccctgaggtgtttggcctccatccgaacgcagatatcacatatcaatctaagctagcgaaggacgtcttggataccattctcggcatccaaccgaaggatacgtctggtggtggagatgagacccgggaggctgtcgtggccagactggccgatgacatgctggaaaagctgccccccgattacgttcccttcgaggttaaagaacgattgcaaaagatgggaccattccagcccatgaatatcttcctccgccaggaaatcgacaggatgcagagggtcctgtcgctggtgaggagtaccctgactgagctgaagctcgctattgatggcacgattattatgagcgagaaccttcgggatgccctggactgtatgtttgatgctcgcatcccagcctggtggaaaaaggcctcatggatttcctcaaccctgggattctggttcaccgagttgatagaaaggaacagccagttcacatcatgggtgtttaacggcaggccacattgtttttggatgacaggtttctttaaccctcagggtttccttaccgcgatgcggcaggagatcacccgggccaataagggatgggcactagacaacatggtgttatgtaacgaggtcacgaagtggatgaaagacgatatttccgcgccgcccactgaaggcgtgtacgtatatgggctatatctggagggggccgggtgggataagaggaatatgaagctgattgaatccaaacctaaagtactgttcgagctcatgcctgtcattcgcatatacgctgagaacaatactctacgggatccaaggttttatagttgtcccatttataagaaacccgttcggactgatctcaattacatcgccgcagtagatttgcgcacggctcagacgccagagcactgggtgcttaggggggtggcactcctgtgtgacgtgaaatag

SEQ ID NO: 115246 - DNA, 12477 bp, synthetic construct
  misc_feature 1..12477: note = Description of Artificial Sequence: Synthetic coding sequence
  source 1..12477: mol_type = other DNA
atgaccttccgagctaccgactccgagttcgatctgacaaatatagaagaatatgcagagaactcagcactctcgcgcctcaacaatatcaaggctaagcaacgcgtatcctacgtgacctccaccgaaaacgagtctgacactcaaatactgaccttccgccacatcaccaaagctcaggagaagacaaggaaacggcagcaaccaattaagctggagcctctgccagttcttaaggtctatcaggaccataaacagcctgaatacattcacgagcagaaccgcttccagctgatgacagcaggaataattaaacgtccagtttctatcgccaaaaagagttttgctacctctagcacccagttcctggagcaccaggatgctgtgaaaaaaatgcagattcatcgcccttacgtggaagtatttagcccatcacccccaaagcttccgcataccggtatcggcaaacgtggattattcggcactaggtcctcagcctaccccaagtacaccttccatgaccgggaagaggtggttaaggcaaacattcgggaccctctacagatcatcaagatcatacgggagaacgaacatctcggctttctgtacatgatccctgccgtcccacggtctagtattgagtacgacacatacaatttgaaagtcgtgagttatgaaaatatcaataagaacgactattacactatctctcagagggcagtgacccatatatataacgaggatatagaatttatcgaaattgatcggtgggagcaggagtatctgtatcaccgggaactgactaaaatcccaatattcagtctatttaggaaatggaaggccttttcagtttggcgcaaaaacgtacggtctaaaaaaatcacggggtgtcagaagtccctgcaaaagaatctcttcattgtcaatccgcacctgaggcccgctttgctcaaaatcaacgaattgtgctatcatctctcatttatggggttatgttacattgaaaagtgtcacacatacacgctgcaggagttcaaggcagcacaagtgattagactcgcggaggtcactgagaggttgggggagttccgaaacgaagccaaatacgtggttaggcgggcgtgtaggtttgccctacgggctgcgggattcgtgcctgacgactgcgcctttggcccttttgaggactatcacaaggtgcaaagcagcggaagttttatcaacacgcctcacgagcttcccacatatggcgactcggagaaaatgacatacacagaacaagcttccaagagacattattgtatgcggttgacttgcttcatccgcctcaacgattacctcattgaaaataccatgcacattctaacagtgaatgccgtcaactcactcttgaaccatctcaccgacaaattgaaaaggaccccgagcgccgacgtaattcagaagtggatcactgaagagaagccggaagtgcctgataaaaaaggcactttgatggtggagaagcaggaagaagatgagagcttgatccctatgttcctgacagagctgatgctaacagtccagtcattgctcttcgagcctagtctcgaggattttttagacggaattctcggcgcagttaatcattgccagaataccgtgctcagtgtgccaaacctcgtgcccgattcttactttgatgctttcacttccccatacataaacaataagttagaagggaaaacgtgcggaaccggcccaagcctggccgccgtctttgaagatgataagaatttccacacgattatctcacagatcaaggagactatccaggccgctttcgaatctgctaggatttacgcagctacctttgagaagttccaaatcttttttaaggaaaacgaaagcctggatctgcaggcgctgaaattgcaagagcctgacatcaacttcttttccgaacagctcgagaaataccataaacagcataaagacgctgttgcattacgacctaccagaaatgtgggactgctgctgattgataccagactcctgcgcgagaagctgattccatctcccctcagatgcttggaggtgctgaatttcatgctgccccgccagtctaagaagaaggtggatgcgatcatattcgaggcccaggatgccgaatacaagctggagttcgtgcccacaacaacgaccgagtatgtccacagcttgctgttcctggatgagattcaggaaagaatagagtctttggaagatgaggggaatattgtcacgcagatgtataagctcatggaacagtaccaggtgcctaccccacccgaggacttcgcagtgttcgctactatgaaacccagtatcgtggccgtgcgcaatgccatcgacaagagcgtcggcgaccgcgagtcttctattaaacagttttgtgtgcacttgggaagcgacctcgaggagttaaataatgaggttaacgaagttaagctgcaagcacaggatccccagatccttgatattagcgctgaccaggacaaaataaggctgattctcaacaatctgcagagcgttctggctgatctccagaaacgagcctttcagtacaagagttaccaaaagaactttaaggtggaagtgtccaaatttgaagcgttagaggaagtgtctgctgaattaaagttaaagcagctgctgtgggatagcttctccgagtgggacaagctgcagcaggaatggctgaagagcaagttcgactgtctcgatcctgaggttttaaacgggcaggtttcgaaatatgctaaattcgtcacacagctggagaaaggactgccgccaaacagtgtagtgcctcaattaaagtataaagtcgagaagatgaaagagaagcttccagtcattattgatcttagaaatcccacccttaaggccagacattgggccgctatcgaacagactgttgatgctactttggtcgacgcagaaattcctttgacacttgagagactctcccagctccacgtgtttgattttggacaggagattcaagatatttctggacaggcctccggagaggcagctcttgaggccatcttgaaaaaagtcgaggactcctggaaaactacagagttcgtcatcctgcctcatcgcgactccaaagacgtctttatattggggggaactgacgacatacaagtgctgctcgatgatagcacaatcaacgtggccactctggcctccagccggtacctaggccctctcaagactcgcgttgacgagtggcaaaaacagttagcattattcaaccagacccttgaggaatggctgacatgccagcgaaactggctctatctggaaagcattttcaatgcccctgacattcaaagacagctgcctgcagaggccaagatgttcctgcaagtggacaaatcctggaaggagattatgcgaaaggtcaatcggctgccaaacgccctgcgggctgctacacagccaggccttttagaaacatttcagaacaacaacgctcttctggatcagatccagaaatgtctggaagcatatctagaatctaaacgtgttatttttccaaggttctatttcctgtcaaacgatgagcttctggagatcctagctcaaacccgtaatccccaagccgttcagccgcacctgaggaagtgttttgacagcatatcaaagctcgagtttgcacttatgccacccgctgaagggaaaatccctggcattgatggagaaccggagaaagtgtataccaatgatattcttgcaatgctttcacccgagggcgaacgtgtctcacttggaaagggcttgaaagcacgcgggaatgtggaggagtggcttggtaaggtcgaggaggccatgttcacctctttgcgccgcctgtgcaaggcagcaattgccgactatcagggaaagcttagaaccgattgggtcgtggccgggcacccaagccaggttattttgacagtttctcagatcatgtggtgtagggatctcactgagtgtctggagactgaacactctaatcacattcaggcccttaagaacttcgaaaaggtcaactttgagagactgaatgccctggctgctattgtgcaggggagtctcccaaaactgcaccgcaacatcctgactgccttaataactatcgatgttcacgcccgcgacatcgtgactgagttagtccagtccaaagtggagactgtagagagctttgactggcagaggcagctcaggtactactgggatatcgatctggataattgcgtggcacgaatggctctgagccaatacacatatggatatgagtatctcggagcttgtccgagactggtcatcacaccactgactgaccgatgctacttgtgtttgatgggcgcgctccaactggatctcggcggtgcgcccgcagggcccgcaggtacaggaaagaccgagacaactaaagatctggccaaggcccttgctattcaatgcgtagtcttcaactgctccgacggcctcgactataagatgatgggtcgcttctttagcggcctcgcacaatccggagcatggtgctgcttcgacgagttcaaccggattgacatcgaagtgctgtccgtcatcgcgcagcagctgattactatcagaaacgccaaggccgcaaagctttcccggtttatgttcgagggacgagagatcaaactggtcatgacttgcgctgcatttatcacaatgaacccaggctacgcaggcaggaccgaactcccagataacttaaaagctcttttccgtccattcgccatgatggtcccaaactacgcactgattgctgaggtcattttgtactccgagggcttcgaatcttctaaaatcctagcgcgaaaaatgacccagatgtataagctctgcagtgagcagctgtctcagcaagaccactatgactttggtatgagggctgtgaaatccgttctcgtgatggccggtagtctgaaacgggagaaccctgatcttaacgaggatgtggttctcatcagggccctgcaggactctaatttacctaaatttttaactgatgacgcgctgctgttttccggtattatcagtgacctttttcccggcgtccagatccccgagcatgattacgggatcctccaatccactatcgttgatgttatgaacaggcagaatctgcagcccgaaatgtgtatggttcggaaagttattcagttctacgaaaccatgctggtaagacatggtgtgatgttagtgggaccaacaggcggaggaaagacaactgtgtataggatcctggccgaaaccctcggtaatctgcagaagttaggtatagaaaactcattctaccaagccgtcaagacatatgttctgaaccccaaatcaatcacgatgggggagctctatggtgaggtgaataaccttaccctggaatggaaagatggcctgatggcactttcagtccgtgccgctgtaaatgatacctctgaagaccacaagtggatcattagcgatggaccggtggacgctctgtggatagaaaacatgaacaccgtgctcgacgataacaagatgttatgcctagctaactctgagcgtatcaagctcactccccagattcatatgctgtttgaggtccaggacttgcgggtcgcttcccccgccacagtgagccgttgcggaatggtgtttgtggatccagaggagctcaaatggatgccgtacgtgaagacgtggatgaagggaatttctaaaaagctgacagaggaaacccaagaatacatcctgaacttgttccagcgctatgtggacgagggcttgcatttcatcaataagaagtgtagtcaggcaattccccaggtggatatctccaaagttaccacattatgttgtctcttagaatccctaatcctcgggaaagacggtgtcaatctcgctatggagcagactaagcttaatacgatactgtgtcaaacatttgtgttttgctatctgtggtcattgggcggcaacctcaccgagaactactatgattcattcgacacctttattagaacccagttcgatgataaccccgatgcaagactgcccaactccggagacctgtggtccattcacatggacttcgataccaaacgtctagatccttgggaacggatcatacctacattcaaatacaaccgggacgtaccattctttgagatgctggttcccaccacagacaccgtcaggtatggctacctcatggagaagttgcttgcggtgaagcatagtgtcctcttcaccggtatcaccggtgtggggaaaagcgttattgcgaaaggcttgctgaacaaaattcaggagtcagctgggtacgttccagtctacttaaacttcagcgcccagaccagctccgcgagaacccaggagattatagagtctaagctggaaagaaagagaaagaacatcttgggggctcccgggaataagagaatcgtgatcttcgtcgatgatctcaacatgccccgcttagatcggtacggttctcagccacccatcgagctattgcggcagtaccaggattttggaggtttttacgacaggaataagctcttctggaaggagatccaggacgtcacgatcatcagtgcttgtgctccacccggcgggggaagaaaccctgttaccccccgattcatccgtcatttttccatgctatgcctgccgatgccctcagagcattctcttaagcaaatctttcaggccatactgaatggctttctcagtgatttcccaccagcggtgaagcagaccgcttcatcgattgtcgaggccagcgtggagatatacaataagatgagcgtagatcttctgcctactcctgccaaatcccattatgtcttcaatctccgggatctttcaaagtgtgtacaaggaatactccagtgcgacccaggcactatccgggaggagatccagatctttagattgttctgccacgaatgccagcgggtgtttcatgatcgcttgattaacaacgaagacaagcattactttcatgtgatccttacagaaatggctaataagcatttcggcatcgccatcgatctggagtatttcctgaacaagccaatcatcttcggcgactttatcaagttcggtgctgataaggccgatcgaatttatgacgacatgcctgacatcgagaaaacagccaacgtgctgcaggactacctggatgattataacctgacaaatccaaaagaggttaagctggtttttttccaggatgctattgaacacgtcagccgcatagcacggatgataaggcaggagcggggcaatgctttgctagtgggagtcggaggcacagggaagcagtccctgactagactcgcggcccatatttgtggttacaaatgccttcagatcgaactcagtagagggtataactacgactcattccacgaggatcttaggaaattatacaagatggccggtgttgaggacaagaacatggtgtttctctttactgacactcagatagtggtggaggagttcctagaggacatcaataacatactaaacagtggggaggttccaaacctgtttgaaaaggatgaactggaacaagtcctggctgcaacgaggcctcgggccaaagaggtcggaatcagtgaagggaatcgggacgaggtttttcagtattttatttctaaggtgaggcagaaactacatatcgtgctgtgcatgtcacccgtcggagaagccttccgttccaggtgtcgcatgttccccagcctggtaaactgttgcaccatcgactggtttgtacagtggcctcgcgaggccctgctttcagtcagcaaaacttttttctctcaggtggacgccgggaatgaagagcttaaggagaagctgcccctgatgtgtgtgaacgttcatctgtctgtatcttctatggcagagcggtattacaatgagttgaggcgcaggtactataccaccccaacttcatatctagaattaatcaatctgtacctgagtatgcttagcgaaaagaggaaacagatcatctctgcgcgggaccgtgtcaaaaatggattgaccaagttactggaaacaaatattctggttgacaagatgaagctggatcttagtgcgctagagcccgttctgctcgcgaagagcgaagacgtcgaggcgctgatggagaaactggccgttgatcaggaatcggccgatcaggttcgcaataccgttcaggaagatgaagcaactgccaaggttaaggccgaggaaactcaggccatcgcagacgacgcccagcgggatcttgatgaagcattgccagccctggatgcagctaacaaggcgttggactccttagataaggcggacatctctgagatcagggtgtttacgaagccaccagacctggtaatgacagtgatggaagcgatctctattctcctgaatgccaagccagattggccaagtgccaaacagctgctgggagactccaactttctgaagaggctcctggagtatgacaaagagaatataaagcctcagattcttgctaaactccagaagtatattaataaccctgatttcgtgcctgagaaagtggaaaaggtgtctaaggcctgtaagtccatgtgcatgtgggtgagagctatggatctgtattccagggttgtcaaagtagtagaacctaaacgccagaagttacgcgcggcccaggccgagctggacataacgatggcaacactgcgcgaaaagcaggccttgctgcggcaggtggaggaccagatccaggctctccaggacgaatatgataaaggggtgaatgaaaaagaatctctggccaaaaccatggctctaacgaaggccaggctcgttagggctggaaaattaaccgcagctctggaagacgagcaggttagatgggaagagtctattcagaagttcgaggaggagatctcaaacataactggaaacgtatttatagccgctgcttgtgttgcatactatggtgcattcactgcgcaatatagacagagcctgatagagtgttggattcaggattgtcaatctctcgagattccgatagaccctagttttagtctgattaatatcctgggtgacccctacgagattcggcagtggaatactgacggactccctcgggatctgatcagcactgaaaatggcatcctcgtcacccagggtaggaggtggccactcatgatagatcctcaggaccaagcgaacagatggataaggaataaggagagcaagtctggcttaaaaatcattaagctcacggatagcaatttcctcaggatcctggaaaactcaattaggctgggccttcccgtgcttctcgaggagctcaaggagactttggatcccgccctcgagcctattcttcttaaacagatcttcatttccggcggacgcttattaattcgactcggcgacagtgatattgattatgataagaacttcaggttttacatgaccaccaagatgcctaacccgcactatctgcccgaagtgtgtattaaggtgaccatcattaacttcactgtgacaaagagtggtctggaggaccaattgctgtccgatgttgtgaggctcgagaaacctcgcctcgaggaacagcggataaaactgatcgtccgaatcaacaccgacaagaaccagctgaaaaccatagaggagaagattttaagaatgttgtttaccagcgagggcaatatcctggacaacgaggagcttatcgataccttgcaagacagcaagattaccagcggcgccataaaaacaaggctcgaagaggctgagagtacagagcaaatgatcaacgtggccagagaaaaatatcggcccgtcgccacccagggatccgtgatgtacttcgttatcgccagcctgagcgaaatcgacccgatgtaccaatactccctaaaatattttaagcagttgtttaataccaccattgagacttccgtgaagaccgagaatctccagcagcgccttgatgtcctgctcgagcagacactactgacagcatacgtgaacgtgagtagaggcctgttcgaacagcacaagttgatctacagcttcatgctgtgtgtggagatgatgcgccagcaggggacattatccgacgcggaatggaacttctttctgcgcggttccgcaggcctggagaaggagaggccacctaagcccgaggcaccatggttgccgaccgctacttggtttgcttgctgcgatcttgaagagagcttccccgttttccatgggctgacccagaacattctttctcatccaatttcaattcgcttgggatccttcgagacgtatataaatcctcagaaatgggagggctacagcaagatgaaacacgaggataaacacatgcggcaggagaaggaagccgctcaccaggatccgtggtctgctggactcagttccttccataaattgatactgatcaaatgctgtaaggaagaaaaggtggtgttcgctctcacagactttgtcattgaaaatctcggtaagcagttcattgaaacccctccagttgatttgcccacactctaccaggatatgtcctgcaacaccccactggtgttcatcctgtccacgggaagtgacccaatgggggctttccagcgattcgcaagagaatctggttatagcgaacgggtccagagcatcagccttggccaggggcagggacccattgctgaaaaaatggtgaaagatgctatgaagtctggcaactgggtattcttacagaactgtcacttggcagtgtcttggatgttggctatggaagagctgatcaagacatttactgatccggactctgcaatcaaagatactttcaggctctttctctcctctatgccatctaacacattccccgtgacggtgctccagaatagcgtcaaggtgaccaacgaaccacccaaggggctgagagcaaatataaggagagctttcacagaaatgaccccatccttctttgaagagaacatcctgggtaagaaatggcggcagatcattttcggaatctgtttctttcacgcaataatacaggaacgtaagaaattcggtccactcggctggaacatatgctacgagtttaacgacagcgatcgcgagtgcgcactcctgaacctcaaactttactgcaaggagggaaaaattccttgggatgctctcatttacattacaggggaaatcacgtacgggggtcgtgtaacagattcttgggaccagcgttgcctgcggaccatattgaaacgcttcttctcccctgagacattggaggaggattacaaatacagtgagtccgggatttatttcgccccaatggctgactctctccaggaatttaaggattatatcgagaacttaccactgattgatgatcccgaaatcttcggcatgcacgaaaacgctaatctggtcttccagtataaggagacctccacactgatcaatacaattctggaggtccagccccggtccagtacagggggggagggcaagtccaacgacgagatcgtccaagagctcgttgcgtctgtacagacccgggtgccagaaaagttggaaatggagggtgcctctgaatctcttttcgtgaaggaccttcagggacgactgaacagcctgacgaccgttctgggtcaggaagtcgatcgttttaacaacctgctgaaactgatacatacttcattggagactttaaataaagctattgccggattcgtggtcatgtccgaggagatggagaaggtatataactccttcctcaacaaccaggtgccagctttgtggagcaacactgcctatccctctctgaagcccctggggtcatgggtgaaggacctcatcttacgaacctctttcgtcgatctatggctcaaacggggccagccaaagtcttattggataagtggattctttttcccacaggggttccttacgggcactttacagaatcatgcccgcaagtataacctacctatagatgaactgagcttcaagtactctgttattcccacatacagggaccaggccgcggttatagaggccgctaaaactgtgcagtttggacaagagctcccaatggatatggagctcccatcaccggaggatggagtgctggtacacggcatgttcatggatgcgagcaggtgggatgataaggaaatggtgattgaagacgcactgccaggacaaatgaaccccgtacttccagtggtccacttcgaaccgcagcagaactacaaaccaagccccaccttgtatcactgcccgctgtataaaacaggtgctagagcaggcaccttgtctactaccgggcacagcaccaattttgtggttacggtcctgctgccttcgaagaggagcaaagactactggattgccaaaggatccgcccttctctgtcagcttagtgagtag

SEQ ID NO: 115247 - DNA, 12477 bp, synthetic construct
  misc_feature 1..12477: note = Description of Artificial Sequence: Synthetic coding sequence
  source 1..12477: mol_type = other DNA
atgaccttccgggcaactgatagcgagtttgatctaacgaatattgaagagtatgctgagaactccgctctgtcacggctgaataacatcaaagccaagcagagggtctcgtatgtgacctcgactgaaaatgagagcgatacgcaaatcctcacatttcgtcatattacaaaggctcaggagaaaactaggaaacgacaacagcctattaagctggagcctttgccagtgctaaaggtctatcaggatcacaaacaacctgagtacatccatgagcagaacaggttccagctgatgactgccggtatcataaaacgtccagttagcattgccaagaagtcctttgccacttctagtacacagttccttgaacaccaggatgctgtgaaaaagatgcaaatccaccggccttatgtggaagtgttctcgccttccccgcccaagctgcctcatactggaatcggtaagcggggcctattcggcactcgaagctctgcctatcccaagtacacattccacgatagagaggaagtagttaaagccaacatccgggatcccctccagataattaagatcattagagagaacgagcacctcgggttcctctacatgatccctgccgttcctaggtctagcatagagtatgacacttataacctgaaggtggtatcttatgagaacatcaacaaaaacgactattacacgatttctcagagggccgttacccacatttacaacgaggatattgaattcatagagattgaccggtgggagcaggaatatctttaccacagggagcttacgaagatcccaatcttttctctgttcagaaagtggaaggccttttctgtttggagaaagaacgtgcgctccaagaaaatcacaggctgccagaagagcttacagaagaatctcttcattgtcaaccctcatctgaggccagccttgctgaagatcaatgagctgtgttaccacctgagctttatgggcctgtgctacattgagaaatgtcacacctacaccttgcaggaatttaaagcagcccaggttatcaggctggccgaggtcacggaacgactgggagaattccggaatgaagcaaaatatgtggtgaggcgcgcctgcagattcgctctaagagccgccggctttgtacctgacgattgcgccttcggacctttcgaagattaccacaaagtccagagttctggtagttttatcaatactccccacgaacttccaacgtacggggacagcgaaaagatgacatatacggagcaggcttctaaaagacattactgcatgagactgacctgttttatccgattgaacgattatctgatcgagaacacaatgcatatccttacagtcaacgcggtaaactctctgttgaaccacttgaccgacaaactgaagcgaaccccttcggcggacgtgatccagaagtggattactgaggagaaacctgaggtcccggacaagaaaggaacacttatggtggaaaagcaagaagaggatgaatccctcatacccatgtttctcacagagctcatgctaactgtccagagtctgctgtttgagccaagtctagaagacttcctggacgggattctcggggctgtcaatcactgtcaaaatacagtcctgtccgtgccaaacctggtgcctgacagctactttgacgccttcactagtccatatattaacaataaattggaggggaaaacctgtgggactggcccatccctcgccgcggtgtttgaagacgacaagaatttccacacgatcatttcccagatcaaggagacaatacaggccgcattcgagagtgcccggatctatgccgccactttcgagaagtttcagatattttttaaggaaaacgagtcactcgatcttcaggccctgaaactccaggagcccgacatcaacttcttctccgaacaactggaaaagtatcacaaacagcacaaggacgcggtagcactgaggcccactcgcaacgtcgggttgcttcttatcgacaccaggcttctgcgcgagaagctgatcccatcgcccctacggtgtctggaggtgctaaatttcatgctgccacggcaaagcaagaagaaggtggacgctatcatcttcgaggcccaggatgctgaatataaactcgaattcgtccccaccactactaccgagtacgttcattcactgctctttttggatgagatccaggaacggattgagtccctggaggatgagggtaacatcgtgacccagatgtacaagcttatggagcagtaccaggtaccaacccccccagaggacttcgccgtatttgcaactatgaagccgagcatagtcgctgtgaggaatgctatagacaaaagcgttggggatagggagtctagcatcaaacaattttgcgtccacctgggcagtgatctggaggagctgaacaacgaggtaaatgaagtgaagctgcaggcccaagatccgcagatcttagacataagcgccgaccaagataagatcaggctcatcctcaacaacttacagtctgtcctggccgatctccagaaacgagcttttcagtacaagagttatcagaaaaactttaaggtagaagtatccaagtttgaagcgctggaagaggtgtcggccgagctcaagctcaagcaactcttatgggatagctttagcgaatgggataagcttcaacaggagtggttaaaatccaagtttgactgcctggatcctgaggtgttgaatggacaagtgtcaaagtatgccaaattcgtgacccagctggagaaggggcttcctcctaacagtgtggtgcctcagcttaaatataaagtcgagaaaatgaaggagaagctgcccgtgattatcgacctgagaaatcctactcttaaggcccgacattgggctgccattgagcaaactgttgacgccacgcttgtggacgcagaaatcccattgaccctcgaaagattgtctcaactccacgtcttcgattttgggcaggaaatccaggacatctctggccaggcttcaggggaggcggccttagaagcaattcttaagaaggtggaggatagctggaagacaacagagttcgtcatcctaccccaccgggattcaaaggacgttttcattcttggagggactgacgatattcaggtgctattggatgactcaacgatcaacgtcgccactcttgcaagcagtagatatctagggccgttaaagactcgcgttgacgagtggcagaaacaattggcccttttcaaccagactttagaagaatggcttacatgtcaaagaaattggctctatttggagtccatttttaacgccccagatattcagcgtcagctgcctgccgaggcaaagatgtttctgcaggtggataagtcctggaaagagatcatgcgcaaggtgaatcggctccctaacgcgctgagggctgcgacacagcccggtttacttgaaacattccaaaataataatgcccttctggatcagatacaaaaatgcttggaggcctatctcgagtcaaagagagtgattttcccgcgtttctactttctatcgaatgatgaactgcttgagattctcgcgcaaacccggaatccccaagctgtgcaaccccacctgcggaagtgcttcgactcaattagcaagttggagttcgctctcatgcctccggcagagggcaaaatccctggaatagacggagaacctgagaaggtctacaccaatgacatcctggcgatgctaagcccggagggagagcgcgtgtccttaggcaagggactcaaagctcggggcaatgtggaagaatggctaggcaaagtggaagaagctatgttcacctcactgcgcagactctgcaaagcggctattgctgattaccagggcaagctgaggaccgactgggtggtcgctggtcaccccagccaagttatccttacagtctcccagattatgtggtgtagggatttgaccgagtgtctggagactgaacattctaaccacattcaggcactgaaaaatttcgaaaaggtgaatttcgaaagattaaacgctcttgccgccatcgttcagggaagtcttcctaagctacatcgtaatatcctgaccgcactgatcactatcgacgttcacgccagggacatcgttaccgaacttgttcaatcaaaagtggaaacagtggagtctttcgactggcaacggcagctgcggtattattgggacattgatctggataactgtgtggccaggatggcgctttctcaatacacttatggatacgagtaccttggcgcatgtcccagactcgtcatcacacccctgacggaccgatgctacctgtgcctgatgggggcattacaactggacctgggtggcgcccctgctggccctgcagggaccgggaagaccgagacgacaaaggacctggccaaggccctagctatacaatgcgtcgtctttaattgctcagatggcctggattacaagatgatgggtagatttttctccgggctggctcagtccggtgcttggtgttgctttgacgaattcaaccggattgacatcgaagtgctcagtgttatagcacagcagctcatcacaattcgtaatgctaaggccgcaaagctctcacggtttatgttcgagggcagggaaatcaaattggtaatgacttgcgccgcatttatcaccatgaatccaggttacgcagggcggacagagctgcccgataacctgaaagcgttgttcaggccgttcgcaatgatggtgccaaactatgctctgatcgctgaggtgattctgtattctgagggatttgaatcttcgaaaatccttgcaaggaagatgacacagatgtacaaactgtgctcagaacagctgtcacagcaggaccattacgacttcggcatgagggctgtgaaaagtgttttggttatggccggatctttgaagcgagagaaccctgaccttaacgaagatgttgttcttattcgcgcactccaggatagtaaccttccgaagttcctgacagatgacgccttattgttctctggaataatcagcgatctgtttccaggtgtgcagatccctgagcatgattacggcatcctgcagtctacaatcgtcgacgttatgaaccgccagaacctgcagcccgagatgtgtatggtgaggaaggtgatccagttttacgaaaccatgctggtgaggcatggagtcatgctggtgggacctaccggtggcggaaaaaccactgtgtacagaattctggctgagaccctgggaaacttacagaagttgggcattgagaatagcttttatcaggcagttaagacatacgttcttaacccaaaatccatcacaatgggggagctgtatggtgaggtgaacaatctcactcttgagtggaaggatggactcatggcactgagcgtcagggcggccgtaaatgatacctccgaggatcacaagtggataatctctgatggccctgtggacgctctctggattgaaaatatgaacactgtgttggacgacaacaagatgctttgcctggcaaattccgaacggatcaagctcacaccgcaaatacatatgctgtttgaggtccaagatctccgcgtggctagccctgccaccgtcagccgatgtgggatggtgttcgttgaccctgaagagcttaaatggatgccttacgtgaagacttggatgaaggggatcagcaaaaaactcaccgaagagacgcaggaatacatcctgaacctttttcagcgctatgtggatgaaggtctgcacttcattaataagaagtgctcacaggcgattccccaggtggatatcagcaaagtcacaacactttgttgcctcctggaatcactgatcttgggaaaagatggcgtgaatcttgccatggagcaaaccaaattgaatacaatcctttgccagacctttgtgttttgctatctttggtcactcggcggaaatctcacagagaactactatgattccttcgacacttttattcggacacagttcgatgataatccagacgcaaggctacctaatagtggcgacctgtggagtatacacatggactttgataccaagcggctggacccctgggaacggatcatccccacttttaagtacaatagggacgtccccttcttcgaaatgctggtccccaccactgatactgttcgctatggatacctgatggagaagctgctggccgtgaagcatagcgtgttgtttacggggataaccggagtggggaagagtgtcatcgctaaaggcctgcttaataagattcaagaatctgccggatatgtgccagtttacctgaacttcagcgcccagacctcctcagcaaggacacaggaaatcatagaaagcaaactggagcgaaaacgcaagaacatcctgggagcccccggaaacaaacgcatagttattttcgtggacgatttaaacatgccacggctcgaccgctatggtagtcagccaccgattgagctactccggcagtaccaggacttcgggggcttctacgacagaaacaagctgttttggaaagaaatccaggacgtcactattatctcggcctgcgcccctcctggagggggacgcaacccggtgacacctagatttataagacatttttcaatgctgtgtctccccatgccttcggaacacagtttgaaacagatttttcaggcaatcttaaacgggttcctctctgattttccacctgcagtcaaacaaacagcaagctcaatcgttgaggcatcagtggaaatatacaacaaaatgagtgtcgacctgctcccgacacccgccaaaagtcactatgtttttaatctgagggacctgagcaaatgcgttcaaggaatcttgcaatgcgaccctggtaccatccgcgaagagatacaaatcttccggctcttctgccatgagtgccagcgggtcttccacgatcgcctgattaataatgaggataaacactacttccacgtaatcctcaccgaaatggcaaataaacactttggcattgctattgatttagaatactttcttaataagcccatcatattcggggactttataaagttcggagccgataaggctgaccggatctatgacgatatgcctgacatcgagaagacggctaacgtgctacaggattatctggacgattataacctcaccaacccaaaggaggttaagcttgtattcttccaggacgctatcgagcacgtgagtcggatagccagaatgatcaggcaggagcgggggaacgctctgctagttggggtaggcgggactggcaagcaaagcctcacaagactcgcggcccacatctgcggctataagtgcttgcagatcgaactctctagggggtacaactacgactcatttcatgaagatctacgaaagctctataagatggctggcgtagaggataaaaacatggtgttcctattcactgatacccagatcgtcgtggaagagttcctcgaggacatcaataacatactgaattcaggagaagtgccgaatttgttcgagaaggatgaactcgagcaggtcctggccgcaacacgtccacgggcaaaagaggtgggaatttcagagggaaatagagacgaagtgttccaatacttcatttctaaggtgcgccagaagctgcacatcgtgctttgcatgtcccccgttggagaggcatttcgctcacggtgcaggatgtttcctagtctggtcaattgctgtacaattgattggttcgtccagtggccccgggaagcccttttgagcgtaagtaagacatttttttcccaggttgacgcaggaaacgaagagttgaaggagaagcttccactgatgtgcgttaacgtccatctaagtgttagtagtatggctgaaagatactacaacgagctgagacgccggtactatactactcccacttcgtatttagagttaatcaacctttatctgagcatgctctctgagaagcggaagcaaattatctctgcgagagatagagtgaagaacggactcaccaaactgttggagacaaatatcctggtggacaagatgaagttggacctatcagcactggaaccagttttgctggcgaagtctgaagacgtggaagcattgatggaaaaactagccgtggaccaagagtcggcagaccaggtaaggaacacagtccaggaggatgaagctaccgctaaggttaaagctgaagagacccaggccatcgcagacgacgcccagcgcgaccttgatgaggccctgcccgccctcgacgccgccaataaagctctggactcactcgataaggctgatatctcggagatccgcgtgtttactaaacctcctgacttggtcatgaccgtcatggaagctatctccatactgttaaacgcgaagcctgactggccctccgcaaagcagctgctgggcgactccaacttcctcaagcgactattggagtacgacaaggagaatattaagccccagattctcgccaagctccagaagtacataaacaaccctgattttgttccagagaaagtagaaaaggtaagtaaagcatgcaagtcaatgtgtatgtgggtgagggcaatggatttatacagccgggttgtgaaggtggtggagcccaaacgccagaagctgcgcgcggcccaggccgaactggacatcaccatggcaactctcagagagaagcaagccttgctgcggcaggtggaagatcagatacaagctcttcaggacgagtatgataagggggtaaacgaaaaggaaagcctggctaagaccatggcattaactaaggcaaggctcgttcgtgcaggcaagctgacggctgcgctggaggacgaacaggttaggtgggaggagtcaattcaaaaatttgaggaagagatctccaatatcactgggaatgtatttatcgcggccgcttgtgtagcctattatggtgcttttactgcccagtaccgacagtccctgatagagtgctggatacaggactgtcagtctttggagatcccaattgatccaagtttctcactgatcaatattttgggcgacccctacgaaattaggcagtggaacactgatggattgccccgggatctgatttctaccgaaaacggcatactggttactcagggccgtcgctggcccctgatgatcgaccctcaagatcaggccaaccggtggatccggaacaaggagtctaaaagcggcctgaaaatcataaaactgacagattccaactttctgagaatcctagagaattcaatacggctggggctgcctgtgctcctcgaagaactaaaagaaacccttgatccagcactggaacccatcttgcttaaacagatttttatcagcggcggccgcctactgattcggctaggcgactccgacatcgactatgacaaaaatttcaggttctacatgactacaaaaatgccaaatccccactatcttcccgaggtctgtataaaggttaccattattaactttactgtcaccaaatcagggttggaagatcaactgctctcggacgtagtccggctcgaaaagcctcgtctggaggagcaaaggatcaagctgatcgtaaggatcaatactgacaagaatcagctgaaaacgatagaagaaaaaatcctgcgcatgctcttcacctcggaaggtaatattctggacaatgaggagctgatcgacacactgcaggattccaaaattaccagcggagcaattaagacgaggctcgaagaggctgagagtactgaacagatgataaacgttgcaagggagaaataccggccagttgcgacccaaggcagtgtgatgtactttgtgatcgcctccttgtctgagatcgatccgatgtaccagtacagtcttaagtactttaaacagctgttcaacaccacaatcgaaacctccgtcaagacagagaatttacagcagcgccttgacgttttgctagagcaaactctgctcaccgcttacgtgaacgttagcagagggctgtttgagcagcacaaattaatatatagctttatgttgtgcgtagaaatgatgcgtcagcaggggaccttgtctgacgcagaatggaatttctttctccgtggatctgccggccttgagaaggaacggccccctaagcccgaggctccatggctacccaccgctacctggttcgcctgttgcgacctcgaggagagctttccagttttccacggtttaacccagaacatcctctctcatcccatttctattagactcggctctttcgaaacttatattaatccacagaaatgggagggttattccaagatgaagcacgaagacaaacacatgcgccaggagaaggaagcagcccaccaggatccctggagcgctggattgagcagcttccacaagctgattctgataaaatgttgcaaagaggaaaaagtcgtatttgctctcactgacttcgtcatcgaaaatttggggaaacagtttatcgaaacccctccagtggacctgccaaccctctaccaagacatgtcttgtaacactcccctcgttttcattctctctactggctctgatcccatgggcgcatttcagcgctttgcaagagaatccggctatagcgagcgagttcagagcatatctttgggccaaggtcaggggccaatcgctgagaagatggttaaagacgccatgaaatccggaaactgggtatttcttcagaattgccatctggccgtgtcctggatgctcgccatggaagagctgatcaagaccttcacagatcccgatagcgcaatcaaggatacatttcgcctgtttctctcctctatgccaagtaacacatttcctgttaccgtactccagaatagcgtgaaggtgactaacgagcctcccaagggtttgagagccaacattagaagggcatttactgaaatgacaccatctttctttgaggagaacattctgggcaaaaaatggaggcagattatattcggcatctgctttttccacgcaattattcaggaacgtaaaaagtttggtccactgggatggaacatttgctatgagtttaatgatagtgacagggagtgtgcattgttaaatctgaagctctactgtaaggaagggaaaattccttgggatgcccttatttatatcacaggagagatcacttatgggggaagagtgactgactcctgggaccaaaggtgtctacgcaccatcctcaaaaggtttttcagccctgagacgcttgaggaggattataaatatagtgaaagcggcatctactttgcgccaatggccgattcgttgcaggaattcaaagattacatcgagaatcttcccttgatcgacgatcccgaaatcttcgggatgcatgaaaatgccaatcttgtgttccagtacaaggaaacctcgactctcatcaatactatcctggaggtgcagcctagatcgtccaccggaggagaggggaaatccaacgacgaaattgtgcaggaactagtggccagcgtgcagactcgcgttcccgaaaaactggagatggaaggagcaagtgagtccttgttcgttaaggacctgcagggtaggctcaactcactaactaccgtcctgggacaggaagtggaccgttttaataatttgttgaaactcatccacaccagtctggagaccctgaacaaagccatcgccggttttgttgtgatgtccgaggagatggaaaaagtctataattctttcctcaacaaccaagtccccgcgctctggtccaatacagcctatccgagcctcaaacccctcggctcctgggtcaaggacctgattctgcgaactagcttcgttgacctgtggctgaaaagaggtcagcccaagagttattggatctccgggttctttttcccacaagggttcctaaccggaactctgcaaaatcacgcccggaaatataatcttcctatcgacgagctctcttttaagtactccgtgatccctacctaccgagaccaggctgccgtgatcgaggcagctaagactgtgcagttcggtcaggagctacctatggatatggagctgcctagcccagaggacggagttttggtccacggaatgtttatggatgcaagccgttgggatgacaaggaaatggtgattgaagacgcactgcccgggcagatgaaccccgttttaccagtggtccacttcgagccacaacaaaattataaaccctcaccaaccctctaccactgccccctttataagactggagctagggccggaaccttgagcactacgggacacagcaccaacttcgtggtgactgtactgctgcccagcaagagatccaaagactattggatagcaaagggatccgctctgctttgtcagttatccgaatag

SEQ ID NO: 115248 - DNA, 7593 bp, synthetic construct
  misc_feature 1..7593: note = Description of Artificial Sequence: Synthetic coding sequence
  source 1..7593: mol_type = other DNA
atgacgttccgagccacggattcagaattcgacctgaccaatatcgaggagtatgccgagaattcagccctatcacgcctcaacaatatcaaggcaaagcagcgcgttagttacgtgacgagcactgaaaatgagagcgatactcagatcctgacctttcgccacattactaaagcccaggaaaaaacccggaaacgccagcagccaatcaaacttgagccccttcccgtccttaaggtgtatcaagatcataagcagcccgaatacattcatgagcagaacaggttccagctgatgacagctgggattattaaaagacctgtatccattgccaaaaagtcattcgccacctcgagcacacagttcctggaacaccaagacgctgtaaaaaagatgcagatccatcgaccctatgttgaggtgttctccccgtccccgcctaagctgccccatactggaattggtaagaggggactgttcggtacacgctctagcgcatatccgaaatacaccttccatgatagggaagaagtggtcaaagcgaatatcagggacccgctccagatcatcaaaatcattagggagaatgagcatctgggattcctgtatatgataccagccgtcccccgcagtagcatcgagtacgacacatataacctcaaagtggttagctacgagaacatcaacaaaaatgattattacaccatttcccagcgagcagttacccacatttacaacgaagatatcgagttcatcgagattgatagatgggaacaggaatacctgtatcaccgggagttgacgaaaattccaatattctcattgttccggaaatggaaagctttctctgtatggaggaagaacgtgcgctccaagaagattacgggatgtcaaaagtcattgcaaaaaaacctattcatagtcaatccacacctgcggcctgctctactaaagattaacgagctgtgttaccatcttagctttatggggctgtgttatatcgagaagtgccacacatacacgctgcaggagttcaaagcagcacaagtcatcagactggcagaggtgaccgagagactgggcgaatttcgtaacgaagccaagtacgtggtgcgaagagcctgcaggtttgctttgcgggccgccggtttcgtccccgatgattgcgcctttggccccttcgaggactaccacaaagtgcagagttccggctcattcattaatacacctcatgaactgccgacttatggggacagtgaaaagatgacctatacagaacaagcatccaagaggcattattgtatgaggctgacgtgctttataaggcttaatgactacttaatcgaaaataccatgcacattctcaccgtcaacgccgtcaatagcctgctcaaccatctgaccgacaaacttaagagaaccccatcagcagatgtgattcagaaatggatcaccgaggaaaagcccgaagttcccgacaagaaaggcacactgatggtcgagaagcaggaggaagacgagagccttatccccatgttcttgaccgagttgatgctcaccgtgcagtccctactgtttgaaccgtcacttgaggattttctggacgggatcctgggggccgtcaatcactgccagaatacagtattatcggtccctaacctggtgccagactcctactttgacgcgttcacatctccatatattaataataaactggaaggcaaaacatgtggaacaggaccttctctggccgctgttttcgaagatgacaaaaatttccacactattatcagtcagattaaggagacaatccaggccgctttcgagagcgcccggatctatgccgcgactttcgagaagtttcaaattttctttaaggaaaacgaatctctcgatctgcaagcgctgaagcttcaggagcccgacatcaattttttctctgagcaacttgaaaagtatcacaaacagcataaagacgccgtggccctaaggcccaccagaaatgtcggcctgctgctcattgatacccggctgcttagggagaagctcatccctagcccactcagatgcttagaggtgttgaactttatgctaccacgacagtcaaaaaaaaaagtcgacgcaatcatttttgaagcccaggacgcagagtacaagctagaattcgtgcctactacaacaaccgaatatgtccattccctgctgtttcttgatgagatacaggaaagaattgaatcactcgaggatgagggaaatatcgtgacccaaatgtacaaactgatggagcagtaccaggtgcctactcccccggaagacttcgccgtgtttgccacaatgaagcctagtatcgtcgccgtgcggaacgctatcgataaatcagttggggaccgcgaaagcagtatcaagcaattttgtgttcacttggggagtgatctcgaagagctaaataatgaggtcaacgaggtcaaactccaggcccaggaccctcagatcctcgacatttcagccgatcaagataaaatccgactgatattgaataatctgcagagtgttcttgcagatctgcagaagcgggccttccagtacaagtcctaccagaaaaacttcaaagtggaggtttccaaattcgaggctctcgaggaggtgtccgccgaacttaagctgaagcagttgctttgggactccttctcagaatgggacaagcttcagcaggagtggctcaaaagcaaatttgactgtttggatcctgaggtgctgaatggccaagtttctaagtatgccaaattcgttacccagttagagaaaggactgccccctaacagtgtagtaccccagctcaagtacaaggtggagaagatgaaggaaaagctgccagtgatcattgatttacggaaccccaccctgaaggctcggcactgggccgctattgaacagactgttgatgctacacttgttgacgccgaaatcccactaactctggagaggcttagtcagctgcatgtgttcgatttcggtcaagagatccaagacatctccggacaggcaagtggggaagccgccctcgaggccatattgaagaaggtggaggactcctggaagaccacagagttcgtgattctgccacatagagattctaaagatgtcttcattctgggaggaacagatgatattcaggtgcttcttgatgactcaactattaacgttgctacactcgcctcgtccaggtacctgggccccctgaagaccagagtcgacgagtggcagaagcagttagccttgtttaatcagactctggaggagtggctcacatgtcagcggaactggctctacttggagtctatttttaacgcccccgacattcaacggcaactgcctgcagaagctaagatgttcctgcaggtcgataaatcatggaaagaaatcatgcgcaaggttaatcgtctgcctaacgccttaagggctgcaactcagcccggactgttggagacttttcagaacaataatgccctcttagaccagatacagaaatgcctcgaagcctatctggaatcaaagcgcgtcatctttccccgattctacttcctgagcaatgacgagctgctggagatcctggcacagactagaaaccctcaagccgtccagccccacctgagaaagtgcttcgattccatttcaaagcttgagtttgctctgatgccaccagctgagggaaaaatccccgggattgacggcgagcccgaaaaggtttacactaatgatatccttgccatgctgtctccagagggagagcgggtcagcttgggcaaagggctcaaggcccgcggcaacgtggaggagtggctcgggaaggtcgaagaagctatgtttacctctctgagaagactgtgtaaggccgccattgcagactaccagggcaaactgagaactgactgggttgtagcaggacacccctcccaggtgatccttacagtgagtcaaataatgtggtgcagagacctgaccgaatgtctagaaacagaacattccaaccacatccaggccctcaaaaactttgagaaggttaactttgagcgcctgaatgcactagccgcaatcgtgcaggggtccctgccaaagctgcatcggaatatcctaaccgctctcattaccattgatgtgcatgcccgagatattgtgacagagctggttcaaagcaaagttgagacagtcgaatcttttgactggcagcgtcagctgagatactactgggacatagatctggacaattgtgttgcccgtatggccctttctcagtatacctacggatatgagtacctcggcgcctgcccacgcctggtgatcacgcctctcaccgaccggtgctacctgtgcttaatgggagcattacagttggacctgggcggggctccagcaggaccagccggaaccggcaaaaccgagacaacaaaagatctcgccaaagcactggctattcagtgcgtggtgtttaattgctctgacggactggactataaaatgatgggccgcttctttagtggactggcccagagcggtgcctggtgctgcttcgacgaatttaatagaattgacatcgaagtgttatccgtaatcgcgcagcagctcatcacgattcggaacgcaaaggcagccaagttgtcgagattcatgtttgaaggccgcgagattaaacttgtcatgacatgcgccgcgtttattactatgaacccaggctacgccggccggaccgaacttcctgataatctgaaggcgctttttaggccgtttgctatgatggtcccaaactacgcactaatcgccgaagttatcctgtactccgagggctttgaatcttccaagatcctggcacggaaaatgactcagatgtacaagctttgttctgaacagctgtctcagcaggaccactacgacttcggtatgcgagccgtaaaatccgtgctcgtgatggcagggtcactcaagcgagagaacccggatttaaatgaagatgtggttctgataagagccctgcaggattcaaacctccccaagtttctgactgacgacgcacttcttttttcaggcataatatccgacttatttcctggtgtgcagatcccagaacacgactatggcattttgcagtctaccatagtagacgtgatgaaccgtcagaatctgcagcctgaaatgtgcatggttaggaaggttattcaattttacgaaactatgctcgtccggcatggggtgatgctagtaggtcccaccggggggggcaaaaccacggtgtaccggatcctagcagagacacttggtaatcttcagaaattaggaattgaaaattccttctatcaggctgttaaaacatatgtgctgaaccctaagtcaattacaatgggagaattgtatggtgaggttaataacctgacccttgagtggaaagatgggctaatggccctgagtgtcagagctgccgtgaacgatacgtccgaggatcacaagtggattatcagcgatggtcctgttgacgccctctggatcgaaaacatgaatacggttcttgatgacaataagatgctgtgcctggcaaacagcgaacgcatcaagctcacgccacaaatccatatgcttttcgaggtgcaggaccttcgtgtggccagcccagccacggttagtaggtgcgggatggttttcgtagatcctgaggagctgaaatggatgccctacgttaagacttggatgaagggcatttccaagaagctcacagaggaaacccaggagtatatactcaatctgtttcaacgttacgtggacgaggggctgcacttcatcaataagaagtgcagtcaggcgattccgcaggtggacatcagcaaggtaacaactctgtgttgtttgctggaatcactgatcctcggaaaggacggcgtcaacctggctatggaacaaactaagctgaacacaattttgtgccagacgttcgttttctgttacctttggtctctcgggggcaatcttaccgagaattattacgactcatttgacaccttcataagaacccagttcgatgacaatcctgatgcgcgcctcccaaactctggcgatctgtggagtattcacatggatttcgacaccaagaggctggacccctgggaacgaattatcccaaccttcaaatacaaccgggacgttccctttttcgaaatgctggtgcctaccactgataccgtgaggtacgggtatctgatggaaaagctcctggccgttaaacactccgttctctttacggggatcaccggcgtggggaagagcgtgattgccaagggtcttctgaacaaaatacaggagagcgccggctatgtgcccgtatatctcaactttagcgcgcaaacgagctccgcaagaacccaggagatcattgagagtaagcttgagcggaagcgaaagaacattctaggcgcccctgggaacaagcggatcgtcattttcgtagatgacttgaatatgcccaggctcgatagatacggtagtcagcctcctatagagttactgaggcagtatcaagatttcggcggattttatgatcgaaacaagctcttttggaaagagattcaggacgtaaccatcatcagcgcctgtgcaccaccgggcggggggaggaaccccgttacgcctcgattcattaggcacttttcaatgttatgtctgcccatgccttccgaacacagtctcaagcaaatctttcaggcgattctgaacggctttctgtctgactttcctcctgcagtcaaacaaaccgccagttcaattgtggaagcttctgttgagatctacaacaagatgagtgttgacctcttgcccacccccgcaaagtcccattacgtctttaaccttcgggacttgtcaaagtgcgtccaggacaagcattttgggatagccatcgacttagaatacttccttaataagccaattattttcggagatttcatcaagtttggggcagacaaggcggaccgaatctatgatgatatgcctgatatcgaaaagactgccaatgtgctacaagactacctggatgattacaatttgaccaatcctaaggaagtcaaacttgtctttttccaggacgcaattgagcatgtgagtagaattgccaggatgattaggcaggagcgcggaaatgccctactggtaggtgtaggaggtaccggcaagcagtcgctcacccgcctcgcagctcacatctgcgggtataaatgcctgcagatcgaactgtctaggggatacaattacgacagctttcacgaggatttgcgcaagttatataaaatggctggagttgaagacaagaatatggtgttcctgtttaccgatactcagatcgtagttgaggagtttctcgaagatatcaataatattcttaacagcggagaggttccaaacctgtttgaaaaggacgagctggaacaggtattagccgctacaagaccacgcgcgaaagaggtgggcatctcggagggaaacagggacgaagtcggctgcgctagagttgtgatgtggctgtatcacaagaatgtgtcctctccctttatttag

SEQ ID NO: 115249 - DNA, 14088 bp, synthetic construct
  misc_feature 1..14088: note = Description of Artificial Sequence: Synthetic coding sequence
  source 1..14088: mol_type = other DNA
ggtgcagaggctccgccgtccaccgaagaggccgcacctccccgcagtgaggaggaggaagccccgcgccctcctacagtggaggctccagccgaagacgggttctcaccttcagccgaggacgcagtgtcatccgtggtcgattatcgcgatctgatcccaagcgaagaaggcatcgtcttgcccgatgatcacgaggccgatctgaatcgcgtaagacaaagactggcgccgcggccagtgcaaagcgttatctctgaggtgctgtctctaccctcctcacggagaagcagtagatatcgaagatccatgagtggactgcctaatttgcaggaaacgctgaaagaacggcaggcccgcttccgagaagcccgtgaaagtcggaggctgaaaatagacccttcatataagtacatctttgagatccttgctgagaacctcggtcttgacatagtcacggtggaggagctcatccttgattgtccaagtttggaagcattcaccaacttttttgctaaggacggatgtaaaaccctaaaattcctgtaccaagagggcgatgtgccaggaattgagtgcgggcgaacaatagccggcgccacaaaaggagccaagatgatgaaactctacatcgacaatgcggcgcctgacaaactgaaggggctgtgcattttctttgttaggtgcaggaacgacgtggccatcaatgtgaagaccatccaggaagaggccctcttcactgtattggacgccagcaaaggattactgaacgggatccgggatatgctcgccaacatcttcctacctgccgttctcgcaactaataactggggcgccttaaaccaaagcaaacagggcgagtcagaaaagcatattttcactgaaactattaatcgctatcttagcttccttgatggggctagaatttccattgagggcacagtgaagctcaaaacgatagacaacgtcaacttcagcaagcttcacacatttgaggaggtcacagcggcagcctcaaatagcgagaccgttcaccaactagaggaagtgttgatggtgtggtataaacaaatagaacaggtcctgatagagtcagaacagatgagaaaggaggctggagattctggtcccctgaccgagctcgagcattggaaaagaatgagcgctaagttcaactatatcatcgaacaaattaagggtccatcctgcaaagcggtgatcaatgtgctaaacgtggcgcatagcaagctgctcaagaattggcgagatctcgacgcccgaatcactgataccgctaacgagtccaaagataacgtaaggtatttgtacacgctggaaaaggtctgccagccactgtataaccatgacctggtgagtatggcccacggtatccagaatctgataaacgcaattcggatgattcacggcgtgagtagatattacaataccagcgaaagaatgacatctctgtttatcaaagtcaccaatcaaatggtgaccgcgtgcaaagcgtacattaccgatgggggattgaatcacgtgtgggatcaggagacgcctgtggtgcttaagaaaattcaggattgcatctttttgttcaaggaatatcaggccagttttcataaaactagaaagctcatcagcgaaagcagcggggaaaagagcttcgaggtttccgagatgtatatcttcggtaagttcgaggctttttgtaagcgcttagagaagatcacggagatgattaccgtggttcaaacttatagtacactgtctaattcaaccatcgagggcatcgatatcatggctatcaagtttcggaatatttaccagggcgtgaagaaaaaacaatacgatattctggatcccagaaggactgaattcgatacagactttctggatttcatgactaaaatcaatgggctggaggttcaaattcaggcgttcatgaattcatctttcggtaagatattatcctcacagcaggcgctgcagctgctgcaaagattccagaagctaaatattccctgtctcgggctggagatcaaccacacaatcgagagaattctgcagtattatgtggccgagctcgatgcaactaagaaactttatcatagtcagaaggacgaccctccactcgctaggaacatgcctcctatagcaggtaagatcctgtgggtcagacagctgtatcgccggataagcgaaccaattaattatttttttaagaactcagatatcctgagctctccagacggcaaagcggtgatccgtcagtataacaagatatcttacgttttggtagagtttgaggtggtttatcacacagcgtggatacgggagatcagccaactccattacgcccttcaggctactttatttgtgcgccatccagaaacagggaagttactggtcaacttcgacccgaaaatcctggaagtggtgcgggagaccaaatgtatgataaaaatgaagctggatgtccctgagcaggcaaagcgactcttgaagctagagagtaagttaaaggcagataagttgtatctacaggggctcctccaatactatgatgagctttgtcaggaggttccaagcgttttcgtaaacctgatgacgccaaagatgaaaaaggttgaatctgtgttaagacagggactcaccgtgctgacctggagctccttgacactggaaagtttttttcaggaggttgagcttgtgctggacatgtttaaccagttgctgaaaaaaatcagtgacctgtgtgagatgcacatcgacaccgtccttaaggagattgcaaaaacagtcctgataagtctgcccgagtctggggccacaaaggtcgaggacatgctcaccttgaatgagacctacactaaggagtgggctgacatcctaaaccataagtccaagcatgtcgaggaggcagtgagggagctcatttctatttttgagcaaatctatgaagtgaaatacaccggtaaggtgggaaagcagtccgaacagagaaagcacgtggtcttcggtagcgaaactggcgagggcgagaacaacgactacgaggccaacattgtgaacgagtttgatacccatgataaagaggatgaattcaaaaaggagtgtaaggaagtattcgccttcttctcacaccagctgctagacagcttgcaaaaagcaactagactgtcactggatacgatgaagaggcgaatctttgttgctagcctctacggtcgcaagcagtccgaggatattattagtttcatcaaatccgaggtgcatctggctatacccaacgtggtcatgatcccttccctggacgatattcagcaggctatcaatcggatgatccagctcacacttgaagtcagcaggggggttgcccactggggccagcagcagatccggccaatcaaaagcgtcataccaagccctacaacgactgacgtgacccaccaaaacaccggcaaactcctaaagaaggaggagcgtagctttgaagaagctattccagcacggaagttgaaaaacttttaccccggcgtggcggagcataaagatatctctaaactggtgctgctccttagttcatcagttaattcgctaaggaaagctgcgcacgaggccctgcaagacttccagaaatacaagaccttgtggaccgaagatcgggacgtgaaggtgaaagaatttctggctaacaatcccagcctgaccgagatccgatcagagatattgcattatgccacatttgagcaggagatcgacgaactgaaaccaattatcgttgttggggcactggagttgcatacagagcctatgaagcttgctctgtcgattgaggcaaaagcctggaagatgctcctgtgtcggtacttaaatgaggagtataagaaaaagatgtcctatatgatcgctttcatcaacgaatacttgaaaaaactgtctcgcccgattcgggacctggacgatgtacgcttcgccatggaagctctctcttgcatccgcgacaacgagattcaaatggatatgaccctagggcccattgaggaggcctatgccatcctgaacaggttcgaggtcgaggtgacaaaagaggagagcgaagccgtagacactctgagatactcattcaacaaactgcagtctaaggcggtctctgtgcaggaggatcttgttcaggttcagccgaaattcaagtcaaatctcctggagagcgtggaagtgtttagagaggacgtgatcaactttgccgaagcgtacgagctggagggccctatggtgccaaatatcccaccccaagaagcctccaataggttgcagatcttccaagccagcttcgacgacctgtggcgtaaattcgtgacatattcttctggggagcagttatttggcttgccagtgactgattatgaggtgctccacaaaactcgcaaggagctgaacctgttgcagaagctctacgggttatatgatacagtgatgagctctatttccggttattatgaaattctctggggagacgtcgatattgaaaaaatcaacgcggaactcttagagtttcagaatcgctgtaggaagttgccaaaaggcttaaaagactggcaagcattcttggaccttaagaagagaatagatgatttttctgagagctgtcccctgctcgagatgatgaccaataaggccatgaagcagagacattgggataggatttcagagttgacaggaactccctttgacgtcgagtccgactctttttgtttgcgtaatatcatggaggcgccactgctgaaacataaagacgatattgaagacatttgcataagcgcaattaaggagaaagacatcgaggccaagttaacccaggtgatcgagaactggacgaaccagaatttgtcattcgctgcctttaaaggaaagggggaactcctgcttaaggggaccgaatccggcgagattatcaccttaatggaagacagtctgatggtgctcggctccctgctgagtaaccggtacaatgccccgttcaagaaaaacatccagaactgggtttataaactgtccaccagctcagacattatcgaagagtggcttgtcgttcagaatctctgggtgtaccttgaagcggtgttcgtgggaggcgatatcgcaaaacagcttcctcaagaagctaaaagatttcagaacatcgataagagctggatcaagattatgcagagggcacacgagaatcccaatgtgatcaattgctgtgtgggggacgaaaccatgggccagctccttccacacctgcacgagcaactagaagtgtgccagaagagcctgaccggttacctggagaagaagcgcctgctcttccctagattcttctttgtcagcgacccagttctgctggagattctcggacaggcctcagacagccataccatccagccacacttgccggccgtcagcgacaacatcaatgaagtgacattccatgctaaagattacgatcgtatcatggccgtaatcagtagggaaggcgaaaagattgtcctcgacaattcggtgatggccaagggcccagtcgagatctggctgctcgatctcttaaagatgcagatgtcatcactgcataacattatcaggagcgcgttttatcagatatcggacagcgggttccagcttcttccgttcctgtcccattttccggcacaggtcggcctgttgggaatacagatgctatggacacacgactccgaagaggcactcagaaatgcaaaggatgatcgcaagattatgcaagtgaccaaccagaagttcctcgatattctgaacacccttatttcccagacaacccacgacctgtccaaatttgatcgggtgaaatttgagacactgatcactattcatgtgcaccaacgggatatattcgacgatctcgttaaaatgcatatcaaaagcccaactgacttcgagtggctcaagcaatctcggttttacttcaaggaggacctggatcagaccgtggtttctatcactgacgtggactttatttaccagaacgaatttttaggttgcacagatcgcctagtaatcacacctttgaccgataggtgctacattacgctcgcccaggccctcggcatgaacatgggtggagcaccagctggaccagccggcaccggtaagaccgagaccactaaagacatggggcgctgcttagggaagtatgtggtagtttttaactgcagtgatcagatggacttcagaggcttaggacggatttttaaagggctcgctcaatcagggtcttggggctgcttcgacgaattcaacagaatcgagttacccgttctatcagtggccgctcaacagatttatatcgtccttaccgcacgcaaggaacggaaaaaacagtttattttttccgacggagactgtgtggacctgaaccctgagttcgggatttttctgactatgaacccaggctacgccggtcgtcaggaattaccagaaaacttaaagattcagttccggaccgtggcaatgatggttccggataggcagattattatgcgggtaaagttggcaagttgcggattcctggagaacgttatcctagctcagaagttctacgtgctttacaaactgtgcgaagaacagctcaccaagcaagtgcactacgactttggtttgcgaaatatcctgtccgttctgcggaccctcggatcgcaaaagagagcccggcccgaagactccgagctctcaatcgtgatgcggggcctgcgcgatatgaatcttagcaagctggtggacgaggacgagccattattcttgtcattaattaacgatctgttcccggggctccagctggacagtaacacgtatgcggagttacagaatgctgtcgcccaccaagttcagatcgaaggccttataaaccatcccccctggaatctgaaactggtgcaattgtatgaaacctccctggtgaggcacggtctgatgactctggggccctcaggttccgggaaaaccaccgttatcactattttgatgaaggcacagactgagtgcggccgacctcatcgcgaaatgcgtatgaacccgaaggccatcaccgctccccaaatgtttggcagactcgacactgccaccaacgactggaccgatggcatcttttcaaccctttggagaaaaactctaaaggcaaaaaagggagagaatattttcctaatactggacggaccggtggacgctatctggatcgaaaatctgaatagcgttctagacgataataagacactcacactcgcaaacggcgacaggattcctatggcgcccagttgtaagctgctgtttgaggtgcataatatcgaaaacgcttcacctgctaccgttagccgtatgggcatggtctacatatcatcttccgcattgtcctggaggccaattttgcaggcctggctcaagaaaagaactgcccaggaggctgctgtgtttctcactctgtatgaaaaggtgttcgaagacacctacacatatatgaagctcaacctcaatccaaagatgcagcttctggagtgcaactatattgtgcaaagcctgaatttgctagagggacttatcccaagcaaagaagagggcggcgtctcctgcgtggagcatctgcataagctctttgtgttcggcctgatgtggtccctgggagccctgttagagttagaatcccgggagaagctggaagcctttcttagacagcacgaatctaagctggacctgccagagatacccaaaggttccaaccagacaatgtatgaattttatgtgacggattacggcgactgggagcattggaataagaagctgcagccctattactatccgactgatagcatccccgaatactcttcaatcctcgtgcctaacgtagataacattaggacaaatttccttattgatactatcgccaagcagcataaagccgtgctcctcaccggcgagcagggtaccgcaaagacagtgatggtcaaagcttatcttaagaaatatgacccggaggttcagctgtctaagagtctcaacttcagcagcgccacagagcccatgatgtttcagcggaccatagaatcctacgtcgataaaagaatcggctcaacatacgggccaccgggaggcagaaagatgacggtgttcattgacgatatcaatatgccagtgattaacgaatggggggaccaaatcaccaatgagatcgttcggcaaatgatggagatggaagggatgtacagcctggataagccaggagacttcaccaccatagtagacgtgcagctgattgctgctatgatccatcccggcggaggtcgcaacgatatccctcaaaggctgaagcgacaatttaccgtgtttaactgcacattaccatccaacgcaagcatagataaaatctttggaattataggttgcggttatttcgatccctgtcggagtttcaagccacagatttgcgaaatgatcgtgaacttggtgtccgttgggcgggtgctatggcagtggactaaggttaaaatgctgcccacccccagcaagtttcattacatatttaacctacgcgatctctcaaggatatggcagggaatgttaactatcaaggccgaggagtgtgccagcattccaacactgctgagcctctttaaacacgaatgttccagggtgattgctgatagatttattaccccagaagacgaacagtggtttaatgcccacctaaccagggccgtggaggaaaatatcggttccgatgctgcgtcttgtatactcccagagccatacttcgtcgatttcctgagagagatgcccgagccgacaggcgatgaaccggaggatagtgtgtttgaggtccctaaaatatacgagctgatgccatctttcgacttcctcgctgagaaattacagttttaccagcggcagttcaatgaaatcattaggggcacgagcctcgacctggtgttcttcaaggacgcaatgactcaccttatcaagatttcgaggattatcaggactagttgcgggaacgccctgctcgtcggcgtggggggatctgggaaacaaagcctctctcgcctcgcttcatttattgcaggctatcagattttccagataactcttaccaggagttataacgtgacaaacttgactgacgaccttaaagccttgtacaaggtcgccggcgctgacggcaagggaatcacgtttattttcaccgacagcgaaatcaaggacgaggcctttctggaatacctcaacaatctgctcagctccggtgagatctcgaacctattcgcgcgggacgagatggacgagattactcaaggcctgatctccgttatgaagagggagttgcctaggcatcctccgaccttcgacaacctctatgagtactttattagtcggtcacgaaagaacctccacgtcgtgctgtgtttttctcctgttggtgaaaaatttagggccaggtctcttaaatttccgggcttgatctcaggctgtactatggactggttcagcagatggccccgggaggctctaatagccgtcgcctcctatttcttgtcagactacaacatcgtgtgttcgtctgaaattaagcgccaggtggtggaaactatggggctgttccatgacatggtttccgaatcgtgtgagagttactttcagcgctatcgcaggcgagctcatgtgaccccaaagagctacctgtcgttcattaatgggtacaagaatatttacgctgagaaagtgaagttcatcaatgaacaggccgagcggatgaatatcggactggataaactcatggaggcttcggagagcgtcgctaagttgtctcaagaccttgcagttaaagagaaagagttagccgtcgcctcaatcaaggctgatgaggtgctggctgaagtgaccgtgtccgcacaagcatcggccaagatcaagaacgaggttcaggaggtgaaagataaagcccagaagattgtcgacgagattgatagtgagaaggtcaaagcagagagtaagctggaagcggctaaaccggcactggaggaagcggaagccgcattaaatactataaagcccaacgacatcgcaaccgtgaggaaattggcaaaaccgccccatcttattatgaggatcatggattgcgtcctgttgctgtttcaaaagaaaatcgatccagttactatggacccagagaaaagctgctgcaaaccttcttggggagagtctctcaagctgatgtccgccacgggattcctgtggtctctccaacagtttcctaaggataccatcaacgaggagaccgtggaactgttgcagccttacttcaacatggacgactacacgtttgagagtgccaagaaggtgtgtggtaatgtggccggcctgctctcgtggactctggccatggccatcttctatggtatcaaccgagaagtcctgccacttaaggcaaacctggccaagcaggagggcaggcttgccgtcgcaaacgccgaacttggaaaggctcaggcgctgctggacgaaaagcaagctgagcttgataaagtacaggccaagttcgatgccgccatgaacgagaagatggatctgctaaatgacgctgatacctgcaggaaaaaaatgcaagctgccagcaccctgatagacggtctgtctggggaaaagatcagatggacacagcagagcaaagagtttaaagcacagatcaataggttggtcggagatatattactctgcaccggttttctgagctacctcggtccatttaatcaaatattccgaaactatctccttaaagaccagtgggagatggagctgcgagcaaggaagattccctttacagaaaatttaaatctcataagcatgctggtggacccacctaccatcggggaatggggtctgcagggactgccgggcgacgacctgtccatccagaacggaatcatcgtcacaaaagcgactcgttaccccctcctgatcgatccacagacccaaggaaagacctggattaaaagcaaggaaaaggaaaatgaccttcaagtcaccagcctcaaccacaaatactttcgcactcacttggaggacagcttatctcttggccgccccctcttgatcgaggatatccacgaagagctagaccccgcattagacaatgtcctagagaagaacttcatcaagagcggaaccaccttcaaggtgaaagtgggtgacaaagaatgcgacatcatggacaccttcaaactctatattactacgaagttaccgaaccccgcgtttactccggaaatcaatgccaagacttctgtcatagattttaccgttacgatgaaggggctggagaatcagcttttgcgcagggtcatcctcacagaaaaacaggagctggaagctgaacgtgtcaagctgctggaagacgtaacgttcaacaagaggaaaatgaaggagttggaggataacctgctgtataagttatccgccacaaaggggtcgctggtggacgatgaaagtcttatcggagttttgcgtacaacaaagcagaccgctgcggaggttagtgaaaaattgcacgtcgccgccgagaccgagatcaagatcaacgcagcccaggaggagtttaggcctgctgcaacccgaggtagcatactctactttttaatcaccgaaatgtccatggtgaacatcatgtatcagacatctctggcccagttcctcaagctctttgatcaaagcatggcacggagcgagaagtctcctcttccacagaagagaatcactaatatcattgaatacctcacctacgaggtcttcacttactctgtgcggggactgtatgaaaatcataaatttctgttcgttttgctgatgactctgaaaatagacctacagagagggactgtcaaacatcgggagttccaggctctgatcaagggaggtgccgcactggacttaaaggcctgtccacccaagccctaccggtggattcttgacatgacatggttgaatctcgtggagctgtccaaattaccacaatttgcagaaattatgaaccagatcagccgcaatgaaaagggttggaaaagctggttcgacaaggatgctcctgaggaggagatcattcctgacggctataatgactcactggacacatgccacaagctgctcttgataagatcttggtgccctgataggactgtctttcaagcccggaaatacatcgccgattcgttagaagagaaatacacagaaccggtgattctcaacctggaaaagacctgggaagagtcagatacgcggactcccctgatctgcttcctcagcatgggaagtgacccaaccaaccagattgacgcactggctaaaaagctgaaactggaatgtagaactattagcatgggccagggacaggaggtacacgcacggaagctgatccagatgagtatgcagcaaggagggtgggtcctgttgcagaattgtcacctggggctagagtttatggaggagctcctggaaacacttatcaccaccgaggcgtctgatgatagtttccgcgtctggattaccaccgagccgcacgatcgcttcccaataaccctgctgcaaacatcactcaaatttactaatgaacctccacagggggtgagggccggcctgaaacggacatttgccggcataaatcaggaccttctggacatttccaacttgccaatgtggaaacctatgttgtacaccgtagccttcctgcactctaccgtgcaggaaaggaggaaatttggccccttgggttggaatatcccttatgaattcaactccgcggacttctcggcctctgtacagttcattcagaaccatctggatgagtgcgatataaaaaagggagtcagttggaacaccgtgcggtatatgattggggaagtgcaatacggtggcagggtcaccgacgatttcgataagagattacttaattgttttgcgagagtctggttctcagagaaaatgttcgaaccttctttctgcttctatacggggtataagatacctctttgtaagactctggatcagtacttcgagtatatccagagcctgccttctctcgataatcctgaagtgttcggcttgcatcccaatgccgatattacttaccagagtaacacagcatccgccgtcctcgagactatcacaaatatccaaccaaaggaaagtggtggaggcgttggggagaccagagaggcaatagtctaccgtcttagcgaggatatgctctcaaagctgccaccagactacatcccgcacgaagtgaaaagcagattgatcaagatggggcacctgaactcaatgaatattttcctgagacaggaaatcgaccgcatgcagagagtgatctccattttgcgcagctccctaagtgatctgaaattagctattgaaggcaccatcatcatgagcgagaacctacgcgatgctcttgataacatgtatgacgcccgcatcccgcagctatggaagcgggtcagctgggacagctctactctcggattctggttcaccgagctactagagcggaacgcccaattttccacttggatctttgagggacggcctaacgtgttctggatgaccggcttttttaaccctcagggctttctcaccgcgatgcggcaggaggtgactcgcgctcacaaggggtgggcgttggacaccgtcacgatacacaatgaagtgctccgccagactaaagaggagattacatccccgccaggtgagggcgtgtatatatacggcttgtatatggatggagctgcatgggataggcgcaatggtaagctgatggaaagtacccccaaggtcctgttcactcagctgcccgtgttacatatcttcgctataaatagtacagcccctaaggacccaaaactttatgtgtgtccaatctacaaaaaaccgcgacggactgatctgaccttcatcacagtcgtttacttaagaaccgtgctgtctcccgaccattggatactgagaggagtcgcgctgctgtgcgacattaagtag

SEQ ID NO: 115250 - DNA, 13473 bp, synthetic construct
  misc_feature 1..13473: note = Description of Artificial Sequence: Synthetic coding sequence
  source 1..13473: mol_type = other DNA
atgatgaagctgtacatcgataacgccgctcctgataagctgaagggcctgtgcatattcttcgttagatgtaggaatgatgtggcgattaatgtgaagaccatccaggaggaagcactgtttaccgtacttgacgccagtaagggtcttctgaacggtatccgagacatgttggccaacatcttccttccggccgttctcgccaccaacaattggggcgcactgaaccaaagcaagcagggggagtccgagaaacacattttcaccgagaccatcaatcgatacctaagcttcctggatggtgctcgcattagcattgagggaacagtcaagctgaaaaccatcgataatgtaaatttttccaaattgcacactttcgaagaggtgacagccgcggcctctaacagcgagacagtgcaccagctggaggaggttctcatggtctggtacaagcaaattgaacaggttctcatagaaagtgaacagatgagaaaagaggctggggactcagggcctcttactgaactcgaacattggaagcgtatgtctgctaagtttaattatatcatcgagcaaataaagggaccgtcctgtaaagcggtgatcaacgtcctgaatgtggcccactctaagttgctgaaaaactggagagacctggacgcgcgcattaccgatacggccaatgaatcaaaagacaatgtgcggtatctgtatacactggaaaaggtgtgtcaacccctgtacaaccatgatctggtctctatggcacatggcatccagaacctgatcaacgcaattcggatgatacacggggttagcagatattataacacatctgaacggatgacttctctctttatcaaagttacgaatcagatggtgacagcttgcaaagcatacatcacagatggcggactaaatcacgtatgggatcaggagaccccagtagtgctgaaaaagattcaggactgcattttcctgttcaaggagtaccaggccagtttccacaaaaccagaaaactcatttcagaatcgagcggggaaaaatctttcgaagtgagcgagatgtatattttcggtaaattcgaagctttttgtaaacggctggagaagatcaccgagatgatcaccgtagtgcagacatactctacactctccaattcaacgatagagggcatcgacatcatggcaatcaagtttcggaacatctatcagggagtcaaaaagaaacagtatgatatccttgatccaagacgaaccgagtttgacacagactttctggacttcatgacgaaaattaatggactagaagtgcaaatccaagcttttatgaactcatcgtttgggaaaattctgtcgagtcagcaggctttgcaattactccaaaggttccagaaactgaacatcccatgtctagggcttgagatcaaccatacaattgagcgaattctgcagtactatgtcgccgagttagacgctacaaagaagctgtatcactcccagaaggatgaccctcccctggcgaggaatatgccacctatcgccggtaaaattttgtgggtccggcagctgtacagacgaatttccgaacccattaattacttctttaagaatagtgatatcctgtcctccccagacggtaaggctgttattaggcagtacaataagatcagctatgtcctggtcgaattcgaggtggtgtatcatacagcatggatacgcgaaataagtcagctgcattatgctcttcaggccactctgtttgtccgccatcccgagacggggaaactgctcgttaactttgaccccaagatactcgaggttgtcagagagaccaagtgcatgattaagatgaagctggacgtgccagagcaggctaagagacttctgaagctggagagcaaactgaaagctgacaaattatacctccagggactactgcagtactatgatgagctatgtcaggaagtgcccagcgtattcgtgaatctgatgactccaaagatgaaaaaggtggaatccgtcctgcggcaggggcttacagtgctgacctggagctcacttacattggaaagcttcttccaggaggtcgagcttgtcctggacatgtttaaccagctgctaaagaagatcagtgatctgtgtgagatgcacattgacacagttcttaaagagatcgcaaagaccgtgctgatatcgctgcccgagagtggggcgacaaaagtggaagatatgctaacgctcaatgagacctacaccaaggagtgggctgatatcctgaatcacaaatctaaacatgtcgaggaagccgtccgggaactgatttctattttcgagcaaatttacgaggtaaaatacactggaaaagtgggtaagcaatccgaacagcgaaaacacgtcgtgtttggcagtgagaccggggaaggcgagaacaacgattacgaggcaaatattgtaaatgagtttgacactcatgacaaggaagacgaatttaagaaggaatgcaaggaagttttcgcgtttttcagccaccagctgcttgatagcctgcagaaagccacaaggttatctctggatacgatgaagcgtcgcatcttcgtcgcaagtttgtacggacgcaagcaaagtgaagacatcatctcttttatcaaatctgaggtccacctggcaatccccaatgtggtaatgatccccagcctggatgacattcaacaggccatcaaccgtatgattcaacttaccctggaggtgtctaggggggtggcccactggggtcagcagcagattcgcccgataaagtcagtgattccgagccccaccaccacagatgtgacacaccaaaataccggtaagttgctgaagaaggaagagcgcagcttcgaagaggccatacctgctcgtaaactgaagaacttttaccctggagttgcagaacacaaggatatcagtaagctagtcctgttgttgagttcaagcgtaaatagcttacggaaggctgctcacgaggccttgcaggacttccagaagtacaagactttgtggactgaggaccgcgatgttaaggtgaaagagttcctggccaataatcctagcctcacagagatccgcagcgagattctccactatgctactttcgagcaggagattgacgaactgaagcctatcattgtggtcggggctctcgagttgcacacggagccaatgaagctggctttgagcatcgaggccaaggcatggaagatgctcttatgtagatacttaaatgaagagtacaagaagaagatgtcatacatgatagccttcataaacgagtacctgaagaagctgagtcgacctatccgcgacctggacgatgtgcgctttgccatggaagcactctcttgcattcgcgacaatgagattcagatggacatgaccttgggcccgattgaagaggcttatgcaattttgaacagattcgaggtggaggtaacgaaagaagaatctgaagccgttgatacactgagatacagcttcaataagcttcaatcaaaagccgtgtccgtgcaggaggatctggtgcaggtccagcctaagtttaaatcaaatctcctggaaagtgttgaagtgtttagggaggacgtgattaattttgccgaagcttatgagctggaggggcccatggttcccaatatcccgccccaggaagcctccaatcgcctccagattttccaagctagctttgatgatctttggaggaaattcgtgacctactcatccggcgagcagctctttggacttcctgttaccgattatgaagtgctgcataagacccgcaaggagctgaacctactgcagaagctgtatggcctgtacgatacagtgatgagtagtatctcagggtattatgaaattctgtggggggacgtcgacatcgagaagatcaacgcggaactccttgaattccaaaatcggtgtcggaagcttccgaagggtctgaaggactggcaggccttcttggacctcaagaaaagaatcgatgatttttcagagagttgccccctattggaaatgatgacaaacaaggcaatgaaacagcggcactgggatagaatcagtgagctcaccgggactccctttgacgtggagtcagactcattttgcctgaggaatattatggaagcccctcttttaaaacataaggacgatatcgaggatatttgcattagcgccatcaaagagaaggatattgaggctaagctgacgcaggtgatcgaaaactggacgaatcagaacctcagctttgcagcctttaaaggcaagggcgaactgttgctcaaaggtacagaatccggagagattatcaccttgatggaagattccctgatggtgcttggcagtctgctcagtaacaggtacaacgctcccttcaaaaagaatattcagaactgggtatataaattgagcacttcttccgacatcattgaagaatggctcgtggtccagaacctgtgggtgtacctggaggctgtgttcgtcggcggtgacatagccaaacagcttcctcaagaagccaaacggtttcagaacatcgacaagagctggatcaaaataatgcaacgggcccatgaaaatcctaacgtgatcaactgttgcgtcggggatgagacaatgggacagctcctcccccatctacacgagcaactcgaagtgtgtcaaaaatcgcttaccggttacctggagaaaaagcgcctgctgttccccaggttcttcttcgtgtccgaccccgtcctcttagagatactagggcaggcctctgacagtcacacgattcagccacatctgccagccgtatctgataacatcaacgaggtgacattccatgccaaggattatgatcgaatcatggccgtgatttctcgggaaggggagaaaatcgtcttggataattccgtgatggccaagggtcctgtggagatatggctgctcgaccttctgaaaatgcaaatgtcatctcttcacaacataatcagatcggccttctaccagataagcgattccggtttccagctactgccctttctcagtcattttcctgctcaggtcggtttgctaggaattcaaatgctgtggacccacgacagcgaggaggccctgcggaacgctaaggacgatcgtaagatcatgcaggttactaaccagaaatttctcgacattcttaacaccctgatctcgcagacaacccacgacctgagtaagttcgaccgagtcaagttcgaaacccttattaccatccatgtccatcagcgcgacatctttgatgatctggtgaagatgcacataaagtcccctacggacttcgagtggctaaagcagagccggttttacttcaaagaggatctcgaccagaccgtagtgagcataaccgacgttgatttcatctatcagaatgagtttctgggatgtactgaccgcctggtcataacccctttaaccgatcggtgttacataaccctggcccaagcgttaggaatgaacatgggaggagcacccgctggacctgccggaacaggaaagaccgagactaccaaggacatgggaagatgtctgggtaagtacgtggtcgtgtttaattgtagtgaccagatggattttcgggggttaggacggatctttaagggtctcgcccagtctgggtcatgggggtgttttgatgagtttaacaggattgagctgcccgtactgtcggttgcagcccaacaaatatatatcgttctgacggctaggaaggagcgtaagaaacaattcatattttctgacggggactgtgtggatttaaaccctgagttcggaatcttcctgacgatgaatccgggttacgcgggccgtcaggagctacccgagaacttgaagatacagtttcgaactgtggccatgatggtgcccgatcggcagattattatgagggttaagttagccagttgcggtttcctagaaaatgtcatactggctcagaagttctatgtgctgtacaaactatgcgaggaacaactaaccaaacaagtccattacgactttgggctccgtaatattttatccgtgctcagaacattaggaagccagaagagggcaagacccgaggactctgagctgtctatcgtgatgagaggtttgcgggatatgaacctgtccaagctcgtggacgaggatgaacctctcttcttgagcttgatcaacgacttgtttcccggtctgcagcttgattcaaacacttatgccgaactccagaacgccgtggcacaccaggtccagatcgaaggattgattaatcacccaccgtggaaccttaagctcgttcagctgtacgaaacttccctcgtgagacacggtcttatgacgctcggacctagtggaagtgggaagacaacagttattaccattctgatgaaggcacaaacagagtgcggaaggccccaccgtgagatgaggatgaaccccaaggccatcactgcccctcagatgtttgggagactagacactgcaactaatgactggactgatggcatctttagtaccctctggcgaaaaaccctgaaagctaagaaaggcgaaaacatctttctgatcctggatggacctgtcgatgcaatatggatagaaaacctcaacagcgtgctggacgacaacaagaccctaacactggcgaatggcgaccgaatccccatggccccctcttgtaaactgctgttcgaggtgcataacatcgaaaacgccagccctgcaacagtgagtcgcatgggaatggtatacatcagttcttcggccttgtcctggaggccaatccttcaggcctggctcaaaaagaggactgcacaggaggccgcagtatttctaaccttatacgaaaaagtctttgaagacacctatacctacatgaagctcaacctcaaccctaaaatgcaacttctggaatgtaattatatcgtgcagtctttgaacctgcttgagggactgatccccagtaaagaagagggtggcgtgagctgtgtagaacacctgcacaagctgtttgtattcggactgatgtggtcactcggtgctcttctggaattggagtcccgcgaaaaactggaagccttcctacgccagcatgagagcaagctggacctgcctgagatccctaagggttctaatcagactatgtacgagttttatgtgacagactatggcgattgggagcactggaataaaaaacttcagccgtactactaccctactgattctatcccggaatactcgtcaattttagtacccaacgtggataatatccggacaaatttcctaattgatactatcgcaaaacaacataaagcagttctgttaacaggtgaacaggggacagcgaagactgttatggtgaaagcgtacttgaaaaagtacgatcctgaggtacagttgtctaagtccctcaacttctcctccgccaccgagcctatgatgttccagagaaccatcgaaagttatgtggataagcggatcggctcaacctatggtcctcccggaggccgcaagatgactgtgttcatcgatgatattaacatgcctgtcattaacgaatggggggatcagataacaaacgaaatagtacgacagatgatggagatggaaggtatgtacagcctcgataagccgggggacttcaccactatcgttgacgtacagctcattgctgctatgatccatcctggtggcgggagaaacgacataccccagcgcttgaagagacagtttacagtatttaactgtaccctgccttccaatgcgtctattgataaaatatttggcattataggctgtgggtactttgacccttgccgcagctttaagccccagatttgcgagatgatcgtgaacttggtttcagtgggcagggtgctgtggcagtggactaaagtgaagatgctgcctactccatccaaatttcattatatttttaatctccgcgacctgagcagaatttggcaaggaatgcttacaataaaggccgaggagtgtgcctccatcccaacgttgcttagtctgttcaaacacgagtgctcacgagtgatcgccgaccggtttatcactcccgaggacgagcagtggtttaacgcccacctgacacgcgcagttgaagaaaatattggcagtgatgccgcaagctgtattttacccgaaccatactttgtcgactttctgcgggaaatgccagagcccactggggacgagcccgaagatagtgtattcgaggttccgaagatctacgaattaatgccctcgttcgatttcctggctgagaaactccagttctatcaacgacaatttaacgaaattatccgggggacttcccttgacctggtattttttaaagatgctatgacccacctaatcaaaataagcagaatcattcggaccagctgcgggaacgccctgttagtcggcgtgggcggatccggcaaacaatcattgtctagattggcaagttttatcgccggctaccagattttccagataaccctgacaagatcttacaatgtcacaaatcttactgacgatcttaaggcactttacaaggtggccggggcggacggaaagggcattaccttcatcttcactgacagtgaaatcaaagatgaggcctttctcgagtacttgaataacctactgtcttcaggggagatctctaatctttttgctagagacgagatggacgagattacccaaggcctcatctctgttatgaaacgcgagttgcctagacaccccccaacttttgacaacctgtacgagtacttcatcagccgcagtcgcaagaatctacacgtagtgctttgcttttctcctgttggagagaagtttcgagctagaagcctgaagttcccgggacttatctccgggtgcactatggattggttctccagatggcctcgggaagccctgatcgccgtggcctcctacttcctgtcagactataatattgtgtgtagtagcgagataaaacgccaggtggtggagacaatgggactgttccacgatatggtctctgaatcctgtgagtcgtactttcagaggtatagacggcgcgcgcatgtgactccgaagagttaccttagttttatcaacggctacaagaacatttacgcagagaaggtgaaattcatcaatgaacaagccgaacgtatgaatatcggtctggataaactgatggaggcctctgaatccgtcgcgaagttatctcaagatcttgcggtgaaggaaaaggagctcgctgttgcgtctataaaggcggatgaggtcctggccgaggtcaccgtgtcagcccaggccagcgcgaagatcaaaaacgaggtgcaggaggtgaaagacaaggctcagaagattgtggacgaaatcgacagtgagaaggtcaaggctgagagcaaactagaggcagccaagcctgcactcgaagaggccgaagcagccctcaatacgatcaagcccaatgatatcgccacagtgcgcaaactggccaagcctcctcatctgatcatgaggatcatggactgtgttctcttgctgtttcaaaaaaaaatcgatccagtcacaatggatcctgaaaagtcctgctgtaagccatcctggggtgaatctctgaagctcatgtccgccacgggctttctctggagcctgcagcagttccccaaagatacaatcaacgaagagactgttgaactgttacaaccctacttcaacatggacgattacacttttgagtctgcaaagaaggtgtgcgggaacgtagccgggctgcttagttggaccctggcaatggcaatcttctatggtatcaatcgggaggttttgcctcttaaagccaatctcgcaaagcaggaaggtagactcgccgtggccaatgccgaattagggaaagctcaggccctgctggatgagaagcaggcggagctagataaggtacaagcaaaattcgatgccgctatgaacgagaaaatggacttgcttaacgacgcggacacatgtcgtaaaaagatgcaggcagccagcacactgatcgatggcctgtctggtgagaagattaggtggactcagcaatccaaggagtttaaggcccagatcaacaggctcgtcggggacatactgctctgtacgggttttctgtcctacttaggcccttttaaccagatttttagaaactatctactgaaagatcaatgggagatggagttacgagcccgcaagattccgttcacggagaatctaaacttgatcagcatgctggttgacccccctacgataggggaatgggggctccagggccttccaggcgatgatctgagtatccaaaatggcattatcgtcaccaaagccaccagatatccactgctgatagacccccagacgcaggggaagacttggattaagtctaaggagaaggaaaatgatctacaggtgaccagcctaaatcacaaatatttcagaacccacctggaggattcgctgagtctgggtaggccattgcttatcgaggatattcacgaggaattagatcctgcattggacaatgtccttgagaagaatttcatcaaaagcgggacgaccttcaaagtgaaagtgggagacaaagagtgcgatataatggatacttttaaactatacattaccactaagttgccgaacccagccttcacacctgaaattaatgccaaaacctccgtgattgattttactgttaccatgaagggactggagaaccagctgttgcgaagggtcattctaacagagaagcaggaacttgaagcggagagagttaaacttctggaagatgtaaccttcaataagcgaaagatgaaggaactcgaagacaacctcttgtataaactgagcgcaacaaagggctctttagtggatgatgaaagcctgattggggtcttgagaacaaccaagcagacagccgcagaggtctccgaaaagctacatgttgccgcagaaaccgagataaaaataaacgctgcacaagaggaattcagaccagctgccactagggggagcattctgtacttcttaataacggagatgtcaatggtgaacataatgtaccagacttccctggcacagttcctgaaattgttcgaccagtcaatggcccggagtgagaagtccccactgccccagaaacgaattacaaacataatcgagtatttgacctatgaggttttcacctacagcgtgcgcggcctgtacgagaatcacaagttcctttttgtcctgctgatgactctcaaaattgatcttcagaggggcacagtgaagcacagagagttccaggcactgatcaaaggcggcgcagctctagatctgaaggcctgcccacctaaaccatatagatggattcttgatatgacgtggcttaacttggtggaactcagcaaactaccacagtttgctgagatcatgaatcagatctcccgaaacgagaaggggtggaagtcctggttcgataaggacgctccagaggaggagatcatccccgatgggtacaatgattctctggatacatgtcacaagctcctcttgatccggtcttggtgccctgacaggacggttttccaagcccgcaaatacattgcggacagcctagaggagaaatacacggagcccgtgattttgaacctcgagaaaacatgggaggaaagtgatacacgtacacctctaatctgttttttgagcatgggcagtgaccctaccaaccagatagatgccttggccaaaaagttgaagctcgagtgtcggaccatctctatggggcagggtcaggaagtgcacgcccgcaagcttattcagatgtccatgcagcaggggggttgggttctcttacagaactgtcacctggggctcgaatttatggaagaactcctcgagaccttaatcacaacggaagcttctgacgattcattccgtgtttggatcaccacagagccacacgacagatttcctatcactcttttgcagacttctctaaagttcacgaatgagccgccacaaggagtgcgggctggacttaagagaaccttcgcaggaattaaccaggatcttctcgatattagtaatttgccaatgtggaaaccaatgctatataccgtggccttcttgcactccacagtacaagagagaagaaagtttggaccactgggttggaatattccttacgaattcaactccgccgacttctccgccagtgtgcagttcatccaaaatcacttggacgagtgtgacataaagaaaggggtaagttggaacactgtcagatatatgattggtgaggtgcaatatggcggtcgagtgacagatgactttgacaaacgcctgctgaactgttttgcacgcgtgtggttctctgagaaaatgttcgagcccagcttttgcttctacacaggctataagatccccctgtgtaaaacccttgaccagtattttgagtatatccagtccttgccctcacttgacaatccggaagtgttcggtctgcaccccaacgcagatatcacctaccaatccaatactgcctccgcggttctggagactattactaatatccaacccaaagagtccggtgggggtgtgggcgagactcgtgaggcaattgtctacagattatctgaagacatgctgagtaagctacctcccgattacataccccacgaagttaagagtcgcctgatcaaaatgggacatctaaattctatgaatattttcctccgccaggaaatagacagaatgcagcgggtgatttcgatcctgcgctccagtttgtcagaccttaaactcgctatcgagggaacaatcatcatgtctgagaacttgcgcgacgcactagacaatatgtacgacgcaaggattcctcaattatggaaacgtgtgtcttgggactcttctactctcggattctggttcacagagctgctggagcgtaatgctcagttctccacgtggatctttgagggacgtccaaacgtgttctggatgacaggattctttaacccccaaggatttctgactgccatgcggcaagaggtcactagggcccataaggggtgggctctggataccgttacaattcacaacgaagtcctgcgccagaccaaagaggaaatcacctccccgcctggagagggggtctacatatacggcttgtatatggatggcgcagcgtgggacagacgtaatggtaagttgatggaaagtacgcccaaagtgttgtttacccaactcccagtgttgcacatctttgcgattaatagcacggcccctaaagaccccaagttgtacgtgtgccccatttataaaaaaccaaggagaaccgacctgacctttatcaccgtggtctatctacgtacagtgctcagtccagatcactggattttgagaggcgtggcactcctctgtgatataaaatag

SEQ ID NO: 115251 - DNA, 13365 bp, synthetic construct
  misc_feature 1..13365: note = Description of Artificial Sequence: Synthetic coding sequence
  source 1..13365: mol_type = other DNA
atgatgaaactctacatcgataacgcagcccccgataagttaaagggattgtgtattttcttcgtgcggtgtaggaatgatgtggccattaatgtgaaaaccattcaggaggaagcgctcttcacagtgctggacgctagcaagggtctgctcaatggaattagagatatgctagcaaacatcttcctccctgcggtactagccaccaataactggggcgccctgaaccagtcaaagcagggtgagagcgagaagcacatatttacggaaactatcaacaggtacctctctttcctggatggcgcccgcattagtatagaaggaacagtgaagctgaagactatcgacaacgtgaacttctctaagctgcatacctttgaggaggtaactgctgccgcaagcaacagtgaaacggtccatcagctggaggaggtcctcatggtttggtataagcagatcgagcaagtgcttatcgagagcgaacagatgcgcaaggaagctggtgacagtgggcccctgacggagctggaacactggaagaggatgagcgctaagttcaactatattatcgagcagatcaaaggccccagctgcaaagcagttattaatgtactgaatgtggcgcactcgaagctcttaaaaaactggcgggatcttgatgcgaggatcacagacaccgccaacgagagtaaagacaacgtaaggtacctgtacacacttgaaaaggtatgtcaacctctgtacaaccacgatcttgttagtatggcacatggtatccagaacctaattaacgctatccgcatgatccacggggtttcacgctattacaatacctccgagaggatgacaagcttgtttattaaagtcactaatcaaatggtcaccgcgtgcaaagcctacatcaccgacggaggactgaaccacgtctgggaccaggagactccagtcgtgctgaaaaagatccaagattgtatctttcttttcaaggagtatcaggcctcattccacaagacaaggaaactgatcagcgaatcctccggagaaaagtcattcgaggtcagtgagatgtatatcttcggcaaattcgaggctttttgcaagaggctcgagaaaatcacagagatgatcacagtagtccagacgtactcaacactgagcaatagtacgatcgagggcattgacattatggcaattaagtttaggaacatttatcagggcgtgaaaaagaagcaatatgatatcctggatccccgtagaaccgaattcgacaccgattttctcgattttatgaccaagatcaatggattagaggtgcagattcaggctttcatgaattcaagcttcggtaaaattctctcaagccaacaggctctgcagcttctccaaaggttccaaaaactcaacattccttgcctgggcttagagatcaatcacactatcgagcgcattcttcagtattatgttgcggagttagacgccacgaagaagctgtaccattctcagaaagatgatcccccgcttgcaagaaatatgcctcctatcgctggaaagattttgtgggtccggcaactctatcgccggatctcagagcccatcaactacttctttaaaaactccgatattctgtcctcacctgatgggaaagccgttatcagacagtataacaaaatctcttacgtgctcgtcgagtttgaggtcgtttatcacacagcatggatcagagaaatcagccagttgcactatgcacttcaggctacactgttcgtgaggcaccccgagaccgggaaactgctagtcaatttcgacccaaaaattcttgaagtggtgagggaaactaagtgtatgattaagatgaaactggatgtccctgagcaggccaaaagattattgaagcttgagtctaaactcaaggctgacaagctgtacctgcagggtctgcttcagtactatgatgagctctgccaggaggtcccctccgtattcgtgaatctgatgaccccgaaaatgaaaaaggtcgagagcgtcctgaggcagggcctgactgtactgacttggagttctctcacactcgagtcatttttccaggaagtagaattggtgctcgacatgttcaatcagttattaaaaaaaatctctgacctctgcgagatgcatattgacacagtcctaaaagagatcgctaagactgtgctgatctctctgccggagtctggagcgaccaaggttgaagatatgctgaccctgaatgagacttacaccaaggaatgggccgacatcctcaatcacaagagcaaacatgttgaggaagcagtgagggagctaatcagcatctttgaacagatctatgaggtgaaatatacaggcaaagtgggcaaacagagcgagcaaagaaaacacgtggtctttgggagtgaaaccggggaaggcgaaaacaacgactacgaagccaatattgttaacgagtttgatacacacgacaaagaggacgaatttaagaaggaatgcaaggaagtcttcgcattcttctcccaccagttgctcgattcactgcagaaggctacacgcctgtcgttggatactatgaaacgtcggatttttgtcgccagcttatatggcaggaagcagtcagaggacataattagtttcatcaaatctgaggtgcaccttgccattcccaatgtagtaatgataccctcactcgacgatatccagcaggcaattaatcgaatgatccagctgaccctggaggtgtcccggggcgtagctcactggggccagcagcagatcagacccattaagtctgtcatcccgagccccaccactacagatgttactcatcagaatacaggtaaactgcttaagaaagaggagagaagcttcgaggaagccattcctgctaggaagctgaaaaatttttacccaggagtggcggagcataaagacatctcaaaattggttctcctgctttccagttctgttaactccctgagaaaggccgcccacgaagcactacaagactttcagaagtacaaaaccctttggactgaggacagagacgtgaaggtcaaggagttcctggcaaataatccaagtttgacagagattaggtctgagatcctgcactatgctactttcgagcaggagatcgacgagctcaaaccgatcattgtcgtgggagccctcgagctgcatactgaacccatgaagctggctctttctatcgaagctaaagcctggaaaatgttgctctgcaggtatttgaacgaggaatacaagaagaaaatgtcttatatgatagctttcatcaatgaatatctcaaaaagctatccagacccatacgcgatttggacgatgtcaggttcgccatggaggccctctcgtgtatacgcgataatgagatccagatggacatgaccttaggacctatcgaagaagcttatgccatcctgaacaggttcgaagtcgaggtcaccaaggaggaaagcgaagctgtcgacacactcaggtactcattcaataaactgcagtctaaggcggtgagcgtccaggaggacttggtgcaagtgcagccaaagttcaagagtaatctgttggagagtgtggaggtgttcagggaggatgtcatcaatttcgccgaggcctacgagctcgagggacctatggtcccaaacattcctcctcaagaggctagcaacaggctgcagatattccaggcttccttcgacgacttgtggcgcaagttcgtcacctatagttcaggggagcagctgtttggtcttccagtcacagattacgaggtgctgcataagacccggaaggaactaaatctcctccagaagctctacggactttacgacactgtcatgagcagcatctctggttactatgaaatcctctggggagacgtagatatcgaaaagattaacgctgagctcctggagtttcaaaaccgatgcagaaaacttcccaagggactcaaggactggcaagcgttccttgacttaaaaaagcgcatcgatgacttctccgagtcatgccccctgctcgagatgatgaccaacaaggcaatgaagcaacggcactgggatcgcatcagtgagctcacgggaacaccattcgacgttgagagcgattctttctgtctgcggaatataatggaggccccattactgaagcataaagacgacatcgaggatatatgtatcagcgccattaaggaaaaggacatcgaagccaaactgacccaggtgattgagaattggacaaatcaaaatctgagcttcgcagcctttaaggggaaaggcgaactgttactaaagggaaccgaaagtggagaaatcattacactcatggaggatagcctgatggtgctgggctcactgttgagtaaccggtataacgccccttttaagaaaaacattcagaactgggtctacaagctgtcaaccagctccgacattattgaggagtggctcgtggttcagaatctgtgggtgtacctggaagctgtatttgtggggggagatatagctaaacagctacctcaggaagcgaagagatttcagaatatcgacaaaagctggatcaaaatcatgcagcgggcacatgagaatcctaacgtaatcaattgctgtgttggcgatgagacaatgggccaactcctgccacacttgcatgaacagctggaagtgtgccagaagagtctgaccgggtacttagagaagaaacggctgttgttcccacgatttttttttgtttccgacccagttctcctggagattctcgggcaggccagcgatagccataccattcagcctcacctgccagccgtttccgataatattaacgaggttacatttcacgcaaaagactacgaccggattatggccgtgatcagccgggagggcgagaaaatcgtgcttgacaacagcgtgatggcaaagggcccggtagaaatctggctgctggatctgttaaagatgcagatgtcgagtctccataacattattagatctgctttctaccagatctcagacagcgggtttcagctcttacctttcctgtcacattttcccgcccaggtgggtctgttgggcatacaaatgttatggactcatgacagtgaagaggcgcttaggaacgccaaagacgataggaaaatcatgcaggtgacaaatcagaaatttttggacatacttaatactctaatcagccagacaacccacgacttatcgaagtttgaccgtgttaaattcgagactctcattaccattcatgtccaccaacgggacatattcgatgacctggtcaaaatgcacatcaaatcccctacggattttgaatggcttaagcaatcacgtttctacttcaaggaagatcttgaccagaccgtggtgtccataaccgacgtggactttatctaccagaatgagttcctagggtgcaccgatagactagtcattacccccttaaccgatcgctgctatataacccttgcccaagccttaggcatgaatatggggggagcacccgccggacctgctggaaccgggaagaccgaaaccactaaggacatgggacgctgccttggaaaatacgtggtggtgttcaattgctctgatcaaatggatttccgggggctcggtaggatcttcaaaggattggctcagtcagggagctgggggtgcttcgatgaattcaaccgcatagaactgccagtgctgagtgtggcggcccagcagatctacatagtcctgaccgctaggaaggaacgtaaaaaacagtttattttctctgatggcgactgcgtagatctaaatcccgagtttggtatattcctaaccatgaaccccggctacgcgggccgtcaggagttacccgaaaacctgaagatccagtttcgcaccgtggccatgatggttcccgatcggcaggttcactacgactttggactgagaaacattctgtccgtgcttaggacattaggcagtcaaaaacgggccaggccagaggattccgagctgagcatcgtgatgcgaggtctccgtgatatgaacttgtccaaactggtagacgaggacgagccgctttttcttagcctgattaatgatttgtttccaggcctgcaactagactctaacacctacgctgaactccagaacgccgtcgcgcaccaggtgcagattgagggtctaattaatcatccaccatggaacctgaaactggtgcagctgtacgaaacctcccttgttcggcacggactgatgacccttgggccatcaggtagtggcaagacgacagtgatcaccatactgatgaaggcccaaactgagtgcggaaggccgcatcgcgagatgcgcatgaaccctaaagctattaccgctccgcagatgttcggccggctcgatactgccactaatgattggaccgatggaatcttttccactctgtggcgaaagactcttaaagccaagaagggagagaatatcttcctgatccttgacggccccgttgacgccatttggatcgagaacctgaattctgtactggatgataacaaaacccttacactggcaaatggtgatagaataccgatggctccctcttgcaagctgctctttgaggtccacaatattgaaaacgcaagcccagccactgtctcccgaatggggatggtgtacattagtagctccgccctctcctggcgacccatactccaggcatggctaaaaaagcgcaccgcccaggaggctgcagtcttcctaaccctgtacgaaaaggtgttcgaggacacgtatacctacatgaagcttaatctgaatcccaaaatgcagttgctggaatgcaactacatagtccagagcctgaacttactagaaggtttaattcctagtaaagaggaaggaggtgtgtcgtgcgtggagcacctccacaaacttttcgtttttggtctcatgtggagcctgggagctctcctggagttggagtcccgtgagaagctcgaggcctttttacgtcagcacgagagcaagctggacctccccgaaattccaaagggttcaaaccagaccatgtacgagttctatgtgacagactacggcgattgggagcactggaataagaaacttcagccatactattacccgaccgatagcattcccgagtactcctcaatcttagtccctaatgtggataacattagaacaaattttttgattgacacaatcgccaagcagcataaggcagtcttgctgaccggggaacagggtacagccaagacggtcatggtgaaggcttatctgaagaagtacgatccagaggttcaactgtcgaagagcttaaactttagctctgccaccgagccaatgatgtttcagaggactatagaatcttatgtcgataaacgcatcggttctacctacgggcccccgggcggaaggaagatgacggtctttattgatgacattaacatgccggtcatcaacgagtggggggatcagataacaaacgaaattgtgcggcagatgatggaaatggaaggcatgtactccctagataagcctggggacttcacaactattgtggacgtgcagctcattgccgccatgattcaccctggggggggccgcaacgatatcccccagagactgaagaggcaatttacagtcttcaactgtacgctgcctagcaacgccagcatagataagatcttcggtatcattggatgcggctatttcgacccctgcaggtcttttaaaccacagatctgcgaaatgatcgtaaacttagtaagtgttggcagggttctgtggcagtggacgaaggtgaagatgctgcctacccccagtaaatttcactatattttcaatcttcgcgacctaagccgcatctggcagggaatgctgaccattaaggccgaggagtgcgcttctattcccaccctcctgtccttgttcaagcacgagtgttcccgggtcattgccgatcggttcatcacccctgaagatgagcaatggtttaatgcccatctcacacgcgccgtggaggaaaacatcggcagcgatgctgcttcctgtattcttcccgagccttattttgttgatttcttaagagagatgccggaaccgaccggggatgagcctgaggacagtgtttttgaagtgccaaaaatatacgagctgatgcctagtttcgacttcctcgctgagaaactacagttctaccaaaggcagttcaacgagataatcagaggtaccagcctggacctggtgttctttaaggatgcaatgacacatcttatcaaaatctcccggattattagaacttcatgcggcaatgccctccttgtgggcgtcgggggtagtggaaaacagagcctgtcacggttggctagctttatcgccgggtatcagattttccagatcactctgacaagatcatataatgtgactaacctcacggacgaccttaaagccctctacaaagtagctggggcggacggaaaaggaatcacttttatctttactgattcagagattaaggatgaggctttcctcgaatacctgaacaacttactctcaagcggcgaaatatcaaacctttttgcccgggatgagatggacgagattacccagggcctaatatcggtgatgaaacgagagctccccagacatcctccgacattcgacaatctttacgagtactttatctctagatcccgcaagaatctgcacgttgttctctgcttcagccctgtcggggaaaagtttagagcacgcagcctgaaattccctggattgatctccgggtgtaccatggattggtttagtcggtggccacgggaagctctgattgctgtcgcctcttactttctcagcgactataatatcgtctgtagctctgaaattaagcggcaagtcgttgaaaccatgggactgttccacgacatggtttccgaaagttgcgaatcctatttccagcggtacaggcgaagagcacatgtcacgcccaaatcttatttgtcctttatcaatgggtataagaatatctacgccgaaaaggtcaagtttatcaatgagcaggccgagagaatgaacatcggactggacaagttgatggaggccagtgaatcagtggcaaagttaagccaggatctggctgtgaaggagaaagagttggccgtggcttcaatcaaggccgatgaagtcttggccgaggttaccgtctctgctcaggccagcgcaaaaattaaaaacgaggtgcaggaggtgaaagacaaggcgcagaagattgtcgatgaaatcgactctgagaaagttaaggccgaatctaagctcgaagctgcaaaacccgcgcttgaggaggctgaggctgccctaaatacgataaaacctaatgacatagcaacagtacggaagctggctaagcccccccacttgatcatgcggattatggattgcgtcctgctattgttccaaaaaaagatcgaccctgtgacaatggaccccgagaagagctgttgcaagccttcatggggcgaatccctgaaactcatgagcgccacaggctttctgtggtctctgcagcagttccccaaagataccattaacgaagagacagtggagctccttcaaccctacttcaacatggacgactacacttttgagtctgctaaaaaggtgtgcgggaatgtggccggtcttctgtcttggacactggccatggctattttctacggcattaatcgagaagtgttgccactgaaagcaaacttagcaaagcaggaaggccgcctagcagtagctaatgctgaactgggtaaggcccaggctctattggacgagaagcaggcagaactcgataaggtgcaagctaagttcgatgccgccatgaacgaaaagatggatttactaaatgatgctgacacatgtcgcaaaaagatgcaggctgcttccaccctgattgacggcctgtcaggcgagaagattcgctggacccagcagagcaaggagttcaaagcccagattaaccgtctggtcggagacatccttttgtgtactggctttcttagctatcttggcccttttaatcagatcttccgaaattacctgctgaaggatcagtgggaaatggagcttagagccaggaaaattcccttcactgagaatctgaacctgatttctatgctggtggatcctccaacaatcggagagtggggcctccagggcctccctggggacgatcttagtatccagaacggtatcattgtgacgaaggccacacgttacccccttctgatagaccctcagacacaggggaagacatggatcaagtccaaggagaaagaaaatgacctgcaagtgacaagtctcaatcacaagtactttagaacacacctcgaagattcgctttcactgggccggccgttactgatcgaagacatacacgaagagctggatccagcgctggataacgtacttgaaaagaatttcatcaaaagtggcacaacattcaaggtaaaagttggcgataaggagtgtgacattatggacacgtttaaactgtacataaccaccaagctccctaacccggctttcactcctgagattaatgccaagacctccgtcattgattttacagtgacgatgaaaggactggagaaccaactgctgagacgcgtgattctgaccgagaaacaggagctggaagctgagagggtgaagctattagaagatgtgacatttaacaaaagaaaaatgaaggaactcgaggacaatctgctttataaattatccgcaaccaagggttccttggtggacgatgagtctctgatcggggtcttacgcaccaccaagcagacagcagctgaggtctctgagaaactgcatgtcgccgccgagaccgagattaagattaatgccgcccaggaggagtttaggccagctgcaactagaggctctatcttatattttctgatcaccgagatgtccatggttaacatcatgtatcagacctctctggctcaattccttaagctgtttgatcaaagcatggctcgaagtgagaagtccccactgccccaaaagagaatcactaacatcatcgaatatctgacctacgaggtgtttacttactctgtcaggggactctatgagaaccataaatttttgtttgtcttattgatgacattaaaaatcgacctgcagaggggcaccgtaaaacatcgcgagttccaagcactgattaaagggggggctgccctcgacttaaaagcctgtccaccaaaaccatatcggtggatccttgacatgacatggttgaacctcgtggagctgagcaaactgccacaatttgccgagatcatgaatcagattagccgtaatgaaaagggctggaagtcctggttcgacaaagacgcccccgaggaggaaattattcccgatgggtacaacgattctcttgatacctgtcacaagctgctcctgatcagatcatggtgccccgacaggacagtatttcaggcccgcaaatacattgctgactctctcgaggagaagtatacagagccagtgatcctcaacctcgagaagacttgggaggagtctgacactcgcacccccctcatctgctttctgagtatgggcagcgatcccaccaaccagatcgatgcactagctaagaagctgaaattggagtgccgaaccatatcgatgggtcagggccaggaagtccatgcgcggaagctgattcagatgtccatgcagcaggggggctgggtgttgctccagaattgccaccttggtttggagttcatggaggagctgctggaaaccctgatcactaccgaagcttcagacgacagtttccgagtttggattacaaccgaaccacacgacagattccctatcacgctgctgcagaccagcctgaagtttactaacgagccaccacaaggagtgcgagccgggctcaagcgaacattcgctggcattaaccaagacttgttagatatcagcaacttgcctatgtggaagcccatgctctatactgtggctttccttcattccacggtccaggagcggcgcaagttcggtcctctgggctggaacatcccgtacgagttcaactcagccgacttctccgcctcggtgcaatttatccaaaaccacttggatgaatgcgatattaaaaaaggagtaagctggaacaccgtgaggtatatgatcggcgaggtccagtacggtggacgagtcaccgacgactttgacaagagattactgaactgtttcgccagagtgtggttctccgagaaaatgttcgaaccgagcttctgtttctacacagggtacaaaattcctttgtgcaagaccctggatcagtactttgagtatattcaaagcttgccatctctagataaccccgaagtgttcggcctccatccaaacgccgacataacctaccagagtaacaccgcgtctgctgttcttgaaacaattactaacattcagcccaaagaaagcggcggaggggtaggagagacccgtgaagctattgtgtaccggttgagcgaggatatgctgtctaagctccctcctgactacatcccacatgaagtaaagagtcggctgatcaaaatgggccatttgaactctatgaatatatttctgaggcaggaaatcgatcgaatgcagcgggtgatctccatactccgaagctcgctttctgatctcaaattggcaattgagggaactatcattatgagtgaaaatctgagagacgccctcgacaatatgtacgatgcacggatcccacagctctggaaacgcgtgtcttgggactcctccaccctcggattctggttcactgaactcctcgaacgcaacgcacaatttagcacatggattttcgagggcagacccaatgtcttctggatgacaggcttcttcaacccccagggcttcttaaccgctatgcggcaggaagtcacgcgtgcccataaaggctgggccctggatacggtgacaatccacaatgaggttctcagacagaccaaggaggagattacgagccctccaggagaaggggtgtatatctatggcctttacatggacggcgcagcttgggatcgccgcaatggcaaactcatggaaagcacccctaaggtgctttttacacagctgcctgttttacacatcttcgctattaactctacagcgcccaaggacccgaagctttacgtgtgtccgatttataaaaaacctaggcggaccgatctgacttttatcaccgttgtctatctgcgcaccgttttgtccccagaccactggattttacgaggtgtagctctgctgtgtgatatcaagtag

SEQ ID NO: 115252 - DNA, 12567 bp, synthetic construct
  misc_feature 1..12567: note = Description of Artificial Sequence: Synthetic coding sequence
  source 1..12567: mol_type = other DNA
atggagaaagatgctgaagatggggcgccctcagagggcgcggaggcgcccccctccaccgaggaggcagctcctcccagatcagaggaagaggaagctccaagacccccgacagtggaggcgcccgcagaagacggtttcagcccttccgccgaagatgccgtgagcagcgtggtggattatagagatttgatcccctcagaggaaggcattgtgctgccagatgaccatgaagctgacctgaatagagtgcggcaaagattagctccccgacctgtgcagtctgtgatcagcgaggtactcagcctgccgagttctcgccggagttctaggtaccggcgttcaatgtccggactgcctaaccttcaggagacactgaaggagcgccaagcccgcttcagggaggcacgggagtcaagacgacttaagatagaccccagctataagtacatatttgagatcctcgcagagaatctcggtttggacatcgtgaccgtggaggaactgatcttggattgtccctcactcgaagccttcacaaattttttcgccaaagatggctgtaaaaccctgaaattcctttatcaagagggggacgtgccaggaattgagtgtgggcgtaccatagctggagcgacgaagggcgccaaaatgatgaagctgtatatcgacaatgccgctccggacaagctaaagggactgtgcatattctttgtacgttgtaggaacgatgtggcaattaacgtaaaaaccattcaggaggaagccctgttcacagtcctggacgcgtccaaggggctcctgaatgggatccgggatatgttagccaatatattccttcccgccgtcctggccaccaacaactggggcgccctgaaccagagcaaacagggtgagagcgagaagcatattttcaccgagaccataaaccgctatctgtcttttttggacggtgccagaatctctattgagggtacagtgaaacttaaaacaatcgacaacgtcaatttttcaaagctgcacaccttcgaggaagtcaccgcggccgctagtaacagtgagaccgtgcatcaactcgaggaggtcctgatggtttggtacaagcagatcgaacaggttctcattgagtccgaacaaatgcgcaaggaagctggcgacagtgggccattaacggaactggagcactggaagcgcatgagcgcgaagttcaactacatcatcgaacagattaagggcccgtcatgtaaggctgtgatcaatgtactgaatgtagcccactccaagctgctgaagaactggcgggaccttgatgctagaatcacggataccgccaacgagagcaaggacaatgtgcgatacctgtacaccctcgaaaaagtctgccagcccctctacaatcatgacctggtttcaatggctcacggaatacaaaatctgattaatgccattcggatgatacacggtgtgtcccgctattacaacacgtccgaacggatgacatccctgtttattaaggttacaaatcagatggtgaccgcttgtaaggcatacatcaccgacgggggactgaatcatgtgtgggaccaggaaaccccagtggtcctcaagaaaatccaggattgtatattcctcttcaaggaatatcaggcctcctttcataagacacgcaagttgattagcgaatcctccggagaaaagagtttcgaggtttccgaaatgtacatatttgggaaatttgaggccttctgcaaaagactggagaaaataacagagatgatcacagtggtacaaacatatagcacactgtcaaactctactatcgaaggcattgacatcatggcgatcaagtttaggaatatatatcagggcgtgaaaaagaagcagtatgatatcttggacccgagaaggaccgaattcgacacggacttcctggactttatgactaagattaatggactcgaagtgcagatccaagcttttatgaattccagctttggcaagattttatcctcacaacaggcattgcagctgcttcaaagatttcagaagttgaatattccgtgtttaggcctggagattaaccacacaatcgagaggattttacagtactatgtcgctgagttagatgccacaaagaaattgtatcattcccagaaagatgatccgcccctggctagaaatatgccccctatcgccggaaagatcctttgggtacgacagttataccggaggatcagtgagccaattaattacttttttaagaactcagacattcttagtagtccagacgggaaggccgtaattagacaatacaacaaaatatcctacgtattggtggagttcgaagttgtgtatcatacggcatggattagggaaatatcacagttgcattacgcacttcaggctacactttttgtccgccatccagaaacaggaaagttgttagtgaactttgatcccaaaattctcgaggttgtgagggagacgaaatgtatgatcaagatgaagcttgatgtgccggaacaagctaagcgtctcctgaagctggaatctaaattgaaggctgataagctgtatctgcaaggtctgttgcagtactatgacgagctgtgtcaggaggttccctctgttttcgttaacctgatgacaccaaagatgaagaaggtggagtctgtactccgacagggactgacagtgttaacttggagtagcctaaccttggaaagctttttccaggaagttgagctggtgctagacatgttcaatcagttattgaagaaaatttcagatctctgcgagatgcatatagacactgtacttaaggaaatagcgaagactgtgcttatcagcctcccagagagcggtgcaactaaagtggaggacatgttaaccttaaatgaaacgtacactaaggagtgggccgacatactgaaccacaagtctaaacatgtcgaagaagcagttcgggagctaatcagcattttcgagcagatctacgaagtcaagtatacaggcaaggttggtaagcagagtgaacagcgcaaacatgtggtattcggcagtgagactggagagggagagaacaatgactacgaagcgaacatcgtaaacgagttcgatacccatgacaaagaggacgaattcaagaaagagtgtaaggaggtgttcgcattcttctctcaccaactgcttgactctctccagaaggccactagactatctctggacactatgaagaggcgcattttcgttgcaagcctttacggccggaagcaatccgaagacattattagcttcataaagagcgaagtgcatcttgcaattcctaatgtggtcatgatcccctccctggatgatattcagcaagccataaacagaatgattcaactgaccctggaggtttcccgtggtgttgcacactggggtcagcagcagatacggcctataaagtccgttatccctagtcccactacgaccgatgtgacgcaccaaaatacaggaaagttgctaaaaaaagaggagcgttccttcgaagaagccatccccgcacgcaaactcaagaatttctatcccggagtggccgaacataaggacataagcaagcttgtgctgctcctttccagtagcgtaaacagcttgcgcaaggcagcccacgaggcactccaggacttccagaagtacaaaactctgtggacagaggaccgcgatgtgaaagtcaaggagttcctggcaaataatcctagtctaaccgaaatccggagcgagattctccactatgccacattcgagcaggagatcgacgagcttaaaccgatcatagtggtaggcgcgcttgaactgcacacagaacctatgaagctggcccttagcattgaggccaaggcatggaagatgttgttatgcaggtacctgaacgaggagtacaagaagaagatgtcctatatgatcgcattcataaacgaatacctgaagaagctatccagacctattcgcgatctggatgacgtgagattcgcaatggaagccctgtcttgtattcgagataatgagattcagatggacatgacccttggaccgatcgaggaagcctatgcaattctcaatcggtttgaagtggaggtgacaaaagaagagtcagaggcagtcgatacgttgagatactctttcaacaaactacagtccaaagccgtttctgtgcaggaggatctagttcaagtgcagcccaaatttaagagtaatttgctggaaagtgtggaggtcttcagggaggatgtcatcaactttgctgaagcgtatgaactggagggcccaatggtgcctaacatcccaccacaggaagcttcaaaccggctgcagatctttcaggcaagcttcgacgatctgtggcgcaagtttgtgacatactctagcggcgagcagctgtttggcctacccgtgaccgactacgaggtgctacacaaaaccaggaaggagcttaatttgctgcaaaaactgtacggactttacgatacggttatgagcagcataagcggttattatgaaatcctgtggggcgacgtggacattgagaaaataaacgctgagctgctcgaattccagaatcggtgtcggaagctgcctaagggtctgaaggattggcaggctttcctggacctgaagaaaaggattgatgacttcagcgaaagctgtccgctcctcgaaatgatgacaaacaaagcgatgaaacagcgccattgggatagaataagtgagcttactgggactcctttcgacgtcgagtccgattcattttgcctgagaaatataatggaagctccacttctcaagcacaaggatgatatcgaggacatctgcataagcgctatcaaggagaaagacatcgaagcaaaactgacccaagtcattgaaaactggaccaaccagaacctgtcctttgcggccttcaagggcaagggggagctgctcctcaaggggaccgagtctggggagatcataacgctgatggaggattccttaatggtacttggctcactgctgagcaatcgctacaacgccccgttcaaaaagaacattcaaaactgggtttacaaattgtcaacatccagcgatattattgaggaatggctggtggtgcagaacctctgggtgtatctcgaggctgtttttgtcggcggggacatagccaaacagctccctcaggaagctaagcgctttcagaacatcgataagtcctggatcaagatcatgcagcgggcccatgagaatccaaacgtgatcaattgctgtgtcggtgatgagactatggggcaacttttgcctcacctccacgagcagcttgaggtttgccaaaagagcctgaccggatacctcgagaagaagagactcctctttccccgcttctttttcgtgagtgacccagtgctcttagagattctcggacaggcctcagattcccacaccattcagcctcatctcccagctgtgtcggataatataaacgaggtcactttccacgctaaggactatgacaggatcatggcggtaatttcaagagaaggtgagaagatcgtccttgataactcggtcatggcgaaaggcccagtcgaaatctggctcctagacctcttaaagatgcagatgtctagcctgcacaacattattaggagcgctttttaccagatttcagacagcgggtttcagctattacctttcctgagtcacttcccagcccaggtgggcctgctgggtatccaaatgctgtggacccatgacagcgaagaagccctgagaaacgccaaggacgatagaaagatcatgcaggttaccaatcaaaaattccttgacatcctgaacaccttaattagccagaccacccatgatttgtcaaagttcgaccgggtgaaattcgaaacactgattacgatccacgtgcatcagcgagacatcttcgatgatctggtaaagatgcacatcaagtctcccactgacttcgagtggctaaaacagtccagattttacttcaaggaggacctcgaccagaccgtggtctctattactgacgtggatttcatttaccagaacgagtttcttggttgcacagaccgcttagtgattacacccctgactgatcggtgctatattacactcgcccaggctctgggaatgaatatgggtggagctcctgccggaccagctgggaccggaaagacagaaacaacgaaggacatgggcaggtgcctgggtaaatacgtggtggtgttcaattgctctgaccagatggactttcggggccttggacggatctttaaggggctggcgcagtccgggtcttggggctgctttgacgaattcaaccggatcgagctgcccgtgctgtcagtcgctgcccagcagatatacatagtgcttactgcaagaaaggaacgcaagaaacagtttattttttctgacggggactgtgtagatttgaatcccgagtttggcatttttttgacaatgaaccccggctatgctggcagacaagaactcccggaaaacttaaagattcaatttcgcactgtcgcaatgatggtgccagataggcaaatcatcatgagggtgaaactcgctagttgtggattcctagaaaatgttatccttgctcaaaaattttatgttttgtataagctatgtgaggagcagctgacaaaacaagtgcactatgatttcgggctgaggaatattctgtctgtgctgcggacgcttggtagtcagaagcgagctaggcccgaagatagcgagctgtccattgtgatgcgcggattacgcgacatgaatctctccaaactggtggacgaggatgagcctctctttctgtctttaatcaacgacctgtttccaggcttacaattagactctaatacttatgcagagctgcaaaacgctgttgctcaccaagtccaaattgagggtctgatcaaccaccctccgtggaacctgaagctggtgcagctgtatgagaccagtcttgttaggcacggcctgatgaccttggggcccagcgggtccggcaagacaactgtgataaccatattgatgaaagcccaaacggaatgcggccggccacaccgagagatgaggatgaaccccaaggccattacggctccacagatgttcggccgacttgataccgctacgaatgactggacagacgggatattcagtaccctctggcgtaagacgttgaaagccaaaaagggcgagaatatttttttgattctggatggacccgtcgatgctatttggatcgagaacctcaattctgtgctggatgataataagaccctcaccctggctaatggcgatagaattcctatggccccaagctgtaaattactgtttgaggttcacaatattgagaatgcttcccccgccacggtgagcaggatgggaatggtgtatatttcctcctcggccctctcatggaggcccatacttcaagcatggctgaaaaaaaggacagcccaagaggcagccgtttttctcaccctctatgaaaaagtttttgaagacacgtacacatacatgaagcttaacctgaatcctaagatgcagctactggagtgtaactacattgttcagagccttaatttgctcgagggcctcatcccgtccaaagaggaagggggcgtgtcatgtgttgagcacctgcataaactgttcgtgttcggcctcatgtggtccctgggggcactgctggagctggagagccgagagaagctcgaagctttcctaaggcagcacgagtctaaacttgatctgcctgagataccaaaaggtagcaaccagaccatgtacgaattttacgttacggattacggagattgggaacactggaataaaaagcttcagccgtattactaccccacagacagtatccctgagtatagttcaatcctggtgcccaatgtggacaacatcagaaccaacttcctgattgatactatcgccaagcaacacaaggccgtgttgctcacaggggaacagggcacagctaaaactgtcatggtgaaagcttacctgaaaaaatatgacccagaagttcagctcagcaaaagcttgaattttagctctgcaacagaaccaatgatgtttcagcggacaattgagagttacgtggataagcgaatcggctccacctacggccctcccggaggcaggaaaatgactgtattcatcgacgacatcaacatgccagtgatcaacgagtggggagatcagatcactaacgagattgtgaggcagatgatggaaatggagggaatgtattcccttgataagcctggtgacttcacaaccattgtggatgtgcagctgatagccgctatgatccatccaggcggaggccgaaacgacattccacagcgcctgaagcgacagttcacagtcttcaattgcactcttcccagcaacgcatcgatagacaaaatcttcggcattattggctgtggctatttcgacccatgccgctccttcaaacctcagatctgcgagatgatcgtgaatttagtaagtgtgggacgggtcttgtggcagtggaccaaagttaaaatgctccccactccctctaagttccattatatatttaatctccgggacctgtctagaatctggcagggcatgctgaccataaaagccgaggagtgtgccagtatcccaactttgttgagcctatttaaacacgagtgtagcagagttattgctgatagatttataactcccgaagatgagcagtggtttaatgcccacctgacccgggccgtggaggaaaacatcggcagcgacgctgcgagctgcattctgccagagccctacttcgtcgactttctgagagagatgcccgagcccaccggagacgagcccgaagactctgtgttcgaggttccaaagatttacgaactgatgcctagcttcgatttcctggccgagaaactgcagttttaccagcggcagtttaatgagatcatacgtggaacgtccctggatctggtgttttttaaagatgcaatgacccatctgatcaagatcagtagaatcatacgtacgagctgtggcaacgctctcctggtgggagttggcggatcaggcaaacagagcctgtccaggcttgcttccttcattgctggatatcagatcttccagattacacttactcgatcttacaatgtgactaaccttactgacgatctgaaggctttgtataaagtggccggggcggatggcaaggggataacattcatttttacggacagcgagatcaaggacgaagcatttctagagtacctaaacaatctgttatcttcgggcgaaatcagtaacctgtttgccagggacgagatggacgaaatcacccaagggctgatctccgtcatgaagagagagctgcctaggcaccctcccacatttgataatctgtatgagtatttcatttcacgcagccgcaaaaatctgcatgtggtactgtgcttttccccggtgggagagaaattcagggcccgatctttgaaatttcctggactaatttctggatgcaccatggattggttctctcggtggccacgcgaagccctaattgccgttgcttcatacttcctttcagattacaatattgtgtgcagttccgagattaaacggcaggtggttgagactatgggactgtttcatgacatggttagcgaaagctgcgaatcatacttccagcgctacaggaggcgcgcccatgtcaccccaaagtcttacttgtcctttatcaatggatataaaaatatttacgccgaaaaggtgaagtttatcaatgagcaggctgagagaatgaacatcggtcttgataagttgatggaagctagtgaaagcgttgccaagctttcccaagatctggccgttaaagagaaagagctggctgtcgcctctattaaggcagacgaggtcctggcagaagttaccgtgtccgctcaagcctccgcaaagataaaaaacgaagtccaggaggtgaaagataaggcccaaaaaattgtcgatgagatcgattctgaaaaggtaaaggcagagtccaaactggaggcagccaagcccgccctggaagaggccgaggcagcgcttaatacaatcaagcccaacgacattgctacagtccggaaattggccaaaccaccccacctgatcatgcgaataatggactgcgttctgttgctgttccagaaaaagattgacccagtgacaatggatcccgagaaatcgtgctgtaagcccagctggggcgaatcactgaaacttatgtcagccaccggcttcctctggtccctgcagcaatttccaaaggatacaattaatgaagagactgtagaattactccagccttacttcaatatggatgactatacatttgaatctgctaaaaaggtctgtggaaacgtcgctggattgcttagctggacccttgccatggcaattttttacggaatcaatcgtgaggtactccctcttaaggcaaacctggctaagcaagagggcaggttagcagtcgcaaatgctgaactgggcaaagctcaggctctcttagacgagaaacaagccgagctggataaagtgcaggccaagtttgacgcagccatgaacgagaagatggatctgctgaatgatgctgatacctgccggaaaaaaatgcaggcagcatccacactcatcgatggtcttagcggggagaagattaggtggacacagcagtctaaagagttcaaagcacagataaacagacttgttggcgatatcctgctctgcaccgggttcctgagctatctgggaccttttaatcagatattccgtaactacctccttaaggatcagtgggagatggaacttagggcacgcaagattcccttcaccgagaatctcaatctgatcagtatgctggtggaccctcccactataggagagtggggcttgcaaggactgccaggagatgacctgtccattcagaacggtatcattgtgactaaagcaacccgttaccccttgctgattgacccacaaacccaaggaaaaacatggattaagtctaaggaaaaagagaatgacttacaggtaacatctctcaatcacaagtattttcgcacacaccttgaggattccttgtctctcggccgtcccctgctgatcgaagacatacatgaagaactggatccggctcttgataatgtgctcgaaaaaaacttcataaaatctggtacaaccttcaaggttaaagtcggagacaaagagtgtgatataatggatacgtttaagttatatattaccactaaacttccgaatccagcattcacaccagagattaatgccaaaacctccgtgattgactttacggtaacgatgaaaggtctggaaaatcagctgcttcgtcgcgtgattctcactgaaaagcaggagctggaggctgagagggtcaaactgctcgaagatgtcactttcaacaaaaggaagatgaaggagctagaggacaatcttctttataagctcagcgccacaaagggctccctggtcgacgatgagtctctcatcggggtcttaagaactaccaaacaaacggcggccgaagtgagtgagaaacttcacgtagccgccgaaaccgagattaaaattaacgccgctcaggaggaattcagacctgcagcaacccgtgggagcatcttgtatttccttataacagaaatgtcgatggtgaatatcatgtatcagacctctctggctcaattcctgaagctatttgatcaatcaatggccagatctgagaagtcacccctccctcagaaacggattacaaatatcatcgaatatctcacatacgaggtcttcacatatagtgttaggggactctacgagaaccataagtttttgttcgtcttgctcatgactcttaagatcgaccttcagcgcggcaccgttaaacaccgcgaatttcaggccttgataaagggcggagccgccctggatcttaaagcctgtcccccaaagccatacaggtggattctggacatgacttggctgaatctggttgagctctcaaaactgccacaattcgctgagatcatgaatcagatctctagaaacgaaaaaggatggaagagctggtttgacaaagacgctcctgaagaggagattatccccgacgggtataacgactctctcgatacctgccacaagctcctgttgattaggtcatggtgccccgacagaaccgttttccaggctagaaagtacattgctgactcgctggaagaaaagtatactgaacccgttatactgaatctggaaaaaacatgggaggagtccgacacaaggactccacttatctgttttctatctatggggtccgaccctaccaaccagattgatgccctggccaagaagttgaaattggagtgccgaaccatctccatggggcagggtcaggaagtgcatgcgagaaagctgatacagatgagtatgcaacaggtttgcgacaagcgactcttacttctacagcattactgttag

SEQ ID NO: 115253 - DNA, 13461 bp, synthetic construct
  misc_feature 1..13461: note = Description of Artificial Sequence: Synthetic coding sequence
  source 1..13461: mol_type = other DNA
atgaggctggcagaagaacgcgcggcgctggcggccgagaatgctgacggagagcccggggccgaccgacgcctgcggctgcttggaacttatgtagctatgagcctgcggcccgctgcaggggcttgggaaagatgtgccggttcagccgaagccgagcagttactgcaggctttcctcggcagagacgccgcagaaggtccccgtccattacttgtcgttagaccgggccccagaggccttgctatccgacctggtttagaagtgggccctgaatcaggactcgctggtgccaaagccctgtttttcctccgcacagggccggaaccacctgggccggattcgttccgcggcgctgtggtgtgcggcgatcttcctgcagcgcccctcgagcacctggcagcgctgttctctgaggtggtgttgccagttttggccaacgagaagaatcgcctgaattggccccatatgatttgcgaagatgttagaagacatgcacattctctccaatgtgacctgagtgtaatcctcgaacaggtgaagggcaaaacgctacttcccctccctgctggcagcgagaagatggagttcgccgacagtaagtctgagaccgttctggactctatcgacaagtccgtgatttacgcgatcgaatctgccgtgatcaagtggagctaccaggtgcaggtggttctaaaaagggagtccagccagcctcttcttcaaggagagaatccaacgcccaaagtggagttggagttctggaagtctagatatgaggatctgaaatatatatacaatcagctaaggaccataaccgtccgagggatggccaagctgctcgataagctgcagtcctcctatttccctgctttcaaggctatgtacagagatgtagttgctgcattggctgaggctcaagacattcatgtgcacctgattccgctccagagacacctggaagccctggaaaatgccgagttccccgaggtcaaaccacagctcaggccattgctgcatgtggtgtgcctgatatgggccacttgcaagagttacaggtctcccgggcgactgaccgtcctgctgcaagaaatttgcaacttgctaatccagcaggccagcaactacctgtcacccgaggatctcctgaggtctgaagtcgaggaatcacagcgcaaactgcaggtcgtgagcgacactcttagtttcttcaaacaggagttccaggataggcgagaaaatctgcacacctatttcaaggaaaatcaggaggtaaaggaatgggattttcagagctcccttgtgtttgtcagactggacggctttctgggccagttgcatgtggtggagggcttgttaaaaaccgccctagactttcacaagctaggaaaggtggagttttccggcgtgcgcggcaacgcgctgtctcagcaggtgcagcagatgcacgaggagttccaggagatgtaccggctattatcggggtccagctccgactgcttgtacctgcagagtacagatttcgagaacgacgtgtcagagttcaatcaaaaggtggaagatcttgacagaagactggggactatctttattcaagcctttgacgatgcaccgggactggagcacgcctttaagttattggatatcgctggcaatctgctggagcggcctctggtggcacgcgacacaagtgataagtacctggtgttaattcaaatgttcaataaagatctcgatgcggtaaggatgatatactcacaacatgtgcaggaagaggcagagcttggcttctcaccggtccacaaaaacatgccgactgtggccggaggtctccgctgggctcaagaactgcgacagaggatccagggacctttctccaacttcggccgaatcacacacccctgtatggagtcagccgagggcaaacgaatgcaacagaagtacgaagacatgctttcactgctggaaaagtacgagactcgcttgtacgaagattggtgtagaacagtttctgagaaatcccagtataatctgtctcaacctctgctgaaacgcgatcccgagactaaggaaatcactatcaacttcaacccccaactcataagcgtgctgaaagagatgtcataccttgagccgagagaaatgaagcatatgcccgagaccgccgccgcaatgttcagcagtcgggatttttatagacaactggtagccaatctcgagcttatggcaaactggtacaataaagtgatgaagaccttgctcgaagttgaatttccacttgttgaggaagaattacaaaacattgatctcaggctgagggccgcagaagaaaccctcaattggaagactgaaggcatctgcgattacgtcacagagataacgagtagtatccacgatttagaacagaggatccagaagactaaggacaatgtcgaggaaatccagaacataatgaagacatgggtcacccctatctttaaaaccaaggatggcaagagagagtccctgttgtccctggacgaccggcatgacagaatggagaaatactacaacctcataaaagagtcaggccttaagatccacgcactcgtgcaggaaaatcttggtctgttcagcgccgaccctacttcaaatatatggaaaacgtacgtgaacagcatcgacaatctactgctaaacgggttctttttggctatcgagtgttccctgaagtacttgctggagaacactgaatgcaaggcaggactcaccccaatttttgaggcgcagctgtcactcgctattcccgaactggtgttttatccgtcgctggaatccggtgtgaaagggggtttctgtgacatcgtagaggggctcattacttcgatctttcgcataccttccctcgtgccccgactttctccccaaaatgggagcccacattatcaggtcgatctagacggcatacctgacttagcaaacatgcgtagaactctcatggagagggtgcagagaatgatgggactttgctgcggctaccagagcacgtttagtcagtacagctatctgtatgtggaggatagaaaagaagtattaggacaattccttctgtacggccatatcctgacccccgaggagatcgaggaccatgttgaggacggtatacctgaaaacccacctttgcttagtcagttcaaggtgcagatcgactcttacgaaacactctacgaggaggtttgtaggctggaaccgatcaaagtttttgatggctggatgaagattgatataaggcctttcaaagcttcccttctgaacattataaagaggtggagcctgctgttcaaacaacatctggtggatcatgtcacacactcgctcgccaacctggatgcatttattaaaaaatcggagtctgggctgctgaagaaggtcgaaaaaggagattttcaaggtcttgtggagatcatgggtcacctcatggcagttaaagagcgtcaatccaacaccgatgagatgtttgagcctctcaaacagaccattgagctgctcaagacgtacgagcaggaattgcctgagacggtctttaaacagctggaagagctcccagaaaaatggaacaatattaaaaaagttgctatcactgtaaagcagcaggtcgccccgcttcaggcaaacgaggtcaccttgctgcgacaacggtgtaccgcctttgacgccgaacagcaacagttttgggaacaattccacaaggaggccccatttcgttttgacagcatccacccacaccagatgttagatgcacgacacattgagatccagcaaatggaatccaccatggccagtatttcagagagcgcatctctttttgaggtcaacgtaccggactataaacagctacgacagtgccggaaagaggtgtgccagttaaaggaactctgggataccatcggcatggtcacgagcagcatccatgcatgggaaacgaccccctggcggaacatcaacgttgaggccatggagctggagtgcaagcagttcgctaggcacattcggaatttagacaaggaagtgcgcgcctgggacgcttttaccggcctggagtctaccgtatggaataccttgtcctccctgagggccgttgctgagttgcaaaacccagccatccgggagcgccactggcggcaattgatgcaggcgactggggtctcatttacaatggatcaagacaccactctggctcacctgttgcagttgcagctgcaccactacgaggatgaggtgcggggaatagttgataaagctgccaaagagatggggatggagaaaacgttaaaggagctccaaacaacgtgggcgggaatggagttccagtatgagccacatcctcgaaccaacgtgcccctgctgtgcagcgatgaggacctgatcgaggtcttagaggacaaccaggtgcagctgcagaatctggtcatgtccaaatacgtcgccttcttcctggaggaagtgtccggctggcagaaaaagctgagcacggtggacgctgtcattagtatctggttcgaggtgcagcgtacctggacacatctcgaatcaatctttaccggctcggaggatatccgtgcacagttgcctcaagattccaagaggttcgagggaatagatatcgacttcaaggaactcgcgtacgacgctcagaagataccaaatgtggtgcagacgaccaataagccgggcttgtatgagaaattggaggatatacagggtcgcctgtgcctatgcgagaaagcgctggccgaatacctcgacaccaaacgactcgcattccctcgcttttactttctctcgagttctgatctgttagacatcctgtcgaacggaaccgctccccagcaggtacagcgccacttgagtaagctgttcgataatatggcaaagatgaggtttcagcttgatgcgtcaggcgaaccaacaaagactagcctgggaatgtacagcaaagaggaggagtacgtcgctttctccgaaccttgtgactgttctgggcaggtcgagatctggctaaatcacgtgctgggtcacatgaaagccacggttcgtcatgaaatgactgaaggcgtcacggcatacgaagaaaagccgagagagcagtggctgtttgatcatcccgctcaagtggctctcacatgcacccagatctggtggacgacagaagttgggatggctttcgcgcgcttggaagagggatatgagtccgccatgaaggactactacaagaagcaggtggcccaacttaagaccttgattacaatgctgatcggacagctctctaaaggagacagacaaaagattatgactatttgtaccatcgacgtgcacgctagagatgtagttgctaagatgattgctcaaaaggttgataatgcgcaagcgttcctgtggctaagccagttgcggcatagatgggacgacgaggtgaaacactgttttgctaacatttgtgatgcacagttcctttattcatacgaatatctggggaacacgcccagactggtaataacccccctaacagaccgatgttatatcacgttgactcagtctctccatttaacgatgagcggcgcccctgcaggcccagctggaacaggcaaaaccgagacgactaaggacttagggcgtgcccttggcatcctagtctacgtgttcaactgctcagaacagatggactataaatcatgcgggaatatttataagggattggcccagactggcgcctggggatgctttgacgagtttaatagaatttccgtcgaagtcctgagtgtggttgctgtgcaggtgaagtccatccaggacgccatcagagacaagaagcagtggttttcatttttgggcgaggaaatctcattgaaccccagtgttgggatcttcattacaatgaatcctggatacgcaggcagaacagaactgcccgaaaacctgaaatccctgtttaggccctgtgcaatggtggtgccagacttcgagctgatctgcgagatcatgttggtggccgagggcttcatcgaagcccagagccttgctcggaagttcatcaccttgtaccagctgtgcaaagagttactgagtaaacaggaccactacgactggggactgagggcgataaagtcagtgctggttgtcgcgggatcccttaaaagaggggaccccgataggcctgaagatcaagtgctgatgagatccctgcgggatttcaatattccaaagatcgtgactgacgacatgcctatttttatgggacttataggggacctcttccctgccctcgacgtccctcggaggagggaccctaactttgaggcgttagtaaggaaggcaatcgttgatctaaaactgcaggccgaggacaactttgtactgaaggtcgtgcagcttgaagagcttctggctgtgcgccactccgtatttgtagtgggaggagcaggtaccggtaagtctcaggtcctccgttccctgcacaaaacatatcagatcatgaaaaggagacctgtttggactgatttgaatccaaaagcggtgacgaacgatgagctcttcgggatcatcaatcctgcaacgggcgaatggaaagatggcctgttcagtagcatcatgagggaactggctaacatcacacatgatggcccgaaatggatcctcttggacggtgacatagacccaatgtggattgaatccctgaatactgtgatggacgataataaagttctgacattagcttctaatgagagaatcccactcaaccccacgatgaaactcctcttcgagatctcccacctccgcaccgccacccccgctactgtgtcccgcgccggtatcttgtatatcaaccctgctgacctgggatggaacccacccgtctctagctggatagagaagcgtgaaatacaaaccgagcgggccaatctgaccattttgtttgacaaatacctcccgacatgcctcgatactctcaggacacggttcaaaaagattatacctataccagagcagtccatggtacagatggtgtgtcatctgctggagtgcttactcaccacggaagatatccccgccgattgcccaaaagagatatatgagcattactttgtgttcgccgccatatgggcgtttggtggtgctatggttcaggatcagctggtggactacagagcggagttttccaaatggtggctcacagaatttaaaactgtcaagttcccatcccagggtaccatctttgactactacatcgaccccgaaaccaagaagtttgaaccatggtctaaactggtgccccaatttgagttcgaccccgaaatgccactgcaggcctgcttagtgcacacaagcgagaccatcagagtctgctatttcatggagcgactgatggcgagacagcgccctgtgatgctcgtcggaactgcaggaacaggaaaatcggtgctggtgggagctaaactagcttcgttggatcccgaggcatatctggtcaaaaatgtcccatttaattactacaccacatccgccatgttgcaggccgtcttggagaaacctctggaaaaaaaagccggaagaaactacggacccccagggaataagaaactcatttactttattgatgatatgaacatgccggaggtggatgcttacggcacagtccagccccatactattatacgacagcatttggactatggccactggtatgacaggtcaaaactatcgttgaaagaaatcaccaatgtccaatacgtctcatgcatgaaccctacggcagggtcctttactatcaatcccagactgcagcggcatttctccgtgtttgtgctcagctttcccggcgctgacgcactctccagtatctatagtatcatcctgacgcaacatctgaagctcgggaatttcccggcgagccttcagaaatctattccacctctgatagatctggccctggccttccatcagaagatcgcgacaactttcctgccaacgggtatcaaattccactatatctttaacctccgcgattttgctaatattttccagggtatactgttctccagtgtggaatgtgtgaaatcgacatgggatttgatccgactatacctgcacgaatccaaccgggtctacagagacaagatggttgaagaaaaggacttcgatctctttgataaaattcagacggaagtgctgaagaaaacattcgacgacattgaagaccctgtggaacagacacagagcccaaatttatattgccattttgctaacgggatcggcgagccaaaatacatgccagtgcagagctgggagctgctaacacagaccctggtagaagctctggagaaccacaatgaggtcaacactgtaatggacctggtcttattcgaggatgctatgcgacacgtgtgccacatcaacagaattctagagagtccccgcggcaacgctttgttggtgggagtgggcgggtcgggcaagcagtcgttaacacggcttgctgctttcattagttccatggacgtatttcagatcacattaaggaagggctatcaaatccaggactttaagatggaccttgcgtcgctgtgtctaaaggctggagtgaagaatctcaatacggtctttttgatgaccgacgcccaggtagctgacgagagattcttggtcctcattaacgatctcctggcctctggcgaaattcccgatctctatagtgacgacgaagttgaaaacattatctcaaacgtgagaaacgaggtaaaatcacagggcttagtggacaaccgggagaattgctggaagttctttattgatcgcatccgcaggcaactgaaagtgactttgtgcttctcacctgttgggaataaactgcgcgtgagaagccgtaagtttcccgccattgttaattgtacggcaatccattggtttcacgaatggccccagcaagcgctggaatcagtgtctttgagatttttgcagaatacagaaggcatcgagccaaccgtcaaacagtctatctcgaagttcatggcttttgtccacacatccgtgaaccaaacaagccaaagttatctatccaatgagcagagatacaactataccacaccaaaatccttccttgaatttattcggctgtaccagtcactactacaccggcatcggaaagaactaaaatgtaagacagaaaggcttgaaaacgggctgctgaaacttcattcgacaagcgcgcaggtagacgacctgaaagccaaactggcagcacaggaggtcgagctaaagcagaagaacgaagacgccgacaagttaatacaggtggtgggcgtggaaacagacaaggtttctagagaaaaggctatggctgacgaggaggagcaaaaggtcgcagtcatcatgcttgaagtgaagcaaaagcagaaagactgtgaggaagacttggctaaggccgagcctgccctgaccgctgctcaagctgcccttaacacattaaacaagactaacttaactgagctgaaaagtttcggctcaccacctcttgctgtgtccaatgtatcagcagctgtcatggtattgatggccccacgaggccgagttccgaaagataggagctggaaggccgcaaaagtgaccatggcgaaggttgatggcttccttgactcacttatcaacttcaataaggagaatattcacgagaattgcttaaaggctattcggccatatctgcaggatcctgaatttaacccagagtttgtggccacaaagagctacgcagccgctggattatgctcttgggtcatcaatatcgtgagattctatgaagtcttctgtgatgtcgagcctaagcggcaggcccttaacaaggctactgccgacctaacggccgctcaggagaagctcgccgctatcaaggcaaagattgcacatcttaatgagaacctcgccaagcttacagccagattcgaaaaggcaaccgccgataagctcaaatgccagcaggaggcagaagtgacagctgtgacgatctcactggctaatcgcctggtggggggcttagccagtgagaatgtgagatgggctgacgcagtacagaattttaaacagcaagaaaggaccctttgcggcgatatcctactcattactgcttttatcagttatctaggtttcttcactaagaagtaccgacagtctctgcttgatagaacttggaggccctacttatctcagctcaaaacacccatccctgtcacgcctgccctggatccattgagaatgttaatggacgacgcagacgttgctgcatggcaaaatgagggtctccccgccgatcgtatgagcgtggagaatgccactattcttatcaattgcgaaaggtggcccttgatggttgaccctcagcttcagggaataaaatggattaaaaataagtacggcgaagatctgcgtgtgactcaaatcgggcagaagggctacctacagattatcgagcaggccctggaggccggcgctgtggtacttattgaaaatctcgaggagagtattgatcctgtcctcggcccactgctagggcgcgaagtcatcaagaagggtagattcattaagattggggacaaggagtgcgaatacaatccgaagttcaggctgattctccacactaaactggcaaatccccattatcaacctgaactgcaggctcaggccacccttatcaatttcaccgttactcgggacgggttggaagaccaattgctagccgccgttgtatctatggagcgtcctgatctcgaacaactcaaatctgatcttacaaagcagcagaatggcttcaaaattaccttaaagaccctggaagacagtttgctgtcccgcttgtccagtgcaagtggcaactttctcggtgagactgtgctcgtggaaaatctggaaattaccaagcagactgccgctgaagttgaaaaaaaggtgcaggaggcgaaggtcacagaggtgaagattaacgaagcacgagagcactaccgtcctgctgcagctcgcgcaagtctgctttacttcattatgaatgatttaagcaaaattcacccaatgtaccagttctcactgaaggccttttccattgtttttcagaaagccgttgagagagccgcccctgacgagtcccttcgggaacgggtcgcgaatttaatcgattcaataaccttctcggtgtaccagtataccattcgcggtctgtttgaatgtgataagctaacttatcttgcacaattgacctttcagatcctattgatgaacagggaagtgaacgctgtcgaattagactttttgcttcggtccccagtgcagacaggcaccgcttcgccggttgagtttctgtctcaccaagcttggggcgcagtcaaagtcctgagctccatggaggagttcagtaacctggatcgagacatcgaagggtcagccaagagttggaaaaaattcgttgagagcgaatgtcctgagaaggagaagttgcctcaagaatggaagaataaaacggccctgcagagactttgtatgctgcgcgccatgagacccgacaggatgacctacgcattgagggactttgttgaagagaaactcggcagtaagtatgtggtaggacgggcactcgatttcgctactagtttcgaggagtctggaccagccacacccatgttcttcatcctgtcacccggagtggaccctttgaaagacgtggagagccagggacgaaagctgggttacacgttcaataatcagaattttcataacgtctccctaggtcaaggtcaggaggtcgtggcggaggcggccctagatctagcagcaaagaagggccactgggttatcctgcagaatattcatctggtggccaaatggctgtctacattggaaaagaagttggaagagcactccgaaaactctcaccctgaattccgggtgtttatgagcgccgagcccgcgccctcccccgaggggcacattatcccgcagggcattctggaaaattccatcaagatcaccaacgagccacctaccgggatgcatgccaatctgcacaaggctcttgataatttcactcaggacacgcttgaaatgtgttctagagagaccgagttcaaatccatcctcttcgcactgtgctactttcatgcggtggtcgccgaacggcggaagtttggcccgcaggggtggaacaggtcctatcccttcaataccggagatctcacaatcagcgtaaatgtcttgtataattttctggaggccaacgccaaagtgccttatgacgacctgaggtacttattcggcgagattatgtacggtggacatataaccgatgactgggacagaagactatgtaggacttatctaggcgagtttattaggcctgagatgctggaaggtgaactatctttggccccgggattccccctgcctgggaatatggactataatgggtaccaccagtacatcgacgctgaattgcccccagaaagtccatacctatacggtttgcacccaaacgccgagatcggctttctaacccagacatcagaaaaactgttcaggacagtcttggagttgcagcccagagacagtcaggccagagacggggccggcgccacccgagaggaaaaagtgaaagccctgctcgaggagatcctggaaagggtgacagatgagtttaatatcccagagttgatggccaaggtcgaggagagaaccccatacattgtggtagcctttcaggagtgcgggcggatgaatatcctgacacgggagattcagagatcactacgagaactggagcttggcctgaagggggagttgaccatgacttctcacatggagaatcttcagaacgcactttatttcgatatggtgcctgagtcttgggcccgccgtgcttatccctctactgccggtctcgcagcatggttccccgacctgctgaaccgcataaaggagttggaggcctggacgggggacttcactatgccaagcactgtgtggcttactggattcttcaaccctcagtccttcctgacagcaatcatgcagagcactgccagaaagaatgagtggcctctcgaccagatggccctgcagtgtgacatgacgaagaagaaccgggaagagtttagaagcccaccgcgggaaggcgcttatatacacgggttgttcatggagggggcctgctgggatacacaggcaggtataatcactgaggccaaactgaaagaccttaccccaccaatgcccgtcatgtttataaaagcaattccggcggacaagcaagactgcagatcagtgtacagttgccctgtgtacaaaacgtcccagcgcgggcctacgtacgtgtggacattcaacttgaaaactaaggagaatcctagcaagtgggttttggcaggggtggctttgcttcttcagatctag

SEQ ID NO: 115254 - DNA, 1002 bp, synthetic construct
  misc_feature 1..1002: note = Description of Artificial Sequence: Synthetic coding sequence
  source 1..1002: mol_type = other DNA
atgaaagacttcgtgctgggccgtgacaaggtccaggaggctaaggtgacagaggtgaaaatcaacgaagctcgtgagcactaccgccccgcggccgcaagagcgtcgctgctttactttattatgaatgatttatccaagatacaccctatgtaccaattctcactgaaagccttcagcattgttttccaaaaggcagttgagcgtgcagccccagatgaatctctccgggaacgggtagccaatctgattgacagcattactttttctgtgtatcagtatactatcagggggctgttcgagtgtgacaagcttacataccttgcacagcttacattccaaattttgctcatgaatagggaggtgaacgctgtggagttggacttcctgctgcggtcgcccgtgcaaacagggacagcttcccccgttgaattcttgtctcaccaggcctggggcgcagtgaaagtcttgtcctccatggaggaatttagtaatcttgatagggacatagaggggtctgctaaatcctggaagaagtttgtcgaatctgaatgccccgagaaggaaaaacttccacaagagtggaaaaacaaaacagccctgcagcgtctgtgtatgctgcgggccatgcgaccggaccgaatgacatatgcactgcgggacttcgtcgaagagaagttagggagcaaatatgttgtcggcagagcccttgacttcgccacaagttttgaggagtccggccccgccaccccaatgttcttcatcctcagccccggggtggaccccctcaaagatgttgaatcacagggccgtaaattgggctatacatttaataatcagaattttcacaatgtttcactggggcagggccaagaggtggttgccgaggccgcccttgatctggcagcaaagaagggccattgggtaatactgcaggtgaagagatgttctttcttcaccttctatcaccccgcgcactgtctcgagcattcgcgacattag

SEQ ID NO: 115255 - DNA, 2397 bp, synthetic construct
  misc_feature 1..2397: note = Description of Artificial Sequence: Synthetic coding sequence
  source 1..2397: mol_type = other DNA
atgaacgatctgtctaaaatacacccgatgtaccaattctccctgaaggctttttcaattgtgtttcagaaggcagtggaaagagcagccccagacgaatcactccgagagcgcgtcgcaaatctgatcgactccatcactttctctgtctaccagtataccattcggggactgttcgagtgcgataaactgacttatctggcccagctaacattccagatactactaatgaatcgcgaagttaacgcagtggaactagattttctgctgagaagcccagtacaaacaggaacagcaagcccagtcgaattcctctcccaccaagcttggggcgccgttaaagttctgtcttccatggaagaattcagcaacctggatcgggatatcgaaggcagtgctaagtcttggaagaagttcgtcgaatccgaatgtcccgaaaaggagaaactaccccaggagtggaaaaacaagacagcgctccagaggctctgtatgctccgagccatgagacctgatcgcatgacctacgccctcagagatttcgtggaagaaaaactcggatccaagtacgtggtgggaagagcattagattttgccacttcgttcgaagagagtggaccggctacccctatgttcttcattctcagtcccggagtcgaccccctgaaagatgtggagtcacaggggcggaagcttggctatacattcaacaaccagaattttcataatgtttccctgggccagggccaggaggttgtggccgaggcagcattggaccttgcagctaaaaagggccattgggtgatcctgcagaatatccatctggttgccaagtggttaagcacacttgagaagaaactggaagagcattcagagaattcgcacccagagtttcgcgtgtttatgagcgcggagcccgccccctctcctgaaggtcacataattccccagggcattcttgaaaattctattaaaataacaaatgagccacccactggtatgcacgctaacctgcataaagccctcgacaacttcacacaggacaccctcgagatgtgctcacgtgaaaccgaatttaaaagcattctctttgcgttgtgctacttccacgctgtggtggccgaacggcgaaaatttgggccacaggggtggaatcgcagttaccccttcaatacgggcgatctcaccatctccgtcaatgtcttgtataacttcctggaggccaacgctaaagtaccttacgatgatctgcgttacctcttcggagagattatgtatgggggccacatcaccgatgactgggatcgaaggctctgcaggacctacctgggcgagttcatccggcctgagatgctcgagggtgagctcagcctcgctccgggctttcctctccctggaaacatggactacaacggctaccaccaatacatcgacgctgagcttcctccagagagcccatatctgtacggactccatcccaatgcagagatcggttttctcacacagaccagtgagaagctgttccgcaccgttctcgaactccagccccgcgacagtcaggccagagacggcgccggagccaccagagaagagaaggtgaaagcgttgcttgaggagatacttgagagagtcaccgacgagttcaatatcccagaacttatggctaaggtcgaggagagaacgccgtacattgtcgtggccttccaagagtgtggccggatgaatatactgaccagagagatccagcggagtctgagagaactggagctgggtctgaaaggggagttaactatgacgagccacatggagaaccttcaaaatgccctctattttgacatggtgcccgaatcgtgggctcgtcgggcctatcctagtacagccgggctggctgcttggttccccgatctccttaacaggattaaggagttggaagcgtggacaggggactttaccatgccttccaccgtatggcttacaggttttttcaatccccagagcttcctcacagctatcatgcagtccactgcccggaaaaacgaatggcctttggaccagatggccttgcagtgcgatatgaccaagaaaaatagagaggagttccgtagccccccacgcgagggagcttacatacacggcctcttcatggagggagcatgttgggacacgcaggccggcattatcaccgaagccaagcttaaagacctgaccccaccaatgcccgtcatgttcatcaaggctattcctgctgacaagcaggactgtcggtctgtctacagttgccctgtttataagacttctcagcgtggccctacttacgtttggaccttcaatctcaaaactaaagagaaccccagcaaatgggtcctagccggcgtggcattactcctgcagatttag

SEQ ID NO: 115256 - DNA, 8979 bp, synthetic construct
  misc_feature 1..8979: note = Description of Artificial Sequence: Synthetic coding sequence
  source 1..8979: mol_type = other DNA
gaggtgcggggaattgtggacaaagccgcaaaagagatgggcatggagaaaacattgaaggaactgcagacaacctgggctggaatggaattccagtacgagccccaccctcgcactaacgttcccctgctctgcagcgacgaggacctcatcgaggtccttgaagacaaccaggtccaactgcagaacctcgtcatgtctaagtacgtggctttttttctagaagaggtgagcgggtggcagaaaaagctctcgactgttgatgcagtgatctccatttggttcgaggtccagcgaacatggactcacctagagagtatttttacaggtagtgaagacatcagagcccagctgccgcaagacagcaagaggtttgagggaatagacatcgatttcaaggagctcgcctatgatgctcaaaagattccaaatgtggtgcaaaccaccaataaacccgggctttacgaaaagcttgaagatatccagggaaggctgtgtctgtgcgagaaggcccttgcagaatatctcgacacaaaacgtctcgcattccctcggttttacttcttgtctagtagcgaccttctagatatccttagtaacggtacggcacctcaacaggtccagcgacatctctccaagcttttcgacaacatggctaaaatgagatttcagttggacgccagcggggaaccaaccaagacgagcttgggaatgtactctaaggaggaggaatatgtagcattctcagagccttgtgactgttcggggcaggtggaaatctggttgaaccacgtgctagggcacatgaaggcaacggttcggcatgaaatgactgagggtgtgaccgcctacgaagagaaaccccgggaacaatggctctttgaccatccagcccaggtggctctcacatgtacacagatctggtggacaacagaggttggtatggccttcgcaaggttggaagaaggctacgagtccgccatgaaggactactacaaaaagcaggtggcccagctgaagacgttaattaccatgcttatcgggcagctgagcaagggtgacagacaaaagattatgaccatctgtaccatcgacgtccatgcacgcgacgttgtggccaagatgattgctcagaaggttgataacgcccaggcctttctctggttaagtcagctgcggcacagatgggatgatgaggtgaagcactgtttcgccaatatatgcgacgcccagttcctctattcttatgaatatttggggaacacccctcgtcttgtgattacacctttgacagacagatgttacattaccctgacacagtctctgcatctgaccatgagcggagctccagctggccctgccggaacaggcaagacggagacgactaaagacctgggacgagctttgggcatccttgtatacgtgttcaattgttccgaacagatggattacaagagctgcggtaatatctataagggattagcacagaccggagcttgggggtgcttcgatgagtttaaccggatctctgtcgaggtccttagcgtggtggcagtgcaggtcaagagtatccaggacgctatccgcgacaagaaacagtggttttccttcctcggagaggaaattagtttaaatccctccgtgggaatcttcattacgatgaatccaggatatgctggccggactgagttgccagagaaccttaaatctctgtttcgaccctgcgccatggtcgtccccgacttcgaattaatctgcgagataatgctggtggcagagggcttcatcgaagcacagtccctcgcccggaagttcattactctctatcaactgtgtaaagaactgctctccaagcaggatcactacgactggggattacgggctatcaagtctgtcctggttgtcgccgggagcttaaaacggggggaccccgatcgccccgaagatcaggtcctgatgcgaagcctgcgagatttcaatatccctaaaatcgttaccgacgatatgcctatattcatggggcttattggtgatctattcccagccctggatgtgcccagacgccgggaccccaacttcgaggcattggtgagaaaggccattgtcgatctgaagctccaggccgaggacaacttcgtgctgaaagtcgtccagctggaggagctgttggccgtgcgtcactcagtctttgtagtaggcggcgcaggcacgggcaagtcccaggtcctgcggagtttgcacaagacctaccaaatcatgaagaggcggccggtgtggacggacctgaatcctaaggccgtgactaatgacgagctctttgggatcattaatcctgccaccggcgagtggaaggacggcctgttttcaagcataatgcgggaattagcaaatataacccacgatgggcccaagtggattctactcgatggcgatatcgaccctatgtggatcgagtccctcaataccgttatggatgataataaagtgttaactctggcgagtaacgaaaggatacccctcaatccaacaatgaagttattgtttgagatcagtcacttgagaacggcaacacccgctactgtctctcgtgccggcattttgtacataaatccagccgatttggggtggaatccaccagtatcttcttggatcgaaaagagagaaattcagaccgagagagcaaacctcacaatcctctttgataaatacctgccgacttgtctggacacactgagaactcggttcaaaaagataattcccatacctgagcagagtatggtgcagatggtgtgccatctgcttgaatgcctgctgacaaccgaggatataccggccgattgccctaaagaaatatatgagcactacttcgtgtttgccgccatttgggcattcggcggcgctatggtacaggaccagttggtggactaccgcgcagagttctccaagtggtggctcaccgaatttaagactgtgaaattcccatcgcaaggtacaattttcgactattatattgatccggagacaaagaagttcgaaccatggagtaaactggtgccacagttcgaattcgatcccgaaatgcccctacaggcatgtctcgtgcacacttcggagaccattcgcgtctgctactttatggagaggctaatggctcgacagaggcctgtgatgctggtagggactgcgggcacaggtaaatccgttctcgtgggtgcaaagttggcttctttggatcctgaagcataccttgtaaaaaacgttccgtttaattattacaccacttccgctatgttgcaagccgtgctcgaaaagcccctggagaagaaggcaggaaggaactatggaccaccagggaataagaaactgatctatttcatcgacgatatgaatatgcctgaagttgacgcctacggcacagtccagcctcacacaatcattaggcagcatctggactatggacattggtacgatcgttctaagctctcactgaaggaaatcacaaatgtgcagtatgtgagttgtatgaaccctactgccgggtcttttactataaatccaagattgcagaggcattttagtgtttttgttctaagctttccaggcgcggatgccctgagttctatttactccatcatccttacacaacatctgaaactgggcaacttccccgcctctttacagaaatccattccgccacttattgatctcgccctcgcttttcatcagaaaattgcaacaacttttctgccgaccggtatcaagttccattatatcttcaacctcagggactttgccaacatctttcagggcatcctctttagtagtgtcgaatgtgttaagagcacatgggacctgatcaggctgtacctccatgaaagtaacagggtttatagagacaagatggtggaagaaaaggactttgacctctttgataaaatacagactgaagtcttaaagaaaacgtttgatgatatcgaggaccccgtcgaacagacacagagccccaacctgtattgccatttcgccaacggaataggagagcctaaatatatgcctgtgcagtcctgggagctgcttacccagacacttgtggaggccctggaaaaccacaacgaggtgaataccgtgatggaccttgtcctgttcgaggatgctatgaggcacgtatgtcacatcaatcggatcctagaatctccacgcggaaatgctttgcttgtcggcgtgggtggttctgggaaacagagcctgaccaggcttgctgctttcataagttccatggacgtgttccaaattacgctgaggaaaggctatcagatacaggattttaagatggacctggcatccttgtgtctgaaagcaggtgtgaagaacctcaacactgtgtttcttatgacagacgctcaagtcgctgatgagagattcctggtcctgataaatgatctgctggcatccggggagatccccgacctgtactcggatgacgaagtcgaaaacatcattagcaacgttcgcaacgaagttaagtctcagggacttgttgacaatcgcgagaactgttggaagtttttcattgacagaatcagacgccagttgaaagtgacactgtgttttagccctgtggggaataaactgcgggtgcggagcaggaaattccccgcaattgtgaactgtactgccatacattggtttcatgaatggcctcagcaagccctggaatctgtctcactcagatttttgcagaacactgagggcatcgagccaacggtgaagcaatctatttcaaaattcatggcttttgtgcataccagtgtgaaccagacgtctcagtcctatttgtctaacgaacagaggtacaactataccacacctaagagctttttagaattcatccggctataccagtccctgcttcatcgacacaggaaggaattgaaatgcaagacagagaggctggagaacgggctgctaaaactgcattctacctccgcccaggtcgacgatctaaaggccaagctggctgcacaggaggtggagctgaagcagaagaatgaggacgcagacaagcttatccaggttgtcggcgttgagacggacaaggtcagtcgggaaaaggcaatggcagatgaggaggaacagaaagtggcagtcataatgctcgaggtcaaacagaaacagaaagactgcgaggaagatctagcaaaagcagagcctgccctgaccgccgcccaagccgcactgaatactttgaataaaacgaatctgaccgagctcaagagcttcgggtcccctcccctcgcagttagcaatgtaagtgccgccgtcatggtcttgatggccccgaggggaagagttccaaaggaccggtcctggaaggccgcgaaggtgacaatggcaaaggtggatgggttcttggatagtttaatcaattttaacaaagagaatattcacgaaaattgcctgaaagctatccggccatatctccaagatcctgagttcaaccctgaattcgtggccaccaagagctatgcggcagccgggctgtgtagctgggtgattaacatcgtacgcttttacgaagtcttctgcgatgtagaacctaagcgacaggccttaaacaaagcaacggcagacttaacagccgcccaagaaaaactggccgccatcaaggcaaaaatcgcccacctgaacgaaaacctggctaagcttaccgctagattcgagaaagccacagcggacaaactcaagtgtcagcaagaggccgaggtcactgccgtgaccattagcttggcaaacagactcgttggcggactggcatcggaaaacgtgcggtgggccgacgcggtgcagaatttcaaacaacaagagagaactctgtgcggcgacatcctcttaattaccgcttttatctcttatctgggtttttttacaaaaaaatatcgccagagcctgctcgacagaacatggcgcccgtacttgtcacagctaaaaacccccatcccagtcactcccgccctggacccgctgcgtatgttgatggatgacgccgacgtggccgcttggcagaacgagggattacccgccgaccggatgagcgtcgagaatgctacgattctgattaactgtgaacgttggcccctgatggtggatcctcagctccagggcataaaatggatcaagaataaatatggcgaagatctcagagtgacccaaattggccagaagggctacttgcagattatcgagcaggctctggaggcgggtgcagttgttctgatcgagaatctcgaggagtccatcgatcctgttttgggtcccctgctcgggagagaagtgataaaaaaggggagatttattaaaatcggcgacaaagaatgcgaatataaccctaagttccgtttgatactgcatactaagctggctaatccccactaccagcccgagctgcaggcgcaagccacactgatcaatttcaccgtgacaagggacggtttggaggaccagctgttggctgccgtcgtgagcatggaacgccctgatctggaacagttgaagtctgacctgacaaaacagcagaatggctttaaaattacactcaagacccttgaggactccctgttatctagactcagcagcgctagtggtaacttccttggtgaaacagtcttggtggagaacttagaaataaccaagcaaacagccgctgaggttgaaaaaaaggttcaagaagccaaagtgactgaagtgaaaattaatgaagcgcgagaacactaccggcctgctgctgctagagcctcactgctgtacttcattatgaacgaccttagtaagatacatcccatgtaccagttttccctcaaggcattctctattgtgtttcagaaagcagttgagcgtgcagcccctgacgaatcgctcagagagagagtcgccaacctaatcgacagcattaccttcagtgtgtatcagtatacaattagggggctcttcgagtgcgataagcttacatatctcgcccagcttacctttcagattcttctcatgaatcgcgaagttaacgccgtggaactggattttctcttaagatcccccgtccagaccgggaccgccagtcctgtagaattcctgagccaccaagcttggggggccgttaaagtgctgagttcaatggaggaattctcaaacctcgatcgcgatatcgagggttccgctaaatcgtggaagaagttcgtggagtcagagtgtccggaaaaggagaagctccctcaggagtggaaaaacaagactgccctgcagagactgtgcatgctgagggcaatgcgccccgacaggatgacctatgctctgagagactttgtcgaggagaagctcgggagcaagtacgttgtaggacgagccttggactttgcaacatcttttgaggagagcggcccagccactccgatgttcttcatcctgtctcccggagttgatcctctgaaagacgtggaatctcaggggcgtaagctcggatataccttcaataaccaaaattttcataacgtctctctcggtcaaggccaagaggtcgttgctgaagcagccctcgatctagctgccaagaagggacattgggtgatcctccaggacaccctggagatgtgtagcagggagacagaatttaaatcgatcctgttcgccttgtgttacttccacgcagtcgtagctgagcgaaggaaatttgggccacaggggtggaaccggtcatatccctttaacaccggagatctgaccatctctgtgaatgtcctttataatttcctcgaggctaacgcgaaagtgccttacgacgacctcaggtacctctttggtgagattatgtatggcggccacataacagacgactgggaccgccgcctctgccggacgtatctgggtgaatttattagaccagaaatgcttgagggagagctgtcactcgctccaggatttccattgcccggtaacatggactataacgggtatcaccagtacatcgatgccgaactgccacccgaatcgccttatttatatggtcttcatccaaacgccgagatagggttccttacccaaacgtctgagaagctctttaggactgtgctggagctgcagccacgagactcgcaggcccgggatggagccggcgccacccgggaagagaaagttaaggcactcctcgaagagattctggagcgagtaacagacgagttcaacattcccgagctgatggcgaaggtagaggaacgtaccccttatattgtggtggccttccaggagtgtggtcgcatgaacatcttgactcgagagatacaaagatccttgcgtgagttagagctgggactgaaaggagagctgactatgacctctcacatggagaatctgcagaacgcgctgtacttcgatatggtaccagaatcctgggctcgcagggcgtatccatctacggcaggattggcagcctggttccctgacctgctgaatcgcatcaaagagctggaggcttggaccggcgactttacgatgccgtctacagtttggctgacagggttctttaatcctcaaagttttctgacagccattatgcagagtacggctcggaaaaacgaatggccccttgatcaaatggctctgcaatgtgatatgactaagaaaaatcgagaggaatttcgtagtccgccacgtgaaggggcatacattcacgggttgttcatggagggcgcatgctgggacacacaggccggtatcattaccgaagccaaattgaaggatctgactccccccatgcccgttatgtttatcaaagccatccccgctgacaagcaggattgtcgctccgtatattcctgcccagtgtataagacttctcagcgtggccccacctatgtttggacttttaatcttaaaacaaaggagaacccctcaaaatgggtcctggctggcgtggcactgctgttgcagatctag

SEQ ID NO: 115257 - DNA, 13233 bp, synthetic construct
  misc_feature 1..13233: note = Description of Artificial Sequence: Synthetic coding sequence
  source 1..13233: mol_type = other DNA
atgaggttggcagaggaacgggcagctctggctgccgaaaacgccgacggggaacccggtgctgaccggcgcctgcgtttattgggcacttatgtcgctatgagcctgcgtcctgccgccggtgcatgggagcgctgcgcaggatcagctgaagctgagcagctgctgcaggccttcctaggacgggatgctgcagagggccctagacctctgctggtcgtaaggcctggaccaaggggattggcaatccgaccaggtctcgaagtcggtcctgaaagcggattagcgggtgccaaagcactgtttttcctccggacgggccccgaaccccctggtccagacagtttcaggggcgcagtagtgtgtggtgacctgcctgccgcaccactggagcacctcgcagcgctctttagtgaagttgtgttacctgtcctagccaacgagaagaataggctgaactggcctcacatgatctgcgaagacgtccgccgtcatgctcatagcttacagtgtgacctgagtgttatcctcgaacaggtcaagggcaagacgctgttaccactcccagctggttctgagaagatggaattcgcagactcaaaaagcgagactgtgctcgatagtatagacaagagcgtgatctacgctatagagagcgccgtcatcaaatggagttatcaagtccaggtggtgttaaagcgcgaatcatctcaacctttgctccagggagagaatcccacacccaaagtggaattagagttctggaagtcccgttatgaggacctgaaatacatttacaaccagcttcgcaccatcaccgtgagaggaatggcaaaactgctggacaaacttcaatcatcatactttcctgcctttaaagcaatgtaccgagatgtagtagccgccttggctgaggcacaggatattcacgtccacctgatcccactgcagcgccacctggaggccctggagaacgcagagtttccagaagtaaaacctcagctgagaccattgctgcacgtggtgtgcctgatttgggcgacctgcaagtcataccgctcacccggccgcctgactgtcctgctgcaggaaatctgcaacctgctcattcaacaggcctccaactatctgtctcctgaggatctgcttagatctgaggtcgaagaatcacagcgaaagctacaggtcgtcagtgatacactgtcattctttaagcaggagttccaggatcggcgtgagaatttgcacacatacttcaaggaaaatcaagaagtgaaggagtgggatttccaatcatctctggtctttgtaaggttggacgggtttttgggacaactgcacgtggtagagggattgctgaaaacggcactggattttcacaagttgggtaaagtggagttcagcggcgtccgcggcaacgccctgtcacagcaggtccagcagatgcatgaggaatttcaggaaatgtatcgcttgctctctggatcttcgagtgactgcttgtatctccagtctacagacttcgagaatgatgtctctgagtttaaccagaaggtcgaagatttagatcgtcgcctcggcaccatctttatacaggcatttgatgacgcaccgggactggaacacgcttttaagctgctggatatagctggaaacttgttggagcgtcccttggtggcacgagacacttctgacaagtatttagttctgatacagatgtttaacaaagatctcgatgcagtgcgcatgatatactctcagcatgtccaggaagaggccgaactgggcttttctcccgttcataagaatatgccaactgtggccggagggcttaggtgggcacaggagctacggcagaggatacagggacctttctccaacttcgggcggataactcatccgtgcatggaatcagccgagggcaagcggatgcagcagaagtacgaggacatgcttagtctgctcgagaaatatgagaccagactctatgaggattggtgtagaactgtgagtgagaagtcacaatacaacctgagtcagccacttcttaagcgagaccccgagaccaaggagatcaccataaacttcaatccccagctaatcagcgttttaaaagaaatgagttacctggagccgcgggaaatgaagcatatgcccgaaaccgccgccgctatgttctccagcagagacttctaccgccaacttgttgcaaatcttgagctgatggcaaattggtataataaggtgatgaagaccctgctggaagtcgagttccccctagtggaagaagagctccagaacatcgacctgagactgagggcagcagaagagaccctcaattggaaaacagaagggatttgtgactatgtgacggagatcacatcatccatccatgacctggagcagcgcatccagaagacaaaggataatgttgaagagatccagaatattatgaagacctgggtgacacctatttttaaaaccaaggatggaaaacgtgagtctctcctgtccttagatgaccgccatgaccgtatggaaaaatattataacctgataaaagaatcaggactcaagattcatgcattggtccaggaaaatctgggcctgttcagcgcagaccctacctctaatatttggaaaacttatgtgaacagcatcgacaaccttctgctgaacggctttttcctggctattgaatgttctctgaagtatttgttagaaaacaccgagtgtaaagcaggtttgactccgatttttgaagctcagctgtcactggccatcccggagctagtgttctacccttcattagaatccggagtcaagggaggattctgtgacatagtcgagggcttgattacatcaattttccgaattccatcacttgtcccaagactgagcccccagaacgggagtccacattatcaagtggatctggatggaatcccagatttggctaacatgcggcggaccctcatggagcgggttcaaagaatgatggggctttgctgcggctaccagagcacgttctcccaatactcatacctatatgttgaggatcgtaaagaagtcttgggtcagtttctcctgtacggccacattttgacacccgaagaaatcgaggatcacgtggaggacggaatccctgaaaatcctcccttattatcccagtttaaggtgcagattgacagttacgaaacactctacgaggaagtatgcagactagagccaatcaaggttttcgacggatggatgaaaattgacatccgcccttttaaggcatcccttctgaacattattaagcgctggagcctgctgttcaaacaacacctggtggatcacgtaacccatagcctcgcaaatctggacgcttttatcaaaaagtctgagtctgggctgttgaaaaaggtggagaagggagatttccaaggtctagtcgagataatggggcacctcatggcggtgaaggagaggcagagcaataccgacgagatgtttgagcccctaaagcagacaattgagttgcttaaaacatacgaacaggaactccccgagacagtgttcaaacagctggaggaactgcccgagaaatggaataacattaagaaagttgccatcactgtgaaacaacaggtggcccccctgcaggctaacgaggtgacgctacttagacagcgctgtaccgcatttgacgctgagcagcaacagttttgggaacagtttcacaaagaagccccgtttcggtttgattctattcatccccaccagatgctggatgctagacacatcgagatccaacagatggaaagcaccatggcctccattagcgagtcagcctcattgttcgaggtcaatgtgcccgattataagcagctgcgccagtgtcgcaaagaggtttgccagctgaaggaattgtgggacaccatcggaatggtaacaagctcgattcatgcctgggagaccacaccatggcgtaacatcaatgtggaggctatggagctagaatgtaaacagtttgccaggcacatccggaatctggacaaggaggttcgcgcatgggatgcgtttaccggcctggaaagcacagtgtggaacactctgtccagcctacgagcggtcgcagaacttcagaacccagcaattcgcgagcggcattggcgccaattaatgcaagcaaccggcgtgtcatttacgatggaccaggacacgacattggcacacctgttacagctgcagctacaccactacgaagacgaggtgcgtggcatagtggacaaagcagcaaaagagatgggtatggaaaagaccctgaaggagctgcagaccacttgggcaggcatggagttccagtacgagccacaccccagaactaatgttcccctgctgtgctctgacgaagatttaattgaagttctggaagacaaccaggttcagctgcagaatctcgtgatgagcaaatacgtggctttcttcctggaggaagtgtctgggtggcagaagaagctaagtaccgtggacgcggtcatttcaatttggttcgaggtgcagcgcacctggacacatctcgaatcaatttttactggcagcgaggacattcgtgcccaactgcctcaggattctaagcggtttgaaggcattgacatcgactttaaggaactggcctatgacgcacaaaagatccctaacgtagtccaaacaacgaataaacccggattgtacgagaaactcgaggatattcaggggagactatgcctatgtgagaaggccctggctgaatacttggatactaaaagactggccttccctcggttctattttcttagttcatccgatctgttagacatactaagtaatggaaccgcgccacagcaggttcagagacatctgtctaaactgttcgacaacatggcaaaaatgagattccagcttgacgcttccggcgaacccacgaaaaccagtctcggaatgtactcgaaagaggaggaatatgtggctttttccgagccctgtgattgttcaggccaggtggagatttggctcaaccacgtgctaggacatatgaaagccaccgtgaggcacgaaatgactgagggggttactgcctacgaagagaaaccacgtgagcagtggctgtttgatcatcccgcccaggttgcgctgacctgcacccagatctggtggacaacagaagttggcatggcattcgcaagattggaagagggctacgagagcgctatgaaagactactacaagaaacaggtcgcacagctgaaaacgttgatcactatgcttatcggacagctctccaagggagatagacaaaagataatgactatctgcaccatcgacgtgcacgcccgggatgtggtcgccaaaatgatcgcccagaaggtggataacgcacaagccttcctgtggttgtcacagctgcgccatcgctgggacgacgaagtgaaacactgcttcgcgaatatctgcgatgcccaattcctttacagctatgaatacctgggcaatactccgaggttagtgatcacaccgctgacggatagatgttatattacgctgacgcagagcctgcaccttacgatgagcggggctcccgcaggtcccgccggaacaggaaagaccgagacaactaaagatcttggtagagccctcgggattttggtgtacgtcttcaattgtagtgagcaaatggattataagagctgcggtaatatttacaaaggtctggcgcaaaccggagcatgggggtgcttcgatgagtttaatcgcattagtgtcgaggtcttaagtgtggtggcagttcaggttaaaagcattcaggatgccattagagacaaaaaacagtggttcagctttcttggagaggaaatctcccttaatcccagcgtaggtatcttcatcacaatgaatcctggctacgccgggcgcaccgagctccccgagaaccttaagtctctgtttaggccttgtgccatggtcgtcccagacttcgagttgatttgcgaaatcatgctagtcgccgaaggatttattgaggcccagtcattggcacggaaattcattacattgtatcaactctgcaaggaattgctctctaaacaggaccactacgactggggtctccgcgccattaaaagtgtgctcgttgtggccggcagtcttaagcgaggagatcccgacaggccagaggaccaggtcctgatgcgctccctgcgcgattttaacatccccaagatcgtcaccgacgacatgccgattttcatgggcctgatcggtgacctgttccccgccctggatgtgcctaggcgccgagatcccaacttcgaagcgctggtgcggaaagctattgttgacctcaaacttcaggcagaagataatttcgtcttaaaagtggtgcaacttgaagaactcttggcagtcagacatagcgtctttgtggtgggcggcgcagggactggcaagtcacaagttttgcggtccctacataaaacctaccagatcatgaagcgccggccagtatggacagacttgaatcccaaggccgtcacaaatgacgaactgttcggcatcatcaatcccgctaccggagaatggaaagacggcttgttctcttccatcatgagggagctggccaacatcacccacgacggaccaaagtggatcttacttgacggcgacatagatcctatgtggatcgaaagcctgaacactgtcatggatgataacaaggtgctgacgcttgcctccaatgagcgaataccactcaaccccactatgaaactgcttttcgaaatctcccatttgcggaccgctactcctgcaactgtatctcgcgctgggattctgtatattaaccctgccgacctgggctggaacccccctgtgagcagctggatcgagaaacgagagatccagacagagagggccaatttgaccatactctttgataaataccttcccacctgtctggacacgctgagaacgaggtttaaaaaaattattccgattcctgaacagagcatggttcaaatggtttgtcatctgttggaatgcttactaacgacagaagatattccagcggattgccccaaggaaatttacgagcactattttgtattcgccgcaatatgggcctttggcggcgcaatggttcaggaccagctggtggattatagagcagagttctctaaatggtggttgacggaattcaagaccgtcaagttcccgagccaaggaaccatttttgactactacattgatcctgagacaaagaagttcgaaccctggtccaaactcgtgccccagttcgagtttgacccagagatgccccttcaggcctgtctggtgcacactagtgagactattcgcgtatgctattttatggagaggctgatggccagacagcggccagtcatgttggtgggcactgccggtactggtaaatcagtcctggtcggggcgaaactggcgtcacttgatcctgaggcttacttagtgaagaatgtaccgttcaactattacaccaccagcgcaatgctccaagcagtgctggaaaaaccgctggaaaagaaagcgggaaggaattatggtccaccaggaaacaagaagctcatctattttattgacgatatgaatatgcccgaagttgacgcctatggcaccgtgcagccgcacacaataatccggcagcacctcgactacggccattggtatgaccgtagtaagttgtccttgaaggaaatcaccaatgtccagtacgtatcctgtatgaacccaaccgctgggagtttcaccattaacccccgtctgcaacgccacttctccgtgttcgtgttatcctttccgggggccgacgctttgtctagcatctattctattatactaacacagcacttaaaactgggcaactttcccgcgtcgctgcaaaaaagcattccaccattaatcgatctggccctggctttccaccagaagattgccaccacctttttgcctacaggaataaaatttcactatatctttaacctcagggactttgccaacatcttccaaggtattctgtttagtagtgttgaatgcgtgaaaagtacctgggacctgattaggctgtatcttcatgagagtaatagagtgtaccgcgataagatggtggaagagaaggactttgacctgtttgataagattcagactgaagtactgaaaaaaactttcgatgacattgaggacccggttgaacagacacagtcccccaatctctattgccactttgccaacggcatcggtgaacctaagtatatgcccgttcagtcctgggagctcctgacccagacactggtggaagcgttagaaaatcacaatgaggtgaacactgtgatggatctggtgctgttcgaagatgcaatgcgacatgtgtgccacatcaataggatactcgagtccccccgtggcaatgcccttctcgtaggagtgggcggctcaggaaaacagtcgcttactcgactcgccgcttttatctcctcaatggatgtctttcaaatcacccttagaaaaggctatcagatccaggattttaaaatggatctggcttccctttgccttaaagctggagtcaagaatctaaatacagtctttctgatgaccgacgcacaagtggcagacgagcggtttctggttctcattaacgatctcctggcttccggggaaattcccgatctgtatagtgacgatgaggtggagaatataatctccaacgtccgcaacgaggtgaaaagtcagggcctggtggacaacagagagaattgctggaaatttttcattgatcggatccggcgccagctgaaggtgactctctgctttagccctgtcggcaataagttgagagtgaggtctcggaaatttcctgccatagtgaactgcaccgcaatccattggttccacgaatggccccagcaggccctcgaatccgtatcacttcgcttcctgcagaacacagagggtattgaacctaccgtgaaacaaagcataagcaagtttatggccttcgtgcacacttctgtgaaccaaaccagccaatcttacttgtcaaacgaacaacggtataattataccacacccaagagttttctcgagttcatcaggctctaccagagcttactacatagacaccgaaaagaactcaaatgcaaaactgaacggcttgaaaatggcctacttaaactgcacagtacctctgctcaggtggatgaccttaaggccaagttggctgcgcaggaggtggagctgaaacagaaaaacgaagacgctgacaaacttatccaggtcgtcggcgttgagacagacaaggtgtcccgagaaaaggccatggcggacgaggaggagcagaaagtcgccgtgatcatgcttgaagtgaagcagaagcagaaggactgtgaagaggatctcgctaaagccgagcccgcgcttaccgccgcccaggctgcccttaacaccctaaataaaacgaatttgactgagcttaaatccttcgggtcccctccacttgctgtttccaatgtcagcgcggccgtcatggtgctgatggcgcccagagggagagtcccaaaagataggagctggaaggctgcgaaggtaactatggctaaggtagacggcttcctcgactccctcatcaactttaacaaagagaacatccatgagaattgccttaaggcaattaggccatatcttcaggaccccgagttcaatcctgaattcgtggctaccaaatcctatgctgcagccgggttatgcagttgggtgattaacatagttcgcttttacgaggtgttctgtgacgtggagccaaaacgccaagccctcaacaaggccactgccgatctcaccgcagctcaggaaaaactggctgcaattaaggcaaaaatcgcgcaccttaacgaaaacctcgccaaattaaccgccaggttcgaaaaagctacggccgacaagctgaagtgtcagcaggaagccgaagtgacggccgtgaccatcagtcttgctaaccgactggtcggtggactggccagtgaaaatgtgcggtgggcggacgcagtgcagaatttcaaacaacaggagaggaccctgtgtggcgacattttgttgattactgcgttcatttcctacttgggattctttacaaagaagtaccggcaatctctcctggaccgcacatggagaccttacctatctcagctgaagacaccaatccccgtcactcccgccctggacccattgcgcatgctgatggatgatgccgacgtggcagcatggcagaacgaaggcctccctgccgaccggatgagcgtggaaaacgccactatcctgatcaactgcgagagatggcccctaatggttgacccacagttacagggaatcaagtggattaaaaataagtacggcgaagatctacgggtaactcagatcggtcagaaagggtatcttcagattattgaacaggcacttgaggcaggtgcagtcgtgctgattgaaaacctggaggagtccatcgatcctgtccttggcccactgttgggcagagaggtgataaagaaaggccgattcataaagattggggacaaggagtgtgagtataatcctaaattccggctgattctgcatacaaagctcgccaacccccactaccaacctgaactgcaggcccaagctaccttgatcaatttcacggtcacaagggatgggcttgaagaccagcttctcgcagctgtggtaagcatggagcgtccggaccttgagcaattaaagagtgatttgactaaacaacagaatgggttcaaaattactctcaagacgctcgaggatagcctgctcagtaggctttccagcgcgtccggcaatttcttgggcgagacagtgctcgtcgaaaatttagaaatcaccaagcaaacagccgcagaagttgagaagaaagtccaagaggctaaagtcacagaggtgaaaataaacgaggcccgggagcactaccgaccagctgccgctcgcgcatctttgctctatttcattatgaatgacctgtccaaaattcatccgatgtatcagttctccctcaaggcattcagcattgtgttccagaaggctgtggagcgcgccgcccccgacgagagtctgcgagaaagggtggctaacttgatcgactccattacattttcggtgtaccagtacacaatccgaggcctgtttgagtgcgacaaactgacctatctggcccagctaacctttcaaatcctgttaatgaatcgggaagtaaacgccgttgagttagacttcctcctcaggagtccagtgcagactggaactgcatcaccggtcgaattcctgtctcaccaggcatggggggcagtcaaggtgctgagctctatggaagaattttcaaacctcgaccgggacattgaaggcagtgccaagtcttggaaaaaatttgttgagtctgaatgtcctgagaaggaaaagttgcctcaagagtggaaaaataagacggctctacagaggttgtgcatgctcagagctatgcggcctgacagaatgacctatgccctcagagacttcgtcgaagagaagctcggtagtaagtacgtggtgggtagggccctcgacttcgccacatctttcgaggagtcaggccccgcaacacccatgtttttcatcttgagccccggggttgatccactcaaagacgtagaatcccaaggcagaaagctgggatatacttttaacaaccagaacttccacaacgtctcccttggacaggggcaggaagtcgtggcagaggcagctctcgatctggcggctaaaaaggggcattgggtgatcctccaggataccctggaaatgtgcagcagggaaaccgagttcaagagcatattgtttgcactctgttattttcatgctgtggtggctgagcggcggaaattcggcccccagggctggaacaggagctatcctttcaatactggcgatctgactatttctgtgaacgtcctttacaactttctggaggccaacgcgaaggtcccctacgatgacctgaggtacctgttcggcgagattatgtacggggggcatataacagatgattgggacaggaggctttgtcgcacgtatctgggtgagtttattaggcccgagatgctagaaggggaactgagcctggccccaggctttcctttgcccggtaatatggactacaacggttatcaccagtatatagacgcggaactgcctcctgagagtccatacctttacggactgcatccaaacgccgaaatcggtttcctgacacaaacctcggagaagctcttcaggactgtactcgaactgcagcctagagactcccaagcccgcgacggcgcaggggcaactcgggaggaaaaggtgaaggcacttcttgaggagattctcgaacgggtcaccgacgagtttaacatacccgaactaatggccaaagtcgaagagagaacgccatacatcgtagtggcgttccaagaatgcggcaggatgaacatattaacccgtgaaatccaacgttctttgcgggaactggagctcgggttaaaaggcgaacttacaatgacttcccatatggaaaacctgcagaatgccctgtatttcgacatggttcctgagtcctgggcacgccgcgcgtacccgagtaccgcaggactagccgcgtggtttcccgatctgctgaaccgaataaaggaattagaggcgtggactggggactttaccatgccatccaccgtctggctgacaggcttcttcaaccctcagtcctttctgacggccatcatgcagtcaacagccaggaagaatgagtggcccctggaccagatggcactgcagtgcgatatgacgaaaaaaaacagggaggagtttaggagcccaccgcgcgaaggggcttatatccatggactctttatggaaggagcttgctgggacacccaagccggaatcataaccgaggcaaagctgaaagaccttaccccccctatgcccgttatgttcatcaaagcgatccccgccgacaaacaggactgtaggagtgtgtatagctgcccagtttacaagacgtcacagcgtgggcccacatacgtctggacatttaatctaaagaccaaggagaatccaagcaaatgggtattagccggggtcgctctgctcctgcagatttag

SEQ ID NO: 115258 - DNA, 2100 bp, synthetic construct
  misc_feature 1..2100: note = Description of Artificial Sequence: Synthetic coding sequence
  source 1..2100: mol_type = other DNA
atgatccctgcaagcgccaaggctccccataaacaaccccacaagcaaagcattagcattggccgtgggacgagaaaacgtgatgaagactctggtacagaggtcggagaaggcacagacgagtgggcacagagtaaggctaccgtccgacccccagaccagctggaactgacagatgccgagctgaaggaggaattcaccagaattcttactgcgaacaaccctcacgctcctcagaatattgtgaggtacagctttaaagagggcacatacaagcctatcggcttcgttaatcaactggcagttcactacacccaagtcggcaaccttattcccaaggattctgatgagggaagacggcaacattatagagatgaactggtagcggggagtcaggaaagtgtaaaggtcattagcgagaccgggaacctggaggaagatgaagagcccaaggagctcgaaaccgaaccaggttcacagacagacgtgcctgccgctggcgctgccgaaaaagtgacagaagaggagcttatgactccaaagcagcccaaggagcgcaagttgaccaaccagttcaatttctccgagcgtgctagtcaaacctataataatccagttcgcgacagggagtgtcagaccgaacccccgcccaggactaacttttcggccaccgcaaaccaatgggagatctacgacgcatacgtggaggagctcgagaagcaggagaagaccaaagaaaaagaaaaggcaaaaactcccgtcgcaaagaagagtggtaagatggccatgaggaagctgacatcaatggaatctcaaacggacgatctcattaagttaagccaggcggcaaagatcatggagcgaatggtcaaccaaaatacttacgacgacattgctcaggactttaaatactacgatgacgccgccgatgagtatcgggatcaggtggggactctcctgccgttgtggaagtttcaaaatgataaagcgaagcgcctgtcggttacggccctgtgctggaaccccaaatacagggacctatttgccgtgggttacggcagttatgatttcatgaaacagtccagaggaatgttgcttctgtattccctcaagaatccttccttccctgaatatatgttttctagcaacagcggggtgatgtgtctggacattcacgtggatcatccttacctggtcgcagtggggcactatgacgggaatgtggccatttacaacttgaagaagccccactcgcaaccatcattctgtagtagtgccaaatcaggcaagcatagtgaccccgtttggcaagtcaagtggcaaaaagatgacatggatcagaacctgaacttcttctctgtctcgtccgatggacgaattgtgtcctggacccttgtgaagcgtaaactggttcatatcgacgtgattaaactcaaggtggaggggtctaccactgaagtgcccgaggggctccagctgcatcccgtggggtgtggcacagccttcgactttcataaggagattgattacatgtttctggtgggtaccgaagaggggaaaatttataagtgctcaaagtcttattcaagtcaatttctggacacctatgatgctcataatatgtccgtggataccgtctcgtggaatccctaccatactaaggttttcatgagttgcagctctgattggaccgtgaagatctgggaccataccatcaagactcccatgttcatatatgatctcaattctgcagtaggcgacgtggcctgggcaccctacagctccaccgtcttcgctgctgttactaccgatgggaaggctcacattttcgaccttgccataaataagtacgaggccatttgcaaccagcccgtagcagccaagaagaatcgccttacacatgtgcagttcaacctgatccaccctattattattgtgggcgatgatagaggccacattatctccctgaaactgagcccaaaccttaggaagatgcctaaggagaagaaagggcaagaggtccagaagggaccggcagtggaaattgccaaactggacaagctgctgaacctggttagggaagttaagataaaaacctag

SEQ ID NO: 115259 - DNA, 585 bp, synthetic construct
  misc_feature 1..585: note = Description of Artificial Sequence: Synthetic coding sequence
  source 1..585: mol_type = other DNA
atggaccaaaatctgaacttttttagcgtcagcagcgatggacgcattgtcagttggacacttgttaagcgtaaactggtacatattgacgtgatcaagctgaaagtggaaggctcaacgacagaagttcccgagggtctgcagctccaccctgtggggtgcggtaccgcgtttgatttccataaagaaattgattacatgtttttggttggtacagaagaaggtaagatatataagtgtagcaagagttatagttctcagtttctggatacctacgacgcccacaatatgagtgtcgacacggtctcctggaatccgtatcacacaaaggtgtttatgtcttgtagttctgactggaccgtcaaaatttgggatcacaccattaaaactcctatgttcatatacgacctgaacagtgctgttggcgacgtggcctgggctccttacagctccaccgtttttgcggccgtgactacggacggaaaagagaaaaaagggcaggaggtgcaaaaggggccagccgtggaaatcgcgaagttagacaaactgttaaatctcgtgcgcgaagtgaaaattaaaacatag

SEQ ID NO: 115260 - DNA, 870 bp, synthetic construct
  misc_feature 1..870: note = Description of Artificial Sequence: Synthetic coding sequence
  source 1..870: mol_type = other DNA
atgatccccgcgagcgccaaggcccctcataagcagcctcacaagcaggacgaggacagcggaacagaagttggggaaggaacagacgagtgggcgcagtcaaaggccactgtcaggccacctgatcaactcgagctgaccgacgctgagcttaaagaagaattcacgagaattttgactgcgaacaatccacacgccccacagaacatcgtgcgttactcttttaaagaagggacatataagcctattgggttcgtaaaccagctggccgtacactatacccaggttgggaacctgatccccaaagacagcgatgaaggaagacgacaacattacagggatgagctggttgctggcagtcaggagtcagtcaaggtcatcagtgaaacgggtaatctggaggaggatgaagagccgaaagagctggagactgaaccggggagccagactgatgtcccggccgccggtgccgctgaaaaagtcacagaggaggagcttatgacccctaagcaaccaaaggaaaggaaacttaccaaccagtttaacttctctgagcgtgcctcccagacttacaataacccagtcagggaccgggagtgtcaaacagaacctccaccaaggactaacttttcagccacagctaaccaatgggaaatctacgacgcatacgtggaagaactcgagaaacaggagaaaactaaagaaaaagaaaaggctaagacccccgtcgctaaaaagagcggcaaaatggccatgcgcaaactcactagtatggaaagtcagaccgacgacttgatcaaactgtcacaggccgccaaaatcatggaacgaatggtcaaccagaatacttacgacgacatcgcacagtag

SEQ ID NO: 115261 - DNA, 870 bp, synthetic construct
  misc_feature 1..870: note = Description of Artificial Sequence: Synthetic coding sequence
  source 1..870: mol_type = other DNA
atgattccagcaagtgctaaagcacctcacaagcagccccacaaacaagacgaggactccggcactgaggtgggtgaagggacagatgaatgggctcagagcaaagcaaccgtgcgcccccccgaccagcttgagttgacggatgccgagctgaaagaggagtttacgagaatcctcactgccaacaacccacacgccccccagaatatagtacgctacagtttcaaagaggggacatacaaaccgattggctttgtcaatcaactggccgttcactatacccaagtcggaaaccttatcccaaaagatagtgacgaaggccgtcgtcagcattaccgagacgagctcgtggctggttcccaggagagtgtaaaagtcatttcagagaccggcaacctcgaggaagatgaggagcctaaagaactcgagaccgaacctgggtcccagacagatgtacctgcagctggtgccgcagagaaggtaactgaagaggagctgatgacccccaagcagcctaaggaacgtaaactaactaaccagtttaatttcagtgaacgggctagccaaacatataacaaccccgtgagagatagggagtgtcagaccgagcctccccccaggaccaatttttctgctactgcgaatcagtgggaaatttacgacgcatatgtcgaagaactagaaaagcaggaaaagacgaaggaaaaggagaaagcgaagacacccgtggctaagaaaagcggaaaaatggccatgcgcaaattgacctccatggagagtcagacagatgatctgatcaagctttctcaggcagcaaagattatggagagaatggtaaatcaaaacacttacgatgacatcgcgcagtag

SEQ ID NO: 115262 - DNA, 429 bp, synthetic construct
  misc_feature 1..429: note = Description of Artificial Sequence: Synthetic coding sequence
  source 1..429: mol_type = other DNA
tgatgcggcaccgcttttgacttccacaaggagatcgattacatgttcttggtggggactgaagaaggtaagatttacaagtgctctaaatcctattccagtcagttcctggacacctacgacgctcacaatatgtcagtggacacagtaagttggaacccttaccatacaaaagtttttatgtcatgcagcagcgattggacagtgaagatctgggatcatacaattaagacacctatgtttatatatgatctaaactctgcggttggggacgttgcttgggctccctactcgagcacggtatttgcagcagtaacaactgatggcaaggaaaaaaaggggcaggaggtgcagaaagggcctgcagttgaaatagctaaactggacaaactgctaaacctcgtccgcgaagtgaagattaagacatag

SEQ ID NO: 115263 - DNA, 507 bp, synthetic construct
  misc_feature 1..507: note = Description of Artificial Sequence: Synthetic coding sequence
  source 1..507: mol_type = other DNA
atgattcctgcgtctgccaaggctccacataagcagccgcataagcagtcaatttctataggccgtggcacaagaaagcgtgacgaggactctggcactgaagtgggagagggcaccgatgagtgggcacaaagcaaagccacagtgaggcctcccgaccagctagaactgacagatgctgagctcaaggaggagtttacccggatcctcaccgcgaataacccacacgcaccacagaacatagtgcggtatagctttaagaaacagtggtccctcggtttcatccctaaactaaagaggaaaattccagtaaattactggggccaggatgaaggcgagatctccaacgagactgttagagtaatctacagtcttggaatctttatcatgaagattgtgacaatccttctgaatatcaacattgaacatctgctctgcgtgagacactgtgtgaacaggctgtttctcctgtttctgatccttattataataatgcaaatcaggtag

SEQ ID NO: 115264 - DNA, 1209 bp, synthetic construct
  misc_feature 1..1209: note = Description of Artificial Sequence: Synthetic coding sequence
  source 1..1209: mol_type = other DNA
atgcgtacaaccctcacaccctcctgtagcagcgctctcgatccacaggaaataaaacgggccgcaacccacctttcctggcaccccgacggaaaccggaagctcgccgttgcatattcatgcttggactttcagagagccccagttggcatgtcaagtgattcctacatctgggatttggaaaatccgaataaacccgaacttgcacttaaaccctcctctccattggtcacactcgaattcaatcccaaggactcacacgtcctcctgggggggtgctataatgggcagatcgcatgttgggatacacgaaaagggagcctcgtggccgagctctcaactattgaatctagccatcgagaccctgtctacgggaccatctggctgcagtccaaaacaggaacagaatgtttttctgcttcaacagacggacaagtaatgtggtgggacattcggaagatgagtgaaccaaccgaagttgtcatcctggacatcactaaaaaggaacagctagaaaacgctctgggcgcgatatcgcttgaattcgaaagtacactgccgactaagttcatggtgggcaccgagcagggaattgtgattagctgcaaccgcaaggctaagaccagcgccgaaaagatcgtctgtaccttccccggccaccatgggcccatctatgcacttcagcgcaatccattttacccaaagaacttccttacagttggagactggacagcccggatatggagcgaggatagccgagagagctccattatgtggaccaagtaccacatggcttacctgaccgacgctgcatggagccccgtgaggcccacggtatttttcacaaccaggatggacggcacccttgatatctgggacttcatgttcgagcaatgtgaccccaccctgtcactgaaagtatgtgacgaggcactgttctgtcttagagttcaagataacggatgtctgattgcctgcggttctcagctgggtacaacaaccctcctggaagtcagtcccggtctgtcaacgctccagaggaacgagaagaatgttgcctcatccatgttcgagagagaaacccgtcgagagaagattcttgaagcacgccatcgtgagatgaggctaaaggagaaagctgcaaccaaaagtcggagacgacctggcggtgggggtggtcggggaagcagcggcggacggcggggttag

SEQ ID NO: 115265 - DNA, 1818 bp, synthetic construct
  misc_feature 1..1818: note = Description of Artificial Sequence: Synthetic coding sequence
  source 1..1818: mol_type = other DNA
atggagatcgtctacgtctacgtcaagaagaggagcgagttcggcaagcagtgcaatttctcagacagacaggcggagctcaacatcgatattatgcctaatcctgaactggcagagcaattcgtggaacggaacccagtggacactggcatccagtgctcgatctctatgagtgaacacgaggccaatagcgagcggttcgaaatggagacaagaggtgtgaatcacgttgagggcggttggcccaaagatgtgaaccccctcgagttggagcagacgatccggttcaggaagaaggttgagaaagatgaaaattatgtaaatgctataatgcagctcggcagtattatggaacattgcattaagcagaataatgccatcgacatttatgaggaatatttcaacgacgaggaggccatggaagtcatggaggaagatcccagtgctaagactatcaacgtgtttcgcgatccccaggagatcaagcgtgccgcaactcacctctcctggcatcccgacggtaaccgcaaactggccgtagcgtactcatgtctcgattttcagcgtgccccggtgggtatgagttccgacagctatatctgggacctcgaaaatccgaacaaaccggagctcgctctaaaacccagctcacccctcgtaaccctggaatttaaccctaaggatagccatgtgctgcttggtggatgttacaacgggcagatagcctgttgggataccagaaagggctcactggtcgctgaactgagtaccatagagtctagccatagagatcccgtatacgggacgatctggcttcagtcaaaaacaggtaccgaatgcttctcggcctcaaccgacggccaggtcatgtggtgggatattcggaagatgtctgaaccaacagaggttgtgatcctcgacatcaccaagaaggaacagctcgaaaacgcacttggagctatttccttggaatttgaatccaccctgcctaccaagttcatggtgggcaccgaacagggtattgttatcagttgtaaccgcaaagccaagaccagcgcggaaaagattgtttgtacctttccaggacatcacgggcccatttatgctctgcagcgcaaccccttctatcccaagaactttctgactgttggagactggactgctcggatctggagcgaggatagcagggagtcctccataatgtggaccaaatatcacatggcatacctgaccgatgctgcctggagcccagtccgccctaccgtcttcttcacaacccggatggacggcacactcgacatctgggacttcatgtttgaacagtgcgaccctacactgtcccttaaggtgtgtgatgaagccctgttttgtcttcgagtgcaggataacggttgcctaatcgcttgcggatcccagttaggcactaccactctgctggaagtgagtccagggttgtcaactctacagcggaacgaaaaaaatgtggccagctctatgtttgagagagagaccaggagagagaagatactggaagcccgccacagagagatgcgattgaaagagaagggtaaggccgaaggtcgggacgaggagcagactgatgaggagctagcagtcgacctggaagctctcgttagcaaagcagaggaagaatttttcgatatcatctttgctgaattgaaaaaaaaggaggccgacgccattaagttgacacccgtccctcaacagccctctcctgaggaagatcaggttgttgaagagggggaagaagctgctggggaagagggggatgaagaggtggaagaagatctggcctag

SEQ ID NO: 115266 - DNA, 1818 bp, synthetic construct
  misc_feature 1..1818: note = Description of Artificial Sequence: Synthetic coding sequence
  source 1..1818: mol_type = other DNA
atggagatcgtgtatgtgtacgtcaaaaagcgttctgaatttggaaagcaatgcaactttagcgatcgacaagccgagctcaatatcgatatcatgcctaaccccgaactcgccgaacagttcgtcgagaggaaccccgtggacactggcatacagtgcagcatttcgatgtcagaacatgaagcaaatagcgagagatttgagatggagacacgcggggtgaaccacgtggaaggcgggtggccaaaggatgtcaaccccctagaactggagcaaacaatccgtttcaggaaaaaggtcgagaaggatgagaattatgtgaatgccattatgcagctgggaagtataatggagcattgtataaaacaaaataacgcaatcgacatatacgaggaatacttcaacgatgaagaggctatggaggtaatggaggaggatccttccgccaaaaccatcaacgtctttagggacccccaggaaataaagcgggctgccacccacctgtcatggcaccccgatgggaacagaaaactggcagttgcttactcatgcttggactttcagcgcgcccccgtgggcatgagctctgatagctatatctgggatctagaaaaccctaacaagcccgaactggctctcaaaccttcgagccctctcgtgactcttgagttcaatccgaaggacagccacgtcctgctggggggttgctataatggccagattgcctgttgggacactcggaaaggcagcctggtggccgaactgagtactatagagagcagccaccgggatcccgtctatggcaccatctggcttcaatcaaagactggtaccgagtgcttctccgcctccaccgatggccaggtcatgtggtgggacatcagaaagatgtccgagcctactgaggttgtgatcctagacatcaccaagaaagagcagctggagaatgcactgggggcaatctccctggagttcgagagcacactgcccactaaatttatggttggcactgaacagggaattgtcatttcatgcaataggaaagccaaaacaagtgccgagaaaatcgtctgcacattcccaggacatcacgggcctatttacgccctacaaaggaatccattttatcctaagaattttctaactgtcggcgattggactgctaggatatggagcgaagattcgcgtgaaagctccatcatgtggactaagtaccatatggcctatcttactgatgccgcatggtcgccagtgaggcctactgtgttcttcactactcgtatggatgggacgctggatatttgggatttcatgttcgagcaatgcgaccctaccctctccttaaaagtgtgtgacgaagccttgttctgcttgagggtccaggacaacgggtgtctgatcgcatgtgggagccaattggggacgaccaccctgctcgaagtctcacctggactctccactctgcagcggaacgaaaagaacgtcgcctcgtccatgtttgaacgcgagacccgccgggaaaagatcttggaagcccgccaccgcgaaatgcggctgaaagagaagggtaaagctgaaggtagggacgaagaacagactgatgaagaactggctgtcgacctggaagccctggtgtcaaaggctgaagaggaattttttgatattatttttgcagaactgaagaagaaggaagcagatgcaatcaaactgaccccggtgccccaacagccatctcccgaagaggaccaggtggtggaggaaggtgaggaagcagcaggggaggaaggagacgaggaggtcgaagaggatctcgcctag

SEQ ID NO: 115267 - DNA, 234 bp, synthetic construct
  misc_feature 1..234: note = Description of Artificial Sequence: Synthetic coding sequence
  source 1..234: mol_type = other DNA
atgaaaaaactaaagatcttgtacatgagcaacaatctcgtcaaagattgggcggagtttgtaaagctcgcggaactgccttgtctagaagacctcgtgttcgtgggtaatccgttggaggagaagcattctgctgagaacaactggattgaagaagccaccaagcgcgtacccaagttgaagaaacttgacgggactcccgtcatcaaaggagacgaggaagaagacaactag

SEQ ID NO: 115268 - DNA, 456 bp, synthetic construct
  misc_feature 1..456: note = Description of Artificial Sequence: Synthetic coding sequence
  source 1..456: mol_type = other DNA
atggatgccagcctatctatgctcgcgaactgtgagaagctgagcctcagtaccaattgcatagagaagattgcaaacttaaatgggttaaaaaatctccggatcctttctcttggccggaacaatattaagaatctgaatggactggaagccgtcggtgatacactcgaagaactgtggatctcttataactttatcgagaagctgaaaggtatccacattatgaagaagcttaaaatattgtacatgtccaacaatctggtgaaggattgggccgaatttgtgaaactcgctgagctaccgtgtttggaagatctggttttcgtggggaatccactcgaggagaaacactccgcagagaacaactggatcgaggaggcaacaaaaagggtcccaaagctcaagaagttggacggcactcctgtgatcaaaggcgatgaagaggaggacaactag

SEQ ID NO: 115269 - DNA, 573 bp, synthetic construct
  misc_feature 1..573: note = Description of Artificial Sequence: Synthetic coding sequence
  source 1..573: mol_type = other DNA
atggccaaggccaccaccatcaaggaagccctggcccgatgggaagaaaaaactgggcagcggccaagtgaggctaaggaaatcaagctgtacgcacagatacccccaatagagaaaatggatgcttcgttgtccatgctggctaactgtgaaaaactgtcgctctccaccaactgcatcgaaaaaattgccaacctgaacgggctgaaaaacttgagaattctatccttgggtcgcaacaatatcaaaaacctgaatggtttggaagcagtgggcgatacattggaggagctctggattagttataattttatcgagaagctgaaagggattcatatcatgaagaaactgaaaattttgtacatgtctaacaacctggtgaaagactgggccgaattcgtaaagcttgccgagcttccctgcctcgaagatctagtgttcgtggggaatccactcgaagaaaagcatagcgccgaaaacaactggatagaggaggccacaaaaagggtccccaagctgaaaaagcttgacggcacccctgtgataaaaggcgacgaagaggaggacaattag

SEQ ID NO: 115270 - DNA, 174 bp, synthetic construct
  misc_feature 1..174: note = Description of Artificial Sequence: Synthetic coding sequence
  source 1..174: mol_type = other DNA
atgaaaaaactgaaaattctttacatgtcaaacaacttggtgaaagattgggctgaattcgtcaagttggcagagctgccctgcctggaggacctggtcttcgtcggtaacccccttgaggagaaacactctgctgagaataactggatcgaagaggctacaaagcgggtgtag

SEQ ID NO: 115271 - DNA, 456 bp, synthetic construct
  misc_feature 1..456: note = Description of Artificial Sequence: Synthetic coding sequence
  source 1..456: mol_type = other DNA
atggatgcctcactgtccatgctggcgaattgcgaaaaactcagtctgtctaccaattgtatcgagaaaattgcaaatctcaatgggctgaaaaatctgcggatcctttcactggggcgaaataacataaaaaacctgaacgggctggaggctgttggggataccctggaggagttatggatctcctacaacttcatagaaaagctgaaagggatacacatcatgaaaaagctcaagatactttacatgtctaacaacctggtcaaggactgggcggagttcgtcaagctggccgagctgccctgtctggaggatctggtgtttgtggggaatcctctcgaggagaagcatagcgccgaaaataactggattgaagaggctacaaaaagggttcccaagttgaaaaaacttgacggcaccccagtgatcaagggggatgaggaagaagataactag

SEQ ID NO: 115272 - DNA, 195 bp, synthetic construct
  misc_feature 1..195: note = Description of Artificial Sequence: Synthetic coding sequence
  source 1..195: mol_type = other DNA
atgaagaagttaaagattctctacatgtccaacaatttagtgaaggactgggccgagttcgttaagctggctgaactcccttgcctggaggatctggtgtttgttgggaatccactggaggagaagcacagcgctgagaataattggatcgaagaggcaactaaaagggttcccaaattgaagaagctggactag

SEQ ID NO: 115273 - DNA, 159 bp, synthetic construct
  misc_feature 1..159: note = Description of Artificial Sequence: Synthetic coding sequence
  source 1..159: mol_type = other DNA
atggatgcctctttatctatgctggccaattgtgagaaactgagtctgtcgacgaactgtatcgaaaagatagcaaacctgaacggattgaagaatcttagaatcttgtccttgggacgaaataacattaagaacctcaacggcttggaggccgtatag

SEQ ID NO: 115274 - DNA, 198 bp, synthetic construct
  misc_feature 1..198: note = Description of Artificial Sequence: Synthetic coding sequence
  source 1..198: mol_type = other DNA
atgaagaaactgaaaattctgtatatgtccaacaatcttgtgaaggattgggccgaattcgtcaaacttgctgaattaccttgcctggaggatctggtgtttgtgggaaaccccctggaagagaaacacagcgctgaaaacaattggatcgaagaggctactaaacgggtgcctaaacttaagaaattagatggatag

SEQ ID NO: 115275 - DNA, 843 bp, synthetic construct
  misc_feature 1..843: note = Description of Artificial Sequence: Synthetic coding sequence
  source 1..843: mol_type = other DNA
atggtcacagccaataaggcccacaccggccagggtagctgctgggttgctactttagcctcagcgatgatcccgccggctgacagcctcctgaagtatgacacacccgtgctggtctctcgcaatacagagaagcgctctcctaaggctcgcctgcttaaagttagtccacagcagcctggaccctctggatccgcgccccagccaccaaagacaaaactcccaagtactccatgtgtacccgaccccaccaaacaagctgaggagatcctcaatgctattctgccacctcgtgagtgggtcgaggacacacaactgtggatccaacaggtcagctctaccccttcaactcggatggatgtagttcacctgcaggagcagctggatctgaaattgcagcagaggcaagccagagagacaggaatttgtccagtccggagagagctttatagccaatgttttgatgaactcatccgcgaagtaacaatcaactgcgcagagagaggcctgctgctgctgcgagtgagggacgaaatccgaatgactatagccgcctatcagacactgtatgagtcttcagtggcattcggcatgcggaaggcactccaggcagagcagggcaaatctgacatggagagaaaaatagctgagctcgaaactgaaaaacgcgatcttgaacggcaggtaaatgagcagaaagccaagtgtgaggcgactgaaaaacgggaaagcgaaagaaggcaggtagaggagaagaaacacaatgaggaaatccagttcctcaagcgaacgaatcagcagctgaaagcccaactggaaggaataattgcaccgaaaaagtag

SEQ ID NO: 115276 - DNA, 399 bp, synthetic construct
  misc_feature 1..399: note = Description of Artificial Sequence: Synthetic coding sequence
  source 1..399: mol_type = other DNA
atgccttactacccgcaggacgaacttattcgggaagtaactatcaactgcgcggaacgcgggttgttgctcctccgggtacgggacgaaatccgaatgacaatagccgcctatcagacactgtacgagtcgagcgtggcctttggaatgaggaaggctctgcaggcagagcaggggaagtcggacatggagagaaaaatcgctgagctggaaaccgagaagagggatcttgaacgccaggtcaatgaacagaaggccaagtgcgaggctaccgagaaacgggaatcagaacgaagacaggttgaggaaaagaagcataatgaagagatccagttcctgaaacgcactaatcagcagctcaaagctcaattggaggggattatcgccccgaagaaatag

SEQ ID NO: 115277 - DNA, 13941 bp, synthetic construct
  misc_feature 1..13941: note = Description of Artificial Sequence: Synthetic coding sequence
  source 1..13941: mol_type = other DNA
atgagcgagcccggggggggcgggggcgaggatggctcagcaggtctcgaggtatcagcagtccaaaatgttgccgatgtctcagttctgcaaaagcatcttcgcaaactggtccccctcctgctggaggacggcggggaggctccggcagcccttgaagctgctttagaggagaaatcagcactcgaacaaatgcgtaagttcctgtctgatccacaagtgcacaccgtgcttgtggaaaggtcaacactcaaggaagatgtgggagacgagggggaggaggagaaagagtttatttcgtacaacatcaatattgatattcattatggagtaaaatccaatagcctcgctttcataaagcggacacctgtgatcgacgcggacaaaccggttagcagtcaactaagggtgctaaccctgtcagaagattctccctacgaaactctgcactctttcatttccaatgccgtcgcccccttttttaagagttacatcagagagtccggtaaagccgaccgagatggcgacaaaatggctccatccgtggagaagaagatcgctgagctggagatggggctgctgcacctgcaacagaatatcgagataccggagattagccttcctatccacccgatgattacgaatgtcgctaaacagtgttacgaacgcggagagaaacccaaggttacagactttggcgacaaagtagaggacccaaccttcttgaaccagcttcagagcggggtgaaccgctggatcagggaaatacaaaaggtgactaagctcgaccgcgaccctgccagtggaaccgccttacaagaaatatccttttggctgaatcttgagcgtgccctctataggattcaggagaagagggagtcgccagaggtgttgctgacactcgacattctgaagcatggcaagagattccacgcgaccgtaagtttcgacactgacaccggcttgaagcaggctctggagacagtgaatgattacaaccccctgatgaaggatttccctctgaacgatctgctgtccgccaccgagcttgataagattcggcaggcgttagttgccatcttcacacacttgcgtaaaatccgtaataccaaataccctatccaacgcgctttgagattggtcgaggctatcagccgggacctgtcatcccagctccttaaagtcctgggaacaagaaaattgatgcatgttgcatacgaggagtttgaaaaagttatggtagcctgttttgaagtgtttcagacctgggatgacgagtacgagaagctgcaggttctgctgagagacattgttaaacggaagagagaggaaaatctgaaaatggtgtggcgaatcaatccagcacacaggaaacttcaggcccggctcgaccagatgagaaagttcaggcgacaacacgagcagctgcgggccgttattgttcgtgtgctccggccgcaggtgactgctgtggcacagcagaatcaaggcgaggtgcctgaaccccaagatatgaaagtggccgaggtgttgtttgacgctgccgatgccaatgctattgaagaagttaacttggcgtatgaaaatgtaaaggaggttgacggtctggatgtctctaaggaaggtacggaggcctgggaagccgccatgaagaggtatgacgaaagaattgaccgtgtagagactcgcatcaccgccaggctgagagatcagttgggcaccgccaagaatgcaaatgaaatgtttagaatattctctcgctttaacgcactgttcgtacgcccccacatcaggggcgccatccgcgagtatcagacccagttaatccaaagagtaaaagacgacatcgagtctctacatgacaaattcaaggttcagtacccacagagccaggcctgcaaaatgagtcatgtcagagatcttccccccgtgagcggaagtattatttgggctaaacagattgataggcagttgactgcctatatgaagcgagttgaagatgtactaggcaagggctgggagaaccacgtcgaggggcagaagctgaaacaagatggtgacagcttccgtatgaaactgaatacccaggaaatttttgacgactgggctagaaaagtgcagcagagaaacttaggcgtgtcagggcgaatcttcaccatagagagcacacgtgttcgcggccggactggcaatgtgctcaagttgaaggtcaattttctgcctgaaataatcacgttgtccaaggaggttagaaatttaaaatggctgggcttcagagtccctctggcaatagtgaacaaggcacaccaggccaaccagttgtatccgttcgcaatttcgctgatagaatctgtcagaacatatgagcgaacgtgcgagaaggttgaagaacggaataccatttccctgctggtcgccggtttgaaaaaagaagtccaggccttgatcgctgaggggatcgcccttgtgtgggagagttacaagttggacccatacgtgcagagactggcagagacggttttcaattttcaagagaaggtggacgatctgctcatcatcgaggaaaagattgacctggaggttaggagtctggaaacttgcatgtatgaccacaaaacattctccgagattctgaaccgtgtccagaaagcagtggacgacctgaatcttcactcttacagtaacctccccatctgggttaacaaactcgacatggaaatcgaaagaattctgggagtacgcttacaagccggactgagagcctggactcaggtcctgctcgggcaggctgaggacaaagcagaagtcgatatggatacggacgccccacaggtgagtcataaacctggcggtgagcctaaaatcaaaaacgttgttcacgagcttcgaattacgaaccaggtgatctacctcaaccctccgatcgaggaatgtaggtataaactctatcaggaaatgttcgcctggaaaatggtggtgctgtctctaccccggatccagagccagcgctatcaagtgggcgttcactacgaactgaccgaggaagaaaaattttaccggaatgccctgacccgcatgcccgacggtcccgtggcgcttgaggaatcttacagcgccgtgatggggattgtgtctgaggttgaacagtacgtgaaagtttggctccagtaccagtgcctctgggacatgcaggccgagaatatttacaatcggctgggcgaggacctgaacaaatggcaggcgttgctcgtgcagattcgaaaagctaggggcaccttcgataacgcggagaccaaaaaggagttcggccccgttgtgatagattacgggaaggtgcagagcaaagtcaacctaaagtacgacagctggcataaggaagtcctgtccaagtttggtcagatgctgggatcaaacatgaccgagtttcacagtcagatctccaagtccaggcaagagttggagcagcactccgtggacaccgccagtaccagtgacgctgtcacattcatcacgtacgtacaatccctcaagaggaagatcaagcagtttgagaaacaggtggaactgtatcgaaatggacaacgcctactggagaagcagcggtttcaattccccccgtcatggctctacatcgataatattgagggcgaatggggtgcctttaacgatatcatgagacggaaggacagcgccattcagcagcaagtcgccaacctgcagatgaaaatcgtccaggaagacagggcagtagagagcaggacaaccgatttactgactgattgggagaagaccaaacccgtgactggcaacctgcgccctgaggaggctctccaagccctgactatatatgaggggaagttcggtcggttgaaggatgacagggaaaagtgcgccaaggcaaaggaagctctcgagctgacagacacaggcctcttgtctggcagcgaagaacgagtccaagtggcccttgaggaattgcaggatctcaaaggggtgtggtctgagctgtctaaggtgtgggaacaaattgatcagatgaaggagcagccatgggtgtccgtgcaacctcgaaagctgagacagaaccttgacgctctgctgaatcagctcaaaagctttcctgcacgccttcgccagtatgcttcatatgagtttgtccagcggctgttgaaaggctacatgaaaatcaatatgttagtgattgagttgaagagcgaggcgctaaaggaccgacactggaaacaactgatgaaacgcctgcatgtaaattgggtggttagcgagttaactttgggtcaaatttgggacgtagacctgcaaaaaaatgaggctatagtcaaggacgtcttactggtggcccagggcgaaatggcactcgaagagttcctgaaacagataagggaggtgtggaatacttatgagcttgatctggttaactaccagaacaagtgtcgtttgatcagaggctgggacgatctgtttaataaggttaaggagcacatcaattcagttagtgcaatgaagctgagcccgtattacaaagtgttcgaagaggacgcattgagttgggaagacaagctgaaccgcatcatggcactgttcgacgtctggattgatgtgcagagacgctgggtgtacctggaggggatatttacggggtccgccgacatcaaacatctgcttcccgtggaaacacagcgcttccagtccatttccaccgagttcctagcccttatgaaaaaggtgagtaagagtccactggtgatggacgtgctcaatattcagggggtccagcgttccttggagcgcctggctgatcttctcggaaagattcagaaggcccttggcgagtacttggagagagaaagatcctcctttcctcgtttttactttgtcggagacgaagatcttttggagatcattggcaattccaaaaacgtggccaagctgcaaaagcatttcaaaaaaatgtttgcaggagttagcagtattattctaaatgaagataattccgtggtcctggggatttcaagccgagaaggggaagaagtgatgtttaaaacccccgtgtctatcactgagcatcccaaaattaatgagtggctgaccctggttgaaaaagaaatgagggtgacactggcgaagctgctcgcggagagcgtgactgaagtggagatcttcggaaaggccactagtattgatccgaatacctatataacctggatcgataagtatcaggcccaattagtagtgctctctgcgcagatcgcctggagcgaaaacgtggagacagcccttagctccatggggggaggcggagacgccgcccctctacattctgtgctatcaaacgtcgaagtgacgctcaacgttttggctgatagcgtgctgatggaacagccacctctgcggcggcgaaaactggaacatctgattacagaactagtgcaccagcgggacgtaacgcgctctctaatcaaatcaaagattgataatgccaaaagctttgagtggctatctcagatgcgattctactttgatccgaagcagactgatgtgttacaacaattgagtatccagatggcaaatgctaaattcaactatggtttcgagtacttgggagtgcaggacaagctcgtacagacccctctgaccgacagatgctatctaaccatgacacaagcactggaggctaggctggggggttccccattcggcccagccggcaccggtaagacggaaagcgtaaaagccctggggcaccaactggggaggtttgttttagtctttaactgtgacgagacatttgatttccaggcaatgggacgaattttcgtcggcctctgccaggtgggagcgtggggctgttttgacgagttcaaccgtttggaggaacggatgctctctgccgtgtcacagcaggtacagtgtatccaggaggctcttcgggaacacagcaatcccaattacgacaaaacctccgccccgatcacctgcgaactgttgaacaaacaggtaaaggtgtctcccgatatggccatatttattacgatgaatcctggatatgccggcaggagtaacctgccagataatttaaagaagctgtttagatccttggccatgactaagcctgaccgccagctgatcgcccaggttatgctttattctcaggggttcagaacggccgaagtcctggctaacaagatcgtccctttctttaagctgtgtgatgagcagctttcctcacagtctcactacgacttcggactaagagcactgaaatctgtgcttgtgagtgccgggaacgtcaaacgtgaaaggatacagaagattaaaagagaaaaagaagaacggggggaggcagtggatgaaggagaaatcgctgaaaaccttccagaacaggagatcctgatccagtccgtgtgtgagacaatggtgcccaagctggtcgctgaagacatcccgcttcttttttcgctgctgagcgacgtgttcccgggggtgcagtaccaccgcggtgagatgaccgccctgagagaagagctaaaaaaagtgtgtcaggagatgtacctcacgtacggtgacggtgaggaggtcgggggcatgtgggtcgagaaggtccttcagttataccagatcacgcagattaaccacgggctgatgatggtcggtccctccggcagcgggaagtctatggcgtggagggtcttgctgaaggctctcgagaggctggagggcgttgagggcgtggcccatatcatcgacccgaaagccatcagcaaggaccatctgtacggaaccctggatccaaatacaagagagtggacagatggtctatttacccacgttcttcgcaaaataatagactctgtgcggggggaactccagaaacgccagtggattgtgtttgatggagatgttgacccagaatgggttgagaacctgaattccgtcctagacgacaataaattactgacactccctaacggagagcggttgagcctgccccctaatgttcggattatgtttgaagtgcaagatctgaaatatgctacactggcaaccgtgagtcggtgtggaatggtgtggttcagtgaagatgttctcagtactgatatgatctttaacaacttcctcgcgcgacttagaagcataccccttgacgagggcgaggacgaggcccagagaagacgtaaaggtaaggaagacgagggagaggaggcagccagcccgatgttgcagattcagcgggatgccgcaaccatcatgcagccatacttcacttcaaatggtctcgtcacaaaggctctagaacatgctttccagctggaacacatcatggatctcacccgcttgcggtgtttaggaagtctgttctctatgctacatcaagcctgccgcaatgttgcacagtacaatgcgaatcatcctgatttccctatgcaaatagagcagctcgagagatacattcagaggtacctcgtgtacgctattctctggtcactctccggagattctcggttaaagatgagggccgagctcggcgagtatatcagacggattactacggtcccactgcctaccgctcccaacatcccaatcatcgattatgaggttagcatttcaggggagtggtctccgtggcaagccaaggtgccccaaattgaggtggaaacacacaaggtggctgctccggatgtggttgtgcctaccctcgacactgtgaggcatgaggccttactgtatacttggttggcggaacacaagcccctggtgctctgcggacctccaggttcagggaagaccatgacattgttctctgctctaagagccttaccggatatggaggtggtgggactgaacttttctagtgccaccacaccagagctcctgttgaagacatttgatcattattgcgaataccggaggacacccaatggggtggtgctagccccagtccaattaggaaagtggcttgttctgttttgcgacgaaatcaacctgccggatatggacaaatacgggacccagagagttattagcttcatccgtcagatggttgaacacggcggattctacagaacaagcgaccaaacatgggtcaaactggaaagaatccaatttgtgggtgcttgtaaccctccgacggatccagggaggaagccactgtcccaccggtttttacggcatgtgcccgttgtgtacgttgactatcccggacccgctagtctcactcagatatacggaacatttaaccgggcgatgctccgcctcattccttccctgcggacctacgccgagcctctgactgcagctatggtggagttttatacaatgagccaggagcggtttacccaggacactcagccacactatatctactctcccagagagatgacaagatgggtgcggggcatctttgaggctcttagaccacttgagaccctgccagtggagggcctcatacgaatctgggcccatgaggccctccggctatttcaagataggctagtggaagacgaagaacgacggtggacggatgaaaatatcgacacagttgccctgaagcatttccctaatatagatcgcgaaaaggcaatgtcacgacccattctttattccaattggctttccaaggattacatacccgtagaccaggaagagctaagggactacgtgaaggcgcgcctaaaggtgttctatgaagaagagctggatgtgcctttggtgctgttcaacgaagttctggaccatgtgttgcgcatagaccggatctttagacagcctcaaggacacctgctcctcattggggtttctggggctggcaagaccactctttcaagattcgtggcatggatgaatgggttgtccgtataccagattaaggtgcaccgaaagtacactggcgaggattttgatgaggacctcaggacagtgctgagacgaagtggatgtaaaaatgagaaaatcgcattcatcatggacgaatctaacgtccttgactccgggtttctggagagaatgaacacgctgctggctaacggcgaggttcctggactgtttgagggggacgagtacgctactctgatgacccagtgtaaggaaggagcccagaaagaagggctgatgttggactctcacgaagagctgtacaagtggtttaccagccaggtgatcagaaacctgcacgtggtctttaccatgaacccctcctcagaaggcctgaaagatcgtgcagctactagtccggccctgtttaatagatgtgtgcttaattggttcggagattggtccacagaggccttgtatcaggtcgggaaggagtttaccagcaagatggatctggaaaagccgaattatatagtgccagattacatgcccgtggtgtacgataaactgccacaacctccctcacatcgcgaagccatcgtcaatagctgcgtgttcgttcaccagacactgcatcaggcaaacgcacggctggccaagcgaggcggtcgcactatggcaatcacaccccgtcattatctcgatttcattaatcattacgccaacttgttccatgaaaagagatctgaattggaggagcagcagatgcatttgaatgtgggccttagaaaaatcaaggaaaccgtagatcaggtggaagagcttaggagggatctgcgaattaaatctcaggaactcgaggtcaagaatgctgctgcgaatgataaactgaaaaagatggttaaggaccagcaggaggccgaaaagaagaaagtcatgtctcaggaaattcaggagcaattacacaagcagcaggaagtgatcgccgataaacagatgtctgtaaaggaggaccttgacaaagttgaaccagctgtgatcgaagcccagaacgcagtgaagagtattaaaaaacagcacttggtggaagtacgtagtatggcgaacccacctgccgctgttaagctcgcactagaatctatctgcttgctgctaggagagtctactaccgattggaagcagatacggtccatcatcatgagggagaacttcatccctaccatcgtgaatttctccgctgaagaaatttccgatgccattagagaaaaaatgaaaaaaaattacatgtctaacccaagctacaattatgagatagtcaatagagctagtctggcatgcggcccgatggttaaatgggcaatcgcccagttaaattatgcggacatgttgaagagggtggagcccctgcgaaatgaacttcagaagctcgaagatgacgctaaagataaccagcagaaagcaaatgaagtcgaacaaatgattcgggatcttgaggcatccatcgctagatataaagaggagtacgctgtgctgatctcagaggctcaggccattaaggctgacctcgcggccgtagaagccaaagttaatcgcagcactgctctgctgaagtctctgtccgccgaacgcgagagatgggaaaagacttccgagacttttaagaaccaaatgagcactattgctggcgattgccttctctccgccgcctttatagcctatgccgggtactttgaccagcagatgagacagaacttatttactacctggtcgcaccatctgcagcaggctaacatccagtttcgcaccgacatcgcccggaccgaatatctctctaatgctgatgagcgactccgatggcaggccagcagtttacccgctgacgatctgtgcacggaaaatgcaatcatgctgaagcggttcaatcggtatccgctgattattgacccttctggacaagcgacagagtttattatgaatgagtacaaagaccgcaagatcacacgcacatcgttcctggatgatgcttttcggaagaatctcgagagcgctctcagatttggcaacccactgctggtacaggatgtggagtcttacgacccagttctgaaccccgtgctcaatcgcgaagtgcggcggacaggtggtagagtcttgattaccttgggagaccaggacatcgacctcagtcccagcttcgtgatctttttgagcacacgcgaccctacagtcgaattccctcccgacctgtgctctcgggtgacttttgtgaatttcaccgtcacccggagttcgttacagagtcagtgcttaaatgaagtcctaaaggccgagcgccccgatgtggacgagaagagatctgatcttctgaagctgcaaggggaatttcagcttcgactgagacaactggaaaagagccttctgcaggccctcaatgaggtaaagggaaggatattagacgatgatactataataaccactttagagaacctgaaaagagaagctgcggaggttacgcgcaaagtcgaggaaaccgacatcgttatgcaggaagtagaaacagtaagtcagcagtaccttccgctctcgactgcctgtagttccatctactttactatggagtccctgaaacagatacatttcctctatcagtattccttgcagttcttcttagacatctatcataatgtgctctacgagaatcctaatctcaaaggagtgacagaccatacacaacgtctctcaatcattaccaaagacctcttccaggtcgcatttaatcgggtggcaaggggcatgctgcaccaggatcacatcacgttcgccatgctgcttgcccggatcaagctaaaaggcacagtcggggagcccacgtacgacgcagagtttcaacacttcctgagagggaacgagatcgtattgtcagctggttctacgcctcgcatccagggtctgacggtggagcaggctgaggccgtagtgcggctaagctgtctccccgccttcaaggacctcatagcaaaagtacaggcggacgaacagttcggcatctggttagatagctccagcccggaacagactgtgccttacttatggtccgaagaaacacccgccacacccataggacaggcaattcatcggctgctcctgattcaagcatttcggccagatcgcctgctggccatggcacacatgttcgtgtctaccaatctcggcgaatcctttatgagtattatggagcagcccctcgacctaacacatatagtcggaaccgaagttaagcccaacacccccgtgctgatgtgtagcgtgcctggatacgatgccagcggacatgtggaggatttagcggctgagcagaacacccaaattacctctatcgctatcggatcagcagaggggtttaaccaagcagacaaggctatcaacactgccgtgaaaagcggacggtgggtaatgttaaagaatgtccaccttgcgcctgggtggttgatgcagctggagaagaagctacatagtctccagccgcatgcctgtttccgcctcttcctgactatggaaatcaaccccaaagtccctgtgaacctgctccgtgcgggccgaatttttgtcttcgagcctcctccaggcgtaaaggcaaatatgctgagaactttctcaagtatcccggtgagccggatatgtaagtcacctaatgaacgtgcccgactgtactttttgctcgcctggttccatgctatcattcaggaaaggctcaggtacgccccactcggatggtcaaagaagtacgaatttggcgaaagtgacctccgcagcgcatgcgacactgtagatacatggttggatgataccgcaaagggaaggcagaatatctcaccagacaaaatcccctggtcagccttgaaaactctgatggcccagagcatctacggcggccgagtcgataatgagtttgatcagcggctgctgaacacgttcctcgaacgcttgtttaccactcgatcctttgatagcgagttcaaactcgcgtgcaaggtggatggacacaaggatatccagatgcccgacggcatcagaagggaggagttcgtgcagtgggtcgagctgcttcctgatacccagacaccaagctggctagggctgcctaataacgccgaacgggttctgctgacaacccagggcgttgacatgattagcaagatgctcaaaatgcaaatgctcgaagacgaagatgatctggcctatgcagagactgaaaaaaagacaaggactgactcgacaagcgatgggcgtccggcctggatgaggaccctgcatactacagctagcaattggttacacctgatccctcagaccctgtcacatcttaaacggacagtggaaaacattaaggatccactcttcagattttttgaacgggaagtgaagatgggggctaaattgctccaagacgtcaggcaggaccttgccgacgtggttcaggtatgtgagggcaaaaaaaaacagactaactacctgaggacactgatcaacgagctcgttaagggcatcctccctcgtagctggagtcactatacagtgccagcaggtatgacagtaattcagtgggtatcagatttcagcgaacggattaaacagctccagaacatcagtctggctgccgcctcgggaggcgcaaaagagctgaaaaatattcatgtctgcttgggcggcctttttgtgcctgaggcctacataactgcaaccaggcagtatgtcgcccaggccaattcgtggagtctcgaagaactgtgcttggaggtgaacgtgaccacttcacagggcgccacactggatgcttgttctttcggggtgacgggtctgaaattgcagggtgcaacatgcaacaataataagctctctttatctaatgcaattagcacagccctgcctctcacccagctccgatgggtcaaacagactaacacagaaaaaaaggcttcagtcgtgacgctcccggtatatttgaatttcacacgcgctgacctcatattcacagttgattttgaaattgccaccaaggaggaccccagaagtttttatgagcggggcgtggcggtgctatgcacagagtag

SEQ ID NO: 115278 - DNA, 1899 bp, synthetic construct
  misc_feature 1..1899: note = Description of Artificial Sequence: Synthetic coding sequence
  source 1..1899: mol_type = other DNA
atgtcggataagagcgagctcaaggctgagctggagcgcaagaagcaacgcctggcacagatcagagaggagaagaaaagaaaagaagaagagcggaagaagaaggagaccgaccagaagaaggaggctgtggccccagtgcaggaggagtctgatctggaaaagaaacggcgcgaggcagaagccctgctgcaatccatggggttgacacccgagtcccccattgtgcctccacccatgagccctagctctaaatccgtgagcactccgtctgaggcggggtcacaggactcaggagacggggctgtaggtagtaggacccttcactgggataccgaccctagcgtcctacagttgcactcagattccgatcttggacgaggaccgattaaactggggatggcaaaaattacccaggtggactttccacctagggagatcgtcacgtatacaaaggagactcagacaccagtgatggctcaacccaaagaagacgaggaggaagacgatgacgtggttgcacccaaaccacccattgaacccgaagaagaaaaaaccttaaaaaaagatgaagagaatgatagcaaggcccctccccatgaactgactgaggaggagaagcagcagattcttcattccgaggagttcctatccttctttgaccacagtacccgcatcgtggaaagagccttgtccgagcagattaatattttcttcgattacagtggccgtgaccttgaggataaagagggcgaaatccaggcaggggctaagttaagtctgaaccggcagttttttgacgaaagatggtcaaaacacagggttgtatcttgcctggactggtcctctcaatatcccgaactcctggtcgcgtcatacaataacaatgaggacgcaccccatgagccagatggagtagccctggtctggaacatgaaatacaagaaaaccacacctgagtatgtgttccattgtcagagcgcagtaatgtcggccacgtttgctaaattccatccgaatttggtggtaggaggcacctacagcgggcagattgtcttatgggacaaccgctctaacaaaagaaccccagtgcagaggacccctctgagcgccgccgctcatacacacccagtctattgcgtgaacgtagtagggacacagaatgctcataacctcatctcaattagtaccgacggaaagatttgctcctggtccttagacatgttatcccacccacaagactccatggagctggtgcacaaacaaagtaaggctgtggccgtaacgtcaatgtctttccccgtgggcgatgtgaataattttgtggtagggtcagaggagggcagcgtttatactgcttgtagacacggctcgaaagcggggatttccgaaatgttcgagggccatcagggtcccattaccggcatacactgtcatgctgcagtgggcgcggtggacttctcccacctgtttgtgaccagctcttttgattggactgtaaaactgtggaccacgaaaaacaacaaacccctgtactcctttgaggacaacgcggattacgtttatgatgtgatgtggagccccacccacccagccctgttcgcatgcgtggatgggatgggccggttggatctctggaatctgaacaacgatactgaagtgcctaccgcttctatttctgttgaggggaacccagctctgaaccgcgtccggtggacacacagtggaagggaaatcgccgtaggtgactcagaaggacagatcgtgatctatgacgtgggggagcaaatcgcagtgcccagaaacgacgagtgggctaggtttggaaggacccttgctgagattaatgcgaaccgggctgacgctgaagaggaagccgccacccgaatccccgcgtag

SEQ ID NO: 115279 - DNA, 1839 bp, synthetic construct
  misc_feature 1..1839: note = Description of Artificial Sequence: Synthetic coding sequence
  source 1..1839: mol_type = other DNA
atgagcgataagtccgaactcaaggccgagttggaacggaaaaaacagagactagctcagatcagagaggaaaagaaaaggaaggaggaggagcggaagaagaaggagactgaccagaaaaaggaagcagtggctcctgtgcaggaggaatcagatctggagaagaaacggcgtgaagctgaggcccttctccaatccatgggtctaactcctgagtcaccaattgttcctccgcccatgtctccgagctccaagagcgtctctacaccctccgaggctggcagtcaggactccggcgatggagccgttgggtccagaagaggacccataaagctcggcatggcgaagattactcaggtcgattttccaccaagagagatcgtgacctacacaaaagagactcaaacccccgtgatggctcagccaaaggaggatgaggaggaagatgacgatgtggtcgccccaaaacctcctatcgaacctgaggaagagaagacccttaaaaaggacgaagagaacgattctaaggcaccccctcatgagctaaccgaagaagagaagcaacagatactgcactcggaagagtttctgagtttttttgatcactctacacgtatcgtagagcgagccctcagcgagcagataaacattttctttgattattccggccgggacctggaagacaaagagggcgaaattcaagctggggccaagttgtccttgaacagacagttttttgacgaacggtggtcaaaacaccgcgttgtgtcatgtctcgactggtcctcccaataccctgaactgttggtggcaagttataataacaatgaagacgcacctcacgagcctgacggagttgccctcgtgtggaacatgaaatataaaaagacaacacccgaatatgtttttcattgccagagcgcagtgatgtccgccacattcgcaaagtttcaccctaatctggtcgtgggaggtacgtattctggtcagatcgtgctgtgggacaacaggagcaataagaggactccggtccagcggacccccctatctgccgctgctcatacccacccagtatattgtgtgaatgtggtgggcacccagaacgcacataacttgatttccatctcgaccgacggaaagatttgttcctggtccctcgacatgttgtcccatccacaggactcaatggagctcgtacacaaacaaagcaaagccgtggccgtgacatcgatgtcttttccggtaggcgacgtcaacaactttgtggtgggctccgaagaaggctccgtttatactgcatgccggcacggtagcaaagccggcattagtgaaatgttcgagggtcaccagggtcctatcacgggtatacactgccacgccgccgtgggagctgttgatttctctcacttattcgtgactagtagcttcgactggaccgtcaagctctggacgaccaagaataataagccactgtattctttcgaggacaacgcggattatgtttacgacgtgatgtggtcgcctactcatcccgccttgtttgcctgcgttgacggaatgggcaggctggatctgtggaacctcaacaacgataccgaagtgcctaccgcctccatatccgtcgaagggaatccagccttaaatcgcgtgagatggacccacagcggccgcgagatcgcagtcggggattcagagggtcaaatcgtcatctatgatgtcggggaacagatcgccgttccgagaaacgacgaatgggcccgcttcggccggactttggctgaaataaacgcaaatcgagctgacgccgaggaggaagctgcaacccggattcctgcttag

SEQ ID NO: 115280 - DNA, 1893 bp, synthetic construct
  misc_feature 1..1893: note = Description of Artificial Sequence: Synthetic coding sequence
  source 1..1893: mol_type = other DNA
atgtctgataagagcgagctcaaagccgagctggagcgtaagaagcagagactcgcccagatccgtgaggagaagaagcgaaaggaggaggaacggaagaagaaggagaccgaccagaagaaagaagctgtcgccccagtacaagaggagtcggaccttgaaaagaagagacgtgaggccgaggcactgctgcagagcatggggctgaccccagaatcccccattgccgagcagcctctgcgagtggtcacagccgatacctgcttatttcactatctggtcccaccaccaatgtccccatcttccaaatcagtgagtacaccgtccgaggctggctcacaggattcgggggacggagcagtcgggtctagacggggaccaatcaagctgggcatggccaaaattacccaggtcgacttcccacccagggagatcgtaacgtacactaaagaaacgcagactcccgtgatggctcagcccaaagaggatgaggaggaggatgacgatgtggtcgccccaaaacctcccatcgaacccgaggaggaaaagaccttgaaaaaagatgaagaaaatgattcaaaggccccccctcacgagctaacggaagaggaaaaacagcaaatcctccactcggaggagttcctatcatttttcgatcatagtacccgaatagtggagagagcactgtcagaacagataaacatcttctttgattacagtggccgagaccttgaggacaaggagggcgagatccaggccggagctaaactgagtcttaaccgccaattctttgacgagcggtggtctaaacaccgcgttgtctcttgccttgactggtcgtctcagtatcctgaactcctagtagccagctataataataacgaggatgccccccacgaaccagatggagtggcgctggtgtggaacatgaaatataagaagaccactcctgaatacgtcttccactgtcaatctgctgttatgtccgcgaccttcgcaaaattccaccctaatctggtggttggcggcacctactccggccagatcgtattgtgggataaccggtccaacaaaagaactcctgtgcagaggaccccccttagcgctgccgctcacacgcatccagtgtattgcgtgaatgtggtagggactcagaacgctcacaatctaatttcgatctcaacagacggcaaaatctgttcctggagtttagacatgttgtcccacccccaggacagtatggaactggttcataagcaatctaaagccgtggccgtcacttctatgagcttccccgtgggagacgtgaacaattttgtggtgggttcagaggagggctcagtttatacagcttgcagacatgggagcaaggctgggataagcgagatgttcgagggacatcaggggcccatcaccgggatccactgtcacgcagctgtgggagccgtggatttctcacacctgtttgtcaccagctcatttgactggactgttaaactctggaccactaaaaataataagcccctttacagctttgaggataacgccgattacgtgtatgacgtcatgtggagcccaacccatccagcgctgttcgcttgcgtcgacggtatggggcggcttgatctgtggaacctgaacaacgacactgaagttcctaccgcatcaattagcgtggaagggaatccagcactgaaccgagtgcggtggacacattcgggacgagaaatagctgtgggcgattccgaagggcagatcgtgatttacgatgtcggggaacagatcgctgtgccgcgcaatgatgaatgggcccggttcggcagaacactcgctgagatcaatgcaaacagagcggacgctgaggaagaggcagctactcggattccagcttag

SEQ ID NO: 115281 - DNA, 1917 bp, synthetic construct
  misc_feature 1..1917: note = Description of Artificial Sequence: Synthetic coding sequence
  source 1..1917: mol_type = other DNA
atgagcgataagtccgagttaaaggctgagctagagaggaagaagcaaaggttggctcagatccgagaggaaaagaagcgaaaagaggaggaaagaaagaaaaaggagaccgaccagaagaaggaggcggtggcccctgttcaggaggaaagtgacctggaaaagaaaagaagagaagccgaagcacttctccaatcaatgggcctgactccagagagtcccatcgtgttcagcgaatactgggtgcccccacctatgtcccccagctcaaaaagcgtgtcgaccccatccgaggctggcagtcaagattcaggtgatggggctgtcgggtcaagaaccctccactgggatactgatccctcagtgcttcagctacactcagattccgatcttggaaggggcccaataaagctgggcatggccaagatcacacaagtggacttcccacccagggagattgtgacctatacaaaagagacacagacccctgtcatggcccagcccaaagaagatgaagaggaggatgacgacgtggtcgcccccaagccgcctatcgaacctgaagaggaaaaaaccctgaagaaggacgaagagaacgacagtaaagcacccccacatgagctgactgaggaggagaaacagcaaatcctgcatagcgaggaattcttgtcctttttcgaccattccacacgaatcgtggaaagggcgttgtctgagcaaatcaatatattctttgattatagtggtagagatctggaggacaaagagggcgagattcaggctggggcaaaactcagcctgaacaggcaattcttcgacgaacgatggagcaagcatcgcgtggtgagttgcctcgattggagttcacaataccctgaactgcttgtcgcgtcatacaataataatgaggacgcaccccatgagccggacggggtcgctctggtctggaacatgaaatacaagaagaccactcccgaatatgtcttccattgtcagtccgccgtaatgagtgctacttttgccaaatttcacccgaatctagtggtcgggggcacttatagtgggcaaatcgtgctttgggacaaccggtcaaataagaggacaccggttcagagaacaccactctcggccgccgctcatacacatcctgtctactgcgtgaatgtggtaggcacacaaaacgctcataatttgatttctatttcaactgacgggaagatctgttcctggtctctcgacatgctgtcccaccctcaagactctatggaactggtgcataaacagagtaaagccgtggctgtaacctcaatgtctttccccgtcggcgacgtaaataattttgttgttggcagcgaagaaggaagtgtctacacagcttgtaggcacggaagtaaagcagggatctccgaaatgttcgaagggcaccagggccctatcacaggcattcattgccatgccgccgtgggcgccgtggactttagccatttattcgtcacgtcttcctttgactggacagtaaagctgtggacgaccaagaacaataagccactatactcatttgaagataacgcagactatgtttacgacgtgatgtggagccccacacatcccgcactctttgcctgcgtagacggtatgggtaggctggatttatggaacttgaacaacgacactgaagtcccaaccgcctcaatatcagtggaaggcaatcctgctctgaaccgcgtccggtggacacactccggtcgcgaaattgccgtgggcgactcggaggggcaaatcgtaatctacgatgtgggtgagcaaattgctgtgcctcggaatgatgaatgggcacggttcggaaggaccctggcagagattaacgctaacagagctgatgcagaagaggaggctgccacacgaatcccagcctag

SEQ ID NO: 115282 - DNA, 1839 bp, synthetic construct
  misc_feature 1..1839: note = Description of Artificial Sequence: Synthetic coding sequence
  source 1..1839: mol_type = other DNA
atgagcgacaaatccgaacttaaagccgagctggaaaggaagaagcagcggctcgcccagattcgggaggaaaaaaagaggaaggaagaagagcgcaaaaaaaaagagacggatcaaaagaaggaagctgtcgcaccagtgcaagaagagtccgacctggagaaaaagcggagagaggccgaggctctgctgcagagtatgggcctcacacccgagagccccattgtacctcccccaatgtccccctccagtaagtctgtgtctactccgtcagaagctggaagtcaagactccggcgacggcgcagtcggatctagacgggggcctataaaactgggtatggcaaaaatcacccaggttgacttcccaccacgggagatcgtgacatatacgaaagagacccagacgcccgttatggcccagccaaaggaggacgaggaagaagacgatgacgtagtggcccccaagccccctatagagccagaagaggagaagacactgaaaaaagacgaggaaaatgactctaaggcccccccccacgagctgactgaggaggaaaagcagcagatcctgcatagtgaagagttcttgagtttttttgatcactctactcgcatcgtcgaaagggccttatctgaacagatcaacatcttcttcgattacagtggtcgagatttggaggacaaggaaggagaaattcaagcaggagcaaaactgtcgcttaatcgccagttctttgacgagcgttggagtaagcaccgcgtagtcagctgcctggattggagctcacagtacccggagctgctcgtggccagttacaacaataatgaggacgccccgcatgagccagatggggtggcactggtgtggaacatgaagtacaagaagaccacaccagagtatgttttccattgccagtctgccgtgatgagcgctacatttgcaaagtttcatccaaacctagtggtgggcggcacatattcaggacagattgtgctgtgggacaataggtcaaataagcgcacacctgtccagcgcacccccctcagcgcggccgctcatacccatcccgtctactgcgtgaacgtcgtgggaacacaaaacgctcataatctgatttcaattagcacagatggaaaaatctgcagctggagcctggatatgctgagccatccccaggatagtatggaactggtacacaaacagagcaaagcggtggccgtgaccagcatgtcctttccagtcggtgacgtcaataactttgtcgtcggctcggaagagggttcagtgtacaccgcctgccgccatgggagtaaggctggtatctcagaaatgtttgagggacatcaggggccaattaccgggattcactgccacgctgcggtcggagctgtcgattttagccacctattcgtgacatcgtcctttgactggacagtcaaattgtggacgacaaaaaacaataagccactgtacagtttcgaggacaatgctgactacgtctacgacgtcatgtggtcacccacacacccagccctgtttgcttgtgtcgacggcatgggacgtcttgacctctggaacctcaacaacgacaccgaagtgcctaccgccagcatttcagttgagggcaaccctgcgctgaacagagtccgatggacacactcagggcgggaaattgcagttggagacagcgaaggccaaattgtcatttacgatgtgggcgagcagatagcagtgcctcgaaatgacgaatgggcgagatttggacgtaccctcgcggaaattaacgccaatcgagcagacgcggaggaggaggctgccacacgtatccctgcctag

SEQ ID NO: 115283 - DNA, 1899 bp, synthetic construct
  misc_feature 1..1899: note = Description of Artificial Sequence: Synthetic coding sequence
  source 1..1899: mol_type = other DNA
atgtccgacaaatccgaacttaaggctgagctcgagaggaaaaaacagcgtcttgcccaaatccgcgaggaaaaaaagaggaaggaggaagagcgtaagaagaaagagactgatcagaagaaagaggccgtggccccggtccaggaggagagtgacctggaaaagaaacggcgcgaagctgaagcattgctgcagagtatggggctcacaccagagagcccaatcgtgcctccacctatgtctccatcgagtaagtccgttagcacgcccagtgaggctggatctcaggacagtggtgatggagccgtgggcagccggacgctgcactgggatacagaccctagtgtcctacagctgcacagcgattcagacttggggcgtggtcccataaaacttggcatggccaagataacacaggtggacttcccaccaagggagatagtgacttacaccaaagaaactcagactcccgtgatggcacagcctaaagaagacgaggaggaggatgatgatgtggtcgctccaaaacctcctatcgagcccgaggaagagaagacactgaagaaagacgaagagaatgactcaaaggcccctcctcacgagctaacagaggaggagaaacaacagattctgcactctgaggaattccttagcttttttgaccattcaacaagaatagtggagagggctctgtccgaacagattaacattttctttgattatagcggaagagatctggaagataaagaaggtgagatccaggctggagccaaactgagtctgaatcgccagttcttcgacgagcgctggtctaagcatcgggtggtgtcttgtctggactggtctagtcaatatcccgaactgttggttgcctcctataacaacaacgaggatgcaccacatgagcctgatggagttgcccttgtgtggaatatgaagtacaaaaaaaccacgcccgagtatgtcttccattgccagagcgccgtgatgagcgctacctttgcgaaatttcacccgaaccttgtggtgggagggacctattcaggccagattgttctctgggacaacagaagcaataaacgaacccctgtacagagaacacccctgagcgccgcagcacatacccaccccgtttactgcgtgaatgtcgttgggacacagaacgctcacaaccttataagtatcagcactgatggaaaaatttgctcatggagcttggacatgctgtctcatccacaagattccatggagctcgttcataaacagtcgaaagccgtggcagtcactagtatgtcattcccagtgggggatgttaacaatttcgtagttgggtccgaggaaggttctgtatataccgcatgcaggcacggtagtaaagctgggatcagtgaaatgtttgaaggacatcagggccccataactggaatccactgccatgccgccgtgggggcagtggacttcagtcatctgttcgtgacctcatcgttcgattggaccgtcaaactgtggactaccaagaataataaaccactgtatagcttcgaagataatgctgactacgtgtatgatgtcatgtggagcccaacccaccccgcactttttgcgtgcgttgatggtatggggcgcttagacctgtggaacctgaacaacgatactgaagtgcccaccgccagtatctctgtcgaggggaatccggccctgaatcgggtgaggtggacgcacagcggtagagagattgccgtgggagatagcgaggggcaaatcgtgatctacgacgtgggcgagcagatcgccgtcccaaggaacgatgagtgggccaggttcggtaggacacttgccgaaatcaatgctaatcgtgctgatgccgaagaagaagctgcaacgcgcatccccgcctag

SEQ ID NO: 115284 - DNA, 1914 bp, synthetic construct
  misc_feature 1..1914: note = Description of Artificial Sequence: Synthetic coding sequence
  source 1..1914: mol_type = other DNA
atgtccgataaatcagaactcaaagctgaactggagcgtaagaaacaaaggctggctcagataagggaagagaagaagaggaaggaggaagagcggaagaagaaggaaaccgaccaaaaaaaagaagctgtggctccggtgcaagaggaatcagatctagagaaaaagaggagggaggccgaggcactgctgcagagcatgggcctgactcctgagagccctatagtgttctccgagtactgggtgccaccacccatgagcccttcgtccaagagcgtgtctacgcccagcgaggctgggtcacaggactcaggggacggggccgtgggatcacggacacttcattgggacacagacccttcagtcttgcagctccattctgattcggacttaggtaggggacctatcaagctggggatggcgaagattacacaggtggatttccctcccagagagatagtcacatatactaaagagacacagacgcctgtcatggcccagccaaaggaggatgaggaggaagatgatgacgtagtggcgcctaagcccccaatcgagcctgaggaggagaagactttgaagaaagacgaggaaaacgacagtaaggcgccacctcatgagctgaccgaggaggagaagcagcaaatccttcactcagaggaatttctgtcattcttcgatcactctactagaatcgtagagagagccctgagtgaacagatcaacatcttcttcgattattcagggcgcgatctcgaagataaagagggagaaatccaggccggcgccaagctgagtctgaaccgccagttttttgatgagagatggtccaaacacagagtggtgagctgcctggactggagtagccagtaccccgagctgttggttgcgtcgtacaacaataacgaggacgccccacatgagcccgatggagtggctctcgtctggaatatgaagtacaaaaagactacccccgagtacgtattccattgccagagcgccgtgatgagtgccactttcgcgaaattccaccccaatcttgtggtcggcggaacctactcaggacagattgtcttgtgggataaccgttcaaataaacgcacgcccgtccagagaacccctttaagtgccgctgctcacacacacccagtgtactgtgtgaatgttgtgggcacacagaatgcacataacctcatctccatctccacagacggaaagatttgttcttggtcgttggacatgctatcgcaccctcaggactccatggagctcgtgcacaaacaaagcaaggctgtcgcggtgactagtatgtcttttcccgtgggcgacgtgaacaatttcgtagtgggctccgaggagggaagtgtgtacaccgcctgcaggcacgggtctaaggcaggaatttctgagatgttcgagggacaccaggggcccatcacagggatccactgtcacgcagccgtcggggctgtggatttttcccatctgttcgtgaccagcagcttcgattggacagtaaaactttggacgacgaagaataataagcccttatattcattcgaagataacgccgattacgtgtacgatgtcatgtggagccccactcaccctgctcttttcgcttgcgttgatggcatgggtcggctggatctctggaaccttaacaatgacacggaagtgcctactgcaagtatttcagtggaaggcaatcccgcattgaatcgtgttcggtggacacattcagggagggagatcgcagtgggggatagtgagggtcagattgtaatctatgacgtgggtgaaatcgccgtgcctcgtaacgacgagtgggctaggtttggtagaaccctcgcagaaatcaatgctaatagggccgacgccgaggaggaggcagccactcgcatccctgcctag

SEQ ID NO: 115285 - DNA, 1917 bp, synthetic construct
  misc_feature 1..1917: note = Description of Artificial Sequence: Synthetic coding sequence
  source 1..1917: mol_type = other DNA
atgagcgacaagtccgagctgaaggctgagttggagcgcaaaaagcagaggctggcccaaatcagggaagaaaaaaagcggaaggaggaggagcggaaaaaaaaagaaaccgaccagaaaaaggaggctgtggcacctgtgcaagaggaatccgacctggaaaagaagcggagggaggcggaagccctgctccagagtatgggactgacaccggagtcgcctattgtgttcagcgagtactgggtgccgcctcctatgtcaccgtcgagcaaatccgtttcgaccccaagcgaggcagggtcccaggacagcggcgacggcgcggttggttccagaaccttgcactgggatacagacccatctgttttacaactccattccgattctgatctgggccgcggccccatcaaactgggaatggctaaaattacacaagtggacttcccccctcgtgaaatcgtcacctacaccaaggaaacccagacccctgtcatggcacagcccaaagaggatgaggaagaggacgacgatgtggtggcacctaagccccctatcgagccagaggaagaaaaaacactcaagaaggatgaggaaaacgattctaaggctcctccacacgagctgacagaggaggagaagcaacaaattctgcactctgaggaattcctgagtttttttgatcactctactcgaatcgtagagagggcgctgagtgagcaaattaacatcttttttgactattcaggcagagacctggaggacaaagagggggagattcaagcaggagctaagctctccctgaaccgccagttcttcgacgagaggtggtccaagcatagggtcgtttcttgtctcgactggtcatctcagtatcctgagctcctggttgcatcttacaacaacaacgaggatgctcctcacgaacccgatggcgtggctctagtctggaatatgaagtataagaaaacaacgccagaatatgtgttccattgtcagtccgctgttatgagcgccacttttgctaagttccaccccaaccttgtcgttggagggacatattctggccagatcgtcctctgggataataggtccaacaagcgtactcccgtgcagcgcacccccttatcagcagctgcccatacacaccccgtgtactgcgtgaacgtagtggggacgcagaacgcacataatctcatctctatatccacagatggtaaaatctgttcatggtcgctggatatgctcagtcacccccaggactctatggagctcgtgcacaagcagagcaaggctgtggctgttacttcaatgagcttccccgtcggagatgtgaataactttgttgtggggagtgaggaaggatccgtgtatacagcctgcaggcacgggtccaaggcaggcatttccgagatgttcgaaggccaccaggggcccatcactgggatccactgtcacgcggcagtcggggccgtggacttctcacacctctttgtcacttcctcctttgactggacagttaagttatggacaacaaaaaataataaacctttatattcatttgaagacaatgctgattatgtttatgatgtgatgtggtcccccacccatcccgccctgttcgcatgcgtcgacggaatgggacggctggatctgtggaaccttaataacgacacagaggtaccaaccgcctccatatcagttgaaggtaaccccgcgttaaaccgcgtgcggtggacccactcaggccgcgagatcgctgttggagacagtgaaggccagatcgtcatctatgacgtgggagagcagatcgcggtgcctcggaacgacgagtgggcccggtttggacgcaccctcgccgaaattaacgcgaatcgtgcagacgctgaagaggaagcagcgaccagaattcccgcatag

SEQ ID NO: 115286 - DNA, 1836 bp, synthetic construct
  misc_feature 1..1836: note = Description of Artificial Sequence: Synthetic coding sequence
  source 1..1836: mol_type = other DNA
atgtccgataagtctgagctgaaggcagagctggagcggaaaaaacaacgactggcccaaattagggaggagaaaaagcgcaaggaagaagaaagaaagaagaaagaaacggatcagaagaaggaggccgtagctcctgttcaggaggagagtgacctggaaaagaagcgtagggaggccgaggctctgctacagagcatgggcttaactccagaatccccaatcgtacccccccccatgtctccttccagtaagtcagtaagcacccctagcgaagcggggtcccaagattcaggcgatggcgccgtcggcagccggaggggacctatcaagctcggcatggctaaaatcacacaggtcgactttcctccccgggagatcgttacttacactaaggagacccagacaccggtcatggcacagcctaaagaagatgaagaagaggatgatgacgtagtagcacctaaacctcctattgagccggaagaagaaaaaacgctcaagaaggatgaagaaaacgacagcaaagccccacctcatgagcttaccgaagaagagaagcagcagatcctgcattcagaagagttcttatcatttttcgaccatagtactaggatcgtggagagggcactcagtgaacaaataaacatattctttgactattcaggccgggatctggaagataaggagggcgaaatacaggccggagccaagctctcactgaacaggcagttttttgatgaaaggtggtctaagcacagagtcgtctcgtgcctggactggtccagtcagtatcctgaattgctcgtcgcaagttataacaataacgaggacgctccacatgaacctgatggtgttgcattagtgtggaacatgaagtataagaagacaacaccggagtacgtcttccactgtcagtcggccgtcatgtcagctaccttcgccaaattccaccctaacctcgtcgtgggcggaacatattcagggcagatagtcctttgggataatcgctccaacaaacgtacccctgtgcaacgcacgccattaagtgcggccgcccacacacatccagtgtactgtgtgaacgtcgtggggactcagaacgcccataacctaatcagcatatcaaccgatgggaaaatctgtagctggtcgctcgacatgctgagccatccacaggactcgatggagctggtgcacaaacagtcgaaagctgtcgcagtcacaagtatgtctttccccgtgggagatgtgaacaacttcgtcgtggggtctgaggagggtagcgtctacacagcctgtagacacgggagtaaggctggcatcagcgagatgttcgaggggcatcagggcccgataaccggtatccactgccacgcagcagtaggcgcagtggactttagccatctgtttgttaccagctcttttgattggacagtaaagctgtggaccactaagaataacaaacccctctattctttcgaggataatgctgactatgtgtatgacgtaatgtggagtcccactcaccccgccctcttcgcttgtgtagacggaatgggcaggcttgatctgtggaacctcaataacgacacagaagtgcccactgcaagcattagtgtagagggcaacccagcccttaatagagtgcgctggacgcacagcggaagggaaatcgccgtgggtgactccgaagggcagattgtgatctatgatgttggcgagatcgctgtccctcggaatgacgagtgggctaggtttggtaggactctggcagaaatcaacgccaaccgggccgacgctgaagaagaggcagcgacacgaattccggcgtag

SEQ ID NO: 115287 - DNA, 1917 bp, synthetic construct
  misc_feature 1..1917: note = Description of Artificial Sequence: Synthetic coding sequence
  source 1..1917: mol_type = other DNA
atgtctgacaaatctgaattaaaagccgagctggaacggaagaaacagcggttggcacaaatacgggaagagaagaaaagaaaagaggaggaaagaaaaaaaaaagagactgaccaaaagaaggaggctgtagctcccgtccaggaggaatcagatctggaaaagaagcggagggaagcagaagcattactacagagcatgggactgacacccgagtcaccaatcgacatcgccgaataccttgttcctcctccaatgagcccgtcctctaagtcagtcagcacccccagcgaggcaggttcacaggacagcggagatggggccgtaggatccaggactctccactgggatacagaccctagcgttctacagttacacagcgacagtgatctagggaggggcccgattaaactggggatggcaaaaatcacacaggttgacttcccacctagggagatcgtgacttacacaaaagagacgcagacaccagttatggcgcagccaaaggaggacgaagaagaagatgatgacgtcgtggcaccgaagcccccgatagaacctgaagaggaaaaaacgctcaaaaaggatgaagaaaatgactcgaaggctccaccgcatgaactcacagaggaagaaaagcagcagatccttcatagcgaggaattcctatccttttttgaccatagcactagaatagtggagcgtgctctcagtgagcagatcaatattttctttgactattccggcagggacctggaagataaggagggtgaaatacaagccggggctaagttgtctctgaatcggcagtttttcgatgagagatggtccaagcatcgggtggtgtcatgcttggattggtcctcacagtaccccgaactcctggtggcttcttacaacaataacgaggatgctcctcatgaaccagatggagtagccttggtttggaatatgaagtataagaagacgactcctgaatacgtcttccactgtcagagcgccgtgatgagcgcgacatttgccaagttccaccccaacctcgttgtcggggggacatattccggccagatcgtattgtgggacaaccggtccaacaagaggacccctgtccaaagaacacctctgagcgccgcagctcatactcatcccgtctattgtgtcaatgtagttggaactcaaaatgctcacaatctgattagcatttctacagacggcaaaatctgcagctggagcctggacatgctttcccatccgcaagattcaatggagctggtacacaagcagagcaaggccgtggccgtaacgagcatgtcctttccagttggagacgtgaacaattttgtggtaggcagtgaggaaggttccgtttatacagcatgtcgacatggttcgaaagctgggatatccgaaatgtttgagggacaccagggccctatcactggtatccattgtcacgcagctgtgggtgccgtcgatttttcacacctgttcgttacatcctctttcgactggacagtgaagttatggacgacaaaaaacaataaacctttgtacagctttgaggacaatgctgactacgtgtacgacgttatgtggtctcccacacatcccgccctttttgcatgtgtagacggaatgggacggctggacctttggaaccttaataacgatactgaagtcccgacagccagtatatccgtggaagggaaccccgccctgaaccgcgtacggtggacacatagcggacgtgaaatagctgtgggcgattccgagggacaaatagtcatatacgatgtgggagagcagatcgccgtcccacgcaatgatgagtgggctaggtttggacggaccctcgctgagatcaacgctaacagagcagacgctgaagaggaggctgccacgcgcattcctgcgtag

SEQ ID NO: 115288 - DNA, 2763 bp, synthetic construct
  misc_feature 1..2763: note = Description of Artificial Sequence: Synthetic coding sequence
  source 1..2763: mol_type = other DNA
atggccaacggtaccgcggacgtgcgaaaacttttcatctttacaaccactcagaattatttcggtttaatgtctgaactgtgggaccagccgttgctgtgtaactgtctggagatcaacaatttcctggatgatggaaatcagatgctcctgagggtgcagcgtagtgacgctgggataagtttctccaatacaatcgaattcggagataccaaagacaaggtgctggtattttttaaattgaggcccgaagtgattacggacgagaatcttcacgacaacattcttgtgagttctatgctagaaagcccaatcagctccctctaccaggcagtgcgacaggtattcgctccgatgctgctcaaagaccaggaatggtctcgcaactttgatccaaaactgcagaacctgctgagcgagttggaggctggcttaggaattgtgcttcggcgcagcgacactaacctaaccaagctgaaattcaaggaggatgatactagaggcatactgactccgagcgacgaattccagttttggatcgaacaggcccataggggcaacaaacagatttccaaagaacgggcgaattactttaaggaactgtttgaaaccatcgccagggagttttataacctcgattccctgagcttactggaagttgtggacctcgtggaaacaactcaggatgtcgttgatgatgtgtggaggcagaccgagcacgatcactaccccgaaagtagaatgctgcatctgttggatattatcggtgggtcattcgggcggtttgtacagaagaagttgggtacccttaacctgtgggaggatccctactacctcgtgaaagagtccttgaaggcaggtattagcatttgcgagcagtgggtcatagtctgtaatcacctcaccggccaggtctggcaacggtacgtcccccacccttggaagaacgagaagtatttccctgagaccctcgacaagctaggtaaacgcctagaggaagtgttagccattcggacgattcacgagaagtttctctactttcttcccgcttcagaggagaagatcatttgcctgacccgcgtattcgagcctttcacaggcctgaatcccgtgcagtacaacccgtatacagaaccattgtggaaggcggccgtgtcacagtatgagaagatcatcgcacctgcagagcagaaaattgccggcaagctcaaaaactacatttccgaaatccaggactctccacaacaattgctccaggcttttcttaaatacaaggagctcgttaagcgtcccacgatctccaaggagctgatgctggagagagagacactattggctagactagtggattccataaaagactttcggctggacttcgaaaacagatgccgtgggatccctggagacgcatcgggacccctctctggcaagaatctaagcgaggttgtcaatagcatcgtgtgggtgcgccagttggaacttaaagtggacgacacaattaagatcgccgaggccctgctttccgatttaccaggtttcagatgctttcatcagtccgccaaggacttgctggatcagctgaagctgtatgaacaagaacagtttgacgattggtcgcgggacatccagagcggtctgagcgattctaggtccggactgtgtattgaggccagttcccggattatggagctggattcaaatgacggattgctgaaggtccactactctgaccgtctagtgattttgctgagggaggtgagacaactgtccgctctgggcttcgttatccccgctaagatacagcaggtggccaatattgcccagaaattttgtaagcaagccatcatcctgaaacaagtggcccacttctacaactccatcgaccaacaaatgattcagtcccagaggcccatgatgctgcagtctgccttggccttcgaacagatcatcaaaaactctaaagctggctccggcggcaagtctcagatcacatgggacaacccgaaggagctcgagggatacattcagaaactgcagaatgccgctgaacggttagcgactgaaaatagaaaactccgcaaatggcatactaccttttgcgagaaagttgtagtgctcatgaatatcgacctattgaggcagcagcagagatggaaagacggcctgcaggagctcaggaccggcttggctacagtggaggcgcagtgtcctttggcttggcagtccaagtgggaagggcctgaagatccgttacagtatcttaggggcctggtcgcgcgcgctctcgcgatccaaaactgggtagacaaggccgaaaaacaggccctgctgtccgaaacccttgatctctcagagcttttccatcctgataccttccttaatgcccttcggcaggagaccgccagagccgtgggaaggtcagttgattcactgaaatttgtcgcgtcgtggaagggaagactgcaagaggccaaattgcagattaaaatttccggattactgcttgaaggttgcagcttcgacggaaatcaactctctgagaatcagctggacagcccttctgtttccagtgtgctgccatgtttcatggggtggatccctcaggatgcctgcgggccttactcaccagacgagtgtatctcactgccagtttatacctccgcagaacgcgatcgggttgtgacaaacatcgatgttccgtgtgggggtaatcaagaccagtggatacagtgcggggctgccttgtttctgaaaaaccaatag

SEQ ID NO: 115289 - DNA, 12924 bp, synthetic construct
  misc_feature 1..12924: note = Description of Artificial Sequence: Synthetic coding sequence
  source 1..12924: mol_type = other DNA
atggccaacggcaccgccgatgtgcgaaagctcttcatttttaccacgacccagaactactttggactcatgagcgagctgtgggatcagcctctgctgtgcaattgtctggaaatcaataacttcctggatgacgggaaccagatgctgctcagggtacagcgcagcgacgccgggatttcttttagcaacacaatcgagttcggagatactaaggataaagtgctggtgttcttcaaactgcggccagaagttattaccgacgaaaatctccacgataacattttggtctctagcatgctggaatcccctatcagctccctctatcaagccgttaggcaggtgttcgcgcctatgctgctgaaggatcaggagtggagccgaaatttcgacccaaaactgcaaaatttactgagtgagctggaagctggactgggcatagtgctccggcggtctgacactaacctgaccaagctgaagttcaaggaagatgatactagaggcatcctcacacctagtgacgagttccagttttggatcgaacaggcccacaggggcaacaagcagattagcaaggagcgagcgaactattttaaagaactgttcgagacaattgcccgggaattttacaatctggacagtctctccttgctggaggtcgttgacttggtggagacaacacaggacgtggtcgacgacgtgtggcgtcaaaccgaacacgatcactaccctgagtcgcgtatgttgcacttgctggacattatcggtggatcattcggaagattcgtccagaagaagttagggacactaaatttgtgggaagacccctactatctggtgaaggagtcactcaaggccggaatctccatttgtgaacagtgggtgatcgtgtgcaaccaccttaccggacaggtgtggcagcggtatgtcccccatccttggaaaaacgaaaaatatttcccagaaacactcgacaaactgggtaagaggctggaggaagtactcgccatccggactattcacgagaagtttctttatttcctgcccgccagcgaagagaagataatctgtctcacgcgagtttttgaacccttcacgggcctgaatcccgtgcagtacaacccctacacggaaccattgtggaaggccgccgtgagccagtacgagaagattatagctcccgctgagcaaaagatcgccggcaagctaaagaactacatttcggagatccaggacagtccccagcagttgctgcaggcattccttaagtacaaggaactggtgaaaagacccacgatatcaaaggagctaatgctcgaaagagagacactgttggctcgtcttgtggactcaataaaggattttagattggacttcgagaacaggtgtcggggaatcccaggcgacgcctcaggtcctctgtccggaaagaacctgtcggaggtcgttaactccattgtgtgggtgaggcagctggagttgaaggtcgacgataccattaaaattgctgaagcgttactgagcgatctgcccggatttcgttgctttcaccaaagtgcaaaggatctgctggaccagctgaaactctacgaacaggaacaattcgatgactggagcagagacatccagagtgggctatctgactctaggtccggactgtgtatcgaggctagcagcagaattatggagttggactccaacgatgggcttctgaaggttcactattcggacaggcttgtgattctcttgcgggaggtcaggcagctgtccgccttaggttttgttatccccgctaaaattcaacaggtggctaacattgcccagaaattctgcaaacaggccatcatcctgaaacaagtggctcatttctataactccattgaccagcagatgatccagagtcaacgacctatgatgcttcaaagcgccctggcattcgaacagattataaaaaattctaaagctggatctggcgggaaaagtcagatcacttgggataacccaaaggaacttgaaggatacatccaaaaactacagaatgcagcagaaagactcgcaaccgagaacaggaagttgagaaagtggcacactactttttgtgagaaagttgtcgttctgatgaatatcgacctgctgaggcagcagcaaaggtggaaagacggactgcaggagttacgcaccggcctcgcaacagttgaagcccaaggcttccaggcctctgacatgcacgcttggaaacagcactggaatcaccagctttacaaggccttagagcaccaataccagatgggcctggaggctctcaatgagaatctacctgagataaacattgacctcacctataaacaagggaggttacagtttcggccaccctttgaagagatcagagccaagtactacagagaaatgaaaagatttatcgggatacctaatcagttcaaaggggtgggtgaggcaggcgacgagagcatcttctctatcatgatcgatcgcaacgccagtggattcctgactatctttagtaaagccgaagacctcttcaggaggcttagcgctgtcctgcatcaacataaggagtggatcgttatcggccaggtcgacatggaagcgttggtggagaagcaccttttcacagtacacgactgggaaaagaacttcaaagctctgaagatcaaggggaaggaggtcgagaggctgccctccgccgtgaaggtggactgtctgaatattaattgtaatccggtgaagacagtgattgatgaccttatccagaaactattcgatttgctcgtgctaagcctgaagaagtccatacaggcccacctccatgaaattgacactttcgttaccgaagcaatggaggttctgacgatcatgcctcaatcagtggaggagatcggagacgcaaacctacagtacagtaaactgcaggagcgcaagcccgagattctccctctgtttcaagaagctgaggacaaaaaccgcctgctccggactgtggccgggggcggcctggagacgatcagcaacttgaaggctaaatgggacaagtttgagctcatgatggagagccaccaattaatgattaaggaccagatcgaagtgatgaagggcaacgtcaagagccggcttcaaatttactatcaggagctggaaaagttcaaagctcgttgggaccagcttaagcctggagacgacgtgatcgagactggacagcataacacccttgacaagtccgcgaaactaatcaaagagaaaaaaattgaatttgacgacctcgaggtaacaaggaagaaattagtggacgattgtcatcactttcgccttgaggaacccaatttctccctggctagtagcatatctaaagatatagaatcatgtgctcaaatctgggccttttacgaagaatttcagcagggattccaggagatggccaacgaggactggattacatttcgaactaagacctacctgttcgaagagtttctgatgaactggcatgacagattaagaaaagtggaggaacactccgtcatgacggtcaaactgcagtccgaagtcgacaaatataagatcgtaatcccgatccttaaatatgtccggggagaacatttgtctccggatcactggctggacctctttaggcttctgggcttgccccgcggcaccagcctcgaaaaactgttgttcggagatttgctgcgcgtggcagatacaatcgtggcgaaagccgccgacctgaaagacctgaatagccgcgcccaaggcgaggtgaccatccgggaagccctgcgtgagctagatttgtggggcgtcggagccgtgtttaccctgatcgactacgaagattcccaaagtcggactatgaagttgatcaaagactggaaggacatcgttaaccaggtcggggacaatagatgcctcctgcaatctcttaaagacagcccctactataaggggtttgaggacaaagtctcgatttgggagcggaagctggctgagctcgatgagtacctgcaaaatctgaaccatatacaacgtaaatgggtttacctggagcccatatttggtaggggcgctctgcccaaggaacagacgcgcttcaatagggtggacgaggattttcggtccataatgactgacatcaaaaaggacaatcgcgtcaccaccctgacaacacatgctgggatcaggaatagcctcttgaccatcctggatcaacttcagaggtgtcagaagtctctcaatgagttcctggaggaaaaaaggtctgcatttccccggttctactttataggagatgatgacctgctggagatcctgggacagtcaaccaacccttcagtgattcagagccaccttaagaagctgtttgccggcatcaactcggtatgtttcgacgaaaaaagtaagcatattacggctatgaaaagtctggaaggggaagtagtgcctttcaaaaataaggttcctctctctaataacgtagagacctggctcaacgacctagctcttgagatgaagaagactttggaacaactgttgaaggaatgcgtcaccaccggccgaagcagtcaaggcgccgtggacccgagtctgtttcccagccaaatcctgtgcctggctgagcagatcaagttcacggaagatgtcgagaacgcaatcaaagaccattcactccatcaaatcgagacacagctcgttaataaactcgaacagtacacaaatatcgacaccagtagcgaggatcccggcaacaccgagagcggaatcctggagctaaagctgaaggcgctgattctcgatataattcacaacattgatgtggtcaaacagctgaaccaaatccaggtccatactaccgaggattgggcctggaaaaagcagctgcggttttacatgaaaagtgatcacacttgctgcgttcaaatggtcgactccgaatttcagtatacctatgaatatcagggaaatgccagtaaacttgtttacacgcctcttacagacaaatgttatctgacactgacccaggcaatgaagatggggctgggtggtaatccctatggccccgctggcacggggaaaaccgaaagtgttaaggccctgggcggcttactgggccgccaggtgctggtgttcaactgtgacgagggaattgacgttaaaagcatgggccgcatatttgttggacttgtaaagtgcggggcctggggatgttttgatgagtttaaccgcctggaagagagtgtgctgtcagctgttagtatgcaaatccagacaatccaagacgccttgaagaaccataggacagtttgtgagttgctgggcaaggaggtcgaggtgaatagcaatagcggcatttttataactatgaacccagccggcaaagggtatggagggcgccagaaacttcccgataacctgaagcagctgttccgcccagtggccatgagtcatccagacaacgagcttatagctgaggtgattctgtactcggaaggttttaaggacgccaaagttttgagccgcaaattagtggcgatctttaatctgagcagagagcttttgacaccacaacagcattacgattggggcttgagagcgttgaaaacagtcctgcgcggatcagggaacttgcttcgccagctgaacaaatccggcaccacgcagaatgctaacgagtcgcacatcgttgtgcaagcactcaggctaaacactatgtcaaagttcaccttcactgattgtacacgctttgacgctctgattaaagacgtattccctggcattgaattgaaagaggttgagtacgatgaattaagtgcagcattaaaacaggtgttcgaggaggctaactacgagatcattcctaatcagattaaaaaggcgctcgaactttacgaacagctctgccagcgaatgggagtcgtcattgtcgggccctcaggtgctggcaaaagcaccttgtggcgcatgcttagggcagctctgtgcaaaactggaaaagtggtgaaacaatatacaatgaatccgaaggcaatgcccaggtaccaactcctaggccatattgatatggacacgcgcgaatggtctgacggggttctgaccaatagcgctagacaggtggtaagggaacctcaagatgtatcctcgtggattatttgcgatggagatatcgacccagaatggatcgagtctttgaacagcgtgctcgatgacaaccgactgttaaccatgcctagcggcgagcgcatccagtttggcccaaatgttaatttcgttttcgaaactcacgacctctcctgtgcctcaccggctaccataagcagaatgggcatgatcttcctttccgacgaggagaccgacctcaattctctcataaagagctggttacgaaaccaaccagccgagtatagaaacaatttggagaactggataggagactactttgaaaaagctctgcagtgggtgctgaaacagaacgattatgtggtggaaacaagcctcgttggaaccgttatgaacggtttatcccacctccacggctgtcgcgaccatgacgagtttattatcaacttaatccgcggtctgggaggtaacctgaatatgaaatcccggcttgaatttactaaagaagtgtttcactgggcccgggagagtccccccgatttccacaagcccatggacacctattatgatagcacccgaggacggctggccacatatgtcttaaagaagcctgaggatcttacggctgatgactttagcaatggcttgacactacccgtgatccagacccctgacatgcagaggggattagactatttcaagccttggctgagcagcgatactaaacagcccttcatcttggtcggaccagaggggtgtggaaagggtatgctgctgagatatgcattctcccagttgcgaagcactcagatcgctacggtacactgcagtgcccaaacaacctctcgtcatttactgcagaaactgagccagacttgtatggtgatctctaccaatacaggccgcgtttaccggccaaaagactgcgaacgtctggttctctatctgaaagacatcaatctccccaagctggataaatggggaactagcacacttgtggcattcctacaacaagtgctgacctaccagggtttctacgatgagaacctggaatgggtggggcttgaaaatattcagatagtcgcgtccatgagtgcgggcggaaggcttggtcgacataaactaacaacacgttttactagtatcgttagactgtgcagtatcgattacccagagagagaacagctccagactatatatggagcctatctggagcctgtgcttcacaaaaacctgaagaaccactctatctggggatcctcctccaagatatacctccttgctgggtctatggtacaggtatatgagcaggtaagagcaaaattcacagtggatgactactcacactactttttcacaccatgcatccttacacaatgggtgctgggtttgtttaggtatgatctggagggggggagcagcaatcatcctctcgactatgtattagagattgtagcctacgaagcgcgtagactgtttagggacaagatcgtgggagccaaggaactgcatctgttcgacataatcctaacctcagtgtttcagggcgattggggtagtgacatcttggacaatatgagtgactccttttacgtaacatggggcgccaggcataattccggcgctcgagcagcacccgggcagccactgccccctcatggtaagcccttgggtaagctaaatagcacggatttgaaggacgtcattaaaaagggtctgattcactatggccgcgataaccaaaacctagatattctgctctttcacgaggtactggagtatatgtcgcgaattgaccgtgtgctgagcttccctggaggtagcttgctgctggctggccgaagcggcgtgggccgcagaacgataacctctctcgtgtcacatatgcacggggccgtgctgttttcccctaagatttccagaggctacgaattaaagcaattcaagaacgatctgaagcacgtactgcagctcgccggaattgaggcacagcaggtcgtcctgcttctggaggattaccagtttgtacatcctacttttctggaaatgattaacagtctattgagcagcggcgaggtacccgggctgtacacactggaggagctggagcctttgctcctgcccctgaaagatcaggcctcgcaagatggtttcttcggacccgtgttcaactatttcacatatagaatccagcagaacttgcacatagtgctaattatggactcggccaatagtaacttcatgattaactgtgagtctaacccagcacttcacaagaaatgccaggtcctatggatggaagggtggtctaatagctctatgaagaagattccggagatgcttttttcagaaacaggcggtggagaaaaatacaacgacaagaagcgcaaagaagagaagaaaaagaatagtgtggatcctgactttctgaagtcattcctcttgattcatgaatcttgtaaggcctacggcgccaccccatcccggtacatgaccttcctgcatgtctacagtgcaatatcatcctccaaaaaaaaagagctgcttaagaggcagagccacctccaagctggagtctctaaattaaatgaggcaaaagccttagtagacgaactgaatcgcaaagctggagagcagtctgtgctgttgaaaacgaaacaggacgaggctgacgctgcgttgcagatgattacagtatccatgcaagacgcaagcgagcagaagactgaacttgaacgtctcaagcaccgcatcgctgaggaggtagtgaagatcgaggagagaaagaataaaattgacgatgagctcaaggaagtccaaccactcgtgaatgaagccaagctggccgtggggaacattaagcctgagtctctcagcgaaattaggtccctgcggatgcccccggatgtgattagagatatccttgagggggtcctgcgactcatgggtattttcgatactagctgggtgagtatgaaatcgtttctggcgaaaaggggcgtaagggaggatatagctaccttcgacgctcggaacatttccaaagagatccgggagtccgtggaggaactactctttaagaataagggatcattcgaccctaagaacgctaaacgggccagtacagccgctgcccctctggccgcttgggtgaaagcgaacatacagtacagccacgttctcgaacgaatccatcctctcgaaacggagcaggccggcctggagtctaatctcaagaaaaccgaagatcggaagcgaaagctagaagaattgttgaattccgttggccagaaagttagcgaattgaaagaaaagtttcagagtcgcaccagtgaagcagctaagctcgaggccgaggtgtccaaggcacaagagactattaaggctgccgaggtgctgattaaccagcttgatcgtgagcataagagatggaatgcacaagtggttgagatcacggaagagctagccacgctgcctaagcgagctcagctagccgctgcattcattacctatctctctgccgcgcccgaatctctacggaaaacatgtctcgaagagtggacaaagagtgcgggactcgagaagtttgatctacgcaggtttttgtgcacagagtccgaacagctgatatggaaatcggaggggctcccctcagacgatctgtccattgagaacgcactggttattcttcagagcagggtgtgccctttcctgatcgatccctcctcccaagcaaccgagtggctcaaaactcacctcaaagattcccgcctcgaagtgatcaaccagcaggacagtaactttatcaccgccttagaattggcagtgaggtttggaaagacccttattatccaggagatggatggtgtggaacccgtcctttatcctctgctgcgccgggacctcgttgctcagggacccagatatgtggtgcagataggagacaagatcatcgactacaatgaagaatttagactcttcctgagcacccgcaatccaaacccattcatccccccggacgctgcctccatcgtgactgaggtcaatttcacaacgacacggtccggccttcgtggacaacttctggcattaactatccagcacgaaaagcccgacttggaggagcaaaaaaccaagctcttacagcaggaagaggacaaaaaaatccagttggccaaactggaggagagtctgcttgaaaccttggctacgtctcagggaaatattttagagaacaaggatctgatcgagagtctcaatcagacaaaggcgagtagcgccctcatccaggagtccctgaaggaaagttataaacttcagatttctctcgaccaggagagagatgcctacttacccttagccgaatcggcctccaagatgtatttcataatttcagacttatcaaaaattaataatatgtacagattctcattggcggccttcttgaggctattccagagagctttgcaaaataagcaggactctgagaacaccgagcagcgaatccagtcactcatatcctcactgcagcacatggtttatgagtacatctgcaggtgtctgttcaaggccgaccagctgatgttcgccctccacttcgttagggggatgcaccccgagctgtttcaggaaaatgaatgggacacatttacaggcgttgtcgtaggtgacatgctccgtaaggccgattcccagcagaagatccgagatcagctccccagctggattgatcaggaacggtcctgggccgtcgccactctgaaaatcgctttaccatccctataccagaccctgtgtttcgaagatgccgctctgtggcgcacctactacaataattcgatgtgcgaacaggagttcccttctatccttgccaagaaagtttccctgttccagcagatcctggtcgtgcaagcccttcgccctgacagactccagagtgcaatggcactctttgcttgtaagacactcggtttgaaagaggtctcaccactgccactgaacctgaaaaggctatataaggaaacgttagagattgaaccaattttgatcatcatttcaccgggtgcagatccctctcaagagctgcaggagctcgccaatgctgaacgcagcggggaatgttatcaccaagtggccatgggccaaggccaggctgatctggccattcaaatgcttaaggagtgtgccagaaatggggattggctttgtttaaaaaatctgcatctggtggtgtcatggttgcccgtgctggagaaggagctgaacactctgcaaccgaaggacacttttcgtctctggctgaccgccgaagttcaccctaatttcactccgattctgctgcagtcctctctgaagattacctacgagtctccccccggactgaaaaaaaatcttatgcgaacgtatgagagctggaccccagagcagatttcgaagaaggataatacccacagggcccacgctctgttctccttggcctggtttcatgcagcctgtcaagagcgccggaattacataccccaggggtggacaaaattctatgagttctctctgtctgacctgcgtgccggatataacattatcgaccgattatttgatggggcaaaagacgtccaatgggaatttgtccatggtttgttggagaatgccatctatggaggccgcatcgataactactttgatcttcgggtattacagtcttatctgaagcagtttttcaactcctcagtcatcgatgtgtttaatcaacggaataagaagtccatcttcccctacagtgtcagtctccctcagagttgttccatactggattatagggcagtcatagaaaagatccctgaggatgacaagccttcttttttcggcctgccagcaaatatcgcccgtagcagtcagagaatgatttcctcgcaagtgatttcgcagctcaggatccttggccgcagtattactgctggatccaagttcgatcgggagatctggtcaaacgaactctctcctgtcctaaacctttggaaaaaattaaatcagaattccaatctgatccatcagaaggtgccccccccaaacgaccgtcagggcagccctatcctgtcattcattatcctggaacagtttaacgcaattcggctggtgcagtcagtacaccagagtcttgccgctctttcgaaggtgatccggggaaccaccttgctgtcttcggaggttcagaagctagcctccgcacttctgaatcagaaatgtccgttagcctggcagtctaagtgggaggggcctgaggaccccctgcagtacctgcgtggccttgtggccagggcactcgctattcagaattgggtcgacaaggctgaaaagcaggcattgttgagtgagactttggacctgagtgagcttttccaccctgatacctttcttaacgcactgcgtcaggaaaccgcccgggctgtggggagaagcgtggactcgttgaagttcgtagcctcatggaaggggcgtttgcaggaggccaaactacagatcaagatctccgggttgctgctggagggttgctcattcgatggaaaccagctctcggaaaatcaacttgactcaccgtccgtttcatcagtcctcccatgcttcatgggttggattccacaggatgcttgcggcccttactctcctgacgaatgcattagcctcccagtatacacgtctgctgagcgggacagggtcgtgaccaacattgatgtcccttgtggaggtaaccaagatcagtggatccagtgtggcgccgcactgtttctgaagaatcagtag

SEQ ID NO: 115290 - DNA, 12945 bp, synthetic construct
  misc_feature 1..12945: note = Description of Artificial Sequence: Synthetic coding sequence
  source 1..12945: mol_type = other DNA
atggcgaatgggacagctgatgttagaaagctattcattttcacaaccacgcagaactactttggcctcatgtctgaactgtgggatcaacccctgctttgcaattgcctggaaattaataattttctggacgacgggaatcagatgttgttgcgagttcagcggagtgacgccggaatcagcttctctaataccatcgaattcggcgataccaaggataaggttttggtgtttttcaagctgagacctgaagtgataaccgatgaaaatctgcatgacaacatcctagtgtcaagcatgctggagagccccattagtagcttgtatcaggcagtgcggcaagttttcgctcctatgttgctgaaggaccaggaatggagtaggaattttgaccctaagctgcagaatctgctttcagaattagaagccgggttaggaatagtgctgaggagatctgataccaatctcacgaaacttaagttcaaagaagacgatactagaggaattttgactccctcagacgagtttcagttttggatcgagcaagcgcaccgtggaaacaaacagatcagcaaagagcgtgcaaattattttaaagagttgtttgagactatagcacgcgagttttacaatttggacagtctgtctctcctagaggtcgtggacctcgtggagactactcaggatgtggtggacgacgtttggagacagacagaacatgaccattaccctgagagccgcatgctgcaccttctcgacatcatcggtggcagcttcggccgctttgtccaaaagaagcttggcactctaaatctgtgggaggatccttactatcttgtgaaagagagccttaaggcaggaattagtatctgcgaacaatgggtgatcgtgtgcaaccacttgaccggccaagtgtggcagcgatacgttccacacccctggaaaaatgagaaatatttcccggagacattggataagctaggaaaacgactggaagaagttttggccatcaggacgattcacgagaaattcttgtattttctgccggcctctgaggagaagattatttgcctcacccgggtgtttgagccctttaccgggctgaatcctgtccaatataatccatatacggagcctctgtggaaggcagctgtgtcacagtacgaaaaaattattgcaccagctgagcaaaaaatagcagggaaactgaaaaattacattagcgagattcaggatagcccccaacagcttctgcaagccttcctgaagtataaagaactggtgaaacgcccaacgatttctaaagaactgatgctcgaaagagagaccttacttgctagactcgtggacagcatcaaagacttcaggctggacttcgagaatcggtgccgtgggattcccggggacgcctcaggacccttgagcggcaagaacctatccgaagtggtcaacagtatcgtgtgggtcaggcagctcgagctgaaagtggatgataccatcaaaatcgccgaggctctgctctccgatctgccaggatttaggtgcttccaccaaagtgccaaagatcttctggatcagctgaaactttacgagcaggagcaattcgacgactggtccagggacattcaaagcgggctgtcagactcccgcagtggtctgtgcatagaagctagctcgcgcattatggaactcgacagcaatgacggcctcctcaaggtgcactattctgacaggttggtcatcctgttgcgggaggtacgccagttgtctgccctgggcttcgtaattccagccaaaatccaacaggtggccaatattgcacagaaattttgcaagcaagctattatattaaaacaagttgcacacttctacaactcgatcgatcagcaaatgatccagagccagaggccaatgatgctgcagtcggccttggcgtttgagcagattattaagaattccaaggcaggttctggcgggaagagccagataacctgggacaatccgaaagaattagaaggttatatccaaaagctgcagaatgcggctgaaagactggcaaccgagaataggaagcttcgcaagtggcacactactttttgcgagaaggtggtcgtcctaatgaatatagacctgctccgccagcagcagcgatggaaagacgggctgcaagagctgaggaccggactcgctacagtggaggctcagggattccaggcatcagacatgcacgcctggaagcaacattggaaccaccagctctacaaagccttggagcaccagtatcagatgggcttggaagcgcttaacgagaacttgcccgagataaacatagacctgacctacaaacagggacgcctgcagtttcgtcccccgttcgaggagatccgggcgaaatattacagagaaatgaaacgcttcataggcatccctaatcagtttaaaggggtgggagaagctggagacgaatctatcttttctattatgattgatcggaatgcatctggctttttgactatcttctcgaaggcagaggacctgtttcgccgcctgtccgccgttctccaccaacacaaggagtggatagtgattggccaggtggacatggaggccctggttgagaaacacttattcactgtgcatgattgggagaaaaatttcaaagcgttgaaaatcaagggcaaagaagtcgaaaggttacctagtgcagttaaagtggattgtcttaatattaattgcaatcctgttaagacagtcattgacgacctgattcaaaagctgtttgatttgctggtactttccttgaagaagtctatccaagcacacctgcatgaaattgataccttcgtcacagaggcaatggaggtcctcacaatcatgccacaatctgttgaagagattggcgacgcaaatttacagtacagcaaactgcaggagcgcaagcctgaaattctgccgctgtttcaggaggccgaggataaaaatcgcctccttaggacggtggctggcggtggcttagagacgattagcaatctgaaggccaaatgggacaagtttgagctgatgatggaatctcaccagctcatgatcaaagatcaaatcgaggtcatgaagggcaacgtgaaatcccgactgcaaatttattaccaggaactggagaagtttaaggcacggtgggaccaacttaagccaggagatgacgtcatcgagacaggtcagcataacactctcgataaaagcgcaaagctgatcaaagaaaagaagatcgaattcgacgacctggaagtgacacgaaagaagctagtggacgattgtcaccattttcggcttgaggagccaaatttcagtcttgcgagcagcatctccaaggacatcgagtcttgtgcccagatttgggccttttacgaagaattccagcagggcttccaggaaatggccaacgaagattggatcactttcaggaccaaaacttacctttttgaggaatttctaatgaactggcatgatcgattacgcaaggtggaggagcattctgtaatgactgtgaagttacagagcgaggtcgataagtacaagattgtcatcccgatcctcaagtacgtgagaggagaacatctctctcccgaccactggctggacctgttccgcctgctcgggctgccacgcggtacgtctctggagaaactgctgtttggcgacctcctcagagtagccgatacaatagttgctaaggccgccgatctgaaagacctgaacagtcgcgcccagggcgaagtgactatccgtgaggcccttagggaactcgatttgtggggtgtcggggccgtgtttacactcatcgattatgaggactctcagagccgaaccatgaaactgatcaaagactggaaggacattgtgaaccaggtcggcgacaataggtgccttttgcagagcctcaaggatagcccctactacaagggatttgaagataaggtctccatttgggaaagaaaactggccgaattagacgaatacctgcaaaatcttaaccacatccaacggaagtgggtgtatctggagcccatcttcggccgaggagcgctccccaaggagcagacacggttcaatagggtggatgaagatttccggagcattatgacagatattaagaaagacaatcgtgtgaccacattgacaacccacgccggcatccgcaattccctgctgaccatcctggaccagctccagaggtgccagaaaagcctgaacgaatttctagaggaaaagcgcagtgcattcccaaggttttacttcataggagacgacgatctgcttgagatattgggacagagtactaaccctagtgtgattcagtcacaccttaagaaactattcgcaggtattaactctgtgtgtttcgatgagaagtcgaagcatattaccgctatgaagtcactcgagggggaggtggtcccctttaaaaataaggtgcccctttccaataatgttgaaacctggctcaatgacctggccttggaaatgaagaagacgttagagcaactgttaaaggagtgtgtcaccacgggccgcagttctcagggcgcagttgacccgtccctattcccgtcgcagattctgtgcctggcagagcagatcaagtttaccgaggatgtggagaacgccatcaaggatcatagtttgcatcagatcgagacccagcttgtaaataagctggaacagtataccaacatcgatacatcaagtgaggaccctgggaacaccgaaagcggaatccttgagctgaagctgaaggctttaattctagacataatccacaacatcgacgtagtgaagcaactgaatcagattcaggtgcacacaaccgaagattgggcctggaaaaagcagctgcggttttacatgaaatcagaccacacttgctgcgtacaaatggtggattcagagtttcagtacacatatgagtatcagggaaacgcctccaaacttgtgtatacgcccctcacagacaaatgctatttgaccttgactcaggctatgaaaatgggtttaggaggcaacccctacggaccagctggcacagggaaaacagaatctgtcaaggcactgggcggcttactcggacgacaggtgctggtcttcaactgcgatgagggcattgacgtgaagtctatgggtcgcatctttgttggtctcgttaaatgtggggcgtggggctgttttgacgaatttaataggttagaagaatccgtgcttagtgctgtgtcaatgcagatacaaactatacaggatgctctgaagaaccatcggacagtatgcgaactgctcgggaaggaagtggaagtgaatagtaactccgggatatttattaccatgaatcctgccggcaaagggtatgggggccgccagaaactccccgacaacctcaagcagctgttccggcccgtcgccatgagtcaccctgataatgaacttatagccgaggtgatcttgtacagcgagggctttaaggatgctaaagtgctgagcagaaaattggtggcaatctttaacctctcgcgcgagctgcttaccccacagcaacattacgattggggcttacgagccctcaagacggtgctcagggggtcaggaaatctgttacggcagttgaataagagcgggacaacccagaacgctaacgaatcacacatcgtagtccaggccctgcgcctcaacactatgtccaagttcacgttcacagactgcacccggtttgacgctctgataaaggacgtgttccctgggatcgaattgaaggaggtagagtacgacgagctgtccgccgctctgaagcaggtgtttgaggaggcaaactacgagattatccctaaccagatcaagaaggctttggagctgtatgaacagttatgtcagaggatgggcgtcgtcatcgttggccccagcggagccggcaagtcaacactgtggcggatgctgcgggccgctctctgcaagactggcaaagtggtcaagcaatacacaatgaacccaaaggctatgccccgttatcagcttctgggccacattgatatggatactcgcgagtggagcgacggagtcttgactaattcagcccggcaggttgtgcgggagcctcaggacgtgtcatcctggataatctgtgacggtgacatcgatcccgagtggatcgagagtttgaattctgtgttggacgacaatcgtctgctgactatgccgtccggagagagaattcagttcggacccaatgtcaacttcgtgttcgagactcatgacttgagttgtgccagcccggcaaccatctctcgcatggggatgattttcctatctgacgaagagactgacctgaatagcctaatcaagagctggctgcgaaaccagcccgcagagtaccgcaataatctggagaactggatcggcgactattttgaaaaggcattgcagtgggtgctcaaacaaaatgattatgtagtcgaaacctctcttgtggggacggtgatgaacggtctctcacatctacatgggtgcagggaccatgatgagtttatcataaacttgatcagggggcttggtggcaatcttaacatgaagtctcgcctggaattcacaaaggaggtgttccactgggctcgggaatcacctccagattttcacaaacccatggacacctattacgattcaaccaggggacgtctggccacctacgtgctgaagaagcccgaggatttgactgctgatgatttcagcaatggcctcacactcccagtgatccaaactcctgacatgcagcgcgggctggattattttaagccttggctctccagcgacaccaaacaacctttcattctcgtcggacccgagggctgtggcaaaggcatgcttttgagatatgctttttcccagttgcgatcaactcagattgccacggtccattgctccgcacagacaactagcagacaccttctgcagaaactcagccagacgtgcatggtcattagcacgaacactggtcgggtataccggccaaaagattgtgagaggcttgttttatacctcaaggacattaatttgcccaagcttgataaatggggtacgagcaccctggtggcgtttctacaacaggtcttgacctatcaggggttctacgatgagaacttggagtgggttgggttggaaaacatacaaattgtggcgtccatgagcgccggagggagattgggaaggcacaaactcacaacacgctttacttctatcgtgcgcttatgctcaatcgattaccctgaaagggagcagcttcagaccatctacggggcttacctcgaacccgtgctgcataagaatctaaaaaaccactcaatatgggggagtagcagtaaaatttacttgcttgcaggctctatggtgcaggtgtatgaacaggtacgggccaagttcaccgttgacgactatagtcattacttttttaccccatgtatactgactcagtgggtgctgggcctctttcgctatgatctggagggaggctcctccaatcatccactggattatgtgctggagattgtagcttacgaagccaggagactcttcagggataaaatagtcggcgctaaggaactgcaccttttcgacatcattctgacgtctgtgttccaaggcgactgggggtcagacattctagataacatgtccgacagcttctatgtgacctggggtgcccgccacaattcaggcgccagggccgctccagggcagccactacccccccatgggaagcctttgggaaagctcaactccaccgatctcaaagatgtaatcaaaaaagggctgattcactacgggagggacaatcagaatctggacattttactgtttcacgaagtgcttgaatatatgtccaggattgatcgcgtactcagcttccctggagggtctctgctgctggccgggaggtcgggggtggggagacgtactataacaagcctggtgtcacatatgcatggggccgtattgttcagtccgaaaatctcccgcggctacgagctgaagcagttcaagaacgacctgaagcacgtccttcagctggccggcatcgaagctcaacaagttgtgctcctgctggaggactaccagttcgtgcatcccaccttcctcgagatgattaactctcttctctcttccggggaagtccccggtctgtatacgctggaagagctcgaaccactgctgctcccacttaaggatcaagcctctcaggatggtttctttggcccagttttcaactatttcacctacaggatacaacagaatctccatattgtgctgatcatggacagtgctaactccaactttatgattaactgtgagtctaaccccgccctccataaaaaatgtcaagtgttatggatggaaggatggtccaactcctcaatgaagaagataccagagatgcttttctcggaaaccggaggaggggaaaagtacaacgataaaaaaagaaaggaggagaaaaaaaagaacagcgtagatcctgactttttaaagtctttccttctaattcatgagtcgtgtaaagcttacggagctactccaagccgatatatgactttcttacacgtctattcagcgatttctagctcaaaaaagaaggagctgctaaagcgtcagagtcacctacaggcaggagtgtctaaactcaacgaggcaaaggcattagttgacgaattaaacaggaaggccggggaacagagcgtgctgttgaagactaaacaggatgaagccgacgcagccttacagatgataacagtctcaatgcaagacgcatccgagcaaaagactgagctagaacggctcaaacaccgcatcgctgaggaggtagtgaagattgaagaacgcaagaataaaatcgacgacgaactgaaagaagtccagccactcgtgaatgaggcaaaactagcagtcggcaacatcaaacctgaaagcctgagcgagatacgcagtctcaggatgccacctgacgtgattcgagacatcctggagggggttctccgcctcatgggtatttttgatacttcctgggtgtctatgaagtcctttctcgccaagagaggagtacgtgaggatatcgctacttttgacgcaagaaatatcagtaaagaaatcagggagtccgtcgaagagcttctctttaaaaacaagggctcctttgacccaaagaatgccaagcgcgccagtacagcagctgccccgctcgctgcttgggtgaaggcgaatatccaatactcccatgtgcttgaaaggattcacccccttgaaactgagcaggccgggctcgagtcaaatctgaaaaaaaccgaagaccgtaaacggaagctggaagaactccttaatagcgtggggcagaaggtatcagaactgaaagagaagtttcaatctcgtaccagcgaggccgccaaattagaggccgaggtgtccaaggcccaggagaccatcaaggccgccgaggtgcttatcaatcagctagaccgcgaacacaagcggtggaatgcacaggttgtagaaatcactgaagagctggccactctgccgaagagagctcaactggctgctgcatttatcacatatctgagcgcagctccagagagcctgcgaaaaacgtgcttagaagaatggactaaaagtgctggcctggagaaatttgatttgaggagatttctctgtactgagtccgaacagctaatttggaaatctgaaggcctcccgtctgacgatctgtccatcgagaatgccttagtaatcttgcagattattggtctgaagagttggtcacgtgtgtgtcctttcctcatcgatccttccagtcaagcaaccgagtggcttaagacccacctcaaagacagcaggctcgaggtgatcaaccagcaggattccaacttcatcacagccttggagctagccgtcagattcggcaaaactctgatcatccaggagatggatggggttgagccggtcctttaccctctcctgaggagggacctggtagctcaagggcccagatatgttgttcagatcggtgacaagataattgactacaatgaagaattccgcttgttcctttctaccagaaatccgaacccttttatacccccagacgctgccagcatcgtcaccgaggttaacttcacaaccacccgatctggcctgcgagggcagttgttagctctcaccattcagcatgagaaacctgatctggaggaacaaaaaaccaaattgcttcaacaagaagaggataaaaagatacagctggcaaagctggaagagagtctgctcgaaacattggccacatctcaaggaaatatactggaaaacaaagatctaatagagtcccttaaccaaacgaaggcttctagtgctttaatccaggagtctttgaaagagtcctataagttgcaaatcagcctggaccaggaacgagatgcttacctacccctggcagaaagtgcttccaagatgtatttcataatctctgacctgtccaaaattaataatatgtatcggtttagtctcgccgctttccttaggctgttccagagagcactccagaataaacaggacagtgaaaacaccgaacaaagaatccagtcgcttatctcatccctgcagcatatggtgtatgagtacatctgcagatgtctgtttaaggctgaccagttaatgtttgcacttcattttgttcgaggcatgcaccctgagctgttccaagaaaacgagtgggacactttcaccggagtggtagtgggcgacatgcttagaaaggcagattcacagcaaaaaatcagagaccagctgcccagttggatcgatcaggaacgcagctgggcagtcgctacgctgaagattgcactcccctctctgtaccaaacattatgcttcgaggacgccgcactctggcgcacttattacaataacagtatgtgtgaacaggagttcccctcgattctggctaagaaggtttcgttgttccagcagattctcgttgtccaggcattgcgaccggataggttgcagagtgcaatggccctcttcgcatgcaagaccctgggcctcaaggaagtgtctcctttacccctaaatctaaaaagactgtataaggaaacactagagattgaacccatcttaatcatcatttctcctggcgctgaccctagccaggaacttcaagaattggcgaacgccgagaggtcgggcgagtgctatcaccaggtcgcaatgggacaaggccaggctgaccttgccatccagatgctaaaagaatgcgctagaaacggtgactggctctgccttaagaacctgcacctggtggtctcctggctacccgtgttggagaaagaactcaacacattgcagccaaaggacacctttcggctgtggctaacagcagaggtgcaccctaatttcacaccaattctacttcaatcgagcctgaagattacctacgagtcaccgccagggctgaaaaaaaatcttatgcgcacttatgaatcttggacgccagagcagatcagtaagaaggacaatactcatcgagcccacgctctcttttccctggcgtggttccatgctgcttgccaggaaagaaggaattatatccctcagggctggactaaattctatgagttctccttatctgacctgagggccgggtacaatattatagatcggctgttcgatggcgcaaaagatgtccagtgggagttcgtacacgggctgttagagaatgcaatttacggcggacgtattgacaattacttcgatcttcgggtgttacagtcctatcttaaacaattttttaattcgtctgttatcgacgtcttcaatcagagaaacaagaaatccatctttccctattcagttagtctgccacaaagctgctccatactcgattatagagccgttattgagaagattcctgaagatgataagccttcgtttttcggtttacccgccaacatcgctcgcagctcacagcgcatgatcagcagtcaagtaatcagccagctgaggattctcggcagatcaataaccgcaggctcaaagtttgatagggagatttggagcaatgaactgagcccagttctgaacctatggaaaaagcttaaccagaacagcaaccttatccaccagaaggtccctccccctaatgataggcagggatcccccattctgagtttcatcattttggagcagttcaacgccattcgattggtgcagagtgtgcaccagtctctggctgcgctgtcaaaggttatccgcgggacgactctcctgtcctctgaggtccagaagctcgcgtccgctctgctgaatcagaaatgccctttagcctggcagagcaagtgggagggcccagaggacccattgcagtacttgcggggactggtggcacgcgcactggcaatccagaattgggttgacaaagccgagaagcaagcccttctgagtgagaccttggacctctccgaactgtttcatcctgatacgttcctgaatgccttaagacaagagactgcacgcgcggtgggtcggtccgttgactctcttaagttcgttgcctcctggaagggtagactccaggaggcgaagctgcagatcaaaatctccggactgctgctggagggctgttcctttgacggcaaccagttatccgaaaaccaactagactctccgagcgtgagtagcgttctgccctgcttcatgggctggattccccaggacgcttgcggtccttattctccggatgagtgcatttccctacccgtgtatacctcggctgagcgcgacagggtcgtcacaaacattgatgtgccttgtggcggtaatcaagatcagtggatccaatgcggcgcggctttgttcctaaagaatcagtag

SEQ ID NO: 115291 - DNA, 1515 bp, synthetic construct
  misc_feature 1..1515: note = Description of Artificial Sequence: Synthetic coding sequence
  source 1..1515: mol_type = other DNA
atgggccagggccaagctgatctcgctattcagatgttaaaggagtgcgcgcgcaacggtgattggctgtgcctaaaaaatctgcatcttgtggtttcctggctccccgtgctggagaaagagctgaatacgttgcagccgaaggatacattcaggttgtggcttacagcagaagttcatcctaactttacacctattctgttacaatcctcacttaagataacatatgagagtcctcccgggttgaagaaaaatctaatgagaacctacgagtcttggacaccggagcaaatctccaaaaaagacaatacgcatcgcgcacacgctttattctctttggcttggttccacgctgcctgccaagagcgccgaaactacatcccgcagggctggaccaaattttatgaatttagtctgtcggatctgcgcgccggctataacataatcgacaggttgtttgatggcgctaaggacgtgcaatgggaatttgtgcatggacttttggagaacgcgatttatggcggtaggattgataactatttcgatctacgcgtcttgcagtcttacttaaagcagtttttcaattcttctgtcattgatgtgttcaatcagcgcaataagaagtcgatttttccctattcagtgtcgctgccccagtcctgtagcattctcgactaccgtgcagttattgagaaaattcctgaagatgataagccaagcttcttcggtctgccagcgaacatcgccagaagttcccagagaatgattagctcccaagtcatctcgcagctgagaatcctcggcaggtccattacagccggaagcaagttcgaccgggagatctggagcaacgagctctcacccgtgctgaacttatggaaaaagttgaatcaaaattcaaatctgatacatcagaaggttcctccaccaaatgaccgccaggggtctcccatcttgtcgttcatcattctggaacagtttaatgccattaggctcgtgcagtctgtacaccagtctttagccgcgctgtcgaaagttatcagaggcacaactctgctgtcttcagaggtacagaagttggcgtctgccttgctgaaccagaaatgtccattggcatggcaatcaaagtgggagggtccagaggaccccctgcagtatctgcgcgggctggtggcgcgcgcgctagctattcaaaactgggtggacaaagctgagaagcaggctttgctgtctgagacactggatctctcggagctgttccaccccgacactttcttgaatgccttgagacaggaaactgcccgggcggttggtcgcagcgtggattccttgaagttcgtggcatcttggaagggccgcctgcaggaggcaaaactacagattaagatctctgggctactgctcgagggatgcagtttcgacggcaatcagctcagtgaaaaccagctagacagtcctagcgtatcctccgttcttccttgtttcatgggatggatccctcaggacctattgtag

SEQ ID NO: 115292 - DNA, 270 bp, synthetic construct
  misc_feature 1..270: note = Description of Artificial Sequence: Synthetic coding sequence
  source 1..270: mol_type = other DNA
atgtgtgaccgtaaggctgtaatcaaaaatgcagacatgtccgaagagatgcagcaggactcagttgagtgtgccacacaggcgttagagaagtataatatcgaaaaagatatcgctgcccatattaaaaaagagtttgacaagaagtacaaccctacctggcactgcattgtgggccggaatttcgggtcttatgtgacacatgaaacgaagcactttatatacttctacttgggacaagttgccatcctgctttttaaaagcggttag

SEQ ID NO: 115293 - DNA, 270 bp, synthetic construct
  misc_feature 1..270: note = Description of Artificial Sequence: Synthetic coding sequence
  source 1..270: mol_type = other DNA
atgtgcgacaggaaggccgttattaagaatgcggacatgtcagaagagatgcagcaggattctgtggaatgcgcaacacaggccctcgagaaatataatatcgagaaggacattgcagcccacattaaaaaggagttcgataagaaatataaccctacatggcattgtattgtaggacgaaacttcggctcatatgtcacacatgagaccaagcacttcatctacttctatctaggacaggtcgcaattctgctatttaagagtggttag

SEQ ID NO: 115294 - DNA, 270 bp, synthetic construct
  misc_feature 1..270: note = Description of Artificial Sequence: Synthetic coding sequence
  source 1..270: mol_type = other DNA
atgtgtgaccgcaaagcagtgataaagaacgctgatatgtcagaagagatgcagcaggattcagtagaatgcgcaacccaggccctggagaagtacaacattgaaaaggatattgcggctcacataaagaaagagttcgataagaagtataatccaacatggcactgcatcgtagggcggaacttcggttcctatgttacacacgaaacaaaacactttatctacttctatctgggccaggtggcaatactcctgttcaagtcgggatag

SEQ ID NO: 115295 - DNA, 270 bp, synthetic construct
  misc_feature 1..270: note = Description of Artificial Sequence: Synthetic coding sequence
  source 1..270: mol_type = other DNA
atgtgcgaccggaaggctgtcatcaaaaacgccgatatgagcgaagagatgcagcaggactcagtggaatgcgcaacccaagctcttgagaagtacaacattgaaaaggatattgccgctcacatcaagaaagagtttgacaaaaagtataatcctacatggcattgcattgtaggaagaaacttcggctcctacgtgacgcatgagactaagcactttatctatttctacctgggccaagtggcgatactcctgtttaaatcaggttag

SEQ ID NO: 115296 - DNA, 129 bp, synthetic construct
  misc_feature 1..129: note = Description of Artificial Sequence: Synthetic coding sequence
  source 1..129: mol_type = other DNA
atgtgcgatagaaaagctgtcattaaaaacgccgatatgtctgaggagatgcagcaggactccgtcgaatgtgctacacaggccctggaaaagtacaacatcgaaaaggatatcgctgctcatatatag

SEQ ID NO: 115297 - DNA, 270 bp, synthetic construct
  misc_feature 1..270: note = Description of Artificial Sequence: Synthetic coding sequence
  source 1..270: mol_type = other DNA
atgtgcgacagaaaagcagtgatcaagaatgctgatatgagcgaagagatgcagcaggatagtgtcgagtgtgccacacaagcacttgagaaatacaatattgagaaggacatcgccgctcacattaaaaaagagttcgacaagaaatacaatcctacgtggcattgcatagtcggacgcaattttgggagttacgtcactcacgaaactaagcactttatctatttctacttaggacaagtggcaattctgctgtttaagtcaggctag

SEQ ID NO: 115298 - DNA, 270 bp, synthetic construct
  misc_feature 1..270: note = Description of Artificial Sequence: Synthetic coding sequence
  source 1..270: mol_type = other DNA
atgtcagataggaaagccgtgataaaaaatgcggatatgtcagaggacatgcaacaggatgccgtagattgtgctacgcaggctatggagaagtacaacatcgagaaggatatagcagcttatatcaaaaaggaattcgacaaaaagtacaatcctacttggcactgcatcgttgggagaaacttcggtagttatgtaactcatgaaaccaaacattttatctatttctatctgggccaggttgcaatactacttttcaagagcgggtag

SEQ ID NO: 115299 - DNA, 144 bp, synthetic construct
  misc_feature 1..144: note = Description of Artificial Sequence: Synthetic coding sequence
  source 1..144: mol_type = other DNA
atggccgaagtggaggagaccctgaagagactgcaaagccaaaagggcgtgcaaggtattatagtggtgaacaccgagggtggttgggagcccctgggtcattgcggagatcggtctagacctcctgctcagggctgtccctag

SEQ ID NO: 115300 - DNA, 291 bp, synthetic construct
  misc_feature 1..291: note = Description of Artificial Sequence: Synthetic coding sequence
  source 1..291: mol_type = other DNA
atggcagaggtcgaggagactctgaagagactgcagtctcagaagggagttcagggcattattgtcgtgaataccgagggaattcctatcaagagcacaatggataacccaacaactacccagtatgcctctctcatgcactcgtttattctgaaggctagatcgaccgtgagggatattgacccacaaaatgatctgacatttctcaggatccgctctaaaaagaatgagatcatggtcgcccccgacaaggattatttcttaattgtcatacaaaaccccactgagtag

SEQ ID NO: 115301 - DNA, 366 bp, synthetic construct
  misc_feature 1..366: note = Description of Artificial Sequence: Synthetic coding sequence
  source 1..366: mol_type = other DNA
atggctgaggtggaggaaaccctgaagcggctgcagagccaaaagggcgttcaagggatcattgtggttaatacagaagggatcccaattaagtctaccatggataatcccacgaccacccagtatgcatccctcatgcactcattcattctgaaggctcgctccactgtgagagacatagacccacaaaatgacctgacctttctgcggatcaggagtaagaaaaacgagataatggtggccccaggcaaaggcagctccacatccccctgccgtaaccgaccccatgggaccttctcagtcgcgcaccaggaatcatggcatagcggcgtaagccgaggatctaagcaaggcccgagatcctag

SEQ ID NO: 115302 - DNA, 291 bp, synthetic construct
  misc_feature 1..291: note = Description of Artificial Sequence: Synthetic coding sequence
  source 1..291: mol_type = other DNA
atggccgaggtcgaggagactctcaagaggatccagagccacaaaggggtgatcggcaccatggtcgtcaacgctgagggaattccaattcgcactacactggacaattcaaccaccgtccagtacgccggtctacttcaccacctcacaatgaaggccaagagcaccgtacgcgacattgatccacagaacgacctgacttttctcagaatcagatctaagaagcatgaaattatggtagcacctgacaaggaatacctgctgatagtgatccaaaacccctgtgaatag

SEQ ID NO: 115303 - DNA, 165 bp, synthetic construct
  misc_feature 1..165: note = Description of Artificial Sequence: Synthetic coding sequence
  source 1..165: mol_type = other DNA
atggcagaagtcgaagagactctcaagcgcatccagtctcacaaaggagttattggcactatggttgtcaacgccgaggaccctaggttcgttacgttcaagtatgccaggcaacttacagcctttcaaaggaagagcgggcaacagataactatcaaagattag

SEQ ID NO: 115304 - DNA, 486 bp, synthetic construct
  misc_feature 1..486: note = Description of Artificial Sequence: Synthetic coding sequence
  source 1..486: mol_type = other DNA
atggacccaaacccccgggctgctctggaaagacagcagctgagactgcgggagcgacagaagtttttcgaggatatcctgcagcctgagaccgaattcgttttccctttaagtcatcttcatcttgaaagtcagcggccccctatcggctccatcagctctatggaggtcaacgttgacactctagaacaggtcgaacttatcgacctgggagacccagatgctgcggacgtgttcctcccttgcgaggatccacctccgacaccacaatccagtgggatggataatcatctcgaagagttatcccttccagtgcctacgagtgacaggactacaagtagaaccagctcgtcctcttcctctgacagctcaacaaacctacacagtccaaacccttcagatgatggcgcagacaccccccttgcccagtctgacgaagaggaggaacggggggatgggggggccgagccaggcgcctgcagttag

SEQ ID NO: 115305 - DNA, 486 bp, synthetic construct
  misc_feature 1..486: note = Description of Artificial Sequence: Synthetic coding sequence
  source 1..486: mol_type = other DNA
atggatcctaacccaagagctgctctggagcggcagcaactgcggcttcgcgagaggcagaaattttttgaagatattctgcagccagagaccgaattcgtgttcccactctcccacctccacctcgaatcccagcggccccctatcggttctatcagcagtatggaagttaatgtagacacattggagcaggtagagttaattgaccttggcgatccagatgcagctgatgtgtttctgccctgcgaggacccacccccgactccgcaaagtagtggcatggataatcatctggaggagctgagtctgccggttccaacctcagaccgaaccacttcacggaccagctcctcctcaagttcagactctagcactaacctgcattcccctaatcccagcgatgatggcgcagacacccctctggcacagtctgatgaggaagaagagcggggggacggcggcgccgaacccggcgcctgcagttag

SEQ ID NO: 115306 - DNA, 792 bp, synthetic construct
  misc_feature 1..792: note = Description of Artificial Sequence: Synthetic coding sequence
  source 1..792: mol_type = other DNA
atggaaagctgggccttagccgtattccctgaatatagagtcagcctcctatggtgtctggaactggcatcacctctgtggagcctgggtcaggcccctcccctccacgaaacttggttcgtcggccacacctggtttcaaggtcggggaaaacgctcccccagagccgaggtgtctcggccggagccaggcgcgcctttactgggatgttggctgcagtggggggcccctagcccaggccccctgtgtctactctttagactctgtagctgtacctgtttcgcaccactgccagctggcgccgatatggatcctaatcctagagccgctttggagagacagcagttaagactgagagaaaggcagaagtttttcgaagacatccttcagcccgaaaccgaattcgtgtttcccctgagccatctgcacctcgagtctcagcgtccgcccatcggaagcatctcgtcgatggaagtgaatgtggacactctggagcaagttgaactgatcgacctgggagacccagatgcagctgatgtttttttgccctgtgaggatcccccaccaaccccacaaagctctggcatggacaatcacctggaggagttgagtctccccgtaccaacctcggacagaacaacttctcgaacctctagcagctcgtccagcgattctagcactaacctgcactcaccaaacccctctgacgatggtgccgatacccctttggcccagtctgacgaggaagaagaaaggggcgatggaggtgcagagcccggagcttgttcttag

SEQ ID NO: 115307 - DNA, 486 bp, synthetic construct
  misc_feature 1..486: note = Description of Artificial Sequence: Synthetic coding sequence
  source 1..486: mol_type = other DNA
atggatccgaatccgagggcagccctagagaggcagcaactgcgcctgcgggaacgtcagaagtttttcgaagacatactgcagcccgaaacggaattcgtgttcccccttagtcatctccatctggaatcacagcgccctccgatcgggtccatcagcagcatggaagtgaatgtggacaccctcgagcaggttgagctgattgaccttggcgatcccgacgctgctgacgtgttcctgccgtgcgaggaccctccgcccacgccccagagctccggcatggacaatcacctggaggagttgagcctccccgtgcctaccagcgaccggacaacaagccgcacctcttcaagttctagctctgattcaagtactaatctgcatagccctaatcctagcgacgacggagccgatacgcctttggcccaatcggacgaggaggaggaacgaggtgatggaggggccgaacctggggcgtgctcttag

SEQ ID NO: 115308 - DNA, 339 bp, synthetic construct
  misc_feature 1..339: note = Description of Artificial Sequence: Synthetic coding sequence
  source 1..339: mol_type = other DNA
atggatcccaatccaagggctgccctagagaggcagcagctccgactgcgtgaacgacagaagttcttcgaagacatcttgcagcctgaaacagaatttgtctttccgctgagtcatctccaccttgaaagtcagcgacctccgatagggagcataagctctatggaagttaacgttgacactctcgagcaagtagagctcatagatcttggcgatcctgacgccgcagacgtgtttctcccttgtgaggatccccctcctaccccacagtctagcgggatgccactctgcttcggggacttctcagcctcgcagcctgaaccagatgtccgactctag

SEQ ID NO: 115309 - DNA, 780 bp, synthetic construct
  misc_feature 1..780: note = Description of Artificial Sequence: Synthetic coding sequence
  source 1..780: mol_type = other DNA
atgggagctgggaacttcctgaccgcactggaagtcccagttgccgcgttagcaggggccgcctcagatagaagagcctcttgtgagcgggtgagcccaccacctcccctcccccacttccgtctgccgcctcttccaagatcgcggctgcctgggccagtcagcagacctgagcccggagctccactgctagggtgctggctgcagtggggggcccctagcccagggcccttatgcctgctgtttcgcctctgcagctgtacctgtttcgctccactccccgctggcgctgacatggatcccaatccacgcgccgctctggagcgccaacagcttcgtctgcgagagcgtcagaagttctttgaagacattcttcaaccagagactgagtttgtgttcccgttgtcccaccttcatcttgaaagccaacggcccccaatcggtagcatctcaagcatggaagtgaacgtcgacacactggaacaggtagaactgatcgacctaggtgatccagacgctgccgacgtcttcttaccttgcgaagaccccccaccgacaccgcaaagttctggtatggataaccatttggaggagctcagcttaccagttccaactagcgacaggaccacttcgaggacgagtagttcttcctcttcagacagttcaaccaacctccactcacctaacccttcagacgacggagctgatacccctctggcccaatcagacgaggaggaggaacggggcgatggaggcgctgagcccggggcctgctcttag

SEQ ID NO: 115310 - DNA, 339 bp, synthetic construct
  misc_feature 1..339: note = Description of Artificial Sequence: Synthetic coding sequence
  source 1..339: mol_type = other DNA
atggatcctaatcccagagctgccctggaacggcagcaactccgacttcgcgaacgtcagaaatttttcgaagatatcctccagcccgaaacggaattcgtgtttcctttatcccatctccatctcgagtcccagaggccgccaattggaagcatcagctccatggaggtgaatgttgacacattagaacaggtagaattgatcgatcttggcgacccagacgccgcggacgtttttctgccatgtgaagaccccccccccacaccacagtcttcaggtatgcccctgtgcttcggagattttagtgctagccagcccgaacctgatgtgaggctttag

SEQ ID NO: 115311 - DNA, 486 bp, synthetic construct
  misc_feature 1..486: note = Description of Artificial Sequence: Synthetic coding sequence
  source 1..486: mol_type = other DNA
atggatcctaacccacgagcagcacttgagagacagcagcttcggctgagggagagacagaaattctttgaggacattcttcaacccgagacagagtttgtatttcccctgtcccatttacatttggagagccagagacccccaattgggtcaatttccagcatggaggtcaatgtcgacactcttgaacaggtggagctgatcgacctgggcgaccctgacgcggctgacgttttcctaccctgcgaggacccacctcctaccccccagagcagcgggatggataatcacctggaggaacttagtctaccagtgccaacatctgatcgcactacctcgagaactagctcttcttcttcgtccgactccagcacaaacctgcactcccccaacccaagtgatgatggagccgacactcccttagcgcaaagcgatgaggaggaggagcgcggggacggcggggccgaaccaggagcttgctcctag

SEQ ID NO: 115312 - DNA, 519 bp, synthetic construct
  misc_feature 1..519: note = Description of Artificial Sequence: Synthetic coding sequence
  source 1..519: mol_type = other DNA
tgaacttggtttcaagggagaggcaagaggagtcctcgtgccgaggtctctagaccagaaccaggtgcgcccctgctcggttgttggctacagtggggcgccccatccccaggacccttgtgcctgctgttcagattgtgcagctgcacatgctttgccccactgcccgcgggcgccgacatggaccctaatcctagggccgctttggagaggcagcagctgaggctacgcgagcggcagaagttctttgaggacatcctacagcccgagacagagttcgtgttccccctcagtcacctacacttagagtcgcagagaccaccaattggaagcattagcagcatggaagtgaatgtggacactctcgagcaggtagaactcattgatctgggagatccggacgccgctgacgtcttcctgccttgcgaggacccgccgccaactcctcagagtagtggcatgcccttatgttttggagacttttcggccagccagcctgagccagacgtgcggctgtag

SEQ ID NO: 115313 - DNA, 15516 bp, synthetic construct
  misc_feature 1..15516: note = Description of Artificial Sequence: Synthetic coding sequence
  source 1..15516: mol_type = other DNA
atgcattcttcgagctactcctaccgctcctctgactctgtgttttccaacactacgtcaacacggaccagtctcgattctaacgaaaacctgcttctggttcactgcggtccaacgctgattaactcctgcatttcattcggatccgaaagcttcgacggacacagactggagatgctccagcagattgccaatcgtgttcagcgggacagcgtgatttgcgaagataaactcattctggcgggcaatgcactgcagtcagactcaaaacggctggaatctggggtgcagtttcaaaatgaggccgaaatcgcggggtacatcttagagtgcgagaacctcttaagacagcatgtgattgatgtgcagatcctaatcgacggcaagtactatcaagccgatcagttggtgcagcgggtggcaaagctgcgagacgagattatggcgctaaggaacgagtgttcttccgtttattccaaaggccggattcttactactgaacagaccaaattgatgatctcgggcatcacgcagtccctgaacagcgggtttgctcagaccctgcacccatcactcaccagcggcctgacgcaatccctgacgcccagcctgacctccagcagtatgaccagcgggctgtcctcaggtatgactagcagactgacacccagcgtcacacccgcctatacacctggtttccccagcgggttagtgccaaattttagtagtggtgtcgaacccaatagtctgcagactttgaaactcatgcagattagaaagcccctactgaaatccagcctcctagaccagaatctgacagaggaggagatcaatatgaagttcgtccaggaccttttgaactgggtggacgagatgcaggttcagctcgaccggactgagtggggcagcgacctgccatccgtggaaagtcatctcgagaatcacaaaaacgtgcaccgggcaatagaggaattcgaatcaagtttgaaagaggccaaaatctccgaaattcagatgactgccccactcaaattgacttacgcggagaaactccatcggttggagtcccagtatgctaagcttctaaataccagtagaaatcaggagaggcacctggacaccctccataatttcgtgagccgagctacgaacgaactgatctggcttaacgagaaggaagaagaggaggttgcgtacgactggagcgagaggaatacgaatattgctagaaaaaaggattaccacgcagagctgatgcgcgagcttgaccagaaagaggagaacatcaaatcagtccaggagattgccgagcagctgctcctggagaaccacccagcgcgactgacaatcgaagcctaccgggccgccatgcagacacaatggagctggattttacagctatgccagtgcgttgaacagcacattaaggagaacactgcatacttcgagttcttcaacgacgccaaggaggcgaccgactacctgcggaacttgaaagacgctatccagcggaaatatagctgcgacagatctagctcaatacataaactagaagatctggttcaggagtcgatggaagagaaagaggagcttctacagtacaagagcactatcgcgaatctcatggggaaggccaagacaatcatccagttgaagccccggaacagtgattgtcccctgaagacttcaatccctattaaagccatatgtgattatcgccagatcgagattacaatctacaaagacgatgagtgcgtgctggcaaataacagccaccgtgcaaagtggaaagtgatctctcctacaggaaatgaggctatggtgccatctgtgtgctttacagtccctcctcccaacaaggaggcagtggatctagctaaccgcattgagcagcaatatcagaacgttctcacactctggcacgaatctcatattaacatgaaatcagttgtgtcttggcattatctgattaacgaaatcgacagaattagggcgagtaacgtggcatctatcaagaccatgctgcccggcgaacatcagcaggtgctctcaaacctgcaatctaggttcgaggacttcctggaggattcacaggagtctcaggttttctcagggtccgacatcactcagctggaaaaggaggtcaacgtgtgcaaacaatactatcaagagctgctgaaaagtgctgagagagaggagcaagaagaatctgtgtacaacctgtacattagtgaggtgcgtaacatccggctccggcttgagaactgcgaggatcgcctcatcaggcagatccggaccccactagagagagacgacttacatgaaagtgtgtttagaattaccgagcaagagaaacttaagaaggaactggaacgcctaaaggacgacctggggacgattactaacaagtgcgaggaatttttctcccaggcggccgccagctcttccgtgcccaccctgagatctgagctgaatgtagttctgcaaaacatgaatcaagtgtattcaatgagcagcacatacatcgataagctgaaaactgtcaacctcgtgcttaagaatacccaggctgctgaggccttggttaagctgtatgagacaaagctgtgcgaagaggaagcagttatcgccgataaaaataacattgagaatctaatctccacgctgaaacagtggcggagtgaggtcgatgagaagcgccaggtgtttcacgctctcgaagatgaactccagaaggcaaaggcaatatccgatgagatgtttaaaacttacaaagagagggacctggacttcgattggcataaggagaaggcagatcaactggttgaacgttggcagaacgttcatgtacagatcgataacagactcagagacctggaaggaatcggtaaaagtcttaagtactatcgggatacttaccacccattggatgattggatccagcaggtggaaacaacccagaggaagatacaggagaaccaacccgagaactctaagaccctcgccacccagttgaaccaacagaagatgttggtgagcgaaatcgagatgaagcagtccaaaatggacgagtgccaaaaatatgcggaacaatactccgctaccgtgaaggactacgagctccagacaatgacctatagagcgatggtggacagccaacagaaatctcctgttaagaggcgacgaatgcagtcgtcggccgatcttattatacaagagttcatggacctgcgcacccgttacaccgcccttgtcacactgatgacgcagtacatcaagtttgctggtgattcactgaagagattagaagaggaggagaaatctttggaagaagaaaaaaaagagcatgtggaaaaggccaaagaactccagaagtgggtgtccaatattagcaagacccttaaggacgctgaaaaagccgggaagccccccttctcaaaacagaaaatctctagtgaggagatttccaccaaaaaggagcagctttccgaagctcttcaaaccatccaactctttctcgccaaacatggcgacaagatgaccgacgaggaacggaatgagctggaaaagcaggtgaagaccctgcaagagtcctacaatctgctcttttccgaatccctcaaacagctgcaagagtctcagacttcgggagatgtgaaagtcgaggagaagatcgtggccgagcgtcagcaggagtataaggaaaaattgcaaggaatatgtgatttactgactcagactgaaaacaggctgattggccaccaagaggcctttatgatcggcgatggcacggtagaacttaagaagtatcaatcaaagcaagaagaacttcagaaggacatgcagggttccgctcaagccttggccgaagtggttaaaaataccgagaatttcttaaaggaaaacggtgagaaactgtcccaagaggataaggccttgattgaacagaagcttaatgaggccaagatcaagtgcgaacagttgaacttaaaagccgagcaatccaaaaaggagctagacaaagtcgtgaccaccgcaatcaaagaagagactgagaaggtggccgccgtaaaacagctggaagagtcgaaaacaaagatcgagaatctcttggattggctgtccaatgtcgataaagattcggagcgggctggaacgaagcacaagcaggtcattgaacagaacggcactcactttcaggaaggcgatggcaagtctgccattggcgaggaggacgaagtaaacgggaatctgctggaaaccgacgtggatggacaggtagggacgacacaagaaaacctgaaccagcaataccaaaaagtaaaagcacagcacgagaaaatcatttcacagcaccaggctgtaattattgccacacagagcgcacaagtgctcctcgagaaacaggggcagtacctaagtcctgaggagaaagagaagctgcagaagaatatgaaggagttgaaagtccattacgagacagcattggctgaatccgagaaaaaaatgaaactgacacattctcttcaggaagaattggagaagtttgacgccgactataccgaattcgagcattggctccagcagagcgagcaggagctcgagaacctcgaagccggagcggacgatatcaacggcctcatgaccaagcttaagcgccagaaatctttttctgaagacgtcatctcccacaaaggcgatctgagatacatcactatatctggcaacagagtgctggaagcagctaaaagctgctctaagagggacgggggcaaggtggacacttctgccactcaccgggaagtacagcgaaagctggatcatgccaccgacagatttaggagtctttatagcaagtgcaatgtgcttgggaataacctaaaggaccttgtggacaagtatcagcattacgaagatgcctcgtgcggtttattagctgggttacaggcctgtgaagccactgcatcaaagcatctgtctgaaccgattgctgtagatcctaaaaatctgcagagacaacttgaagagaccaaagctctgcaggggcaaatttcatcccagcaggtggccgtcgaaaagctcaaaaagacagcagaggttttgctcgacgccagagggagtctgctgccagcaaagaacgacattcagaaaaccctggacgacatcgtgggcagatacgaagatttgtccaaaagcgtgaacgaacgtaacgagaagcttcaaatcacacttactcggtctttatccgtgcaggacggcctggacgagatgttagactggatggggaacgtagaaagcagcctgaaggagcaagggcaggtgcctctgaacagtactgctttgcaggatatcatttccaagaacattatgctggagcaggatattgccggcaggcagtcctccatcaatgctatgaatgaaaaagtgaagaaatttatggaaaccaccgaccccagtactgcaagctccctgcaggccaaaatgaaggatctcagtgcccgtttttctgaggcatcccacaaacacaaggagaccctcgccaaaatggaagagctgaaaacaaaggtcgaactgtttgaaaacctctccgagaaactacagactttccttgaaacaaaaactcaggctctgacagaggtggatgtacccgggaaagatgtgaccgaattaagtcagtatatgcaggagagtaccagcgagttcctggagcataagaagcacctggaggttctgcatagcctcttaaaggaaataagcagccacggtcttccttcagataaggccctggtgctagaaaaaacgaataacctgtctaagaagttcaaggaaatggaagacaccataaaggagaagaaggaagcagtaactagttgccaggagcaactggatgccttccaggttctggtgaaatctctaaagagctggatcaaagagaccacaaagaaagttccgatagtccagccctcatttggcgcagaggatcttggtaaatccctggaggacaccaaaaaactgcaggaaaagtggagcctgaaaacccccgagatccagaaagttaataatagtggcatttcactgtgcaatctcatcagcgctgttaccactcccgccaaggcgatcgccgctgtgaaatccggcggcgcggtgctcaatggcgaagggactgccacaaacactgaggagttctgggccaacaaaggtctgactagcattaagaaagatatgacagatatcagtcacggctacgaggatctggggctgctcctgaaggacaaaattgctgaattgaatacaaaacttagcaagctgcaaaaggctcaggaggaatccagtgccatgatgcagtggcttcagaaaatgaacaaaacggcaacgaaatggcagcagacacccgcacccaccgacaccgaagccgttaaaacacaggtggaacagaataagtctttcgaggcagaactgaaacagaatgttaataaagttcaggaactgaaggataagcttaccgaattgctagaggagaaccctgacactccagaagctcctaggtggaagcagatgctgacagaaattgattccaagtggcaagaacttaaccagctcaccatcgatagacagcagaagttggaggaatcttcaaataacctcacacagttccagactgtggaagcccagctcaagcaatggttggtagagaaagagctgatggtctccgtactgggcccactctcaatagaccccaacatgctgaacacacagcgccaacaggtgcagattttgttgcaggagttcgccacacgtaagccgcagtacgagcagttaacagcagctggccagggcatcctgagccgccctggcgaggacccctccctccgcggaattgtcaaggagcagctcgctgctgtcacccagaaatgggatagcctgaccggccaactgagtgatcggtgtgactggattgaccaagcgatcgtcaaatcaacgcaatatcagagtttgcttagaagtttaagtgataaactatccgatctggacaacaagctgagtagctcgctggccgtgagcacccacccagatgccatgaatcagcagttggagaccgcacaaaaaatgaagcaggagattcagcaggaaaagaagcagataaaggtggcccaggccctgtgcgaggatctgagcgctctcgtcaaggaagagtatttaaaggctgagctgagccgccagttggaggggatcttgaaaagtttcaaggatgtggaacagaaggccgaaaaccacgtgcaacatctgcagtccgcttgtgcgtcctctcatcagttccagcagatgtcgagagattttcaagcttggctggacactaagaaggaagaacagaataagtctcatccaatttccgccaaacttgatgtcttagagagcctgatcaaagaccacaaggatttctcaaagaccctgacagcccaaagccacatgtatgagaagacaattgccgaaggagagaacctgctcctgaagacccagggaagtgagaaggcagccctccagttgcaactaaataccatcaaaactaattgggacacattcaataagcaggtgaaagagagggagaacaagttgaaggagagcctggagaaggctctcaagtataaggagcaagtcgaaaccctttggccatggatagataaatgccagaacaatttggaggagattaaattctgcctggaccctgccgagggcgaaaatagcattgcgaaactgaaatccctccagaaggaaatggatcaacactttggcatggtggaactccttaataacactgcaaattcactgctgtccgtctgtgagatcgataaggaggtggtgacagatgagaataagagcctgattcagaaagttgatatggtgacagaacaactgcatagtaagaagttttgcctggagaacatgacccagaagtttaaagaattccaggaagtttcgaaagagtcaaagcggcagctgcagtgtgccaaggagcagctcgacattcacgactcactgggtagtcaggcatactctaataaatatttgacgatgcttcagactcagcagaaaagtcttcaagctctaaagcaccaggtagatctcgccaagaggttagctcaggacttggtggttgaagcatccgattccaaggggacctcagacgtactattacaggtcgaaacgattgcacaggaacactccacgctgagccaacaagtggatgagaaatgttcctttcttgaaaccaaattacagggcatcggacactttcagaacacaatcagggaaatgttctctcaattcgccgagtttgatgatgagttggatagcatggctccagttgggcgtgatgcggagacacttcagaaacagaaggagactatcaaagctttcctaaaaaaattggaggcgttgatggcctctaatgataacgcaaacaagacatgtaagatgatgcttgccacagaagaaaccagccccgatctggtcggcattaagagagatctggaggctctgtcaaaacagtgcaataaattgctcgatcgggcacaagcccgtgaggaacaggtggaaggaacgatcaagcgactggaggagttctacagtaagctgaaggagttttcaatcctgctgcagaaggcggaagaacacgaggagagccaaggcccagtggggatggaaaccgagacgattaatcagcagctgaatatgtttaaggtcttccaaaaggaggagatagagccactacagggcaagcaacaggacgtcaattggcttggacagggcctcatccagtctgccgctaaaagcacttcaacccagggtctggagcatgacttagacgatgtcaacgctagatggaagactctgaataaaaaagtagctcagagagctgcgcagctgcaggaagccctgctgcactgcggccggttccaggatgcactggaaagcctcctgtcctggatggtcgataccgaggaactggttgcaaaccagaagcccccgagtgcagagtttaaagttgtcaaagcccagattcaggaacagaaactcctgcagagattactggacgatagaaaaagcacggtcgaggtgataaagcgggagggggagaagatcgcaacaaccgctgaacccgcggacaaagtgaaaattcttaaacagctgtccctgctggacagcagatgggaagcactgctgaataaggcagaaaccaggaatcgacagcttgaggggataagcgtcgtagcccagcagtttcacgaaacactcgaaccactcaacgagtggctgactaccattgaaaagagactcgtcaattgtgagccgatcggcacccaggcatccaagttagaggagcagatagcacagcacaaggctttggaagatgatattataaatcacaataagcatctgcaccaggccgtttcaattgggcagagcctgaaagtcctgtcatctcgcgaagacaaggatatggtacagtctaagctggactttagccaggtatggtacatcgagatccaggaaaagtctcacagtcgatctgaactgctccagcaggcactctgcaatgccaaaatatttggcgaggacgaagtggaactcatgaattggctgaacgaggtgcacgacaagttgtccaaactctcagtccaggactacagtactgaaggcctgtggaagcaacagagtgaactcagggttctccaggaagatattttgcttcgaaagcagaatgtcgatcaagccttgttgaacggtctggagctgctgaaacaaacgactggggacgaagtgctgattatccaggataagcttgaggccatcaaagcacgctacaaagacataactaaattgagcactgacgtagccaagacccttgagcaggctttgcagcttgcacggaggctgcactccacccacgaagaactctgcacttggctagataaggtggaggttgaacttctcagctacgaaacccaggttctgaagggcgaggaggcctctcaggcacagatgagacccaaagaactcaagaaagaggcaaaaaataataaggccctgctggatagcctgaatgaagtgtcctcagctctcctagagcttgtaccatggcgggcacgggagggcctggaaaagatggtcgctgaagacaacgaaaggtacaggctggtcagcgatacaatcacccagaaagtcgaagagattgacgccgctatcctccgctctcagcagtttgatcaagcggccgacgctgaactgtcctggatcaccgaaacagagaagaagctcatgagcctcggtgacattagattggagcaggaccaaaccagcgcgcaactgcaagtacagaagaccttcaccatggagatactgaggcacaaggacatcatcgacgatcttgtaaaaagcggccacaaaatcatgactgcttgtagtgaggaagagaagcagtcaatgaaaaaaaagctggacaaggtcctgaagaactatgacacaatatgccagattaactccgaacgttatctccagctggagcgagcccagtccctggtaaatcagttctgggagacctacgaggaactgtggccttggctcaccgagacacaaagcataatctcgcagctgccagctcctgccctcgagtacgaaactctcaggcagcaacaagaagagcacaggcaactacgggagctgatagcggagcacaagcctcacattgacaagatgaacaagacaggcccacagctgttggaactctcccccggcgaagggttctctatacaagagaaatatgtcgcagccgataccctctactcgcagattaaggaggacgttaagaagagggccgtggccttggacgaggcaatttcacagtcaactcagtttcacgataagattgaccagatcctggaaagcctggagaggattgtagaaagactcagacagcctccttctatctcggccgaagtggagaagataaaagaacagatttccgaaaataagaacgtgagcgtagacatggagaagctccagccactgtacgaaacgttgaaacagagaggggaggaaatgatagcacggtccggtggtaccgataaggatatcagcgccaaagccgtgcaggacaaactggatcaaatggtcttcatttgggagaatatacacactctagtggaagaacgagaagccaaactgcttgacgtcatggagcttgcagaaaagttctggtgtgatcatatgtctcttatcgtcaccattaaagatacccaggacttcattcgtgacctggaggatcctggaatcgacccttcagtggtgaagcagcagcaggaggccgcagagacaattagagaggagatcgatggcttgcaggaggagttggatattgtaatcaatctcggctccgaactgattgcagcatgtggagagcctgataagcctatagtcaagaaaagcattgatgaactgaatagcgcatgggactcattgaacaaagcatggaaggaccgaatagataaacttgaggaggcaatgcaggctgctgtgcagtaccaggatggtctgcaggccgtgtttgactgggtggatattgccggcggaaagctggcctctatgtctcccatcggaacagacctggagaccgtgaagcagcagattgaggaactcaaacagttcaagtcagaagcctaccagcagcagattgaaatggagagactgaaccaccaagcggagctcttgctgaaaaaggtaacagaagaatctgacaaacatactgtacaggatcctttaatggaattgaaactcatttgggatagcttagaggaaagaataataaatcgacaacataagctggagggggccctgttagccctaggccagttccagcatgccttggacgaattgctggcttggcttacacacactgaaggtctgctgagtgaacaaaagcctgttgggggagatcctaaagcaatagaaatcgaactcgcaaaacatcacgtgctccaaaatgatgtccttgcccatcagagcaccgtggaggccgtcaataaagccggaaatgacctgattgaaagttccgcaggggaagaggcctccaacttacaaaataagctcgaggtgctgaatcagaggtggcaaaacgttctggaaaagaccgagcaacgcaaacaacaactcgatggcgccctgcgccaagcaaaggggttccatggcgaaatcgaggatctgcagcagtggctcactgacactgaacgacatctgctcgccagcaaaccattgggtgggttgccggaaacagccaaggagcaacttaacgtgcacatggaggtgtgtgctgcctttgaggcgaaagaggaaacgtacaaatccctcatgcagaaagggcagcagatgctggcgcgttgtcccaaaagtgcagagactaatattgaccaggatatcaacaacttaaaggagaagtgggaaagcgttgagacgaagctgaatgagaggaagaccaaactggaagaggcactgaaccttgctatggagtttcacaacagcttgcaagacttcatcaattggcttacgcaggccgagcagaccctcaatgtggcatcccggccttcactgattcttgatacagttctgttccagattgacgagcataaagtgtttgccaatgaggtaaattctcaccgcgagcagattatagagctcgacaagacgggaacccatcttaaatacttctcccaaaagcaggatgtcgtcctgataaagaatttgttgatctctgtgcagtcccggtgggagaaagtggtccagcgcctagtagaacgggggcgatcactagatgacgctcgcaaaagggcaaaacagttccacgaggcttggtcgaaactgatggagtggctggaagaatcagagaaaagtctcgatagcgagctggagatagctaacgaccccgacaagattaagacccaactggcacagcacaaggaatttcagaaatcgttaggtgccaagcactccgtctatgacaccaccaatagaactgggcgctcactcaaggaaaaaactagcctggccgacgataatcttaagcttgatgatatgttatctgaactcagagataagtgggacaccatttgcgggaaatcagtggaacgacagaataagcttgaggaagcattgctgttttctggccaattcaccgacgctttgcaggctcttatcgattggctgtacagagttgagccgcagcttgctgaggatcagcccgtgcatggagacattgatctcgtgatgaacctcattgataatcacaaggcgtttcagaaggagttaggtaagagaacaagtagcgtgcaggcgttgaagaggtctgctcgtgagctgatcgaggggagccgcgacgacagctcatgggtgaaagtgcagatgcaggagttgtcgacccgctgggagaccgtctgcgctctgtctatttccaaacaaactcggctagaagcagcacttcggcaggccgaagagttccattctgtggttcatgcgctgctggaatggcttgccgaggccgagcagaccctgaggttccacggcgttctgccagatgatgaggatgccttgcgaaccctgatagaccagcataaggagttcatgaagaagctggaagagaagcgggcagaacttaacaaggcaaccacaatgggcgatacagttctggctatttgccaccctgattccatcactaccattaagcactggattactatcataagagcgcgctttgaagaggttctggcctgggctaaacagcaccagcagaggttggcatcagcccttgcagggctaattgccaaacaggagctgcttgaggccctcctggcgtggctccagtgggctgaaacgaccctcactgataaggataaagaggtgattccacaagagatcgaggaggtaaaggcactgatcgccgagcatcaaacgtttatggaggaaatgacccggaagcaacccgacgtggataaagtgaccaagacctacaaacggcgggcagcagatcctagctcccttcagtcgcatatccctgtactcgacaagggtcgtgccggccgcaagcggtttccagcaagttccctttatccgtccggcagccagactcaaatcgaaaccaagaatccacgggtgaaccttcttgtttccaagtggcagcaggtgtggctactcgccctggaacgacgccgaaagctgaacgatgctctggacagactcgaggagctgcgagagttcgctaatttcgactttgacatttggcgcaagaagtacatgagatggatgaaccataaaaagagccgggtcatggatttttttcggcgaatcgacaaggatcaagatggcaagataacaaggcaggagttcatagacggtattctgagtagcaagtttccaacctctcggcttgagatgtccgccgtggcggatatattcgatagggatggagacggctatatcgactactacgagttcgttgctgcccttcatcctaataaagatgcttataagcctatcaccgatgctgataaaatcgaggatgaggtcacccgacaagtggccaaatgtaagtgcgctaagaggttccaggtcgagcagatcggggacaacaaatatagattcttcctggggaatcaattcggcgattcccagcagctgagattggtgcgcatcctccgctcaaccgtgatggtgcgagtggggggcggctggatggctctggacgaattccttgtgaaaaatgacccatgtcgtgcgaaaggtcggaccaatatggaactcagagagaaattcattctggccgacggggcctcccagggaatggcggcctttagacccaggggaaggcgtagtagaccttcctctcgaggcgcttctcctaacagaagtacgagcgtgtctagtcaggccgcccaagctgcctccccccaggtgcccgccaccacaacacctaagatcctccacccccttacccgaaactatggtaagccgtggctgacaaactccaagatgtccacaccttgcaaagcagctgaatgttcggactttccagtgccatccgccgagggtacacccattcaagggtccaagctccgtttacccgggtacttgagtgggaagggattccactcaggtgaggacagcggcctaatcaccaccgccgccgctcgagtgcgcacacagtttgcagacagcaaaaaaacaccaagtaggccaggctcacgcgcagggagcaaagccggctcgcgcgcctcaagcagaagaggcagtgacgctagcgacttcgacattagcgaaatacagagcgtttgttccgacgttgagaccgtgccacagacccatcgccccacaccaagggcagggagcagacctagcacagctaagccttccaagattcccaccccccagagaaaatcaccagcgtctaaactggacaagagcagtaaacgttag

SEQ ID NO: 115314 - DNA, 12603 bp, synthetic construct
  misc_feature 1..12603: note = Description of Artificial Sequence: Synthetic coding sequence
  source 1..12603: mol_type = other DNA
atggctggctacctcagtccggcagcctatctgtatgtagaggagcaggaatatctgcaagcctatgaggatgtgctcgagcggtacaaggatgaaagggacaaggttcaaaaaaagacgtttactaagtggatcaaccagcatttgatgaaagtgagaaaacatgtgaacgatctatatgaggatctgagggacggccacaatctgatctccctcctggaagtgctctcgggggatacactgcctagggagaaaggtcgaatgagatttcaccggctgcaaaacgtccaaatcgcgctcgactatctcaaacgtagacaggtgaagctggtcaacattcgcaacgacgacatcaccgacggcaacccaaaactgaccctgggtttgatttggacgatcattctacatttccagatctcggacatccacgtgactggagagtctgaagatatgtcagccaaagaaaggcttctcctatggacccaacaggctacagagggctacgccggtatacgctgtgaaaacttcaccacctgttggagagacggcaaattgtttaatgccatcattcacaaatacagacccgacctgatcgatatgaatactgtcgccgtgcagagtaacctcgccaatctagagcacgcattctatgtcgcggaaaagattggagtgattaggctgttggaccccgaagatgtggatgtgtcgtcgcctgatgagaaatcagtcattacctacgttagtagcttgtacgacgcttttcccaaagtgcctgagggaggggaaggaatcggtgccaacgacgttgaagtgaaatggatcgaataccaaaacatggtgaattacctgatccaatggatccgtcaccatgtgaccacgatgtcagagaggaccttccctaacaaccctgtggaactcaaagccctctataaccaatacttgcagttcaaagagactgagataccacccaaagagacagagaagagcaagatcaaacggttgtacaagttgcttgagatctggatcgagttcggccgcatcaagctcctccagggttatcatccgaatgacatcgagaaagagtggggaaagctaataatcgctatgctcgaaagagaaaaggccttaaggcctgaggtagaaagattggaaatgctgcagcagattgccaatcgggttcagcgggattccgtgatctgcgaggataagctcatattggccggcaacgcgctccagtcagatagcaagcggttggaaagtggagtgcagttccaaaacgaggccgagatcgctgggtatatactcgaatgcgagaacctgctgcgccagcatgtgatcgatgttcagattttgattgatggcaagtattatcaagccgaccagctcgtgcagagggtcgccaaactaagggacgagatcatggcactgcgaaatgagtgttctagcgtttatagcaagggccggatcctcactacggagcagaccaagctgatgatttccgggattactcagtctctaaattcaggcttcgcccagacgttgcacccttcactcacctccggcctgactcagtccctgaccccctctctcacctcaagttctatgacttcaggactcagcagcggaatgacatcgagacttacacccagcgtcacccctgcctacacaccggggttcccatctggcctggttccaaacttctcgtctggagttgagcccaacagtttgcagacattaaagctgatgcagatacgaaaacccttgctgaagagctcacttctggatcaaaatttaacggaggaggaaatcaacatgaagttcgtgcaggatctgctgaattgggtagatgagatgcaggttcagctcgaccggacagaatggggaagtgacttgccatccgtagaaagtcacttagaaaaccacaagaacgtgcatagggctattgaggagttcgaaagcagtcttaaagaggccaagatttccgagattcaaatgactgcacctctcaaacttacctatgcagaaaaactgcaccgcctggaaagccagtacgccaagctgctgaacacaagccggaaccaggagagacacttggatacgctgcacaatttcgtgagcagagcgaccaacgagctgatctggctgaatgagaaggaggaggaggaggtggcctatgattggtcagagaggaatacgaacatcgcgcggaagaaggactaccatgccgagctcatgcgggaattggaccagaaggaggaaaacatcaaaagtgtgcaggagattgcagagcaactactgcttgagaatcatccagcccgcctgaccattgaagcctatagggcagcaatgcaaacgcagtggtcctggatcctgcagctctgtcagtgcgtggagcagcatattaaggagaatactgcttattttgagttttttaacgacgcaaaagaagcaaccgactatttgagaaaccttaaagatgcaatccagcgaaaatactcatgtgatcgcagttcaagtatacataagctcgaagacttggtgcaggaaagcatggaagagaaggaagaactgctccaatataagtctacaatcgctaatctgatggggaaagcaaaaaccatcattcagctcaaacctcggaactcggactgcccactcaaaacatcaatccctatcaaggcaatatgtgactacaggcagattgaaatcaccatttataaggatgacgagtgcgttcttgctaataatagccacagagccaaatggaaagtcatctctccgactgggaatgaagccatggtgccctccgtgtgttttactgttccccccccaaacaaagaggctgtggacttggccaatcgcatcgaacagcaatatcagaacgttctgaccctgtggcatgagtcacatattaacatgaagtccgttgtgagctggcattatctaataaatgagattgatcgcatccgggcctccaacgtggcctcaattaaaacgatgttgcccggtgagcaccagcaggttctgtccaatctccagagccgattcgaggactttctggaggactctcaggaaagtcaggtgttcagcgggtcagatataacacagctagagaaggaagtcaacgtctgtaagcagtattatcaggagctgctgaagagcgctgaacgcgaagagcaggaagagagcgtttacaacctgtacatcagcgaggtacgtaacattaggttacgtttggagaattgcgaggatcggctgatccgccaaatcagaactccgctggaaagagacgacctccatgaatctgtgttccgcattaccgagcaggaaaagctgaagaaagagctggagcgtctcaaagacgacttgggtaccatcacaaacaagtgcgaagagttctttagccaagccgcggcctcatcgtctgtgccaacgcttagatcagaactgaacgtggtactgcaaaatatgaaccaggtgtattcgatgtcaagtacgtacatcgacaagttgaagactgttaatctggtgttaaagaatacacaggccgctgaagctttggtgaaactttacgagaccaaattgtgtgaagaagaggcggtcatcgctgataagaacaacatagagaatctcatctccacacttaaacagtggcggagtgaggtcgacgaaaaaagacaggtattccatgcgctcgaagacgagctccaaaaagctaaagcgattagtgacgagatgttcaagacatacaaggaacgggacctcgatttcgactggcacaaggagaaagccgatcagctggttgagcgctggcagaacgtgcatgtgcagattgacaatcggctccgtgacctcgagggaatcgggaaatcacttaagtactatcgcgatacgtatcaccccttggatgactggatccaacaggttgaaacaactcagcgcaaaattcaggaaaaccagccggaaaattcaaaaacgctcgctactcagctcaaccagcaaaagatgctggtttcggaaatcgaaatgaagcagtccaagatggacgagtgccagaaatatgctgagcagtatagcgcaacagtcaaggattacgaactgcagacaatgacctacagagctatggtcgattcccagcagaaatcccctgtgaagcgacgccgaatgcaatccagcgcagacctcatcattcaagaatttatggaccttcggacaagatacacagctctggtaactctgatgacccaatatatcaagttcgccggtgactccctcaagcgacttgaagaggaagagaagagtttagaggaagagaaaaaggaacatgtggaaaaagccaaggaactgcagaaatgggtatcaaatatttccaaaactttaaaagacgccgagaaggccggcaagccgcccttttctaagcagaaaatttcatccgaggaaatttcaacaaaaaaggagcagctctctgaagcactccagacaatccagctgttcctcgcaaagcacggggacaaaatgacggatgaggaaaggaatgaattggagaagcaggtcaagacactccaagagtcctacaacctcttatttagcgagagtctaaagcagttgcaggaatctcagacatctggtgacgtgaaagtcgaagaaaagctcgataaagtcatagcggggactattgaccaaacaacaggggaagtgttgtcagtgtttcaggcagtcctgcgcggattgatagattacgataccggcatcagattgctcgagacacaactgatgatcagtgggctgataagtcctgagctgcggaagtgtttcgacctcaaagacgccaaatcacatggattgattgatgagcaaatcctatgtcagcttaaagagctctctaaagcaaaggagataatttccgccgccagccctactaccatccctgtgttagatgccttggcccagagcatgatcaccgagtctatggccataaaagtgcttgagatcttgctgagcacaggatcactcgttatccctgcaaccggagaacagttgacactgcagaaagcatttcagcagaatctcgttagcagtgcccttttcagcaaggtgctggagcgacagaacatgtgtaaggacctgattgatccatgtacctccgaaaaggtttctttaattgacatggtgcagaggtctaccctgcaagagaatacgggaatgtggctcctaccagtacggccacaagaaggaggacggattacactaaagtgcggcagaaacatatccatactgagagctgcccacgaggggctcatcgatcgcgagactatgtttaggctgctgtctgctcaattgctgtcgggcggtttaatcaatagcaactctggtcagcgcatgacggtagaggaggcagtcagagagggtgtcatcgatagagacaccgcctcttccatcctcacctaccaggtgcaaactggaggaatcatacagtctaatccggccaaacggctgaccgttgatgaggccgtgcaatgtgacctgataacctctagctccgcccttcttgtgctcgaggcacaaagaggatacgtggggcttatatggccacatagtggcgaaatattccccacgtctagcagcctgcagcaggagttgatcactaacgagctagcctacaagatcttgaatggacgccagaagattgccgcgctgtacatccctgaatcttcacaggttataggtcttgacgcagcaaaacaactgggcatcatagataataatactgctagtatcctaaagaacattaccctgcctgacaaaatgcccgatttaggtgacctagaggcttgcaaaaacgccaggcgctggttgagcttttgcaaatttcaaccttcgactgtgcacgactataggcaggaagaggacgtgttcgatggggaggaacccgtaaccactcagacctcagaggagacaaagaaattattcttgtcatacctaatgataaattcctatatggatgccaacacaggccaacgcctgctgctctacgatggtgacctggacgaggctgtcgggatgttactggaaggttgtcacgcagaattcgatgggaatacagccatcaaagagtgtctggacgtcctcagctcatccggagtttttctgaataacgccagtggtagagagaaagatgagtgcacagccactccctcctctttcaataagtgccattgcggggagccagagcacgaagaaactccagaaaacaggaaatgtgctatcgatgaggaattcaacgagatgcggaacacggtgataaactcagagtttagccagtccggaaagttagcgtcaacgatttcaatcgatccaaaggttaacagcagtccaagcgtctgtgttccttcgctgatctcctatctaacgcaaactgaactggccgatatttctatgttgagaagcgattcggaaaacatcttgactaactacgagaaccagtcacgggtggaaacaaatgagcgcgcaaatgagtgtagtcatagtaagaacatccagaactttccgagcgacctgatcgaaaatccaatcatgaaatccaaaatgagcaagttctgcggtgtcaatgagactgaaaatgaggacaacacgaatcgtgattctcctatcttcgattattcacctcgcctgtccgccttgctgtcccatgacaagctgatgcactcacagggctctttcaatgacacccatacacctgagtccaacgggaacaaatgtgaagcaccggccttatctttctcagacaaaactatgctttcagggcagaggattggcgagaagttccaggaccaatttctcggcatcgccgcaatcaatatcagcttgcctggtgaacaatacggtcagaagtctttgaatatgatctcctccaacccgcaagttcaataccataatgacaaatacatttcgaataccagcggagaggacgagaaaacccacccaggcttccagcagatgcccgaggacaaggaggacgaatctgagattgaagagtactcttgtgcggtgacccccgggggcgacacagacaacgccatcgtgagtctcacatgcgctactcccctgctcgatgaaacgatctccgcctcagattacgaaacatcgctgctcaacgaccagcaaaataataccggcactgataccgactcagacgatgacttctatgacacacctcttttcgaggatgatgatcacgactcactgctcctcgacggagatgaccgtgactgcttgcaccctgaagactatgatacccttcaagaagagaatgacgaaaccgcgagccccgccgatgtgttttacgatgtgtccaaggagaatgagaattccatggtgccacaaggcgcccccgtgggtagtctcagcgtcaagaacaaggcccactgtcttcaggattttctcatggacgttgaaaaggacgagctggatagcggggaaaagatccacctgaaccccgttggcagcgacaaagtcaatggacagtccctcgagaccggcagcgaacgcgagtgtactaacattctcgagggcgatgagagtgactccctcacggattacgatattgtaggcggcaaagagtcattcactgcaagccttaaatttgacgacagcggaagctggagaggaagaaaggaggagtatgtgaccggccaagagtttcattccgacactgaccacctggactcaatgcagtcagaggagtcctatggggattatatctacgatagtaatgaccaggatgacgacgatgacgatgggattgatgaagaagggggaggcattagagatgagaacgggaagccacgctgccagaacgtcgccgaggatatggatatccagctctgcgcttctatcctgaacgagaactcggacgagaacgaaaacattaacacaatgatcttgctggataagatgcactcttgttcctcgctcgaaaaacagcagagggtgaatgtggtccagctggcctcccccagcgaaaacaatttggtaacagaaaagagtaatctcccagaatacacaacagagatagccgggaagtcaaaggagaacctccttaaccacgagatggttttgaaggacgtactgcctccaattataaaagacaccgagtctgagaagacctttggaccagcttcaatctcccacgataataataacatatcttccacctcagaactgggtaccgaccttgcaaacactaaggttaagctcattcaggggagcgagttgcccgaactgacggacagcgtgaaggggaaagatgagtatttcaagaatatgacgcccaaggtcgatagctccttggaccacataatttgcacagaacctgacctcatcggcaaacccgctgaagagtcccacctgtcattaatagctagcgtcacggataaagatccccaaggtaatggcagtgatctgatcaagggaagagacggaaagtcggacatcctcattgaggatgagaccagtatccaaaaaatgtacctgggagagggagaggtgttggtagaggggttggtggaggaagagaaccgccacttgaaacttcttcccggcaaaaacactagggattcatttaaactcataaactcacagtttcccttcccacagataaccaataacgaagagcttaaccagaagggtagtctgaaaaaggctactgtaaccttaaaggatgaacctaataacctccaaatcatcgtgagcaagtccccagtccaatttgagaacctggaggaaatcttcgacacatccgttagcaaagagattagtgacgatatcaccagtgatatcacaagttgggaaggcaatactcactttgaagaaagcttcactgatggccctgagaaggaactggacttgttcacgtatctcaaacattgcgccaaaaacatcaaggcgaaagacgttgcaaagccaaatgaggacgttccttcccacgtgcttatcaccgccccccccatgaaggagcatctccagttaggtgtcaacaacactaaggaaaagtcaacaagcacccaaaaggattccccattgaatgatatgatacagagcaatgacttgtgctccaaggaatcgatttcaggaggaggaaccgaaatatctcagtttacccccgaaagcattgaagccaccctcagcattttgtcacgaaaacatgtggaggacgtcgggaagaacgacttcctgcagtcggagaggtgcgccaatggcctgggtaatgataactcctcaaacacccttaatacagattattcttttctagagattaataataagaaggagagaattgaacagcagctgccaaaggagcaggccctgtcgcctagatcacaagagaaggaagtgcagataccagaactgagccaggtgtttgtagaagatgtaaaggatattctcaaatctcgtttgaaggagggccacatgaatccccaggaggtagaggagccatcggcctgtgcggataccaagatcctcatacaaaatctgattaagaggatcactacatcccagttagtcaacgaggcgagcaccgtgcccagcgattcccagatgtcagactcctccggtgtgagcccgatgactaattctagcgagctgaagcccgagtctcgcgatgacccattttgtattgggaacctcaagagcgagttgctactgaacattctgaagcaggatcagcactctcagaaaataactggcgtgtttgagctgatgcgggaactgactcatatggagtatgatttagaaaaacgggggatcacttcaaaagttttgccactgcagctcgagaatatattctacaagctacttgcagacggatatagtgaaaagattgagcacgttggagatttcaaccaaaaggcgtgctccactagcgaaatgatggaagagaaaccacatatcctaggtgatatcaaatccaaagaggggaattattactctccgaacctcgagaccgtcaaagagatcggcctggagtcaagcaccgtatgggcctcgactctgccacgcgatgaaaaactgaaggatctatgcaacgacttcccaagtcatctggagtgtacatcaggcagcaaggaaatggcatctggggactcctccacggagcagttcagtagcgaattgcagcagtgcttgcagcacacggagaaaatgcatgaatacctcacactcctccaagatatgaaacctcccctggacaaccaagaaagcctggataataacttggaagccctaaagaatcagcttcggcagctggagaccttcgaactggggcttgcacccattgctgtgattctgcgaaaagacatgaaactggccgaggagtttctgaagagcctgcctagtgacttccctcggggccacgtcgaagagctttccattagccaccagtctctgaagaccgccttttcttctctttccaacgtttccagtgagcggacaaaacagattatgcttgcaatagattcagaaatgagtaagctggctgtaagtcatgaggagttcctgcacaagttgaagagtttttcagattgggtctccgaaaagagcaagtccgtaaaagacatcgagattgttaatgttcaggactctgagtacgttaagaagcgcctagagttcctcaagaacgtcctgaaggacctgggccacacaaaaatgcagctggaaactactgcctttgacgtgcagttcttcatttcagagtacgcacaggacctgtctcccaaccaaagtaaacagctcctccgattgctcaacactacccagaaatgtttccttgacgtgcaggaaagtgtaacaacccaagtcgagcggttggagacccagctccatctcgagcaggatctggatgaccagaaaattgttgccgagagacagcaagaatacaaggaaaagctgcaaggcatttgtgacttgctgacgcagacagaaaatcggttgatcgggcaccaggaggcttttatgattggagacggcactgtcgagctcaagaaataccagagtaaacaggaggaactgcaaaaggacatgcaggggagcgcacaagcccttgccgaagtggttaaaaacactgaaaacttcctaaaggaaaacggcgaaaagctgagtcaggaggataaagccctgattgagcagaagctcaacgaagccaaaatcaaatgtgagcagttgaacctcaaagcagagcagagtaaaaaagaactggataaggtcgttaccactgccatcaaagaagagaccgaaaaggtcgccgctgtcaagcagctggaggagtcaaagaccaagatcgaaaacctgcttgattggctgagtaacgttgacaaggacagtgaaagggcagggacaaaacacaaacaggtcatcgagcagaacggtactcacttccaggaaggcgacggaaaaagtgcaatcggcgaggaggatgaggtgaacggcaacctacttgagaccgatgtggacggtcaggtggggacaactcaagaaaacctaaatcagcaataccaaaaagtgaaggcccagcatgaaaaaatcatatcccagcatcaggcggtaataatcgccacacagagtgcacaggtactgctggaaaaacagggccagtacctcagccccgaagagaaagagaagctgcagaaaaatatgaaggaattgaaggtgcattatgaaacagccctggcagagagcgaaaaaaaaatgaaactgacccacagcctccaggaagagcttgagaagtttgatgccgattacactgaattcgagcactggctgcagcagtctgagcaggaactcgagaacctcgaggctggggcagacgatattaacgggctgatgactaaactcaaacgccagaaatcattttcagaggatgtcatttcccacaagggcgaccttaggtacattaccatctctggcaatcgggtactggaagctgcgaagtcctgtagtaagagggatggggggaaggttgatactagcgccacacacagagaagtccaacgcaaacttgatcacgctaccgacagatttagatcgctgtatagcaaatgtaatgtactcggaaacaatctcaaagatctggtggacaaataccagcactacgaagacgcctcgtgtggactgctcgcaggattgcaggcctgtgaggctacggcatcaaagcatctatctgagcccatcgccgtagatcccaaaaatttgcagaggcagctcgaagagactaaggctctgcagggccagatctcatcacaacaggttgccgtggaaaagcttaaaaaaacagccgaggtgctgctcgacgcacggggttccttgctgcctgcaaagaacgatatccagaagacactcgatgatatcgtggggaggtatgaggatctgtcaaagtccgtcaatgaaaggaacgagaagcttcaaatcacactcacccggtcactcagcgtccaagacggcctcgatgagatgctcgattggatggggaatgtggagtcctccctgaaggaacaggatgtcggcaccgggtactgtaggagcagtgaacagtataagtgccatgagtag

SEQ ID NO: 115315 - DNA, 22386 bp, synthetic construct
  misc_feature 1..22386: note = Description of Artificial Sequence: Synthetic coding sequence
  source 1..22386: mol_type = other DNA
atggctggatatctgtctcccgcagcctacctgtatgttgaggagcaggaatatctacaagcatatgaggacgtcttagaacgctataaggatgagagggacaaagtgcaaaagaaaacatttaccaagtggatcaaccagcacctgatgaaagtgcgaaagcatgttaacgatctgtacgaggatctccgggacggccataatcttattagcttgctggaagtcctgtccggagatactcttccgcgagaaaaaggtaggatgcgattccataggctgcagaatgttcagatcgcactggactacctcaagagacggcaggtgaagcttgtgaatataagaaacgacgacatcacagacggcaaccctaagctcaccttaggtctgatctggaccatcatcctacactttcagatctccgacattcacgtcaccggtgaatcagaggacatgagcgcgaaagagcggctactgttgtggacccagcaggctaccgaaggatacgctggcattcgctgcgagaactttaccacctgttggcgcgacggcaagctgttcaacgccatcatccataagtacagaccggatctgatcgacatgaacacggtggcggtgcagtctaaccttgccaacttggaacacgcattctatgtcgctgagaaaattggagtgatcagattactcgatccagaagatgtggacgttagcagccccgacgagaagagcgtgatcacctacgtctcatctctgtatgacgcctttcctaaggtccccgagggcggggaaggaatcggggccaacgacgtggaggttaagtggatagaatatcagaatatggtcaactacttaatacagtggatccggcaccatgtaaccacgatgagcgaaaggacatttccaaataaccctgtggagttgaaggccctgtacaaccaatatctgcagttcaaagagaccgagattccacccaaggaaactgaaaagtctaaaatcaaaagactgtacaagcttttagaaatctggattgagtttggacggataaaactgctacagggctatcatcccaacgacattgagaaagagtggggcaaactcatcattgctatgctggagcgagaaaaggctctgaggcctgaggtggagcgtcttgaaatgttgcaacagatcgctaacagggtacagagagattcagtgatctgtgaggataagctgattttagcagggaatgcactccaatccgactcgaagagacttgaatcaggagtccagttccagaatgaggctgagatcgccggatacatcttggagtgcgagaatctactcaggcagcatgtgatcgacgtgcagatccttatcgacggaaaatattaccaggccgatcagctggtgcaacgagtggccaagttgagggacgagatcatggctctgaggaacgagtgctcatcggtgtatagcaagggaagaattctgaccaccgagcagactaaactaatgattagtggcatcactcagtctctgaatagtggtttcgcgcagacactgcaccccagccttacatctggcctcactcaatccctaactccaagtcttacctctagctccatgacctcaggcctgtcctcagggatgacatcacgtctgacaccatctgtaacgcctgcgtatacacccgggttcccctccggcctcgtgccgaatttcagctccggggtggaaccaaatagtctccagaccctgaagctgatgcagatcaggaagccgttgctaaaaagctcacttctggaccagaatctcactgaggaggagatcaatatgaaatttgttcaagacctgttaaattgggtagatgaaatgcaggtgcagcttgacaggacagagtggggctctgatctgccttcagtagagtctcatctagaaaatcacaaaaatgtacacagagcaatagaggaatttgagagctcactgaaggaggctaaaataagcgagatccagatgacagcaccactgaagctgacatatgccgaaaaacttcaccgccttgagagccagtatgccaagctgctcaacacttctagaaaccaggagaggcaccttgacactctgcataatttcgtcagtcgagccactaatgaactgatttggctcaacgaaaaggaagaagaggaagtggcatatgattggagcgagcgtaacacaaacatcgcacgcaaaaaagattaccacgccgagctcatgcgtgaattagatcagaaagaagaaaatataaagtccgtgcaagaaatagccgagcagctgttactagagaaccaccctgctagactgaccattgaagcctaccgggccgccatgcagacccaatggtcatggattctgcagctgtgccagtgtgttgaacaacatatcaaagagaatactgcttacttcgaatttttcaacgatgctaaagaggctaccgattatctgcgcaatctcaaggacgccattcaaagaaaatacagctgcgaccggagctcgagcatacacaaactggaagatttagtgcaggaatccatggaggagaaggaggagttactccagtacaaatccactatcgctaaccttatggggaaagcgaagacgataatccagctcaagcctagaaattccgattgccctttgaaaacgtcaatccccatcaaggccatctgtgactatcgccaaatagagattacgatttacaaagacgatgagtgcgttcttgcaaataattcccatcgggcaaaatggaaagtcatctctcccaccggcaacgaagcgatggttcctagcgtctgtttcacagtcccacccccaaataaggaggccgtcgacttggctaacaggatcgagcagcagtatcagaacgttcttacgctgtggcacgagtctcatataaacatgaaatctgtggttagctggcactacttaatcaacgagattgatcgaatcagggcatctaacgtggcttccatcaagacgatgttgccaggcgaacaccagcaggtcttgtccaatctccaatcccgctttgaggacttcctggaagacagccaggagagccaggtgttctcaggctcggatataacccagctcgaaaaagaagtgaatgtctgtaagcagtattaccaggaactgctcaaaagcgccgaaagggaagagcaggaggaaagtgtttataatttgtatatttcagaagttcggaatatcagactgcggctggaaaactgtgaggacaggttgataaggcagatccgcacacccttggagcgcgacgatttgcatgaaagcgtctttcgaatcactgaacaagagaagctcaagaaagagcttgagcggctgaaggacgatcttggcaccattacaaacaagtgtgaagagtttttctctcaagctgctgcgtccagctctgtccctacccttcggtcggagctgaacgtggtgctccagaacatgaaccaggtgtactccatgtcaagtacatacatagataaactgaagaccgtcaatctggtcctcaaaaacacccaggcagcggaggccctggtgaaactttatgagaccaagctctgtgaagaggaggcagtgatcgcggacaaaaacaatatcgagaatttaatcagcacgctgaagcagtggagaagcgaggtggacgagaagcgccaagtgtttcacgccctggaggacgagctgcagaaagctaaagccataagtgatgagatgtttaaaacatataaagagcgggacctcgatttcgattggcataaagaaaaggccgaccaattggttgagaggtggcaaaacgttcacgttcagatcgacaataggttgcgcgacttggagggcatcgggaagtccttgaagtactatagagatacctaccaccctctggacgactggatccagcaggtcgagaccactcagcgcaagattcaggaaaaccagcccgagaattctaaaaccttggccacgcaacttaatcagcagaaaatgctggtctccgaaatcgaaatgaagcagtccaaaatggatgagtgtcaaaaatacgccgagcagtactccgcgactgtgaaagattacgagctccagacaatgacttatcgagctatggtggattcacagcagaagagccctgtaaaacgccgcagaatgcagtcctccgcagatttgatcatccaggaatttatggatttgcggactcgctataccgcactggtgacactcatgactcagtatattaagttcgcaggggatagcctgaaacgcttagaggaggaggagaagtctctggaagaggagaagaaggagcatgtggagaaagccaaggagctgcagaaatgggtgtcaaatatctcgaaaaccctcaaggacgccgagaaagctggcaagcccccgttctccaagcaaaaaatctcatcagaggaaatctccaccaaaaaggagcagctgagtgaagcccttcagactatccagctcttcttggccaaacatggagacaaaatgactgatgaagagaggaacgaactcgagaagcaagtcaaaacattgcaggagtcttacaatctacttttctcagagtctctaaaacagctgcaagagtcccagacaagcggggatgtcaaggttgaggagaagctggataaggtgattgcaggcacaatagaccagaccacaggcgaagttttgagtgtgtttcaggcggtgcttagaggattgattgactacgatacaggtattcgtctgctcgaaacccagttgatgatcagtggcctgatatcccccgaattacggaaatgcttcgacttaaaggacgcaaagtcacatggactgatcgacgagcagatcctgtgccagctaaaggaactctctaaggcgaaagagatcattagtgcagcctcgcccaccacgatcccagtgctggacgctctggcacagtctatgatcaccgaatctatggctattaaagttctagaaatcctcctaagcacaggttcactcgtgatacctgcgaccggcgaacagctgacactccagaaggccttccagcagaacctcgtttcctcagcattgtttagcaaagtgctggaacgccagaacatgtgcaaagaccttattgacccctgcacaagcgaaaaagtatcactaatcgatatggtccagaggagtaccctgcaggaaaataccggaatgtggttactgcccgtcagaccacaggagggaggacgtattactctgaagtgcggaagaaacattagcatactgagagcagcacacgagggcttaattgacagagaaacaatgttcagacttcttagcgcccagttgctttctgggggactaattaattctaattcgggccagaggatgacagtggaagaggctgtcagggagggcgtaatagaccgagacacagctagttccatcctcacgtatcaggtgcagacaggcgggataattcagagcaatccagccaagcggttgactgttgatgaagcggtgcagtgtgacctgataactagttctagtgcgttactggttctggaggcccaaaggggctacgtcgggcttatctggcctcactccggcgagatcttcccgacatcttcgagtctccagcaggaactgatcacaaatgagctagcctacaagatactgaatggtaggcagaaaatcgcagccctctatattcctgaaagctcccaagtgatcggactggacgcagcaaagcagctgggcattatagataacaataccgccagcatcctgaagaatattactttgcctgataagatgccagatctgggggatctggaggcctgtaagaatgcccgaagatggctcagcttctgcaagttccaaccgtcaaccgttcacgattaccgacaggaggaggatgtttttgacggtgaggagcctgtaactacccagaccagtgaagagacaaaaaagctttttctgtcttacctgatgataaatagctatatggacgccaacacgggccagcggctgctgttgtacgatggagacctggatgaagctgtaggtatgctccttgaaggatgccacgccgagtttgacggaaataccgcaattaaagagtgccttgatgtgctctctagtagcggagtgttcctgaataatgcctctgggcgtgaaaaagacgaatgcacggccacgcctagcagtttcaataaatgccattgtggtgaaccagaacatgaggagacacctgagaatcggaagtgcgccatcgacgaagagtttaatgagatgaggaataccgttattaattccgagttcagccagtcgggaaaactcgcaagcacgatcagcatcgatcctaaggtaaactcctcaccatccgtgtgcgtgccatccctgataagctacctgacccagaccgaactcgcagatattagcatgctgagatccgactcagagaatattctcaccaattatgaaaaccagtccagagtagagactaatgaacgagccaatgagtgcagccactccaagaacattcagaacttcccatccgatctgatcgagaatcctattatgaaaagcaagatgtctaagttttgtggagttaacgagacggagaacgaggataatactaatagggactcccctatttttgactactctccccgcctgagtgccctcctgtcccatgacaagttgatgcattctcaaggctccttcaacgacacacacacccccgagtcaaatggaaacaagtgcgaggctcccgccctgtctttcagcgacaaaacaatgctatctggtcagcgaatcggcgagaaatttcaagaccaattcctgggcatcgccgctatcaacatctctctgccgggcgaacaatacgggcagaagagtctgaacatgatatcctctaacccgcaggttcagtatcacaacgacaagtacataagtaatacgtcaggcgaagacgagaagacacatccagggttccagcagatgccagaggataaagaggatgagagcgagatcgaggaatacagttgtgcagttacacccggcggagataccgataacgccattgtgtctttgacctgtgctactcccttactggatgaaaccatttctgcaagtgactacgagaccagccttttaaacgatcaacaaaacaatacaggaactgacacggacagtgacgatgatttttatgacacgcctttattcgaggatgacgaccatgattcccttctgttggacggggacgaccgggattgtctgcacccggaagactacgatacgctgcaagaggagaatgacgaaaccgcctcaccggcagacgttttctacgacgtgtctaaggaaaatgaaaacagcatggtgcctcaaggcgcaccagttgggtcattgtcggtgaaaaacaaggcacactgcctacaagactttctaatggatgtcgaaaaagatgaactggatagtggggaaaagattcacttgaatccggttggatcagacaaggtaaatggacagtctctggagaccgggagcgaaagagagtgcactaacatcctagaaggcgatgagtcagattccctgactgactacgatatcgtgggtggtaaggagtctttcactgcttctttaaagtttgacgacagcggttcatggagaggacggaaggaagaatatgttaccggccaggaatttcacagtgatacagaccacctagattcaatgcagagcgaggagtcctacggcgattatatttatgattcaaacgatcaggacgatgatgatgatgacggcatagacgaggaaggaggaggcattcgggacgagaatgggaagccaagatgtcagaacgtcgcagaggatatggacatccaattgtgtgcttccattctaaacgaaaactcagatgagaatgagaatatcaacacgatgatccttctagataaaatgcattcgtgctccagcttggaaaaacaacagcgcgtaaatgttgttcagttggctagcccatcagaaaataacctggtcacagagaaaagtaacctgcccgaatacaccaccgagatagccggaaaatccaaggagaacttgctgaaccatgagatggtgcttaaggatgtcttacctcccatcatcaaggacacggaatccgaaaagactttcggacccgctagtatcagccatgacaacaacaatattagttcaacttccgagctggggactgatctagctaatactaaggtgaagttaatccagggcagtgaattgccggagctgaccgattcagtgaaaggtaaagacgagtactttaagaacatgaccccgaaagtcgacagtagcctggatcacataatctgcacggaacctgatctgattggcaaacctgcagaggaaagccacctaagtctgatcgcctctgtgaccgataaggatcctcaggggaacgggagcgacctgatcaaggggcgagacgggaagtcagatatcctgatagaagacgagacctctattcagaagatgtacttgggcgagggggaagttctggtagaagggctagttgaagaggaaaacagacatcttaaactgctccccgggaagaacactcgggattcattcaagcttatcaacagtcagttcccctttccacagattaccaataacgaggagctgaatcagaagggttctctaaaaaaggccactgtgaccctgaaagacgagccaaacaatcttcaaattatcgtaagcaagtcccccgtccaatttgagaacctagaggagattttcgacactagtgtgagcaaagaaatctcggatgacattacgtcggatatcacctcctgggaaggtaatactcatttcgaggaatccttcaccgacggccctgaaaaggaacttgacctgttcacttacctcaagcattgtgcaaagaacatcaaagctaaggacgtggccaagccgaatgaggatgtgccttctcatgtgttgattaccgcaccgccgatgaaagagcatttgcagctcggtgtcaacaacactaaagagaaaagcacatcaacccaaaaagatagcccactgaacgatatgatccaatccaatgacctatgtagcaaggaaagcatttccgggggcggcacagagatttctcagttcacaccagaatctatcgaagcaaccctgagcattttgagtaggaagcatgtggaagacgtgggaaagaacgacttcctacagtcagagagatgtgccaatgggctgggtaacgataactcaagtaacacacttaacacagactacagctttctcgaaatcaacaacaagaaggagcgcatcgaacagcaacttcccaaggagcaggctctgtctcctagatctcaagagaaagaagttcagatcccagaactcagtcaggtgtttgtagaggacgtgaaggatattcttaaaagtagacttaaagagggccatatgaaccctcaggaggtggaagagccctcagcttgtgccgacaccaagattctgatccagaacttgatcaaaaggattaccacaagtcagctggtgaacgaggcctcaactgtgccaagcgattcacagatgtctgactcatcaggcgtcagtccaatgaccaatagctcagaactgaagcccgaatcaagagatgacccattctgcattggcaatctgaagagcgagctgctattaaatattttaaagcaggatcaacatagtcagaaaataacaggagttttcgagcttatgcgtgagcttacacacatggagtatgacctcgaaaaaaggggcattacttcgaaagtcttaccactgcagctcgaaaacatattttacaagctcctggcagatggctattcagaaaagattgagcatgtaggcgatttcaatcagaaagcctgctccacttccgaaatgatggaggagaaaccccacatcctgggtgacatcaagagtaaagaaggcaattactattctcccaacctggaaacagtgaaggagattggactagagtcatccacggtttgggcctccactctaccccgggatgaaaaattgaaggatctgtgcaatgattttccgtcccacctggaatgtacaagcggtagcaaggagatggcctcgggggactcaagtacagagcagttctctagcgagctgcaacaatgtttgcagcacactgaaaaaatgcacgagtacctcacactgctgcaggacatgaagcctcccctggacaatcaggaatcattggacaacaatctggaggccctcaaaaatcagctccgacagctcgaaaccttcgagcttggcttagctcctattgcagtaattctgcgcaaggacatgaagctcgcagaggaattcttgaaatcactaccaagtgattttccccgcggacatgtggaggaattgtccatctcacatcagagtctgaagactgctttttcatccttgtccaatgttagttctgagaggaccaagcagattatgttggccatcgactcggaaatgtccaagctggcagtttctcacgaggagtttctccacaagctgaaatcgtttagcgactgggtatccgagaagtcaaaatcagtgaaggatatagaaatcgttaatgttcaggacagtgagtatgtgaagaagcgactcgagtttctgaagaacgtgctgaaagacctgggtcacacaaaaatgcaactagaaactactgcttttgacgtgcagttctttatctctgaatacgctcaggacttatcccctaatcagagcaagcagctcttgcgactgctgaatactacccagaagtgctttctggatgtgcaggaatctgtgactactcaggtggagagattggaaactcagcttcaccttgagcaggatctggatgaccagaaaattgtggccgaaaggcagcaggaatataaagaaaagctccagggcatctgcgaccttctgacacaaactgaaaaccgtctgatcgggcatcaggaagccttcatgattggggacgggactgtcgagctgaaaaagtaccaatccaagcaggaggagttacaaaaggatatgcaaggtagcgcacaggccctcgccgaagtggtcaaaaatacagaaaacttcctcaaagaaaacggggagaagctctctcaggaggataaggcactaatcgaacagaagcttaatgaagccaaaattaaatgcgagcagctgaacttgaaagcagaacaatctaagaaggagttggacaaagtcgtcacaaccgccatcaaagaggagacagagaaggtggccgccgtcaagcagctcgaggaaagtaagacgaagattgagaacctactggactggctatctaacgtagataaggatagtgagagagctgggacgaagcataaacaggtgatcgaacagaacgggactcacttccaagagggagacggaaagagcgcaatcggagaagaagacgaggttaacggcaaccttttagagaccgacgtggatgggcaagtgggaaccactcaggagaatctaaaccagcagtaccagaaagttaaggcccagcacgagaaaattatttcacagcaccaggctgtgatcattgcaacgcaaagcgcccaggttctgttggagaagcagggacagtatctgtcacccgaagagaaggagaagctgcagaagaacatgaaagaactaaaggtgcattatgaaacagcactggcagaatcggagaagaagatgaagctgacacacagcctgcaggaggaactggaaaaatttgatgcagattatacagagtttgaacactggctccagcagtccgagcaggagcttgaaaaccttgaggccggcgcggatgacatcaacggcctcatgaccaaactcaagagacagaaatctttctccgaggacgtcatcagccacaagggcgatttacgctatattaccatctcaggaaatcgggtgctggaggccgccaagagttgtagcaaacgtgacgggggtaaggtggacacaagcgccacgcaccgcgaggtccagcgcaagctcgaccacgccaccgacaggtttaggtctctgtactcaaagtgcaatgttctcggcaacaacctcaaggacctggtggacaaatatcagcactatgaagatgccagttgcggtctgctagccggcctccaagcctgtgaggcaacagcgtccaaacatctatcagagccaatcgcagttgatcccaagaacctgcagcggcagcttgaggagaccaaggctttacagggacagatcagttctcagcaggtggcagttgagaaacttaagaaaacagctgaggttctcttggatgccaggggttcgttgttaccagcgaagaatgatattcagaaaacccttgatgacatagtgggccggtacgaggatttaagcaagtccgtgaatgagcgcaacgaaaagctccagatcaccctcactcggtctctctctgtccaggacggccttgatgagatgttggattggatgggcaacgttgagagcagccttaaagagcaagggcaggtccctctcaatagcaccgcgctgcaagatattatctccaaaaatatcatgctcgagcaggatatagcgggccgtcagagttctattaacgcaatgaacgaaaaagtcaaaaaatttatggagactacagatcccagtactgcctcttctctccaggcgaaaatgaaagatctatccgccaggttttcagaggccagtcacaagcacaaagagaccctggctaagatggaggagttaaagaccaaggtcgagctttttgaaaatctcagcgaaaagctacagacatttttggagactaagacccaggccctcacagaagtcgacgtgcctggtaaggatgtgactgaactgtctcaatatatgcaggaaagtacctccgagttcctcgagcataaaaagcatctggaggtgctgcattctctgctaaaagaaatctcaagccacggattacccagcgacaaggcactggtcttagagaagacaaacaacctctctaagaaattcaaggagatggaagacactatcaaagaaaaaaaggaggccgtcacttcttgtcaggaacagctggatgcttttcaagtgttagtgaagagcctgaagagctggatcaaagagaccaccaagaaggtgccaattgtccagccaagtttcggcgccgaggacctaggcaagtctctggaagacacaaagaagctgcaggagaagtggtctctgaaaacacccgaaatccagaaagtcaataatagtggaatttccttgtgtaacctgatctccgcagttactaccccagcaaaggccatcgcagctgtgaaaagcggcggtgctgtgttgaacggagagggaacagcgactaacaccgaagaattctgggccaataaaggactgaccagtatcaagaaggatatgaccgacattagccacgggtacgaggacctgggcctgttgctgaaggataagatagcagaactgaacactaagctctccaagctccagaaggcgcaggaggaatctagcgccatgatgcagtggctccaaaaaatgaataagacagctaccaagtggcagcagactcctgcccctactgacaccgaggcagttaaaacacaagtggagcagaacaagtctttcgaagctgaactgaagcaaaatgttaacaaagtgcaagagctcaaagacaagctgacagagctgctggaagaaaacccggatacaccagaagcccctcgttggaagcaaatgttaactgagattgattctaaatggcaggaactaaatcagctgacaattgatcggcagcagaagctagaggagtcaagcaacaaccttactcagttccagacagtagaggcgcagcttaaacagtggttagtggaaaaagagttgatggtgagtgtactggggccactctcaatcgatcctaatatgctcaatacacagagacagcaggtgcagatcctcttacaagagttcgccaccagaaaacctcagtacgaacaactgacagctgctggtcaggggatactttctagaccaggagaggatccctcgctgcggggaatcgtcaaggagcagttggccgccgttacacaaaaatgggattcactgaccggccagctctctgaccggtgcgattggattgatcaagccattgtgaaatccacccaataccagtccctgttgcgcagcctgagtgacaagctatctgatctcgataataagctgagctcctcactggcggttagcacccacccagacgcgatgaatcagcagctggagaccgctcaaaagatgaaacaagagattcaacaggagaaaaaacagatcaaggtggctcaagccttatgcgaggacctgtccgcccttgtgaaggaggaatatctgaaggctgagttgagccggcagcttgaaggaattctgaagagctttaaggatgtcgaacagaaggccgaaaaccacgtgcaacacctgcaatccgcctgcgcctctagtcaccagttccaacagatgagccgtgatttccaggcatggctggacaccaaaaaagaggagcagaataagagtcaccccataagtgccaaacttgacgtgctggaatcactgataaaggatcataaggacttcagcaagaccctcactgcccaatcccacatgtacgaaaaaactatagctgaaggagaaaatctcctcctcaagacgcaggggagcgaaaaggccgcccttcagttgcagctgaacactatcaagaccaactgggatacttttaacaaacaggtcaaggaacgagaaaacaagctgaaagagtcgctggagaaagctctaaagtataaggaacaggtggagacgctatggccctggatcgataagtgccagaataaccttgaagagattaagttctgcttggacccagccgaaggtgaaaattccattgctaagctgaaaagccttcagaaggagatggaccagcactttggcatggtcgaacttctcaacaacactgccaacagcttactgtctgtgtgcgagatagacaaggaagtcgtcaccgacgagaataagtccctgattcaaaaagtcgatatggtgaccgaacagctgcatagcaagaagttttgtctcgaaaacatgacccagaaatttaaagaattccaggaggttagcaaggagtccaaacgacagttgcagtgtgccaaggaacagctggacatccacgactccctggggtcccaggcttactcaaataaatacctgacgatgctccaaacgcaacagaagtcactgcaagccttaaagcaccaggtggaccttgcaaagagactggctcaggacctggtggtcgaggctagcgatagcaaagggactagcgatgtattgctacaggtcgaaacgatagctcaggagcactccactcttagccagcaggttgatgaaaagtgttcgtttctggagaccaagttacagggtatcggacactttcagaataccatacgcgaaatgttctcccaattcgctgagttcgacgatgagctcgactctatggccccagtaggacgcgatgctgagactcttcagaagcagaaggaaacgatcaaagcatttttgaaaaagcttgaagcattaatggcaagcaacgacaatgccaataagacctgcaaaatgatgctagccacagaggagacttctcccgacctggtgggcatcaaaagagacctggaggcattatcaaaacagtgcaataagttactcgaccgggcgcaggcacgggaggagcaggtggagggcaccatcaaaaggctggaggagttttactccaaactaaaggagttctccatcctgcttcagaaggcggaggaacacgaagagagccaaggacctgtaggcatggaaaccgagacaatcaaccaacaactaaacatgttcaaggtgttccagaaagaggagatcgaacctctacagggcaagcaacaggacgtgaattggctgggtcagggcctgatccaaagcgcagcaaaaagcacttcaacgcaaggcctcgagcatgacctggacgacgtgaatgccagatggaaaacacttaacaaaaaggttgcccagcgagcggcccagttgcaggaggctttactccactgtggccggttccaggacgccctggagagcctcctcagctggatggttgatacagaagaactcgtagccaaccagaagcctccctcagctgaattcaaagtagttaaggcacagatccaggagcagaagctcttacagaggctgttggatgaccggaaaagtacagttgaggtgatcaaaagggagggcgaaaagattgcgacgaccgcagaaccggccgataaggtgaaaattttaaagcagctgtctcttttggattcacgctgggaggcactgttgaacaaggcagagactaggaatagacagcttgaggggattagtgtggtggcacagcagtttcatgagactttagaacccctgaacgagtggttaacaactattgaaaagcggctagttaactgtgaacccatcggaacccaagcctcaaaactggaagaacagatcgcccaacacaaggtgttgcaagaggatatacttctgaggaaacagaatgttgatcaggcactgctgaacggactggagctcttaaagcaaacaacaggtgatgaggtgttgatcatccaggataaacttgaggccattaaggctagatacaaggatattactaaattaagcactgatgttgccaaaacccttgagcaggccctgcagttggcacgccgtctccatagtactcacgaggagctgtgtacctggttggataaagtggaggttgaactcctatcctacgaaactcaggtcctgaaaggcgaagaggcctctcaggcgcagatgcgacctaaagagctgaaaaaagaagcgaaaaataataaggccctcctggattctctcaacgaagtgtccagtgctctgctggagctcgtcccctggcgggcccgagagggactggagaaaatggtcgcggaagataacgagagatatcgccttgtgtcagacactatcactcagaaggttgaagagatcgacgccgcaatcctcagaagtcagcagttcgaccaagcggccgatgctgaactctcttggattactgaaaccgagaaaaagcttatgtcactgggggatatcagactggagcaggaccagacttctgcacagctccaggttcaaaagacatttaccatggagattctgaggcataaagacatcattgatgacctggtcaagtccggtcacaaaattatgaccgcttgtagcgaggaggaaaagcaatccatgaagaaaaagctcgataaagtgcttaaaaactatgacactatctgccagattaactctgagagatacttacaactggaacgcgcacagtcattagtcaaccagttttgggagacgtatgaggaactgtggccatggttgacagagacgcagtcaataatttctcaactgcctgcaccggcattggagtacgaaactctgcggcaacagcaggaggaacatagacagctccgcgaacttattgcagagcacaaaccacacattgacaagatgaataagaccggaccacaactcctcgaactgtcccccggtgaaggtttcagtatacaggaaaagtatgttgcagccgacacgctctattcacaaatcaaggaagatgtcaagaagcgagccgttgccctggacgaagccatctctcagagtacccaattccatgacaaaatcgaccagatcttggagtcgttagaaagaatcgtcgagcgactgagacagcccccgagcatatctgctgaagtcgaaaaaataaaagaacagattagtgaaaataagaacgtctccgtcgacatggagaagctgcagcctctatacgaaacactgaaacagaggggtgaggagatgattgctcgttctggcggaaccgacaaggatatcagcgctaaggccgtgcaggacaagctggaccaaatggtgttcatctgggagaatatacacactttggtcgaggagcgcgaggcaaagctgttagacgttatggagctggccgaaaaattctggtgcgatcacatgtcacttattgtaactatcaaggatacccaagacttcatacgcgacctcgaggaccctggaattgacccctcagttgtcaaacaacagcaagaggcagctgaaaccattagggaagaaatcgatggtctacaggaagagctggacattgtaatcaatctgggctccgaactgattgcagcctgtggcgaacccgataaaccgatcgtgaagaaaagcattgatgagctcaattctgcatgggattcacttaataaagcctggaaggatcgaattgataagcttgaggaggcgatgcaagcggctgtccaataccaagatggactccaagccgtgtttgattgggtggacatcgctggggggaaattagcatcaatgagccccatcggaaccgacttagaaaccgtgaagcagcaaatagaagagctgaaacagtttaaatctgaggcttaccagcagcagattgaaatggaaaggctgaaccaccaagccgagctgcttctcaaaaaagtcacagaggagtcagataagcacacagtgcaggatcctctgatggagttgaagctgatctgggacagtctggaagagcggatcattaaccggcagcacaaactggaaggagcactgctggcattgggacagttccagcacgccctggacgagctgcttgcctggctcacccatacagagggtcttttatcagaacagaagcccgtcggcggagatccaaaggcgattgaaatcgaattggcaaaacatcatgtactgcagaacgacgtacttgcccatcaaagtacagttgaggccgtgaataaggctggcaacgacctcatcgaaagttccgccggcgaggaggcttctaacctgcagaacaagttagaagtgcttaaccaacgatggcaaaatgttctcgaaaaaacagaacaaagaaagcaacagctggatggcgctctgcggcaggctaagggattccacggtgagattgaagacctgcagcaatggttaactgacacagaacgacacctcctggcttcgaaaccactcggcggactgcctgagaccgccaaagagcagttgaacgtgcacatggaagtgtgcgctgctttcgaggccaaagaggagacctataagtctctcatgcagaaaggccagcagatgctcgccaggtgtccaaagtcggcagagaccaacattgatcaggacatcaataatttaaaagagaagtgggaatccgtcgaaactaagctcaatgaaagaaagacaaaacttgaagaggctctcaatcttgccatggaattccataattctctgcaagacttcatcaactggctgacccaggcagagcagaccttgaacgtagcaagtaggcccagtcttattctggacacagtgctttttcagatagacgagcacaaggtctttgctaacgaggtgaattctcaccgcgagcagataattgaactcgacaagacaggcacacacctaaagtattttagtcagaagcaggatgtggttctcataaaaaatctactgatctctgtccagtcccgctgggagaaggtggttcagagattagtcgaacgcggcagatcgctcgacgatgcccgcaagcgtgcaaagcaattccacgaagcatggtcgaagttgatggagtggcttgaggaatctgagaagtcgctggatagcgaactcgagattgcaaacgaccctgacaaaatcaagacccaactggcccagcacaaggagtttcagaagagtctcggagcgaagcattctgtctacgacaccaccaatcgcaccggtagaagtctgaaggagaagacttcattggctgacgataacctgaagctggacgatatgctcagcgagttacgcgataaatgggacactatctgcggcaaatcagtggaacgacagaacaaactggaggaggctctacttttcagtggacagttcaccgatgccctacaagcactcatcgactggctgtaccgggtggaaccccagctggcggaggaccagcctgtgcacggtgacatagacttggttatgaacctgattgataatcataaagcgttccagaaggagctggggaagcgtaccagcagcgtccaggcactgaaacgctcggcaagggagctcatagagggatcacgtgacgatagctcctgggtgaaggtgcaaatgcaagagctgtccacacgatgggagactgtttgcgcactgagtatctctaaacaaaccaggcttgaggcagcactcaggcaggccgaggagttccacagtgtggtccacgcccttcttgaatggcttgccgaggccgagcagaccctccgatttcacggtgttctccctgacgacgaggacgcgctgcggacactcatagaccagcacaaggaattcatgaaaaagctcgaggagaaaagagccgagctcaataaagcaaccactatgggcgataccgtgctggccatttgtcaccccgacagcattacaaccattaagcactggatcactattattcgggcaagattcgaagaggtcctagcttgggctaaacagcaccagcagaggttagccagcgcgttagccggactgattgcgaagcaggagctgttggaggctttgttagcgtggttgcagtgggccgaaacaactttgaccgataaggataaagaagtgatcccacaggagatcgaggaagtgaaggccctgattgccgaacaccagacttttatggaagagatgacacgcaagcaacctgacgttgacaaagtgaccaaaacctacaagcgcagagcggctgacccaagctctctgcagagccacataccagtcctggataaaggcagagcgggaagaaagcgtttccctgcgagtagtttatacccgagcggctctcaaactcaaatcgagacaaagaaccccagggtgaatctcctggtttccaagtggcaacaagtgtggttactggctcttgagaggagaaggaaacttaacgacgctcttgatcggctggaagagctgagagagttcgcaaactttgatttcgacatttggcgaaaaaagtacatgcgctggatgaatcacaaaaagtcacgcgtgatggatttctttcgacgcatcgacaaggaccaagacggaaaaatcaccaggcaggaatttatcgatggaatccttagctccaaatttcctaccagtcgcctggaaatgagtgccgtcgccgacatcttcgacagagacggggacggctatattgattattacgaattcgtggctgctctccaccccaataaggatgcctataaacccatcactgatgccgacaagattgaggatgaagtgacacgccaggtggcaaagtgtaaatgtgcgaagcggtttcaggtggagcagatcggtgataataaataccgcttcttccttggcaatcagttcggcgactcgcaacagttacgattagtgaggattctgagatccaccgtgatggtgagagttgggggcggatggatggcgcttgacgaatttctcgttaagaacgacccatgcagagtgcatcatcatgggtccaagatgctgcggtcagagtcaaatagctctatcacaaccactcagccaactattgcgaagggaagaactaatatggaactacgggagaagttcattctggcggacggtgcttctcagggtatggccgcatttagacccagggggagacgatctcgcccaagttcccgtggagccagtccaaatcgctccacaagcgtgtcatcacaggcggcccaggcagcatcaccccaagttcctgcaactactacgcctaaaggtacgcctatccagggttccaagctgagacttcctgggtacctaagtgggaagggatttcattcgggcgaggatagcgggcttattactacagccgctgcccgggtacgaacccaattcgctgactccaaaaaaaccccttcaagaccagggtctagagcgggatccaaagcaggctcccgtgcttccagcagacgtggctcggatgcgtccgatttcgacattagcgaaattcagtcagtttgcagtgacgttgaaaccgtccctcaaacacataggcccacccccagagctggctcgcggccctcaacagcaaaaccctctaaaatccctactccacagcgcaagtcccctgcgtcaaaacttgacaaaagcagcaagaggtag

SEQ ID NO: 115316 - DNA, 23253 bp, synthetic construct
  misc_feature 1..23253: note = Description of Artificial Sequence: Synthetic coding sequence
  source 1..23253: mol_type = other DNA
atgatcgcagcggcctttctggtactcctgagaccttactctattcagtgtgccctgttcttgcttcttctccttctggggactatcgcaacaatcgtctttttctgctgttggcataggaagctgcagaagggacggcacccaatgaagtcagtattcagcggccggtctcgctcacgagacgcagtgctgagatcgcaccacttccgctcagagggctttagggccagtcctagacacctgcggcggcgcgtggcagcagccgcagcagctcgtctggaggaagtgaagcccgtcgtggaggtccatcatcagagcgagcaggagacctcagtccggaaacggcggatcaagaaaagcagccgtgtgcagcccgagttctaccactcggtgcagggtgcctccatcagacgaccctcaagcgggaacgcctcatatcggtgctccatgtcgtcatctgcagacttttctgacgaggacgatttttcacagaaaagtgggagcgcatcccctgcacccggggacaccttaccatggaatctgccaaagcacgagagatcaaagcgaaaaattcaggggggttctgtacttgatccagcagagcgagccgtgctccgcatcgctgatgagagagataaggtgcagaaaaaaacttttacaaagtggattaaccagcatctcatgaaggtgcgcaagcatgttaatgacctctatgaggacctgcgcgatggccataatctcataagtctgctggaagttctgagtggagacacgctccctcgggaaaaaggccgcatgcgctttcacagactgcagaacgtccagattgccctcgactacctcaagcggcgccaggtaaaactggtcaatatcaggaacgatgacattactgatggtaaccccaaactcactctgggtctcatctggaccatcattcttcactttcagatttctgacattcacgtgacgggagagagtgaggatatgtccgcaaaggagcggctgttgctatggacacagcaagctacagaaggctacgcaggcatccgctgtgagaacttcacaacatgttggcgggatggcaaactcttcaatgcaataatccataagtacaggcccgacctgatcgatatgaacaccgttgcagtgcaatctaacctcgctaatctggagcatgcgttctacgtggccgaaaagataggagtgatccggctgcttgatcctgaggacgtggacgtttcatcacccgacgagaagtcggtcatcacctatgtatcttctctgtatgacgcgtttcccaaggtgcccgaagggggcgaaggaatcggcgctaatgacgtcgaagtcaagtggatcgaataccagaacatggtaaattacttgatccagtggatccgccatcacgtcaccaccatgagcgagaggacgtttcctaataaccccgtggagttgaaggctctttataaccaatatcttcagttcaaagagacagagattccccctaaagagaccgaaaagagtaagataaaaagactgtacaaacttctggagatttggattgaatttggcagaatcaaactgctgcagggttatcaccccaatgacatcgaaaaggaatggggaaaacttattatcgccatgctggagagggaaaaggcactcaggccggaggtagagaggctagagatgttgcagcagatcgctaatagggtgcagcgcgacagcgttatatgcgaagacaagctgatactggccggcaacgccctccagtcggacagcaaaaggctggagtctggggtacagtttcagaatgaagcagaaattgcaggttacatccttgagtgtgagaatctacttcgtcagcacgtgatcgatgtgcagatcttaatcgacggaaagtattaccaagctgaccagttagtccagagggtcgctaagcttcgggacgaaatcatggcccttaggaacgaatgctcctccgtgtactccaaggggaggatactgacaaccgaacagactaagttgatgatttcaggaatcacccaaagtctgaactccggattcgcccagacactgcaccctagtctcacctcagggctgactcagagtcttacaccctcactaacctctagtagtatgacttccggattgtcaagtgggatgacaagccgcctgacaccctctgttactcctgcttacactccaggattccccagcggcctcgtgccaaacttttcttcgggggtggagccaaactcccttcaaacgttaaaactaatgcagatccggaagcccctgctgaagagcagcctactggatcaaaacttgaccgaagaagaaatcaacatgaaattcgtacaggacctgctcaattgggtagatgagatgcaagtccagctcgataggacggaatgggggagcgatctaccatcggtcgagtcccatttagagaaccataagaacgtccacagagctatcgaggagtttgagagtagccttaaagaggctaagatcagcgaaattcagatgacagcccctctgaagcttacctatgctgagaagctacatcgcttagagtcccagtatgccaaactcctgaacacctcgaggaaccaggaaagacatctcgacaccctacacaactttgtgtcacgggccaccaatgagctgatttggctgaacgaaaaggaagaggaggaagtcgcctacgattggagcgagcgaaacacaaacatcgcgcgcaagaaagattatcatgcggagttaatgcgagaactcgaccagaaagaagagaatattaaatctgtgcaggaaatagcggaacaactcctgcttgaaaaccaccccgcccgccttactatcgaggcttatcgagcagccatgcagacacagtggtcatggattctccagctttgccagtgtgtcgaacagcacattaaagaaaacactgcgtattttgagttttttaacgacgccaaagaggctactgattacttgcggaacctaaaagatgctatacagcggaagtatagttgtgaccgttcttcatctatccataagctagaggacctagtgcaggagtccatggaagaaaaggaggagctgttgcagtataaatctaccatcgctaatctgatgggaaaggccaaaacaatcatacaattaaagccacggaactccgactgtcccttgaagacgagtatccccatcaaagcgatctgtgattaccgccagatcgaaattacgatctataaggacgatgaatgcgtgctggccaacaattctcatagagcaaagtggaaggtcatcagtcctactggcaacgaggccatggttcccagtgtgtgcttcaccgtgcctcctccaaataaagaagcagtagatctagcaaacaggatcgagcagcagtatcagaatgtgttaaccctgtggcatgaaagccacattaacatgaaatctgtggtcagctggcactatctaatcaatgaaatagatcggatccgtgcgtctaacgtggcttccattaagacgatgcttcctggggagcatcaacaagtgctgtccaaccttcagagccgcttcgaagacttcctggaggacagccaggagtctcaggtgtttagcgggtcggacatcacacagctcgaaaaggaggtgaatgtgtgcaagcagtactatcaggagcttctcaagtcggcagaacgtgaagaacaggaagagagtgtgtacaatctttacatatcagaggtacggaatatccgcctgcggttggagaattgcgaggacagactgataagacagatcagaacgccactggaaagggatgacctgcatgaatctgtctttcggatcacagaacaagaaaaactgaaaaaggagctagagcggctgaaggacgacctgggaactatcactaacaagtgtgaagaatttttttctcaagcagcggcttcctccagtgtgccgacactaagaagcgaactcaatgttgtcctgcagaatatgaaccaagtttactctatgtcctctacctacattgataaattaaaaacggttaacttggtgctgaagaacacacaagctgcagaagcactggtaaagctttatgaaaccaagctttgcgaggaagaggcagtgatcgccgacaagaacaatatagagaatctcatatccacattgaagcagtggcgatctgaagtcgacgagaagagacaggtgttccacgcactagaggacgaattgcagaaggccaaggctattagtgacgagatgtttaagacttacaaggagagagacttagacttcgattggcacaaggagaaagcagatcaactcgtggagcggtggcaaaatgtgcacgtacagatcgataacagactgagagaccttgaaggcatcgggaagagccttaaatattaccgcgatacctaccatcccctggacgattggattcaacaggtggaaactacacagagaaaaatccaggaaaaccagccagagaattccaaaaccctcgccactcaactgaaccaacagaaaatgctggtgtccgagatcgaaatgaagcagtccaaaatggacgagtgtcagaaatacgctgaacaatatagcgccacggtcaaagactatgagcttcagacaatgacatatcgggccatggtcgactctcagcagaagtccccagttaaaagaagacggatgcaatcatctgccgaccttataatacaagagtttatggacctgcgaactaggtatacagctttggtgacattgatgacacaatatataaagtttgcaggcgatagtctcaagagactggaggaagaagagaagtcccttgaagaggagaagaaggaacatgttgaaaaggccaaggagctgcagaaatgggttagtaacatctctaaaactttaaaggatgccgaaaaggcgggcaagccccccttcagcaaacagaaaatttcaagcgaagagatctcaaccaagaaagaacagctgagcgaagccctgcagactatccaattgttcctggccaaacacggtgacaaaatgaccgacgaggagcgcaatgagttagagaaacaggtgaagactctgcaagagtcatataacctcctattttcagagtctctgaaacagctgcaggaatctcagacctctggcgatgtgaaagttgaggagaagctggataaggtcattgccggaacaatcgatcagacaaccggcgaagttttgtcggtgtttcaggcagtcttgaggggtctcattgactacgacactggtattcgcctgctggagacgcagctcatgatatccggcttgattagtcccgagctgaggaagtgtttcgatctgaaggacgctaagtcccacggactgattgacgaacaaatcctgtgtcagctaaaagagctctctaaggcaaaggaaatcatcagcgccgccagtcccacgacaatcccagttttggatgccctcgctcagagcatgattactgagagtatggccattaaggtgctcgagatcctgctcagcactggtagccttgttatcccagctacaggcgaacagctaacccttcagaaagcatttcagcagaacctggtttcatctgcactgttctctaaagtgcttgaacggcaaaacatgtgtaaggacctcatcgacccgtgtacttccgagaaggtgtcgctgattgacatggtgcagcggtctactttgcaggaaaacactggaatgtggctgttgccagtgaggccacaagaaggtgggaggattacattaaagtgcggcagaaatataagtatcctgcgagctgcccatgagggtctcatcgaccgggaaacaatgttccgacttctttctgcacagttactcagcggtgggctcatcaatagtaacagtggccagcgcatgacggttgaggaagccgttcgtgaaggcgtgattgatagggatacagctagctccatcctgacgtatcaggttcagacaggtgggattatacaatccaaccccgcgaaaaggctgaccgtggacgaagcagtccagtgtgacctgataacttcatcaagcgcactgttagtcttagaggctcaacgcggctatgtggggctgatctggcctcatagtggcgaaatcttcccaacatcttctagcctccaacaagagctcatcactaatgaactggcatacaaaatattgaacggaaggcaaaagattgcagctttgtatattcctgaatcatcccaggtgatcggcttagacgctgcaaaacaactcgggattattgataataacactgctagtatattgaaaaacataaccttgcccgacaagatgccagacctcggggatttagaggcttgtaagaacgctcggaggtggctgtccttttgcaagtttcaaccttccactgtccatgattatcgacaggaggaggatgtctttgatggggaggagccggtcaccacccaaacttctgaagaaacaaagaagctgtttctctcctatctgatgatcaattcttatatggatgccaataccggtcagaggttgcttctttacgatggtgatttggacgaagcggtgggtatgttgctagagggttgccacgcagaattcgacggaaatactgctattaaggaatgcctggacgttctctcctcaagcggtgtgttccttaataatgcctcaggcagagaaaaggacgaatgcacagctacccccagctctttcaacaagtgccactgcggcgagcctgaacacgaagagaccccagaaaaccggaaatgcgccatagatgaggagtttaacgaaatgaggaatacggtaattaactccgagttttctcaatccggtaaactggctagcacaatcagcatcgacccaaaagtgaactcttccccctccgtctgtgtgccctccctgatctcttatttgacccagaccgaacttgcagacatcagcatgttgcggtctgatagtgagaacatacttacgaactacgagaatcaaagccgcgtagagacaaacgaacgggcaaacgagtgcagccatagcaagaacattcaaaatttcccctcagatctgattgaaaacccaatcatgaaaagtaaaatgtccaagttttgcggtgtgaatgaaaccgaaaacgaagacaataccaatcgggactcacccatttttgactatagcccccgccttagtgccctgctctcacacgacaaacttatgcactcccagggctcatttaacgacacccatactccggagtccaatggaaataagtgtgaggcccctgcactaagctttagcgacaagactatgctgtctggacaacgtattggggaaaaatttcaggaccagttcctcgggatagctgcaataaacatctcacttccaggcgagcagtacggccaaaagtccctcaacatgatatcttccaaccctcaagtgcaataccataacgataaatatattagcaacacatctggcgaagacgaaaagacgcaccccggctttcagcaaatgcctgaagataaagaagatgaaagcgaaatagaggagtattcctgtgccgttactcccggaggggataccgacaatgcgatcgtcagcctgacttgtgcaacccccctgctggacgaaaccatttccgcctctgattacgagacgagcctgttgaacgatcaacagaacaatactggcaccgacacggattctgacgatgatttctatgataccccactattcgaagatgacgaccacgattctttgctactggacggggacgacagagactgcttgcaccccgaggattatgacacactgcaggaggaaaatgacgaaactgcctcacccgcagacgtcttttacgacgtgagcaaggagaacgagaactccatggtccctcagggagcccccgtcggaagcctgagtgttaaaaataaagctcactgcctacaggactttctgatggatgtggagaaggatgagttagacagtggagagaagatacaccttaatccagtgggaagcgacaaggtgaatggccaaagcctggaaactggatccgagcgcgagtgtacgaacattctggaaggggacgaatctgactcccttactgattatgacattgtagggggaaaggaaagtttcaccgccagtttgaaatttgatgactccggatcctggcgcggcaggaaagaagagtacgtgacaggacaagaattccacagtgatactgatcacctggactctatgcagagcgaggaaagctatggggattatatctacgacagtaatgaccaggatgacgatgatgatgacgggattgacgaagagggcgggggtatcagagacgagaatgggaaacctcgctgtcaaaatgtcgcggaggacatggacatacagctgtgcgcttccatcctcaacgagaactcggacgagaacgaaaatatcaataccatgatcctgttggacaagatgcacagctgtagctcgctcgaaaaacaacagcgggtgaatgttgtgcagctggcatcaccgagtgagaacaatctggttacagaaaaaagcaacctacctgagtacaccaccgagatcgcaggaaagtccaaggagaacctgctgaaccacgagatggttttaaaagacgtcctaccgccaataattaaagacacagagagcgagaaaacttttgggccagcgtcaatcagtcacgacaataacaacatcagttccacctcagagttgggcacggacctggcaaataccaaggtgaagcttattcaaggctctgaactccccgaacttaccgattccgtgaagggcaaagatgaatattttaagaatatgacgccaaaagtggatagtagtcttgatcacatcatctgtaccgaacccgacctgattggaaagccagcagaggagtcacacctgtccttgattgcctcggtaaccgataaggacccccaaggaaacgggagcgatcttattaagggtcgcgacggcaaatccgatatactcattgaagatgaaacctcaattcagaagatgtatctgggggagggggaggtgctggtggagggtttagtagaggaagaaaacaggcacctgaaactgctacctggcaaaaacactcgggatagtttcaaactgatcaatagtcagttcccttttcctcagataacaaacaatgaagaacttaaccagaagggctcattaaagaaagccacagtcacattgaaggacgagccaaacaatctgcagatcattgtctctaaatctcctgtgcagtttgagaacttagaggagattttcgatacatccgtttccaaagagatcagtgatgacattaccagcgatatcacaagttgggaagggaacactcacttcgaagagtccttcaccgacgggccagagaaggagctggacctgtttacctacttgaaacactgcgccaagaacatcaaagctaaagatgtagctaagccaaatgaggacgtcccctcacacgtattaatcaccgcccctcctatgaaggagcacctgcaactcggggtgaacaatacaaaagagaaatctactagcacccagaaggattcccccttgaacgatatgatccagtccaatgacctgtgttcaaaggagagtatcagcgggggtgggactgagatatctcaatttacacctgagtctatcgaggcaactctgtccatactctcccgcaaacacgtggaggatgtcggaaaaaacgactttctgcagtcagaacgttgtgccaacggcttgggcaatgacaacagctcaaataccctcaacacagattacagcttcttagagattaacaacaaaaaggagcggattgagcagcagttaccaaaagaacaagcgttgtctccaaggtcacaggaaaaggaggtgcaaattccagaactgtcgcaagtgttcgtggaggatgtcaaggatattctgaagtccaggcttaaagagggccacatgaacccacaggaggtggaagagccctccgcgtgtgccgatacaaagattttgatccaaaatctgattaagcggatcaccacctctcagctggtgaatgaggcgtccacagtgccgtccgactcgcaaatgtctgattcatcaggggtgagccccatgactaacagctccgaactcaagccagagtcgagggatgaccccttttgcatcggaaacctaaagagtgagctgcttttgaatatcctgaaacaggatcaacactcccagaagatcactggtgtttttgaactcatgcgcgagctaacgcatatggaatacgacttggaaaagagaggtataactagcaaagtcctcccgctccagctggagaatatcttctataagctgctggctgatggctactcagagaagatagagcacgtgggcgacttcaatcagaaagcgtgcagcactagtgagatgatggaggagaagccacacatcctgggggatatcaagtccaaagaaggcaactattactctcctaatctggaaaccgtcaaggaaatcggtctcgaatcctcaacagtgtgggcaagcactcttcctcgggatgagaaattgaaggacctgtgtaacgattttccctcccacctcgagtgtactagcggatccaaagagatggcaagcggggacagcagtactgagcagtttagctctgagctccagcaatgcttgcagcataccgaaaaaatgcacgagtacctgacactgctgcaggacatgaaaccacccctcgataaccaggaatccttagataacaacctggaagctcttaaaaaccagctgcggcagctcgagaccttcgagctgggcttagcacccatcgctgtgatccttaggaaagacatgaagttagccgaggaattcctgaaatccctaccctcagacttcccacggggtcatgtggaggagttgtccatttctcaccagtcgcttaagactgcgttttccagcctttcaaacgtctcatctgagaggaccaaacagataatgctagctattgatagtgagatgagcaaactggccgtcagccacgaagagttcttgcacaagctgaagagcttctccgactgggtctctgaaaaatctaaatcagtgaaagacatcgaaatcgtcaatgtgcaggatagtgaatatgttaaaaaaagactggagtttctcaaggctaacaatgtgttgaaggatcttggacatactaaaatgcagttggagaccaccgccttcgacgtacagtttttcattagcgaatacgcccaggatttaagccctaaccagtctaaacagctgctgagacttttaaacaccacacagaaatgtttcctggatgtgcaggagtccgtgacaacccaggtagaaagactggagacccagctgcatctggagcaggacctggacgatcagaagatcgtggcggaaaggcagcaggagtacaaggaaaaactgcaagggatttgcgaccttctgacacagactgagaaccgactcataggtcatcaggaggctttcatgatcggtgacggcactgttgaactgaaaaaataccagagtaaacaggaagaactgcagaaggatatgcaggggtccgctcaggctctcgctgaagtcgtgaaaaataccgaaaacttcctaaaagaaaacggggaaaagctgtcccaggaagacaaggccctgattgagcaaaaactgaacgaggctaagatcaagtgtgagcagctgaacctgaaagctgaacagagcaagaaggagctggataaggtggtgaccacagccatcaaggaggagacggaaaaagtagcagctgttaagcagctcgaagaatccaaaaccaaaatagagaacctcctggattggctgagcaatgtggacaaagactccgaaagggcaggcacaaaacacaaacaagtcatagaacaaaacgggacacattttcaggagggcgatggcaagagcgccattggagaggaggacgaagtgaatggaaacctgctcgaaaccgatgtggacggccaggtaggtaccacccaagaaaatcttaatcagcagtaccagaaagtcaaggcccagcatgagaagatcatttcgcagcatcaggccgtgattattgctactcagtccgctcaggtcctgctggagaagcagggccagtatttaagtcctgaggagaaggaaaagttgcaaaagaatatgaaagagttgaaagtccactacgagaccgcactggcggagagtgaaaagaaaatgaagctcactcactcactgcaggaggaacttgagaagtttgacgcagactacactgaatttgagcattggctgcaacagtccgaacaggaattggaaaatctggaagccggcgccgatgacataaacgggctcatgaccaagctcaagagacagaaatccttttcagaggatgtaatctctcataagggagatctgagatatatcacgatttcaggaaatcgagttttggaggccgccaaatcttgctcgaagagagacggcggaaaggttgacaccagcgccacccatcgggaggttcagaggaagttggaccacgcaaccgatagatttcgatctctgtatagcaagtgtaacgtgcttggaaataacttaaaggatctcgtagataagtatcagcactatgaagacgctagctgtggtttactcgccggtctacaggcctgcgaggccactgcctctaagcatctgagcgaaccaatcgcagtggatccaaagaaccttcaacggcagctggaggagacaaaggcacttcagggacagatcagttcacagcaggtcgccgtggaaaaattaaagaaaactgccgaggttctgctcgacgcacgcggctcactcttacccgccaagaatgacatccagaagactctggacgacatcgttgggcggtacgaggatttgagcaaatctgtcaacgaacggaacgaaaaattacagattaccctaacgaggagccttagcgtgcaggatggattggacgaaatgttggattggatgggcaatgtggaaagtagtctgaaggagcagggccaggtcccactcaattctaccgcactgcaggatataataagcaagaacatcatgttagagcaggatatcgcaggtcgccagtcttcaatcaacgccatgaacgagaaggtcaagaagttcatggagactactgacccatccactgcaagttctctgcaggccaagatgaaggacctgtcagcgcgcttcagcgaggcaagccacaaacacaaggaaaccctcgccaaaatggaggaactcaagactaaagttgagctgttcgaaaacttgtcagaaaagctgcaaacattcttggagacaaagacccaagccctgactgaggtcgacgtgcccgggaaagacgtgaccgaactatcccagtacatgcaggaaagcacctcagaatttctcgagcacaaaaagcatcttgaagtgctgcattcactgctgaaagagatcagctcccacggcctgccctctgataaagcactagtccttgaaaagacaaataatctctctaaaaagttcaaagaaatggaggatactatcaaggagaaaaaggaggctgtcacttcctgtcaggaacagctcgacgcatttcaggtgcttgtgaagagcttgaagtcatggatcaaagaaaccactaagaaagtgcccattgttcagccgtctttcggtgccgaagacctagggaagagcctggaggataccaaaaaactacaggaaaaatggagtctaaagacaccggagattcaaaaagtgaacaactctggcatctcactgtgtaacctgatcagcgccgtgaccaccccagctaaggcaattgcggccgtgaagagcgggggcgctgtgctcaatggtgaaggcacagccaccaacacagaggaattctgggcaaacaaaggccttaccagcatcaagaaggacatgacagacatcagccatggctatgaagaccttgggttgctcctcaaggataaaatcgcagagttaaataccaaactcagtaaactgcagaaagcccaggaagaatcttctgctatgatgcaatggttgcagaaaatgaataagactgctaccaaatggcagcaaacaccagcccctaccgacaccgaggctgttaagacccaggtcgagcagaacaagtctttcgaggctgagctgaagcaaaacgtgaataaagttcaagagctgaaggataaattgacagagcttttggaagagaaccccgatacacctgaggcaccccgctggaaacaaatgctgacagagatcgatagcaagtggcaggaactgaatcagttgacaattgaccgacagcagaaactcgaggaatcaagcaataatcttactcaatttcaaaccgttgaggcccagctcaagcagtggctggtggagaaggagctcatggtgagtgtgctcgggccactaagtatcgatccaaacatgctgaatactcagaggcaacaggtgcagattctcctccaggagttcgcgactagaaaacctcagtacgaacagcttactgccgccggccaaggtatactgtcccggccaggcgaagacccctcacttcgcgggattgtgaaggagcagctggctgccgtgacccagaaatgggactccttaactggccagctgtccgatcgttgtgactggatcgatcaggccatcgtgaaatccacacagtatcagtcgcttttgcggtcactttcagacaaacttagtgacctggataataagttatcgagttcgctagcagtgagcacccaccccgacgccatgaaccagcagctcgagacagcccaaaagatgaagcaggaaattcaacaggaaaagaaacagatcaaagtggcccaggctttgtgcgaagatctgagcgcactagtgaaggaagaatacttaaaggccgagctaagtcgccagctcgaggggatcctcaagtcttttaaagacgtggagcaaaaggctgagaaccacgtgcaacatttgcagagcgcctgcgcctctagccaccaattccaacagatgagccgggattttcaggcttggctggacacaaaaaaagaagaacagaataaatcacaccctattagcgcaaagctcgatgtcctcgaatctctgatcaaagaccacaaagacttctccaagaccctgacagctcagagtcacatgtacgaaaaaaccatcgctgagggcgagaacctactgctgaaaactcagggctctgaaaaggccgccttacaactgcagctcaacacaattaaaactaactgggatacgttcaacaaacaagtgaaggagcgagaaaataaactcaaggaatctctggaaaaggccttgaaatataaggagcaggtagaaactctgtggccatggatagataagtgtcagaacaatctggaagagattaagttctgccttgacccagctgagggggaaaactctattgctaagctgaagtctttgcagaaggagatggaccagcatttcgggatggtggaactcctgaacaatactgccaatagcctgctgagcgtgtgcgaaatagacaaggaggtggttaccgatgagaacaaaagccttatccaaaaagttgacatggtgactgaacagctccattcaaaaaaattctgcttagaaaacatgacacagaaatttaaggaatttcaagaggtgtctaaggagagcaagcgacagctgcagtgcgccaaggagcagctggatattcacgatagcctgggatcccaagcctacagcaataaatatctcactatgttgcagacgcagcagaagagtttacaggcgctgaaacatcaggtggatctggccaagcggctggcacaggatctggtggttgaagcaagtgactcgaagggcaccagtgatgttctcctccaagttgagacaatcgcccaggagcacagtaccctctctcagcaggttgatgagaagtgctcctttttagagacaaagctacaggggatcggacatttccagaataccatcagggagatgttctctcagttcgcagaattcgatgacgaactagattccatggccccagttgggcgggacgctgagacactgcagaagcagaaagagacaatcaaggccttcctcaagaagctggaagccctcatggcctccaacgacaatgctaacaagacttgcaagatgatgctagcgactgaggaaacatccccagatctggtggggatcaagcgcgacttagaggctctttccaaacagtgtaataagctgcttgaccgggcccaagcccgtgaagaacaggtggagggaactatcaagcgacttgaggaattttacagtaagctcaaggaattcagcatattgctgcagaaagcagaggaacacgaggagagtcaaggccccgtgggcatggagaccgagactatcaatcagcagctgaacatgtttaaggtgttccagaaagaggagattgagccattacaggggaagcaacaggatgtcaactggttgggccaaggcctgattcagagcgctgcaaagagcaccagcacgcaaggtctggagcacgacctagatgatgtcaatgcccgatggaaaactctgaacaaaaaggtggcgcagcgcgcggcacagttacaagaagccttgctacattgcggaagattccaagatgctctcgaatccttgttgtcctggatggtggacaccgaggaacttgtcgctaaccagaagccaccgagcgctgagtttaaagtggtcaaagcccagattcaagagcagaagctcttgcagaggctacttgacgacaggaagtctactgtagaagtgatcaaacgggagggggagaagatcgccacaacggcggagccagctgataaagtaaagattctcaaacaattaagcctgctggactcccgttgggaggcccttctgaataaagccgaaactcgtaaccgacagctcgagggtatctccgtggttgctcaacagttccacgagaccctggaacctctgaatgagtggctgacaaccattgaaaagagacttgtgaattgtgagccaatcggaacacaggcctccaaactggaggaacagattgctcagcacaaagcacttgaggacgatatcattaatcataacaaacacttacatcaagcggtttccataggtcagagcttaaaagtcctttccagcagagaggataaggatatggtgcagtctaagcttgatttttcgcaggtttggtatattgagattcaagaaaagtctcacagccgtagcgaactcctccagcaagcgctatgcaatgccaagatttttggagaagatgaagtggagctgatgaactggctgaatgaggtgcacgacaaactctctaaactgagcgtgcaagactatagcacagaggggttgtggaaacaacaaagcgaacttcgggtccttcaggaagatatcttattacgtaaacagaacgtggatcaggcgcttttaaatggactcgagcttctgaagcagacgaccggcgatgaggttcttatcatccaggacaaactcgaagccataaaggcgaggtataaggatatcaccaagctgagcacagacgttgcgaagacactagagcaggccctgcagctagcccgacggctacatagcacccatgaggagctctgtacttggctggacaaagtggaggtggaattactgtcttacgagactcaggtgctgaagggcgaagaagcctcacaggctcagatgcgccctaaagagctgaaaaaggaggctaaaaacaacaaggcactgctggattccctgaatgaagtcagcagcgccctgctggaacttgtgccctggcgcgcaagagagggcctcgagaaaatggtggccgaagacaacgaacgttacaggcttgtttccgacacaataacacaaaaggttgaggaaattgatgctgctattctacgcagccagcaatttgaccaggcagccgacgcagagctcagttggattacagagaccgaaaaaaaacttatgtctttgggggacatccggctggagcaggaccagacatcagctcaattgcaggtgcaaaaaaccttcaccatggagattctgcgccacaaagacatcatcgacgatctggtaaagtccggccacaagattatgaccgcgtgtagcgaggaggaaaagcagtcaatgaagaaaaaactcgacaaggtattgaaaaattacgatacaatctgtcagatcaactcagagaggtatcttcaactagaacgggcacagagtctggtgaatcagttttgggaaacctacgaagagctgtggccctggctcaccgagacacagagtatcatttctcagttgcccgctcctgcgttagagtacgagacgctgcgccaacagcaggaagagcacagacagttaagagaactgatcgccgagcacaagcctcacatcgacaaaatgaataagactgggccgcagctactggaactaagtccaggagaaggcttttctatccaggagaagtacgtggccgcagacaccctctactcacaaattaaagaagacgtgaagaagagagccgtggcattggatgaagctatatcccagagcacacaatttcacgacaaaatagatcagatcctggaatccctggagagaattgtcgaacgcctgcggcagcctccatctatatctgccgaggtcgagaaaataaaggaacagatcagcgagaacaagaatgtcagtgtcgatatggagaaacttcaaccgctttacgaaacgcttaaacaaagaggcgaagaaatgatcgctcggtcaggcggaacagacaaagatatatcagccaaagcagtgcaggataagctggaccaaatggtgtttatttgggaaaacatccatactctcgtggaggaaagagaagctaagctcctcgatgtcatggagctagctgaaaagttttggtgcgaccacatgtccctcatcgtaactattaaggatactcaagacttcatccgggatctggaagaccccggaattgatcccagtgtggtcaagcagcaacaggaggcagctgagaccattcgcgaagaaattgacgggctacaagaggaattagacatagtcatcaatctcggttctgaactgatcgcagcgtgcggcgagcccgacaagccaattgtcaagaagtcaatcgacgagctcaacagcgcctgggatagtctgaataaagcatggaaggataggattgacaagttagaagaagccatgcaagcggctgtgcagtaccaggacggattacaggcagtgtttgactgggttgatatcgctggaggaaagctggccagtatgagccctattggtaccgatctggagactgtgaaacaacagattgaggagcttaaacaatttaaaagcgaggcctaccagcagcagatcgagatggaaagactgaatcatcaggcagagctgctgttaaaaaaggtgactgaagagtccgataagcacactgtgcaggacccactcatggagctgaaactcatttgggactccctggaagagcgtataataaatagacagcacaagctggagggtgccctgctcgcacttggccagttccagcacgccctggatgaactcctggcctggctgacacatactgaaggcctcttgtccgaacaaaaaccagtggggggtgatcccaaggcaattgaaatcgagctcgcaaagcaccacgttctccagaatgacgtcctggcccatcagagtactgttgaggcagtgaacaaagctggcaacgacctgatagagtcttcagcgggggaggaagcaagcaaccttcaaaataagcttgaagtattgaaccaaaggtggcagaacgtgctggaaaagaccgagcagagaaaacagcagctcgatggagccctgagacaggccaagggattccacggtgaaatcgaagatttacaacagtggctgacggacacggagcgccacctgcttgcctccaagccattggggggtctgcccgagacggcgaaggaacaactaaacgtacacatggaggtttgtgccgcctttgaggcgaaggaggaaacatataagtctctgatgcagaaggggcaacagatgctggctcgctgtcctaagtcagctgagaccaacatcgatcaggatatcaacaatctaaaagagaaatgggagagtgtcgagacaaaactgaacgagcgcaaaaccaaactagaagaggctctcaatctggcgatggagttccataactcccttcaggatttcattaactggctgacacaggcagagcaaactctgaatgtggcgagcaggccttcactgatactcgataccgtgttgtttcaaattgatgaacacaaggtctttgccaatgaggtgaactctcaccgggaacaaattattgagctcgacaagacggggactcacctcaagtatttttcccagaaacaggacgtggtgttaataaaaaatttgctgatcagtgtccagtctcggtgggagaaagtcgttcagcggcttgttgaaagagggcggagcttggatgatgctcgaaagagagcgaaacagtttcatgaagcctggtctaaattgatggagtggctcgaagagtccgagaaatcactggatagcgagttggaaattgctaacgacccagacaaaataaagactcaactggcacagcataaagagtttcaaaagtcgctgggcgctaagcatagcgtttacgacaccaccaaccgaaccggacggtctctcaaggaaaaaaccagcttagcagatgacaaccttaagctcgatgatatgctaagcgaactgagagacaagtgggacaccatatgcggcaaatccgttgagcgccaaaacaagctcgaggaagcgctgcttttcagtggccagtttaccgacgccctgcaagcactgattgattggctgtatcgggtggaaccacagctcgccgaagaccagccagtgcacggggacatcgatttagtgatgaatctgattgacaaccataaggcttttcaaaaagagctgggcaagaggacatccagtgttcaggccctaaagaggagcgcccgggaacttattgagggctccagagatgactcctcatgggtgaaagtccagatgcaagaactttctacccgatgggagacagtgtgcgccctctcaatttcaaagcaaactcgactggaggccgccctacggcaggcagaagagttccatagtgtggttcatgcactccttgaatggctcgcagaggccgagcagacactgcgattccacggggttcttcccgatgatgaagatgctcttcggaccttaatcgaccagcacaaagagttcatgaaaaagttggaggagaaacgtgcagaactgaacaaagcgacaacaatgggagataccgtgctggccatatgtcaccctgactcgattacgacaataaaacattggattaccatcatccgagcacggttcgaagaagtgctcgcttgggccaaacaacatcagcagcggttagcctccgccctcgctggtcttatcgccaaacaggaactgctcgaggctctgctggcctggcttcagtgggccgagactacactaaccgataaagataaggaagttattccacaagagattgaagaagtcaaggccctcattgcagagcaccaaacttttatggaggagatgacaaggaagcagcccgatgttgacaaggtcacaaagacttacaagcggcgggcagcagatccaagctccctccaatcgcatattcccgtgctggacaaaggcagggctggacgaaagagattccctgcttcatctctttaccccagcggctcccagacgcaaattgagaccaaaaaccctcgcgtgaacctgttggtcagcaagtggcagcaggtgtggctcttagcgctggagcgtagaaggaaattgaacgatgctcttgatcgcctggaagagctcagggagttcgcgaattttgatttcgacatttggcgcaaaaaatacatgcgttggatgaatcataagaaaagccgggtaatggacttttttcgccgaatcgataaggaccaggacggcaaaattacaagacaggaatttatcgacggtatcttgtccagcaagtttcctacatcaaggctggaaatgtctgcggtggccgatatcttcgacagggacggggacggttatatcgattactatgagtttgtggcggccttgcatcctaacaaagatgcctacaagccgatcactgacgcagataagatagaggatgaggtcacaaggcaggtggcaaagtgcaaatgtgccaaacgcttccaggtggaacagatcggtgacaacaaataccgggtgtcttttcagtctaatttcggagactcccagcagctgcgcctcgtgagaatacttcggagcactgtgatggtgcgcgttggggggggttggatggcgctcgatgagtttttagtcaagaatgatccatgccgggttcaccaccatggctcaaaaatgctgcggagtgaatctaattcttcaatcaccactacacagccaactatcgcaaagggccgaaccaatatggagctgagggaaaagttcatactggccgacggtgcctcacaggggatggccgcttttcgcccaaggggcagacgctcccgtccgtccagcagaggtgcctcccctaataggtccacctctgtaagtagtcaggccgcccaggccgcctccccacaggtgccagccacaactaccccgaaagggactcccatccagggctccaaactgaggctgcccggatatcttagcggcaaggggttccactctggcgaggactcaggcttgatcactaccgctgcagcaagggtccggacccaatttgctgattctaagaagactccctcaagaccagggtctcgggcggggagcaaggcgggatctcgggctagctcccgcagagggagtgacgcctcagactttgacattagtgagatccaatcagtttgttctgatgtagagacagtcccacagacccataggcccactcctcgcgctgggagtagaccctctaccgcaaaaccaagcaagatccctactccgcagcgcaagagtccggcgagtaagctggacaagagtagcaagagatag

SEQ ID NO: 115317 - DNA, 7950 bp, synthetic construct
  misc_feature 1..7950: note = Description of Artificial Sequence: Synthetic coding sequence
  source 1..7950: mol_type = other DNA
atgcattcttctagctacagttataggtcgtccgacagtgtgttttccaacacgaccagtacacggactagcctggactccaacgagaacttgttactcgtccattgtggccccaccctgattaattcatgcatcagctttgggtccgaatcattcgatggccatcgcttggagatgctccaacaaatcgcaaatcgcgtgcagcgcgactcggttatttgtgaggataagctcattcttgctggtaacgctttacaatctgattcaaaaagactggagtccggtgttcagttccagaacgaagcggagatcgctggttatatcttggagtgtgagaacctgctcagacagcacgtcatcgatgtccaaatactgatcgacggaaaatactatcaggccgatcagttggtgcagcgcgtggccaaactgcgcgacgaaattatggcgctccgaaacgagtgctcgtccgtttatagcaagggccgcatcctcactaccgaacagacaaaattaatgatttccggtatcacacagagcctgaacagcggttttgcccagactcttcacccatcgcttacctctggactgactcagtcactgaccccgtccctcacgtcctcatctatgacctcaggcctctcgtcaggtatgacatcaagactgaccccctcagtcacccccgcatatacacccggcttcccttccggacttgtgcctaatttctcttcaggtgtggagccaaacagtctgcagacactcaagctgatgcaaattcggaaacctctgctcaagtctagtctgctggaccagaacctcactgaggaagaaatcaatatgaagttcgtccaggacctcctgaactgggttgatgaaatgcaggtgcagttggacagaaccgagtgggggagcgacctcccctctgtagagagccacttggaaaatcataaaaatgtccaccgggccatcgaggaattcgaaagcagcctgaaggaagccaagatatctgaaattcagatgacagcaccccttaaactcacgtacgccgagaagctccaccggcttgaatcccagtatgccaaactactaaatacttcgaggaaccaggaacgccatctggacaccctgcataactttgtatcccgtgccacaaacgagctgatctggctgaacgagaaggaagaggaggaagtggcctatgactggagcgagaggaataccaatattgcacgaaaaaaggactaccacgccgagctgatgcgagaattggaccaaaaagaagaaaatatcaagtcagtacaggagattgccgagcagctattactggagaatcacccagccagacttactattgaggcatatcgggccgccatgcaaactcaatggtcatggattctccagctgtgtcaatgcgttgaacagcacataaaggagaacacggcctactttgaattcttcaatgacgcaaaggaagccacggactatcttcgtaatctgaaagatgctattcagcgaaagtattcatgtgaccgaagctcgagtattcacaagctagaggatcttgttcaggaatcgatggaagagaaagaggaattgctccaatataagagcacaatagccaacttgatggggaaggctaaaaccatcatccagctgaagccaaggaactcagattgccccttaaaaacttctattccaattaaagccatttgcgactatcggcaaatcgagataactatctacaaagatgacgaatgtgtgctggccaacaactcgcaccgggcaaaatggaaagtgatcagtccaaccggcaacgaagcaatggtcccttccgtctgcttcacagtgccaccacccaacaaggaggccgtggatctagctaatcgcatcgaacagcaatatcaaaacgtccttacgctctggcatgaatcccacataaacatgaagtccgtggtgtcttggcactatctgattaatgaaattgatcgcattagggcaagtaacgttgcaagtatcaagacaatgttgcccggtgaacatcagcaggtgctttccaatctgcagtctagattcgaagacttcctggaggattcccaggagtctcaggtctttagtgggtcagacataactcagcttgagaaggaggtcaatgtatgtaaacagtactaccaggaactcctgaagagcgctgaacgagaggaacaagaggaatccgtctacaacctctacatttccgaagtacgcaatattcggctgaggctggaaaactgcgaagaccgcctgatccgccagatacgtacgcccctggagagggacgacctgcacgagtcagtattcagaatcactgagcaggaaaagcttaaaaaagaactcgaaaggctgaaagacgaccttggtaccataaccaataagtgcgaggagttcttttctcaggctgccgcctccagttccgtgccaaccctgcggagcgagttaaatgtggttttacagaacatgaaccaggtgtactccatgtcctcaacatacatcgataaattgaagaccgttaacctggtgctcaagaacacacaggccgcagaggccttggtaaaactgtacgagactaaattgtgcgaagaggaggccgtgatcgccgataagaacaacattgaaaatctcatcagcactttgaagcagtggcggagtgaggtcgacgaaaaacgccaggtgttccatgccctggaagatgaactccagaaagccaaggccatctcagatgagatgtttaagacctacaaggaaagggatctcgatttcgactggcataaagagaaggcagaccagctggtagaacggtggcaaaatgttcacgtacaaatagacaatagattgagggatctagaggggattggaaagtcgctgaaatactatcgcgacacctatcaccctcttgacgattggattcaacaagtcgagacaacgcaacgcaagatccaagagaaccagccggagaattccaaaaccctggccactcagctcaatcagcagaaaatgctcgtcagcgagattgagatgaagcaatccaaaatggatgagtgtcagaagtacgctgagcagtactctgcaactgttaaagattacgagttacagaccatgacctatcgcgccatggtggactctcagcagaaaagcccagtgaaaaggaggaggatgcagagttccgctgatctgattattcaggaatttatggacctgaggactcgatataccgctctcgtgactttaatgacgcagtacataaagttcgcaggggactctctgaaacggctcgaggaagaggagatcaaaagatgtaaggaaaccagcgaacacggcgcctatagcgatttactgcagaggcaaaaagcgacggtgctcgaaaactccaagctgacagggaagatcagcgaactagaacggatggtcgcagagctgaaaaagcagaagagtagggtcgaggaggaacttcccaaggtccgggaggccgccgagaacgaattgcgcaagcagcagcggaatgttgaggacatttctctccaaaagatcagggccgagtcagaggctaaacagtaccgccgtgaactggagacaatcgtgcgagagaaggaagctgccgaaagggagttggagagagtgagacaattgaccattgaggccgaggcaaaacgagctgccgtcgaagaaaatttgctcaactttagaaaccagttggaagagaatacttttactaggagaaccctggaagatcatttaaagaggaaagatctgtctttgaacgacctggaacagcaaaagaacaagttaatggaagaactgaggcggaagcgagacaatgaagaggagttgctaaaactgattaagcagatggagaaggacctggcatttcaaaaacaagtcgccgaaaagcagctcaaagagaagcagaagatcgagctcgaggcccgacggaaaataacagagattcagtacacgtgccgagagaacgcgctgcctgtgtgccccataacccaggcgacatcttgccgggctgtgactggcttacaacaggaacacgacaagcagaaggccgaagaattaaagcaacaggtggacgaattaaccgcggcaaacagaaaagcagaacaggacatgcgtgagctcacctatgagctcaatgccctccagttggagaagacttcctctgaagagaaggcccgattgctgaaagacaagctcgacgagactaacaatacacttcgttgtcttaaactcgaacttgaacgaaaggaccaggcggagaaggggtatagccagcagctgagagagttggggcgtcagttgaatcaaactacaggtaaggcggaagaagcaatgcaggaggcttctgacctcaagaagattaaacggaactatcagctggagctcgagagccttaatcatgaaaaaggaaagttgcagagggaagtggatcgtatcacgagggctcatgccgtcgccgaaaaaaatatacaacacttgaacagccagatccacagcttccgtgacgagaaagagttagagaggctgcagatttgccagaggaaaagcgatcacctgaaggagcagttcgaaaagagccatgagcagctgctgcagaatattaaggctgaaaaggaaaataatgataagatccagcggcttaacgaggaactggaaaaaagtaatgagtgtgccgaaatgctgaaacagaaagtggaagagctaacacggcaaaacaatgaaaccaagttaatgatgcagaggattcaggctgagtccgagaacatagtgctggagaagcagactattcagcagcgttgtgaagccctgaagatccaggcggacgggtttaaagaccagctcagatcgaccaatgagcacctgcataaacagacaaagactgagcaagattttcagcggaaaataaagtgcctggaagaggatctggccaagagccagaacctagtctcagagttcaagcaaaagtgtgatcagcagaatataattattcagaataccaaaaaagaggttcgcaatctcaatgcggagctgaacgctagtaaagaggagaagcgcaggggtgagcaaaaagtgcagctgcagcaggctcaggtgcaggaactcaacaacagactcaagaaggtacaggacgaactgcacctcaagactattgaagagcagatgacacacagaaagatggtgctcttccaggaggaatccggcaagtttaaacagtccgctgaagagttccgtaagaaaatggaaaaacttatggaatctaaggtgatcacagagaatgatataagcgggattaggctcgatttcgtgtctttgcagcaggaaaacagccgggcccaggagaatgctaagctctgtgagaccaacatcaaggaattggaaagacagctgcagcaatatagggaacagatgcagcagggccagcacatggaggcgaatcactaccagaagtgtcaaaaactggaggatgagttgatcgcacagaaacgggaggtggagaatctgaaacaaaaaatggaccagcagattaaagaacacgaacaccagttggttctgttacaatgcgaaatccaaaagaagagcacggccaaagattgtacattcaaacccgatttcgaaatgactgttaaagagtgccagcattccggggaactcagctctcgcaataccggacatctgcatccgaccccacgcagccctctgctgcgatggacacaggaaccccaaccactcgaggaaaaatggcagcatcgggtggtcgaacagattccaaaagaagttcagtttcagccccccggcgcccctctggaaaaagagaaatctcagcaatgctatagtgaatacttctctcagacgtcaactgaactgcaaatcacgttcgatgagaccaacccaattacacggctgtctgaaatcgaaaaaattcgggatcaggccttgaataactctagaccaccagtacgctatcaggataacgcctgcgaaatggaactggtgaaggttttaactccgctggagattgcaaagaataagcagtacgacatgcacaccgaagtcaccacgctgaaacaggagaaaaatccagtgccaagcgctgaagaatggatgcttgagggctgccgggccagcggcgggcttaagaaaggagactttttgaaaaaaggcctcgaacctgaaacttttcagaactttgacggagatcacgcgtgtagcgtgcgcgatgacgagttcaagttccaaggactcaggcatactgtgacggctcgacagctagtggaggccaaactgcttgacatgcgaacaattgagcagctgaggttggggcttaaaacagtcgaagaagtgcagaaaaccctgaataagttcctaaccaaggccacgtccattgctggcctataccttgagtccaccaaagaaaagataagtttcgcctccgccgcagagcggattattatagacaaaatggtggcgttggccttcctggaggcgcaagccgcaacaggctttatcattgacccaatttcgggacaaacatactcagtggaggatgctgtgctgaagggggttgtcgacccggaattcagaatccgtcttctcgaggccgagaaggccgcggttggctacagctacagttccaagacccttagcgttttccaagcaatggagaatcggatgctggataggcaaaagggcaaacatattcttgaggcacaaatcgcctccggaggtgtcatcgaccccgtgagagggatcagagttccaccggagatagcgctgcagcaggggctgctgaataatgccatcctgcaatttctgcatgaaccttccagtaataccagagtgtttccaaaccccaataacaaacaggccctatattactccgaactgctgcgtatgtgcgtctttgacgtcgagtcccagtgcttcctgtttccattcggcgaaagaaacatcagtaacctcaacgtgaaaaagacacaccgaatttctgtcgtcgatacaaaaacagggagcgagctcaccgtctacgaggcatttcagaggaatctgattgagaagtccatctacctggagctgtctggacagcagtatcagtggaaagaggccatgtttttcgaatcctatgggcactcttcccatatgctgacagatacgaagactgggttgcacttcaacattaacgaagcaatcgagcaaggcactatcgacaaggcactggtcaagaagtatcaggagggactgattaccctaacagaactcgccgatagcttactttctagactggttccaaaaaaggatctgcattcaccagtggcaggatattggctcacagcgagcggcgaaaggatctctgtgctgaaggcctcacgtagaaacttggtggatagaattacagccttgagatgtctggaagctcaggtgagcacgggaggtattatcgacccactgaccgggaaaaagtaccgcgtcgctgaagctctgcatcggggcctggtggatgaagggttcgcacagcagctcaggcagtgtgaacttgttatcaccggcattggccaccctatcacgaataagatgatgtccgttgtggaggctgtgaacgctaacattattaacaaggagatgggaatccgctgtttggagttccagtatttaactggagggctgattgagccccaagtgcattctcgcctgtctatcgaggaagcactgcaggtgggcatcattgatgtgttgattgctactaaactgaaagaccagaagtcctacgtacggaacatcatttgcccacagacaaaacggaaactcacctataaagaggccttggagaaagcagactttgatttccacacaggtttgaagctcctagaagtcagcgagcctctgatgacaggaatttccagtctgtattacagcagttag

SEQ ID NO: 115318 - DNA, 22719 bp, synthetic construct
  misc_feature 1..22719: note = Description of Artificial Sequence: Synthetic coding sequence
  source 1..22719: mol_type = other DNA
atggcaggctacttgtcccctgctgcatacctctacgtggaggaacaggagtacctgcaagcttacgaagacgtccttgaaagatacaaggatgaaagagataaggtgcaaaagaaaacctttactaaatggattaatcagcacctcatgaaggttagaaagcacgtaaacgatctgtatgaagacttacgggatgggcacaatctgatctctctgctcgaagtgctgtccggggataccctgccccgcgaaaagggccggatgcgtttccaccgcctgcaaaacgtacagatagccttggattaccttaagaggcgtcaagttaagcttgtcaacattcgcaatgacgacattacggacgggaatcccaagctgacattgggtctcatatggacgataatactgcattttcaaatctccgacatccatgtcactggagagtctgaagatatgtcggcaaaggaacgtctgcttctctggacacagcaagctaccgaaggttatgctggcatcaggtgcgaaaatttcacaacgtgttggagggatggcaagctgttcaacgcaatcatccacaaatatagacccgaccttattgatatgaataccgtagccgtccagagcaacctggccaatttggaacatgcattctatgttgccgaaaaaatcggtgtgattcggctccttgaccctgaagacgtggacgtcagctccccagatgaaaaaagcgtgatcacctatgtgagcagcctttatgatgcctttcctaaggtacccgaaggtggagaggggattggtgcgaacgatgtcgaggtgaaatggattgaataccaaaatatggtgaattatctgatacagtggatccgccatcacgttacaaccatgtctgagcgtacattcccaaataatcctgtcgagctcaaggctctatataaccagtaccttcagtttaaggagaccgagataccaccgaaagaaaccgaaaagtccaaaatcaagcgcctctacaaattgctggaaatttggatcgagtttgggcgaattaaacttttacagggttaccatcctaacgacatcgagaaggagtggggtaagctgatcatcgcaatgttagagcgcgaaaaagccctgagacctgaggtcgagcgcctggagatgttgcagcagattgctaacagagtgcagagggactccgtcatttgtgaagataaacttatccttgccggaaacgccctgcaatcggactccaagcgattagagtccggggtgcagtttcagaatgaggcagagattgccggttacattctcgagtgcgagaacctgctcaggcaacatgtcatcgatgtccagattctgatagacggcaagtactaccaggccgaccaactggtgcaacgcgttgccaaacttcgggacgaaatcatggcacttagaaacgagtgttcatctgtctattcaaagggtaggatcttgacgaccgaacagacaaagctgatgatttcgggcataacccagtccttgaattctggtttcgcacagaccctccatccctccctcaccagtggcctcacacagagtttgacgcccagcttgacctcttcaagcatgaccagtgggctgagcagcggcatgacaagtaggctcactccgtcagtaactcctgcgtatacacctgggtttccttcagggctcgtacccaacttctcctcaggagtagaaccaaactccctgcagacacttaaactgatgcagatcaggaagccattattgaagagcagcttgcttgatcagaacttaacagaagaggagatcaacatgaagttcgtgcaagaccttttgaactgggttgacgaaatgcaagtgcagctggataggactgagtgggggtctgacctgccgagcgtggaatcccatttagagaatcataagaatgttcatcgagccatagaggagttcgagtcgtccttgaaagaagcaaagatctccgaaatccagatgactgcacccctgaaactgacatacgccgagaaactccaccggctggagtcacagtacgctaaactgctgaatacctctcgaaaccaggagagacacctggacaccctgcacaactttgtgtcaagggccaccaacgagctgatttggctgaacgagaaagaagaggaggaagtagcctatgattggagtgaaagaaacactaacattgcaagaaaaaaagactaccacgctgaattgatgagagagttggatcagaaagaggagaatataaaatccgtacaggaaatagcagagcagcttctgctagagaatcacccagcaagactaaccatagaggcgtacagagccgccatgcagactcagtggtcgtggatacttcagctgtgtcagtgtgtagaacagcatattaaggagaacactgcctacttcgagttttttaacgacgcaaaggaagccacggactacctgcgcaacctcaaagatgctattcagaggaagtattcctgtgatcgctcgagcagtatccacaaattggaggatctagtccaagagtccatggaggagaaggaggaactgttgcaatacaagtccaccattgccaacctgatgggcaaggctaaaacaattattcagctgaagcccagaaactctgactgtccactgaagacatctatacctattaaggcaatttgtgattaccggcagattgagattacaatctataaagacgatgagtgcgtgctggccaacaattcccacagagctaaatggaaggtgatcagccccactggtaatgaagctatggtacctagcgtatgttttacagtacctcctccaaataaggaagctgtggatttggccaaccgcattgagcagcagtatcagaatgttctgactctgtggcatgagtcccacataaatatgaagagcgtcgttagctggcactatctgattaacgaaattgaccggatacgggcatccaatgtcgccagcattaagaccatgctcccaggcgaacaccagcaggtgctgtctaacttgcagagccgctttgaggatttcctcgaagattctcaggagagccaggttttctctgggagtgacataacacagctggagaaggaggtgaacgtgtgcaaacagtactaccaagaactcttgaagtccgccgaacgtgaagagcaggaagagtccgtttataacctgtacatcagtgaggtacgcaacattagacttcggttagagaattgtgaagaccgattgatacggcagatccggacccctctggaacgggatgatctgcatgagtctgtttttaggattacagagcaagaaaagcttaagaaggaactagaaaggttgaaggatgacctcggtaccatcacaaacaagtgtgaggaattcttctctcaagctgccgcttcttccagtgtgccaaccctgcgatccgaactcaatgtagttttgcagaacatgaaccaagtgtactcaatgtcctctacctatatcgacaagctgaaaactgtgaatttggtactaaagaatacccaagccgctgaagccctggtaaagctgtacgagactaagctgtgcgaggaagaagctgtcatagccgataaaaacaacatcgagaaccttatcagcacactgaaacaatggcgctccgaggtcgatgagaagcgccaggtctttcacgccctggaagatgagttgcagaaggccaaggcgatatccgatgagatgttcaagacctataaggaacgcgacctggacttcgactggcataaagaaaaggccgatcaattggttgaaaggtggcaaaatgtccatgttcaaattgataatcggttgagggacttagaaggtatcggaaaatctttaaagtactacagagacacatatcatccacttgacgattggatccaacaggtggagaccacccagagaaaaattcaggaaaatcagcccgagaatagcaaaaccctggccacccagctaaatcaacagaaaatgctcgtcagcgagattgagatgaagcagtcaaagatggatgagtgccagaaatatgccgaacaatactctgccactgtaaaagattacgaactgcagacaatgacctaccgtgcgatggtggactcacagcagaaaagtcctgtgaagaggaggaggatgcaatccagcgcagacctcattatccaagagtttatggacctccggacccgttataccgcactcgtgaccctcatgacccaatatattaagtttgcaggcgattcattgaagcgactcgaagaggaggaaaaatcgctcgaggaagagaagaaggagcacgttgagaaagctaaggagctccagaagtgggtgagcaatatctccaaaaccctgaaagatgccgagaaagcaggaaaaccaccattctccaagcagaagatctcttccgaagagatttccactaaaaaagagcagctgtcagaggctctacaaaccattcagctgttcctagccaagcacggtgataagatgacggacgaggagcgaaatgaactggaaaagcaggtgaaaaccctgcaggaaagttataatctgctgttcagcgagtccctgaagcagttgcaggagtcgcagacttcgggggacgttaaggtggaggagaaactggacaaggtgattgctggtaccattgatcaaactacaggcgaagtcctgtccgtcttccaagccgtactgcggggtctcatcgattacgatacaggcattcggctactcgagacccagctgatgatctctggcctgatttcacccgaactgcggaaatgttttgaccttaaggacgctaagagccatgggctgatcgacgagcagattctgtgccagttaaaggaactctcaaaggcaaaagagatcatttcagcagcttcccccactacaatcccagtgttggatgctctggctcagagcatgattacggagagtatggccataaaggtactggagattctgcttagtactggtagcctcgtgattccggctaccggggaacaactcaccctgcagaaggcattccaacagaatttggttagctctgctctgtttagtaaagtgttggaacgccagaacatgtgcaaggatctgattgacccttgtaccagcgaaaaagtgagtcttatcgacatggtgcagcgatctactctgcaggaaaacaccggcatgtggcttctgcccgttcgcccgcaggaaggaggaagaatcactttgaagtgcggtaggaatatttctatcttgcgggcggcacacgaagggctgatcgacagagagacaatgttccgcctgctgagcgcacagctgctgagcgggggtctaattaacagcaacagtggacaacgaatgactgtggaagaggctgtgcgggagggagtgatagaccgggatactgcaagctccatcctgacctaccaggtccaaacaggcggaatcattcagagcaacccggccaaaaggctcaccgtggatgaggcagtgcaatgtgacctgatcacatcttcaagcgccctgcttgtgcttgaggcccagcggggttatgtgggactgatctggccccactctggagaaatctttcccacgagttcttcgctgcagcaggagcttatcaccaatgagttagcatacaaaatcttgaatggtaggcagaaaatagctgcgctatatattccagagagcagccaggtgatcggactggacgcggccaagcagctggggatcatagataataataccgctagcatcttgaaaaatatcaccctcccagataaaatgcctgatctgggtgatcttgaagcgtgtaaaaacgcccggcgatggctttctttctgtaaattccaaccgagcactgtgcacgactatcggcaggaagaggatgtgttcgatggcgaggaacctgtgaccacccagacttctgaggagactaagaagctttttctcagctatctaatgattaattcctacatggacgccaacactggccaaagattattactttacgacggcgatctggatgaagcggtggggatgctgctagagggctgccacgccgagttcgatggcaatactgcaattaaagaatgcctagacgtactttcaagtagtggtgtcttccttaacaacgcctcaggacgagaaaaggatgagtgcaccgcaacacctagctcttttaacaaatgccactgcggcgaaccagaacatgaggagacaccagaaaatagaaagtgcgctatagatgaagagttcaatgagatgaggaatactgttatcaattccgaattcagtcagagtggtaaactggcttcaaccattagtatcgaccccaaagtcaattcatcaccatcagtgtgcgtgccgagcctaattagctatttgactcagactgaacttgcagacatttctatgttaaggtcagacagcgagaacattctgaccaactacgagaatcagtccagggtggaaacaaacgaacgtgccaatgagtgtagtcactcaaaaaatatacagaacttcccatctgatctgatcgagaatcccatcatgaagtcaaaaatgagtaaattctgtggtgttaacgaaacggagaacgaggacaataccaatcgagactcccccatctttgactactcccctcgactctccgcactgctgtctcacgataagctgatgcacagtcaaggatcatttaacgatacccacacacccgagagtaatggaaacaagtgcgaggctcccgcgctgagcttcagcgataaaactatgctctccgggcagaggataggcgagaagtttcaggatcagttcctcgggatcgctgccatcaacatttctctccctggggagcaatacggacagaagtcattaaacatgattagctccaacccacaagtccagtaccataatgataaatatataagcaacacaagcggcgaggatgagaagactcaccccgggttccagcagatgccggaggacaaggaggatgaaagcgagatagaagagtatagctgcgccgtgacaccaggcggcgataccgataacgccatcgtcagcctgacatgtgcaactcctctgctagacgaaactatttctgcatccgactatgagacctccctgctgaatgatcagcagaataacactgggacagacacagattctgacgatgacttctacgacactccactgttcgaggacgatgatcatgactccctccttctggatggtgatgaccgcgactgcctccaccccgaagactacgacaccctgcaggaggagaatgacgaaaccgccagccccgccgacgtgttctatgatgtctctaaagaaaacgagaactccatggtacctcagggggccccggtcgggtcgctctcagttaagaacaaagcgcactgtctgcaagacttccttatggatgtggagaaagatgaattagactccggggaaaagattcacctgaatcctgtgggatcagacaaggtgaatggacaaagcttagaaaccgggagcgaaagagagtgcactaacatcctggagggagatgaatcagatagtctcacagactatgacatagttggaggaaaggagtccttcacagcaagtctcaaatttgacgattcaggtagctggcgcggaaggaaagaggagtatgtaacgggacaggaattccatagtgacacggaccatctcgatagcatgcaatctgaggagtcctacggcgactatatctacgacagtaatgatcaggatgatgacgatgatgacgggattgacgaggagggtgggggaattagagacgagaacgggaaaccccgctgccaaaatgtagccgaggacatggatatccagctgtgtgcctctatcctcaatgagaacagtgatgaaaatgagaatatcaacaccatgattttgctcgacaaaatgcacagttgctccagtctagagaagcagcaacgggtgaatgttgtccaacttgcttccccgtctgaaaacaatctggttacagaaaagagtaacctgccggaatacaccaccgaaattgccgggaagtctaaagaaaatctgctgaatcatgaaatggtgctcaaagatgtcttaccacccatcatcaaagatactgagtctgagaagacgttcggccccgcgagtatctcacacgacaacaacaacatctccagcacatccgagctgggtaccgacctggcaaacacaaaagtgaagctgatccagggcagtgagctgcccgagctgactgactccgtcaaaggaaaggacgaatatttcaaaaacatgactcccaaggttgactccagcctcgaccatatcatatgtactgagccggatcttattggtaagcccgccgaggagtcccacttgtccctgatcgccagtgtgactgataaggatcctcaagggaatgggtcagatttgattaaaggacgtgacggcaaatctgatatccttatcgaagacgaaacttcaatccagaagatgtacttaggcgaaggggaggtgctggtggagggtctggtggaggaggagaatcgccatctgaagctcctccctggcaagaatacgagagacagctttaaactaattaattcacagttccccttcccacagatcactaataacgaggagctaaaccaaaaagggtctttgaagaaagccactgttaccctcaaagatgagcccaataatctgcagatcatagtctcaaaatcccctgttcaattcgaaaatctggaagagatatttgacacgagcgtttcaaaggagattagtgacgacattacaagtgatatcacaagttgggaaggaaacacacacttcgaagaatccttcaccgacggcccagagaaagagctggatctttttacatacctgaagcactgcgctaagaacattaaagcaaaagacgttgcgaagcccaacgaagatgtgccctcccacgtgctcatcacagcgccccctatgaaggagcacctccagctgggcgtcaacaacacgaaggaaaagtcaacctcaacacagaaggactctcccctaaatgacatgatacagagcaacgatctgtgctctaaggagagcatctctggtggtgggacggagatcagccagttcacccccgagtcgattgaggcaaccctgtccatactttctcggaaacacgtggaggacgtcggcaaaaacgattttttgcagtccgaacgttgtgcaaacgggctcggaaatgacaattcctcgaacacactcaatacagattattcctttcttgaaattaataataaaaaagagcgcattgagcagcaactgcctaaagagcaagctctctccccaaggagccaggagaaggaggtccagatccccgagctgtcacaggtgttcgtggaagacgtgaaagatattctcaagagtcgtctaaaagagggacatatgaacccgcaggaggtagaggagcctagcgcatgtgccgacaccaagatactgatacagaatttgattaaacggatcaccaccagtcaactcgtgaacgaggcgtcaacggtgcccagcgatagtcagatgtcggacagcagtggcgtgagccccatgaccaactcttcagaactgaaaccagagagcagggacgaccccttctgcattggcaatctgaagtccgagctgctcctcaacattttaaagcaagatcaacatagccaaaaaattactggtgtgttcgaactcatgcgtgaactgactcacatggaatacgatctagaaaaacgcggaattacttctaaggtgctgccgctgcagctggaaaacatcttctacaagcttcttgccgacgggtatagcgagaaaatcgagcacgttggggattttaatcaaaaagcctgcagcactagtgagatgatggaagagaagcctcacatcctgggagatatcaagtcaaaagaaggaaattattactcccccaatctggagaccgtcaaggagattggcctggaatcttccacagtttgggccagcacactgcctcgcgacgaaaaactgaaggacctgtgcaacgactttccgagccatttggagtgcacaagtggatccaaggagatggctagtggagacagttctacggagcagtttagcagtgagctgcagcagtgcctccaacacaccgaaaaaatgcacgagtacctgacattgctccaggatatgaaaccgcctcttgataatcaggaatctctagataataaccttgaagctctgaagaatcaactccgccagcttgagaccttcgaactgggtttggcacccattgccgttatcctgagaaaagatatgaaactggctgaagaatttcttaagtcactcccctctgacttcccccgcggacatgtggaggaactgagcatatcccaccagtccctaaagacagctttctcaagcctatcaaatgtgtctagcgaacgcactaaacagatcatgctggccattgattccgagatgtcaaagttagctgtttcccatgaggaattcctgcacaagttaaaatcctttagtgattgggtgtccgagaaaagcaagtccgtgaaagacatagagatcgtaaacgtgcaagactccgaatacgtgaaaaaaagactggaatttctaaaggccaacaatgtgctcaaggacctcggccataccaagatgcaactcgaaacaactgccttcgatgtgcagttcttcatcagcgagtatgcccaggatctgagccctaaccagtctaaacagttgctccggctgctgaacacaacacagaaatgttttctggacgtgcaggagtctgtaaccacacaggtcgaacgcttagagacacagctccatctggagcaggatctggatgaccaaaagattgtggccgaacgccagcaggagtacaaagaaaagctgcaagggatctgcgatctactgacacagactgagaaccgcttaataggtcaccaggaggccttcatgataggggacggcacagttgagctgaagaaatatcagagtaagcaggaggaactccaaaaagatatgcagggctccgcacaggccctcgcggaggtggtcaagaatactgagaacttcctgaaagagaatggtgagaagctgagccaagaagacaaggccctcattgagcagaagctaaatgaagctaaaataaaatgtgagcagctgaacctgaaggccgagcaatcaaagaaggagctggacaaggtagtcacaactgccatcaaagaagagacagaaaaggtggcagcggttaagcagctggaggaaagcaagacaaaaatagagaatctgctggattggctcagcaatgtggacaaagacagtgaaagggcggggaccaagcataaacaggttatcgaacaaaatggcacacacttccaggagggtgacgggaagtctgctattggcgaggaagacgaggtcaacgggaatctgctggagactgatgtggacgggcaggttggcactacacaagagaaccttaatcagcagtaccaaaaagtaaaagctcagcacgaaaagattattagtcagcaccaagcagtcattatcgcgactcagtccgcccaggtgctgctggaaaagcagggtcaatatctttctccagaggagaaagagaagctgcagaagaacatgaaagaactgaaagtccactacgaaaccgcactagctgagagcgagaagaaaatgaaattgacacactcactgcaagaagaattagagaagttcgatgcagactacacggaatttgagcactggcttcagcagtccgaacaggaactggaaaacctggaagccggggccgacgacataaacggactcatgacaaaactgaagcggcaaaagagcttctctgaggacgtcatcagtcacaagggagacttgcgatatataacaatctccggtaaccgagttctggaagctgctaagtcctgttcaaagagggatggaggtaaagtggatacatccgccactcatcgagaagttcaacgtaaattagatcacgctacggatagattccgctcactgtattctaaatgcaacgtgctgggcaacaacctgaaggacctcgtggacaaataccagcactatgaagacgcatcgtgtggactcctggcaggtttacaggcttgcgaggctaccgcttccaagcatctcagcgagcccattgctgttgaccctaagaatctgcagcgccaactggaggaaacaaaggccctccagggacaaatctcctcacagcaggtcgcagtggagaaactcaaaaagacggctgaggtgctgctggacgccagaggctccttactccctgctaagaacgacatccagaagactcttgacgatatcgtgggccggtatgaggacctctccaagtcggtgaatgaaaggaacgagaagctacaaatcaccctcactagaagcctgtcagtccaggatggactagacgagatgcttgactggatggggaatgttgagtctagcctcaaggaacagggccaagttccactgaacagcacagccctccaggacattattagcaagaacatcatgctcgagcaagacattgccggacgtcagagcagcataaacgctatgaatgagaaggtgaaaaaatttatggagactacagatccgtctactgcctcatctttgcaggccaagatgaaggatttgtctgcaagattcagcgaagcctcgcataaacataaagaaaccctggctaagatggaagagctcaaaaccaaagtcgaactgttcgaaaacttgagcgagaaactgcagacattcctggaaactaagactcaagctctaaccgaggttgatgtgccaggcaaggatgtgactgaacttagtcagtatatgcaggaaagtactagcgaatttcttgagcacaaaaagcaccttgaggttctgcacagcctcctaaaagagatcagctcccacggccttccgtctgataaagctctggtgttggagaagaccaacaacctttcaaaaaagtttaaggagatggaggataccataaaggaaaagaaggaagcagtgacatcctgtcaggaacagctcgacgcttttcaggttctcgtcaagagcctaaagtcgtggatcaaggaaaccacgaagaaagtgcccattgttcagcccagtttcggggctgaagacctgggaaaaagtctggaggacacaaagaagctgcaggagaagtggagcttaaaaacacccgaaatacagaaagtaaataattcaggcatatcgctgtgcaacctgatcagcgctgtgacaacacctgctaaggccattgcggccgtgaaatccggaggggctgtcttgaacggcgaagggaccgccaccaatacagaggagttctgggcaaataagggcctcacttctattaagaaggacatgactgatattagtcacggatatgaggatttgggtttactcctgaaagataaaatcgccgaacttaacaccaagttatccaagctacaaaaagcccaagaggagagctccgccatgatgcagtggttacagaagatgaataaaactgcgaccaagtggcagcagaccccagctcccaccgacaccgaggccgtaaagactcaagttgaacagaataagtcctttgaagcagagctgaagcaaaacgtgaacaaggtgcaagagcttaaagacaaactcacagagttgctggaggaaaaccctgatactccggaggcccctcggtggaaacaaatgctgaccgaaatcgactctaagtggcaagagcttaaccagttaaccatcgatcgccagcagaagttggaggaatcctccaataacctgacacaattccagacagtcgaggctcagctgaagcaatggctggtggagaaggaattgatggtgtctgtgttggggccactttctatcgacccaaatatgctcaacactcagaggcaacaggtgcaaatactgttacaggagtttgccactcgcaagcctcagtacgagcagttgaccgccgcagggcaaggcatactgagccgtcccggagaggacccttccctgcgagggatcgtgaaggagcaattggccgcggtgactcaaaagtgggatagcctcaccggccagctctccgaccgctgtgactggatcgatcaggcaattgtgaagtctactcaatatcagtctctcctgagatctttatcagacaagctcagcgacctagacaacaaactgtctagttcactggccgtctccacacaccccgacgcaatgaatcagcagcttgagacggcacagaaaatgaaacaagaaattcagcaggagaagaagcagataaaggtggcccaggctctgtgcgaggacctgtccgctctggtgaaagaggaatatttgaaagccgaattgtctcgtcagctggagggaatactgaagagcttcaaagacgtcgagcagaaagcagaaaatcatgttcagcatctgcaatcagcatgtgcgtcttcccatcaatttcaacagatgagtagagatttccaggcgtggcttgacactaagaaggaggagcagaataagagccaccctatcagtgctaaactggatgttctggaaagtctgatcaaagaccacaaggatttctccaaaacgctgaccgcacagagccacatgtacgagaagactattgccgagggcgagaatctgctgctcaagacgcagggcagcgaaaaggctgccttgcagctgcagctgaatacaatcaaaacaaactgggacacattcaacaaacaggtcaaggagcgtgagaacaaattgaaggaatcacttgagaaggcattaaaatacaaagaacaggtggagacactgtggccatggatcgacaagtgccagaacaacctggaggaaatcaaattttgtctggatccagcagagggtgagaactccatcgctaaactcaagtcactgcaaaaggagatggatcagcacttcggcatggttgagctgctgaataataccgccaacagtctgctatcagtgtgtgagattgataaagaggtagtcactgacgagaataaatcactcattcagaaagtggacatggttacagagcagttgcactcgaaaaagttttgcctcgaaaatatgactcagaaatttaaagagttccaggaggtcagcaaggaatctaaacgccaactgcagtgtgcgaaagagcagctggacattcatgattccctgggcagccaggcctatagcaacaagtacctcacaatgttgcagacccagcagaagtcactgcaagccctgaagcaccaggtggacctggctaaacgcctggcccaggatctggtagtggaggcatccgactccaaaggtacaagcgacgtcttgttgcaagtggagacaatcgcccaggagcacagcactcttagccagcaggtggacgaaaagtgctctttccttgagacaaagctgcagggcatcggacatttccagaatactattcgtgaaatgttctctcaattcgctgagttcgacgacgaactggattcgatggcaccagttgggagagatgctgagacattacagaagcagaaggaaactattaaggcctttctaaaaaagctggaggcgctcatggccagcaatgataacgctaataaaacctgtaagatgatgctggcaacagaggaaacgagtcccgacctagtcgggatcaagagggatctggaagctctatctaagcaatgcaataaattgttggatagagcccaggcgcgagaagaacaggtggaggggaccataaaacggctcgaagagttttactctaaattaaaggagtttagcattctgctgcagaaagcggaggaacacgaggagtctcaggggccagtgggaatggaaaccgagacaatcaatcaacagcttaacatgtttaaggttttccaaaaggaggaaatagagccattgcaggggaagcagcaggacgtaaactggctgggacagggactgatacagtccgctgccaagagcacgagtacgcaggggctggagcacgacctggatgacgtcaacgctagatggaaaactctcaacaagaaggtcgcacaacgagcggctcaactgcaagaggcgctactccactgcgggaggtttcaggatgcgctggaatcactactctcgtggatggtggatactgaagagctggtggccaatcagaaaccaccatctgccgagtttaaagttgtgaaggctcagatccaagagcaaaagctgttgcaaaggctgctggatgaccggaagagcaccgtggaagtgatcaagcgtgagggagaaaagatcgccacaaccgctgagccagccgacaaagttaagattctgaaacagttgagcctgctggacagtcgctgggaggcccttctgaacaaagcagagaccaggaacaggcagctggaagggatctccgttgtggctcagcaattccacgagacacttgagccccttaatgagtggctgactaccatcgaaaaaagattagtcaattgtgaacctatcgggacccaggcgtccaagctcgaagaacagatcgctcagcacaaagccctggaagatgacatcatcaaccataataagcacctccaccaggcggtctccattggacaaagcctgaaagttctgtcatcgcgcgaggataaggacatggtgcaatctaagctggacttctctcaggtgtggtatatcgagatccaagagaaatcccattcacgtagtgagctgcttcagcaagccctctgtaacgccaagatttttggggaagacgaggtggagctgatgaactggctaaatgaagtgcacgataaactaagcaagctgagcgtgcaggattactctaccgaagggctatggaagcagcagtccgagctgcgagtactccaggaagatatccttttaagaaaacagaacgttgatcaagcactgctgaatgggctcgagctcttgaagcagacgacaggggacgaggtactcattattcaggataaattggaggcaatcaaagcacgatacaaagacatcaccaagctgtccactgacgtggccaagactctagaacaagccctgcagcttgcacgccgcctacacagcactcacgaggaattgtgtacctggctggacaaggttgaggtggaattgctgagctatgagacccaggtgcttaagggggaagaggctagccaagctcagatgcgccccaaagagttgaagaaggaagccaagaacaacaaggccctgctggattcgttgaacgaggtgtcaagtgctctactggaactggtgccctggagagcccgggaggggctggagaaaatggtggccgaggataatgagaggtaccggctggtctcagacacaataacccagaaggtagaggaaattgatgccgccatcctaaggtctcaacagtttgatcaagcagctgacgccgaattaagttggattacggaaacggaaaaaaagctcatgtcactgggcgatatccggcttgaacaagatcaaacctcagcccagttgcaggtgcagaagactttcaccatggaaattcttaggcacaaggacattattgacgatctcgttaagtctgggcacaaaatcatgacagcctgcagcgaggaagagaaacagagcatgaagaagaaactggataaagtgttaaagaattacgacaccatatgccaaataaactcagagcggtatctccagttagaacgggcccagagcctcgtcaatcagttctgggaaacctacgaggagttgtggccttggctgaccgaaacccagagcatcatctcccagctgcccgcgcccgccttggaatacgagaccctcagacagcaacaagaggaacaccgccagctccgcgaactgatagccgagcataaaccgcatattgataagatgaacaaaacgggtccccaattgctggagctgtccccgggggagggatttagcattcaggagaagtatgtggcagctgatacactgtactcacagatcaaggaagatgtcaaaaagagagctgttgcgctggatgaagctatttcacagagtacacagtttcacgacaaaatagatcagatactggaatctctggagcggattgtggagcgtttgcgtcaacccccaagcatctcagcagaagtcgagaagatcaaagaacagatttctgaaaataagaatgtgtcagtcgacatggagaaactgcagcccctgtacgagaccctgaagcaacgaggcgaggaaatgattgcgcgttcgggcgggaccgataaagatattagcgctaaagccgtccaggataaactcgatcagatggtctttatctgggaaaacatccataccctcgtcgaagagagggaggccaagctgctcgatgtgatggaactggcagaaaagttttggtgtgatcacatgtcccttatagtcaccatcaaagacactcaagactttattagagacctggaagaccccggaattgacccatctgtagttaaacagcaacaggaggccgcagaaaccatacgcgaagagatagacggattgcaggaggaattagatattgtgatcaatctggggagcgaacttattgccgcttgtggggaacctgataagcctatagtaaagaagtccattgacgaacttaattctgcttgggacagcttaaacaaggcatggaaggataggattgataagctggaagaggcgatgcaagctgcagtacagtaccaagatggcttgcaggcagtgtttgattgggtggacattgccggcggcaaactggcaagtatgtccccaatagggaccgacctggagacggtcaagcagcagatcgaggaactcaagcagtttaagtctgaagcctatcaacaacaaatagagatggaacgcctgaatcaccaggcagagctgcttcttaagaaagtcacagaggaatctgataagcacacagttcaagatccccttatggagctcaaactcatctgggacagtctcgaggaacgcattattaaccggcaacataaactggagggcgctctgctggcattaggacagttccagcacgcacttgacgaattactcgcctggctcactcacactgagggcctgcttagtgagcaaaaacccgtgggtggagatccaaaggcaatcgagattgagctggctaagcatcacgtgctgcaaaatgacgtcttggctcatcaaagcactgtcgaggccgttaacaaagcaggaaacgatctcatcgagtcctctgccggagaagaggcatctaatcttcagaacaaactcgaggtgctcaatcagagatggcagaacgtgctagagaagactgagcagcggaaacagcagcttgatggagcactgaggcaggcaaaaggtttccatggggagatcgaggacctccaacagtggctgacggacactgaacggcacttactcgccagcaagcctctggggggccttcctgaaaccgcaaaggagcaactaaacgttcacatggaagtgtgcgccgctttcgaagccaaggaggagacctacaaatccctgatgcaaaagggtcaacagatgctggctaggtgtccaaagtccgccgagactaacatagaccaggatataaacaatctcaaggaaaagtgggagtccgttgagactaaactcaatgagcgcaagaccaaactcgaagaagctcttaacctcgcaatggagttccataatagtttacaggactttattaattggctgacacaggccgaacaaaccctgaacgtagcctcaaggccctcccttattctagatacagtgctttttcagatcgacgaacataaggtgtttgccaacgaagtcaattcccatagagaacagataatcgagttggacaaaacggggacgcaccttaaatacttcagccagaagcaggatgtggtactgatcaaaaatttgttgatctcagtgcagagcaggtgggaaaaggtcgtacagcgcctcgtcgagagaggtcgatcccttgacgacgctcgaaaaagagcgaagcagtttcatgaggcatggagcaagcttatggagtggctggaggaatccgaaaaatctcttgacagcgaactcgagattgcgaatgaccccgataagatcaaaacacagctcgcgcagcacaaggagtttcagaagtctcttggtgccaagcatagcgtttacgatacaaccaatagaacaggtcgctccctgaaggaaaagacatctctggccgacgacaacctgaaactggacgacatgctcagcgagcttcgcgacaagtgggacaccatttgtggaaaatcggtcgagagacagaacaagctggaggaagctctcttatttagtgggcaattcacagacgcccttcaggctctcatagattggctgtaccgcgtggagccccagctagctgaggaccaacctgtgcacggtgacattgaccttgtgatgaacctcatcgataatcacaaggcctttcagaaggaactgggaaagcgtacttcaagtgtacaggctctgaaaaggtctgctagggaattaattgagggctcccgggacgacagcagctgggtcaaggtgcaaatgcaagaactgagtacacgctgggagaccgtgtgtgccctgtcaattagtaagcaaacaagattagaagctgctctgagacaagctgaagagttccactccgtggtgcacgcacttcttgagtggcttgctgaagcagagcaaactttaagattccacggcgtgctacctgacgacgaggacgcacttcgaacccttattgatcagcacaaagagttcatgaaaaagctggaagagaaacgcgcagagctcaacaaagccacaaccatgggggacacagtgctggcaatctgccacccagactctatcactactattaagcactggattaccattatacgggccagatttgaggaggtcctggcctgggctaagcagcaccagcagagactggcctcagctctggcgggcttgatcgcaaagcaggaactactggaagccttgctggcatggcttcagtgggccgagaccacgctcacagacaaggataaagaggtgatcccacaggagattgaagaggtcaaggcacttattgccgaacaccagactttcatggaggagatgactcggaagcagccagacgtagacaaggtaacaaaaacgtacaaaagaagggctgccgatccttcaagcttacagtcacatataccagtgttggacaagggtcgagccggtaggaagcggtttccagccagcagcctttatccttctggctcccaaacccaaatcgagaccaagaatcctcgagtgaatcttctggtcagcaaatggcagcaggtctggttgcttgcattagagcggaggcgaaaattgaatgatgctctggaccgcctggaggagcttagagaattcgcaaatttcgacttcgatatctggcgtaagaaatacatgcgctggatgaaccataagaaaagccgggttatggacttctttaggagaatagacaaagatcaagatggaaaaatcacacgtcaggagtttattgatggcattttgtcgagcaaatttcctacatcgagactggagatgtccgccgttgcagacatatttgatcgggatggagacgggtacatcgactattacgaatttgtggccgccctacaccccaacaaggatgcctacaaaccgattaccgatgcagacaagattgaagatgaggttacccgccaggtggccaagtgtaaatgcgccaagcgctttcaggtcgaacagataggcgacaacaaatatcgcgttagcttccagagtaatttcggtgattcccaacaattaaggctcgtacgtattctcaggagtaccgtgatggtccgagttggagggggatggatggctttagatgaatttttggtcaagaatgacccttgtcgcgtccatcatcatgggtcaaagatgctccgaagtgaaagcaacagctccattactaccacccagccaacaatcgctaaaggtagaactaacatggagctgagggaaaagtttatcctggccgatggggcttcacagggtatggctgcctttcgtccccgcggacgcaggtcccgtccgtccagcaggggagcatcccccaatcgcagtacatccgtttcctcgcaggctgcccaggctgcttctcctcaagtcccagcaacaacaaccccaaagggcactccaatccaaggttctaaacttcggcttcccggatatctgtccggcaaaggtttccactccggagaggatagtgggctcatcaccacagctgcggcccgcgtgaggacgcagtttgcagactccaaaaagacaccttctcgacctggatctcgagcaggcagcaaggcgggcagcagagcgagctcacgcaggggatcggacgcttccgacttcgatatctcagagatccaaagcgtgtgcagcgacgtggaaacagtcccacaaacccaccggcccactccccgcgctggatcgagacccagcacagctaagccatccaaaattcccaccccacagaggaagtctcccgcttcgaagctagataagagctctaaaagatag

SEQ ID NO: 115319 - DNA, 16374 bp, synthetic construct
  misc_feature 1..16374: note = Description of Artificial Sequence: Synthetic coding sequence
  source 1..16374: mol_type = other DNA
atggctggctacctgtcgccagctgcctacttgtacgtagaagagcaggaatatctgcaagcgtacgaagatgtcctggaaagatacaaagatgagcgggacaaggtgcagaagaaaacattcaccaaatggatcaaccaacacctgatgaaagtccgtaaacatgtcaacgatctttacgaggacctccgcgacggacacaacctcatttctcttctggaggtactcagtggggacacactgccccgtgaaaaaggacggatgcgtttccataggctccaaaatgtgcagatagccctggactatctgaagaggcggcaggttaagcttgtcaacattaggaacgacgacattaccgatggtaacccgaaactgaccttggggctgatctggacaattattctgcactttcaaatcagtgatattcacgtgaccggggagtctgaggatatgtccgccaaggaaaggctattactgtggacgcaacaggccaccgaaggctacgcagggattagatgcgaaaattttaccacgtgttggcgtgacggcaagctgttcaatgcaatcatccataagtatcgacccgatctcattgacatgaacacggtggcggtgcaatctaatctcgccaatctggaacacgcattttatgttgctgaaaagattggggtgatacgcttgctggaccctgaggatgtggacgtgagctcgccagacgaaaaatctgtgattacctatgtgagttcactttacgacgcttttcctaaggttccggaggggggggaagggatcggggctaacgacgtggaggtgaaatggattgagtatcagaacatggtgaactacctgattcagtggatccggcaccatgtaactacaatgtcagaacgtacttttccaaataatcccgttgagctgaaggctctgtataaccagtatctccagtttaaggaaaccgagatcccaccgaaagaaacggagaagagcaagatcaaaaggctttataagctcttggaaatctggatagaatttggtcgtatcaaattgctacagggttatcacccgaatgacatagagaaagagtggggaaaattgataatcgctatgctcgagcgggagaaagccctccgacctgaggtggagcgtctcgaaatgctgcaacagattgccaaccgggtgcagcgggattctgtgatttgcgaggataagctaatcctggccggaaacgccctgcagagtgatagcaagcggcttgagtcgggagtgcaattccagaatgaagccgagatcgctggatatattctcgaatgtgaaaatctgcttaggcagcacgtcatcgacgtgcagattctgattgatgggaagtactaccaggccgaccaactcgtgcaaagagtggctaagttgcgggacgagattatggccctgaggaacgagtgctcctccgtgtatagcaaaggccgcattctcaccaccgaacagacgaaactgatgataagtggcataacacagtcactgaattctgggtttgctcagaccctccatccgagcctaacctccggtctcacacagagcctaacacccagcctgaccagttcttcaatgacttcaggccttagctctggaatgacctcccggcttacacctagtgtgacacctgcctacacgcctggctttccctcaggcctggtacccaacttttctagcggcgtcgaaccaaactctctgcagactctgaagctgatgcagattagaaaaccgttgctgaagtcctccctcctggatcaaaatttgactgaggaagagataaatatgaagtttgttcaggatctgttaaactgggtagacgagatgcaggtacagttagataggactgagtggggatcggatttgcccagtgtcgagtcacacctcgagaaccataagaacgtccaccgggccattgaagaattcgagtcttccctgaaggaggccaaaatcagtgaaattcaaatgacagcaccgcttaagctcacctacgcagaaaaactgcacaggctagagtcacagtatgccaaacttctgaatacctcccgcaatcaggaacgccaccttgacacactccataacttcgtgagtcgggcaactaatgagctgatttggttgaacgaaaaagaggaggaagaagttgcctacgattggtcagaacgcaataccaacatcgccagaaaaaaggattatcacgccgagctcatgagggagctggaccagaaggaggaaaacattaagtcagtccaggagattgccgaacagctgctgcttgaaaatcatcctgcccgtctgactatcgaggcataccgggccgctatgcagacacagtggtcctggatcctacagctgtgccaatgcgtggagcagcacatcaaggagaatacagcctatttcgaattttttaacgatgccaaggaggcgacagattatcttcgcaacctgaaagatgctatacaacgaaagtatagctgcgaccggtccagctcaatccacaagcttgaggacctggtgcaggaatctatggaggaaaaagaagagctgttgcagtataaatcaacaattgcgaaccttatgggaaaagcgaagactatcattcaactgaagcccagaaatagcgactgccctctcaagacttccatcccgattaaggccatctgcgactataggcagatcgagattacaatctataaagacgacgaatgcgtgctggccaacaacagccatcgagcaaaatggaaagtgataagccccactggtaatgaagccatggtcccatctgtgtgtttcaccgtgcctccccctaacaaagaggccgtcgacttagcaaatagaatcgaacagcagtatcagaatgtgctaacactgtggcatgagtctcacatcaatatgaagagtgtggtgtcttggcactatttgattaatgagatcgatagaatcagagctagtaacgtcgctagtattaagactatgcttcctggcgagcatcagcaggttctctcgaacctgcagtccaggttcgaagacttcttggaggactctcaagaatcacaggtgttctcaggtagcgatataacccaacttgagaaggaagtgaatgtctgcaaacaatactaccaggagctcctcaaaagtgcggaacgcgaggagcaggaggagagtgtttacaatctctacatcagcgaagtgagaaatatcaggctccgcttggagaactgtgaggaccggcttattagacagattcggacgcccctggaacgggacgatttgcatgaaagtgtgtttcgaataactgagcaggaaaaactgaagaaagaactggagagactgaaggacgacttaggtactatcaccaacaagtgtgaagagttcttctctcaagcagctgcaagttcctccgtcccaacattgagatccgagttgaacgtggtgctgcaaaatatgaaccaagtgtatagcatgtctagcacctacattgacaaacttaaaactgtcaacctagtccttaagaacacacaggcagcagaggcgcttgttaaactctacgagactaagctctgtgaggaggaggccgtcatcgcagacaagaataatatcgaaaatctgatcagcacattaaaacaatggcggagcgaggtcgacgagaagagacaggtgttccacgccttagaagacgaactccagaaggcaaaagctatatccgatgagatgttcaagacttacaaggaacgagatttagattttgattggcataaggaaaaagccgatcaactggttgagcggtggcagaacgtgcacgtccaaatcgacaaccggctgcgagacctggaaggaattggaaaaagtttaaagtactatcgagatacctaccaccccctggacgattggatccaacaggtcgagacgacccagcgaaaaattcaggaaaaccaacccgaaaatagtaagactctcgctacccagctaaaccagcagaagatgttggtgagtgagattgagatgaagcaatcaaaaatggatgaatgtcagaagtatgccgagcagtactctgctactgtgaaggactatgaacttcagactatgacctaccgcgcgatggtggactctcagcagaagagtcctgttaaacgccggcgtatgcagagctccgctgatcttatcatccaggagttcatggatctgcggactagatataccgctttagttacccttatgactcagtacatcaagtttgcgggagatagcctgaagcggctggaagaggaagaaaaaagcttggaagaggaaaaaaaggagcatgtggaaaaggccaaagaactgcagaaatgggttagtaatatcagcaagacactcaaagatgccgagaaggccggcaagccccctttcagtaaacaaaagatttcctccgaggagattagcaccaaaaaggagcaactctctgaggctctgcagactatccaactatttctggctaaacatggggataagatgaccgatgaggagagaaatgagctcgagaagcaggtgaagaccctgcaggagtcttacaacctgctgttctccgagtctttaaagcagctgcaggagtcacagaccagtggagatgtaaaagtggaggaaaagatcgtagcagagcgtcaacaagaatataaggaaaaattgcaagggatctgtgatctgcttacccagaccgaaaacagactgatcggccaccaggaggcattcatgataggagacggcactgtggagttgaaaaaataccagagcaagcaggaggagttacagaaggacatgcaggggagcgcccaggccctggccgaggtggtgaaaaacactgagaattttttaaaagaaaacggggaaaaactgagtcaggaagacaaggcattaattgagcagaagttaaatgaggcaaaaattaaatgcgaacagttgaacctgaaggctgaacagtcaaaaaaagagctggacaaagtcgtgaccaccgccattaaagaggaaactgagaaggtcgcagcagtgaagcagcttgaggagtctaaaacgaaaatcgaaaacttgctagattggctgtcaaacgtggataaggactctgagcgggctggcacaaagcataagcaggtgatcgaacagaacggcactcactttcaagagggagacggaaaatctgctatcggggaagaagatgaggtaaatgggaacttgctcgaaacagacgtcgacggccaggttggcacgactcaggagaacttaaatcaacagtaccagaaagtaaaggctcaacatgagaaaatcatttctcagcatcaggcggtgatcatcgccactcagtcggcccaggtgctcctcgaaaagcaaggccagtacctgagtcctgaggagaaagagaaactccagaagaatatgaaagagctgaaggttcactacgaaaccgctctagcagaatctgaaaagaaaatgaagcttacacatagtttgcaagaagaactggaaaaattcgacgccgactatacagagtttgagcattggctacaacaatctgagcaggaacttgagaacctggaagcaggtgctgatgatattaacggtctcatgactaagttaaaaaggcaaaagtctttctcagaagacgttatctcgcacaaaggcgatctgcggtacatcacaataagtgggaaccgcgtgttagaggccgccaaatcttgctctaagcgggacggaggcaaggtggacacatccgccacacatagagaggtccagcgcaagttggaccacgcgactgatagattccggagcctgtacagcaaatgcaacgtcctggggaataacctgaaagatctagtggataagtaccagcattacgaagatgccagctgtgggctgctggcaggcctgcaggcttgcgaggctactgccagcaaacatttgtctgaaccgatcgctgtggaccctaagaacctgcagcgtcagctggaggaaaccaaggctctacaagggcagatcagcagccagcaagtcgctgtggagaagctcaaaaagacagcagaggtgctgcttgatgctagaggaagcttgcttcccgcgaaaaacgacatccagaaaacacttgatgacatcgtaggacgttacgaagatctgagcaagagcgtcaacgagcggaacgaaaagctgcagattactctgacccggtcattgagtgttcaagacgggctggacgaaatgctcgactggatggggaatgtggaatcatctcttaaggagcagggacaggttcccctgaactctacggcgctccaggacatcatttctaagaatatcatgttagagcaggacatcgcgggaaggcagtcatctatcaacgcgatgaatgaaaaggtgaagaagtttatggaaacaacagacccttctactgcgagctcactgcaagctaagatgaaggacctgagcgcaagattctctgaggcatcacacaaacataaagaaaccctagcgaagatggaagaactgaaaactaaggtcgaactttttgaaaatctgagcgaaaaattgcagacattcttggagacaaagacccaggcccttaccgaagtcgacgtgcctggcaaagacgtaaccgagttgtctcaatacatgcaggaaagcaccagcgagtttctcgaacataaaaaacacctggaagtgttgcatagtctgttgaaagaaataagcagccatggcctccctagtgataaagcattggtgttagagaagaccaataacctgtccaaaaaatttaaagagatggaagatacgattaaggagaagaaggaagccgtgactagttgccaggaacaactagacgctttccaagtcctcgtcaagtccttaaaatcttggataaaagagaccaccaaaaaggtccctatcgtccagccttctttcggcgctgaggatttgggcaagtccctggaggacaccaaaaagctccaagagaagtggagtctcaagacccccgagatacagaaagtgaataacagtggaatatcgctatgcaatctcattagtgccgtgaccacccccgctaaagccatcgcggctgtgaaaagtggtggggccgtacttaacggagaaggaacggcaaccaataccgaagagttttgggccaacaaggggttgacatcaataaagaaggacatgaccgatattagtcatgggtatgaggaccttgggctacttctcaaggacaaaatcgccgaactcaatactaaactttcaaaactgcaaaaggctcaagaagaatcatccgctatgatgcagtggcttcagaagatgaataagactgccaccaagtggcagcaaacaccggctcctactgacactgaggccgtgaagactcaagtcgaacagaataagtcattcgaggctgagttgaagcaaaatgtgaataaggtacaggaactcaaagacaagctgaccgagctgttggaagaaaaccctgataccccagaagcaccacggtggaaacaaatgcttactgaaatcgattcaaagtggcaggagttgaaccagctgaccatcgatcgtcagcagaagctcgaggagtcttcaaacaaccttacacagttccagactgttgaagctcagcttaagcagtggttggtcgaaaaagagcttatggtaagtgtactaggacctctgagtattgatccaaatatgttaaatacacagaggcagcaagtgcagatcctgcttcaggaattcgctaccaggaagccccagtatgaacagctcacagcagcaggacagggcatcctctcccgccctggggaagatccctctttgcggggcattgtcaaagaacagctggcagctgtgacccagaaatgggactctttgactggccagttgtcagatcgttgcgactggatcgatcaagcaatcgtgaagtccacacagtatcaatctctcctgcgcagcttgagcgataagttgtccgacctagacaataagctgtccagttctctcgccgtcagcacccatcctgatgcgatgaaccaacagctggagaccgcacagaagatgaaacaggagatccaacaggaaaaaaagcagattaaggtggcccaggccctttgtgaggacctgagtgcccttgtgaaggaggaatatctgaaggctgagctgtcccgtcagttggaggggatcttaaagtcattcaaggacgtggaacagaaagctgagaaccacgttcagcatttacaaagtgcctgcgcatcctcacaccagttccagcagatgtcaagggattttcaggcttggcttgacaccaaaaaggaggagcagaacaaaagtcatccaatctccgcaaagctagacgtgctggagtccctcattaaggaccacaaagacttctctaaaacgctcacggctcagtcccatatgtacgagaagacaatcgctgagggggagaacctgttactgaagacccagggcagcgaaaaagccgccctccaactgcaactgaatactatcaagactaattgggataccttcaacaagcaggttaaggagagagaaaataaactgaaggagagcttagagaaggccctgaagtataaagagcaggtagagaccctgtggccctggatagacaagtgccagaacaatctcgaggagatcaagttttgcttagaccccgcagagggcgagaatagcatcgctaagttgaaaagtctacaaaaagaaatggatcagcattttggtatggtcgagctcctcaataatacagcgaattccctcctctcagtgtgcgagatcgacaaggaggtggtcactgatgaaaataaatccttaattcaaaaggtggacatggtcacagagcagcttcattcgaagaaattttgcctcgagaatatgacgcagaagttcaaggagttccaggaagtgtccaaagaatcaaagaggcaattgcagtgtgccaaagagcagctggatatacacgattccttgggaagtcaggcttactccaacaagtaccttacaatgctgcagacccaacaaaagtcccttcaggccctcaagcaccaggtggatctcgccaagaggctggcccaggacctggtggtggaggcatctgatagtaagggcacgtcagacgtactgctgcaggtggaaacaatcgcacaggagcattccacattgtcacagcaggtggacgaaaaatgtagtttcctggagactaagctccagggaattggacattttcaaaacacaatacgggaaatgttcagtcagtttgctgagttcgacgatgagctcgacagcatggcccccgtgggacgagacgccgaaaccctgcagaagcagaaggagacaataaaggcattccttaagaagctggaggccctgatggcttccaacgataacgccaacaagacatgcaagatgatgctcgccactgaagaaacttctccagaccttgtcgggatcaagagagacctcgaggccctgagcaaacagtgcaataaacttctggaccgcgcgcaggctcgggaagagcaggtagaaggcaccattaagaggctggaagaattctatagcaagttgaaggagttctctatcctgctgcaaaaggctgaagaacacgaagaaagtcagggtccagtgggaatggaaactgagacgatcaaccagcagctcaacatgttcaaggttttccaaaaggaagagattgaacccctgcagggcaagcagcaagatgtgaactggctcgggcagggactgatccagtccgccgccaaatcgacctcaacgcagggcctcgagcatgatctggatgatgtgaacgctcgatggaaaaccctgaataaaaaggtggcccagagagctgctcagttacaagaggccctcctccactgcggccgattccaggatgcacttgagtcacttctcagttggatggttgataccgaagaacttgttgcgaaccaaaaacctccaagcgccgaattcaaggtggtcaaggcccaaatacaagaacagaagctgttacagcgactactcgacgacagaaaatcgactgttgaggtgataaagcgagagggagaaaagattgcaaccacagccgaaccagctgataaagtcaagatcctgaagcagctgagtctcctcgattctcgctgggaagctcttctcaataaggcagagacccgaaatcgacaattggagggcatatccgtggtggcccagcagttccatgagacgttagagcctctgaatgaatggttaaccacaatcgagaagaggctggtcaattgcgagcctataggcactcaagcaagtaagctggaggaacagatagcccaacacaaggcgctcgaagacgacatcattaaccacaataagcacctgcaccaggccgtctcgatcgggcagagccttaaagtgctctcatctagagaagacaaagatatggtgcagagcaagctcgactttagccaagtgtggtatatcgaaatccaagagaagtcccatagtaggtctgagctgttacagcaggccctgtgcaacgccaaaatatttggagaggacgaggtagagctcatgaactggcttaacgaggtgcacgacaagctgtctaaactctctgtgcaggactatagtaccgaagggctctggaagcagcagagcgaactacgcgttctccaggaggacattctgttgcgaaaacaaaacgttgatcaggcattgttgaatggccttgagctccttaaacagacgaccggcgacgaagtgttaatcatccaagacaagttggaagctatcaaggctcgttataaggatataaccaaactgtccacagatgttgcaaagacattggagcaggcgctgcagctggccaggcggttacatagcacccatgaggagttgtgcacctggctggataaagtcgaagtcgaacttcttagttacgaaacgcaggttctgaagggggaggaggcaagtcaagcccaaatgcgacccaaggaactgaagaaggaggctaagaataacaaagccctgttggattcactgaatgaggtcagctctgctctcctggagctggtcccatggcgagctagagaggggctcgagaagatggttgctgaggataacgaaaggtataggttggtcagtgacacaatcactcagaaagtggaagagatcgatgctgcaatcctgaggtctcaacaatttgatcaggctgctgacgccgaattgagttggattacggaaaccgaaaagaagctgatgagcttgggcgatatccgactcgagcaagatcaaactagtgctcagttacaagtccagaaaacatttaccatggagattctgcgacacaaggacataattgacgatttagtgaaatccgggcacaaaatcatgactgcttgttccgaggaggaaaagcagtccatgaaaaagaaacttgacaaggtgctcaaaaattacgatactatttgtcagattaatagcgagcgctatttacagctggaacgcgcccagtcactcgtcaatcagttctgggagacctatgaggagctttggccatggttgacagaaacacaatcaatcatttcccagctcccagccccggctctcgagtatgaaaccttgagacagcagcaagaggagcaccgtcagttgagggagctgattgccgagcataagccacatattgataaaatgaacaagacaggtccacagctgttagagttgagtcctggggaaggcttctccatccaggagaagtatgtggctgcagataccctgtacagtcagattaaagaggacgtaaaaaagagagctgtggcactcgacgaggcaatcagtcaatcgacacagttccacgacaagattgaccaaatccttgagagtttggagagaatcgtggaaagattgagacagccaccatccatcagcgccgaggtggaaaagatcaaagagcagatatcagagaataaaaacgtgagcgtggacatggaaaaattgcaacctctatatgagaccctcaagcagaggggcgaggagatgattgctcgttctggaggaaccgacaaggacatttcggctaaggctgtccaggacaaattagatcagatggtgttcatttgggagaacatccatactcttgtcgaggagagggaggctaagcttcttgacgttatggagctcgccgaaaaattttggtgcgatcatatgtctctcattgtcaccatcaaagacacacaggattttattcgcgatctggaggatccagggatcgacccttccgttgtgaaacagcagcaagaggcggccgaaacaatacgagaggaaatcgacggtctgcaagaggagctggatatcgtcattaacctcggaagtgagttgatcgctgcttgtggtgagcccgacaagcccatcgtcaaaaaatcaattgatgaactgaactccgcttgggattctttaaacaaggcatggaaagatcggatcgataagctggaggaggctatgcaggcagcagtacaatatcaggatgggctgcaggctgtcttcgactgggttgacatcgccggtggaaagttggcatccatgagccctatcggcaccgatctggagaccgtgaaacagcaaattgaagaattgaagcagttcaagtccgaggcctaccagcagcagattgaaatggagagattaaaccatcaagcggaattgttacttaaaaaagtaaccgaggaatccgacaaacacaccgtgcaggatcccttgatggaattgaagctgatttgggattctctcgaggagaggataatcaatcggcaacacaagctcgagggagccctgctggcgctgggccagtttcagcacgccctggacgaactgcttgcctggctgacccatacagagggcctcctgtctgagcaaaaaccagtaggaggcgaccctaaagcaatagagatcgagctggctaagcatcacgtgctgcagaatgacgtgctggctcatcagagcacagtcgaggcggtgaacaaggccggaaacgacctcatcgaatcatccgctggggaggaggcctctaacctgcaaaacaaacttgaggtcctgaatcagcgctggcagaatgtattagagaagactgaacagcgcaagcagcaacttgacggagccttacgccaggctaaaggtttccacggcgagatcgaagacctgcagcagtggctgaccgacaccgagagacacctcttggcgtcaaaacctctcggcggactcccagagacagcaaaggagcagctcaacgttcacatggaagtgtgtgccgctttcgaagcaaaagaggaaacatataagtccctgatgcagaagggccagcaaatgctagcacgttgtcctaaaagtgcggaaaccaacatagatcaggacatcaacaatcttaaagaaaagtgggaaagtgtggagaccaagctgaatgagcggaaaaccaaacttgaagaagccctaaatctcgcaatggagttccacaactcactccaagactttataaactggctaacccaggctgagcagacacttaatgttgcgagcagaccctctcttatcctggacacagtcctattccagatagacgaacacaaagtctttgcaaatgaagtgaacagccaccgcgaacagatcatcgaacttgacaagacagggacgcacttgaaatactttagccagaagcaggatgtcgtgctaatcaagaacctgctgatcagtgtccagtcgagatgggagaaggtggtgcaaagactggtcgaaagagggcgttccctagatgacgcgcggaagagggcaaagcagttccacgaagcctggagcaaattaatggaatggctcgaagaaagcgagaagtcgcttgattctgagctcgagattgctaacgaccctgacaagataaagacgcaactggcccagcacaaggaatttcagaaatcccttggcgcgaagcactctgtgtatgacacgactaaccgaactgggcggagcctgaaagagaagacctcattggccgatgataatttgaaactcgatgatatgctgtccgagctgcgggacaaatgggataccatatgtggaaagtccgtcgaacgccagaacaaactggaggaggctctcctcttcagtggccagtttaccgatgccttgcaggcgctgatagactggctatatcgggtggaaccccagctcgccgaagaccagcctgttcatggggatattgatctcgtgatgaacctgatcgataaccacaaagcattccaaaaggaactggggaagaggacatccagcgtgcaggccctgaaacgctcggctagggagctcatcgaaggctctcgggacgatagctcttgggtgaaagtgcagatgcaagagctgagcacccggtgggagacagtgtgtgcgctgtccatcagcaagcaaacccgcctcgaagctgcattgcggcaggcagaggaatttcactctgtcgtgcatgcactgctagaatggctcgccgaagcagagcaaactctgagatttcacggagtgctgcccgacgatgaggacgccctacggactctgatcgatcagcataaggaattcatgaaaaagcttgaagagaaaagagctgagttaaacaaggccaccaccatgggggataccgtattggccatctgccaccctgacagcattactaccattaaacactggattactattattagagcgaggttcgaggaggtgctggcctgggccaaacagcaccagcagaggctggctagcgcacttgctggtctcattgcgaagcaagagttgctcgaagcattgctggcatggctgcagtgggccgagactaccctgacagataaggataaggaggttattccccaagagattgaagaagttaaggcccttattgcggagcatcagaccttcatggaagaaatgacccgaaaacagcctgacgtggacaaggttaccaagacatataagcgaagggcggccgacccatcctctctgcagtctcacattcccgtgctggataaaggcagggccgggagaaagagatttcccgcctcttccctctatccttccggctcacagacacagatagagactaagaatccaagggtcaacctccttctgagggaattcgcaaacttcgatttcgatatctggcgtaaaaaatatatgaggtggatgaaccataagaagagtcgcgtgatggatttctttcggcggattgataaagatcaagacggcaaaatcactagacaggagtttatcgacggcatattgtcaagtaaatttcctaccagccggctagagatgtccgccgtggcggatatttttgaccgggacggagacggctacattgattactacgagttcgttgctgcgctgcaccctaataaagatgcctacaaaccgatcaccgatgctgacaagatcgaagacgaagtgacgcggcaggtggctaaatgcaaatgcgcaaaaagattccaggtagagcagatcggggacaacaaataccgggtgtccttccagagtaactttggagacagtcaacagttaagattggtcagaatactgcgaagtacagttatggttcgcgtaggcggaggctggatggcactggacgagttcctcgtgaagaatgacccatgcagggtgcaccaccacggaagcaagatgctaagaagtgagagtaactcctctatcacaacaacacagccaactattgccaagggcagaaccaacatggaattgcgtgagaagttcatcctggctgatggcgcttctcaaggaatggccgcatttagaccacgaggacgccgatccagaccatcaagccggggcgcctctccgaacagatctacatcggtaagttcacaagctgctcaggccgccagtccacaagtccctgccacgactacccccaaggggacccctatacaaggctcgaaactccggctgcccggctatctgtctggaaagggcttccactctggagaagacagtggcctgattactacagctgccgcccgcgtccggactcagttcgccgattcgaagaagactcctagtaggccaggctcccgagctggcagtaaagctggcagcagagccagttctcgaagaggcagcgacgcctcggattttgatatttcagagatccagtccgtctgttctgacgttgaaacagtgccacaaactcatcgaccaaccccccgtgctgggtctcgtcccagtacagccaaaccatcgaagattcctacaccacagaggaagtcgcctgccagtaaactggataagtcttctaagagatag

SEQ ID NO: 115320 - DNA, 9183 bp, synthetic construct
  misc_feature 1..9183: note = Description of Artificial Sequence: Synthetic coding sequence
  source 1..9183: mol_type = other DNA
atgcatagttcctcttactcttatcgctcctcagactccgtcttttctaacaccacctccacccggacttctttggacagcaatgaaaaccttcttttggttcattgcggacctaccctgataaatagttgtatctcattcggttccgagtcattcgacgggcacagactggagatgctccagcagatagcaaaccgggtccaaagagactccgtgatttgtgaggacaagctcatcctggccggaaatgccctccagagcgacagcaaaagacttgagtccggagtccagtttcagaatgaagccgagattgccggatacatcctagaatgcgagaacctgctgaggcagcacgtcattgatgtgcaaattcttattgatggcaagtattaccaggctgaccagctggtccagagggttgctaaactcagggatgagattatggctctaaggaacgaatgctcatccgtgtatagcaaaggccgcatcctgacgactgagcagactaagctcatgatctctggaataactcagagcctgaattccggattcgcccagacacttcacccatctctgacgtccggtctgacccagtcccttacaccatctctgaccagctctagtatgacctccgggttaagttcaggcatgacatcaaggctgaccccttccgtgacccccgcatatacacctggctttccgtctggtctcgtgcctaatttcagctccggagtggagcctaactcacttcagacactgaaactgatgcagatcagaaaaccccttttaaaaagcagtttgcttgatcaaaacctcactgaggaggaaattaacatgaagtttgtgcaagacctgcttaattgggtggacgagatgcaagtacagctcgaccggacagagtggggctccgacttgcccagcgtcgagtcacacttggagaatcataagaacgttcaccgtgccatcgaggagtttgagtcttccctgaaggaggccaagatttccgagattcagatgacggcacccctgaagcttacgtatgctgagaaattgcaccgcctagaatctcagtacgccaagctcttaaatactagccgcaatcaagaaagacaccttgatactcttcacaactttgtgagccgagcgaccaatgagctgatatggctgaacgaaaaagaggaggaagaggtggcctacgattggtctgagaggaataccaatattgcaaggaagaaggactatcatgcagagttaatgcgagagctggaccagaaggaggaaaatattaagtcagtgcaggagattgcagagcaactgttattagagaatcacccagctcgtctgacgatcgaggcctatcgagcagcaatgcagacccagtggtcctggattctgcagctgtgtcaatgtgtggagcagcacattaaggagaatacagcatattttgaattcttcaacgatgcgaaggaggccacggattatttacgaaacctaaaagacgctattcaacgcaaatattcttgtgatcgttccagctccatacacaagctggaggacctggtgcaggagagtatggaagagaaagaggagctactgcaatacaaaagcaccattgcaaatctgatgggaaaagccaagacgattattcagctgaaaccccgtaactcagactgccctctcaaaacaagcatcccaattaaagcgatctgtgactacagacagatcgaaatcacaatctacaaggacgacgagtgcgttctggccaataactctcaccgcgccaaatggaaggtgatctctcctaccgggaacgaggctatggtgcccagtgtgtgcttcaccgtgccaccacccaataaggaggcagtcgatttggccaatagaatcgaacagcagtaccagaatgtacttactttatggcacgaaagtcacattaacatgaagtccgtcgtctcctggcattacctgataaacgagatcgacagaattagggccagcaacgtggcttcaattaaaacaatgctacccggagaacaccaacaagttctgagcaacttgcagagtagattcgaggattttctcgaagattcacaagagagccaggttttttcaggttcagacattacccaacttgaaaaagaggtgaacgtctgcaagcagtactaccaggagcttctcaaatccgctgaacgggaggagcaggaggagagcgtatataacctgtacatcagtgaggtgcgcaatatcaggctgaggctggaaaattgcgaagatcgtctgattcgacagatacggactcctttggagcgcgatgatctgcatgaaagtgtatttcgcatcaccgagcaggaaaaattgaagaaggaattggagcgactgaaggatgatctgggaactattaccaataaatgcgaggagttctttagtcaggcagctgcgtcctccagcgtgcctacactgaggagtgagctgaacgtggtgttacagaatatgaatcaggtgtactcaatgtcaagcacgtacatagacaagctgaaaacagtgaacttggtgctaaaaaacacccaggccgcagaagccctcgtcaaactgtacgagacaaagctatgcgaagaggaggccgtgattgcggacaaaaacaacatcgaaaatctcatcagcaccctgaagcaatggaggtctgaagttgacgaaaagcgacaagtatttcatgccctcgaggacgagctgcagaaggccaaagctatatccgatgagatgttcaaaacctataaagaacgcgacctggactttgactggcataaggaaaaagccgatcagcttgtagagcggtggcagaatgtccatgtgcagatcgataatagactcagggacctggaaggaattggaaagtcccttaaatattacagagacacataccatcctcttgacgattggatccagcaggttgaaaccactcagaggaagattcaggagaatcaacccgagaattcaaagaccctggcgacacagcttaatcaacaaaaaatgttggtttcagaaatcgaaatgaagcagagcaaaatggatgagtgccagaaatacgccgaacagtacagcgcaactgtgaaggactatgagctccagactatgacatacagggctatggtggattctcaacagaaatcccctgtgaagcggagacgaatgcagtcaagcgctgacctcattatccaggaatttatggatctgagaacacggtataccgccttggtgactttgatgacacagtatataaagtttgccggagacagcttaaagcggctcgaagaggaggaaaaaagcctcgaggaggaaaagaaggagcatgtggagaaagctaaggaacttcaaaaatgggtaagtaacatctctaagacgctaaaagacgcagaaaaagcagggaaaccaccatttagcaagcagaagatcagctcagaggagatctccacaaaaaaggagcagctcagtgaagccctgcagaccattcaactgttcttagctaaacatggcgataaaatgaccgatgaagagaggaatgagctggagaagcaggtcaaaaccctgcaagagagctacaacctattgttcagtgaaagtctgaagcagttacaagagagccagacttccggcgatgtgaaggtcgaggagaagttagataaagtgatcgctggaaccatcgaccagaccaccggtgaagtgctgagcgtgtttcaggcagtgctgaggggactaatagattatgacactggaattagacttcttgagacgcagttgatgatcagcgggcttatctcgcccgagcttaggaagtgctttgatcttaaagatgcgaagagtcacggtctgatcgatgagcagattctttgccaactcaaagagctttcaaaggccaaagagattatctctgcagcatctccaaccactattccagtcttagatgccctcgctcaaagcatgatcaccgagtccatggcaattaaagtactggagatcctactgtcgactggctcactggtgatcccagccactggggagcagctgacacttcaaaaggctttccagcaaaatttggtgtcaagtgcccttttttctaaggtcctggagaggcagaatatgtgcaaggatctcattgacccctgcaccagcgaaaaagtctctctcatcgacatggttcagaggtcaacgctgcaggagaacactggcatgtggctcttgccagtgcgtccccaggagggcggccggattaccctgaaatgtggtcgaaacattagcatcctccgcgctgctcatgaaggtctgatagatagagagactatgtttaggttgctttcagcccagctgttgagcgggggcctgatcaactcaaactccggccagagaatgactgtggaagaagcagtcagagaaggtgtgattgaccgtgacacagctagttcaatactcacatatcaggtgcagacagggggaattatacaaagcaaccccgctaagaggctgacagtggacgaggcagtgcaatgtgacctgatcaccagttcctcagcccttctggtgctggaagcccaaaggggttatgtgggcctcatatggcctcattccggagaaattttccccacaagcagcagtctgcagcaggagctgattacgaacgagcttgcttataagatccttaatggccgccagaagatcgcggccctgtacatcccagaatcatcccaagtcatcgggctggacgcagcgaagcagcttggcatcatagacaataatacggctagcatccttaagaatattacactccctgataagatgccagacctgggcgatttagaagcttgtaaaaatgcaagaagatggctcagcttctgcaagtttcagccctctaccgtgcacgactatcgacaagaggaggatgtgttcgacggagaagaacctgtgactacccaaacctccgaggagaccaaaaaactgtttctctcatatttgatgattaactcttacatggacgctaatacaggccagcgtctgctgctgtacgacggcgacctggacgaggcagtggggatgttgctggagggttgccacgctgagttcgacggaaacactgcaatcaaggaatgcctggacgtgcttagcagttctggcgtattcctgaacaacgcctccgggcgcgagaaggacgagtgcaccgcaaccccttcctccttcaacaaatgtcactgcggagagccagaacacgaggagacaccggagaaccgcaagtgcgcaatcgacgaagagttcaacgaaatgcggaatactgttattaactcagaatttagtcagtcaggtaagttggcctcaactatctctattgacccaaaagtgaacagttctccctccgtgtgcgtgccttccctgatatcctatctgacacagactgaactggctgacatctctatgctgaggagcgactcagagaacatattgaccaactatgaaaaccagtctagagttgaaaccaacgagcgggctaatgagtgttctcattccaaaaacattcagaattttcctagtgatttaattgagaaccccatcatgaaatcaaagatgtccaaattttgcggcgtcaacgaaactgagaatgaagataacaccaacagagattcccccatcttcgattatagccctcggttaagcgccctcctcagccacgataaattgatgcactcacagggatcttttaacgacacccacactcctgaatccaacgggaacaagtgtgaagccccagcactttcctttagcgataagaccatgctgtccgggcaacggatcggggagaagttccaagatcaattcctgggaattgctgcaatcaatattagccttccgggcgaacagtacgggcagaagtcccttaatatgatatccagtaatcctcaggtacagtaccacaatgataaatacataagcaacacatcgggagaagacgagaagacccaccctggcttccagcagatgccggaagataaagaagacgagtccgaaatagaggagtactcttgtgcagtgactccaggaggggatactgacaacgcgatcgtgagcctgacatgcgccacacccttacttgacgagacaatctctgcctctgattacgaaacaagtctcctgaatgaccaacagaataataccggcactgacacagatagtgacgatgacttctacgacacgcccctgtttgaagacgacgaccacgattccctgctgcttgatggggacgacagggactgccttcacccggaggattacgatacgcttcaggaggagaacgacgagacggcatcccctgctgatgtgttttacgatgtctcgaaagagaacgagaacagcatggtcccacagggcgcgcccgtcggcagcctcagcgtcaagaataaggcccactgtctccaggattttctgatggacgtggaaaaagacgagcttgactcaggtgaaaagatccacctcaaccccgtcggtagcgacaaggtgaatggacagagtctggaaactggctctgaacgcgaatgcactaatatcctagaaggagacgagtccgacagtctcactgattatgacatcgtgggtggcaaggagtccttcacagcctccttgaagtttgatgatagcgggtcctggagaggccgcaaagaggaatacgtcacaggccaggagtttcattctgataccgaccacctggatagcatgcagtcagaggagagttatggagactacatctacgatagtaatgatcaggacgacgacgatgacgacggaattgacgaggaaggaggcggcatccgggatgagaatggtaaacctaggtgccagaatgtagccgaagacatggacatccagttatgcgctagcatactgaatgagaactctgatgaaaacgaaaacataaacactatgattctcctagacaagatgcacagctgctctagcctcgagaaacaacagagggtcaacgtcgtgcaactcgcctcgccctcagaaaataatctggtcaccgagaagtccaaccttcctgaatacaccaccgagattgccggcaagtcaaaagaaaacctgctgaaccatgaaatggtgttgaaggacgtcctccctccaatcattaaggacaccgaatctgaaaagacatttggcccggcttccataagtcacgataataataatattagctccacctcagagctgggaacagacctcgctaacaccaaagtcaagctgatacagggatctgagctaccagaactcacagatagtgttaaggggaaggacgaatacttcaagaacatgacccccaaagtggacagcagcctcgaccatattatttgcacggagcccgacctcataggcaagcctgctgaggagagccacctgtctctaattgcatctgtgacagataaggatccccagggaaatggcagcgacttgattaagggccgcgacggaaagagtgatatcttgattgaggatgaaacctcaatacagaagatgtacctcggagaaggggaggtattagtcgaggggctcgttgaggaggagaatcgccacctgaaactgctccctggaaagaacaccagagatagctttaaactcatcaattcacaattcccttttcctcagataaccaacaatgaggagctgaatcaaaaagggagcctcaaaaaggcaacagttaccttgaaggacgagcccaacaacctacagataattgtgtccaaatcaccagttcagttcgagaacctggaggagattttcgacacatctgtctccaaagagatctccgacgatatcaccagtgacattaccagctgggaagggaacactcactttgaggagtcttttacagatggacctgaaaaagagctggatctgttcacatacctgaagcactgcgcaaaaaatatcaaggcaaaagatgttgcgaagcccaatgaggatgtgccgtcccatgttctgattacagctcccccaatgaaagagcacttgcagttaggcgtgaacaacactaaagagaagtccacatctactcagaaggattctcccctgaacgacatgatccagtccaatgacctttgctcaaaagaaagcatttccggcggtggcactgagataagtcaattcactccagaatccatagaggccacccttagtattctgtcaaggaagcacgtggaagacgtcggaaagaacgattttctgcaaagcgagcgctgtgccaacggtctcggaaatgataactcctctaacaccctgaatacagactactcctttctggaaatcaacaataagaaagagaggatcgagcagcaactgccaaaagagcaggccctgagcccacggtcccaggaaaaagaggttcagatccccgagctctcgcaggtgttcgttgaagatgttaaggacatactcaaaagccgactgaaggaaggacacatgaatcctcaggaagttgaggagccttccgcctgcgccgataccaagatccttatccagaacttgattaagcgcatcacgacctcacaactggtaaatgaagccagtacagtgcccagtgacagtcagatgtccgatagtagcggcgtctcccctatgacaaattctagcgaactgaaaccagagagcagagatgatcccttctgcatcgggaatttgaaatctgagctgctcctgaacatcctgaaacaagatcagcactcacagaagattaccggggtcttcgaactgatgcgggaactcacccacatggaatacgatctggagaagagaggtatcacgtccaaggtactccctttgcagttagaaaatattttctacaagctgctggcagatggctatagcgagaaaattgagcacgtcggcgacttcaaccagaaggcgtgttctacgagcgagatgatggaggaaaagcctcacatcttgggggatattaaaagcaaagaagggaattattacagccccaatttggagaccgtgaaagaaataggtctggagtcgtcaaccgtgtgggccagcactcttccgcgagacgaaaagttgaaagacctgtgtaatgactttccctcccatttggagtgcacatctggatccaaggaaatggcaagtggcgacagcagtaccgaacagtag

SEQ ID NO: 115321 - DNA, 21741 bp, synthetic construct
  misc_feature 1..21741: note = Description of Artificial Sequence: Synthetic coding sequence
  source 1..21741: mol_type = other DNA
atgcactctagttcatacagctatcgtagtagcgacagtgttttttccaatactaccagtactcggaccagcctggactcaaacgaaaacctactgctcgttcactgtggccccaccctgattaattcatgcatatcgtttggtagtgagagttttgacggccacagactcgaaatgctgcaacagatagctaatcgggtacagagggactctgtgatctgtgaagataagctgatcctcgccggcaacgctctccagtccgacagtaagcgactcgagagtggggtgcaatttcaaaacgaggccgagatcgcagggtatatcttggagtgtgaaaacctgttgcggcagcatgtgatcgatgtgcaaattctgatcgacggaaagtactaccaggcagatcagctcgtccagagggtcgcaaagctgcgcgatgaaatcatggcactcagaaacgaatgtagctcggtctattccaaaggacgcatcctcacaacagaacagaccaagctgatgatctctggaattacacaaagtctaaacagtggctttgcccaaactctacatccttcgctgaccagcggccttacccagtccctcactccttccttgacctccagttcaatgacatcagggctgtcctcaggtatgacaagccgtctcactccttctgtaacacccgcatacacacctggatttccaagcggtctcgttcctaatttttcatcaggtgttgaacctaatagcctgcagactctaaagttaatgcagatcaggaagcccttacttaagtcaagccttcttgatcagaatctgaccgaggaggagatcaacatgaaattcgtgcaggaccttctgaattgggtggatgaaatgcaggtgcaacttgacaggaccgaatggggcagcgatcttcccagtgtggagagccacttggaaaaccataagaatgtgcaccgggccatcgaagaattcgagtcctctctcaaggaggccaagatctccgagattcaaatgaccgccccgttgaaattaacctatgctgaaaagctgcaccggcttgagtctcagtacgccaagctactgaacacaagccggaaccaagagcggcacctggatacactgcacaactttgttagccgagcgacaaatgagctgatttggcttaacgaaaaagaagaggaggaggtggcgtatgactggtcagagaggaatactaacatcgccaggaagaaagactaccacgcagagctcatgagagaactggaccagaaagaggaaaatatcaagtcagtccaggagattgctgaacagctcctcctcgagaaccaccccgctcgactgacaatcgaggcctaccgcgctgcgatgcagacgcagtggtcgtggatcctgcagctttgtcaatgcgtcgaacaacatattaaggaaaacactgcttatttcgagttctttaacgatgcaaaagaggcaaccgactatctgagaaatcttaaagacgcaatacagaggaagtatagttgcgaccgctccagctctatccataaactggaagatctggtccaggaaagcatggaagaaaaggaagaacttctacagtacaagagcactatagccaatcttatggggaaggccaaaactatcatacagctgaagcctcggaatagcgactgccccctgaaaactagcattcctatcaaagcaatctgtgactataggcagatagaaatcactatctacaaggacgatgaatgtgttcttgcaaacaattcccatcgggctaaatggaaagtgatatctcctaccggcaacgaagccatggtcccgagcgtgtgttttacggttcctcctcccaacaaggaggctgtcgatctggccaataggatagaacagcagtaccagaatgtacttaccctctggcacgaaagccacatcaatatgaagagcgtggtcagctggcactatctaataaacgagatcgataggatccgggcgagtaacgtggcttcaataaagaccatgctgcctggggaacaccagcaggtcctgagcaacctccagagcagatttgaagacttcctggaagatagccaggaatcccaggtgttctccgggagcgatatcactcagctcgagaaggaagtgaatgtttgcaagcaatactatcaggagctactgaagtccgctgaaagggaagagcaggaagaaagtgtgtataatctgtacattagcgaagttcggaacattagactgcggctggaaaattgcgaggatcggttaatccggcaaattagaactcctctggaaagggatgatctccacgagtccgtgtttcgaataactgagcaggagaagctgaaaaaagaactggagcgtctgaaggatgacctcggcaccatcacaaataagtgtgaggaattcttttcccaggccgccgccagttctagcgtccctactctgcgctctgaactaaacgtggtattacagaacatgaatcaagtctactccatgtcctccacttacatcgacaagttgaagaccgttaatctcgttctgaagaacacccaggctgcagaagccctggtcaagttgtatgagacgaagttgtgcgaggaggaggccgtgatcgccgacaagaataacatcgagaatctgatctcgactctcaaacagtggcgctcagaagtggacgagaaacgtcaggtgttccacgctctcgaggatgaattgcagaaggcgaaagcaatatcagatgagatgtttaagacatataaggagagggacctagacttcgactggcataaggaaaaggccgaccagttggtggaacgatggcaaaatgtgcacgtgcagattgacaatagactgcgggatttagagggcatcggcaagagcttgaaatattacagagacacttaccaccccctagacgattggattcaacaggtggagaccacacagagaaaaatccaagaaaatcagcctgaaaactctaaaactttggctacacagctcaatcaacagaaaatgctagtgagtgagatcgaaatgaaacagagtaagatggacgagtgtcagaagtacgccgagcaatactccgcgacagtcaaggactacgagcttcagaccatgacgtaccgagctatggtcgatagccagcaaaaaagtcccgttaagcgcagaagaatgcagtccagcgctgacctgatcatacaggagttcatggacttgcgcacacgctataccgcactggtgacactcatgacccagtacataaagtttgccggcgattccctaaaacggttagaggaagaagagaaatctctagaggaggagaagaaggagcacgtggagaaagccaaagaactccagaaatgggtgtcaaacatatctaaaacattaaaggatgccgagaaagcaggcaagccacccttttcaaaacagaaaataagtagtgaagaaatcagcacaaagaaggaacaacttagtgaggctttgcagacaatccaactgttcctagctaagcatggggacaaaatgacggatgaggaaagaaatgaactggaaaagcaggtgaagacgttgcaggaaagctacaacctgctgttcagcgaatcccttaagcagctacaggagtcccagacttcaggagatgtaaaggtggaagaaaagcttgacaaagttattgcagggaccattgatcagacaaccggggaggtgttaagtgtcttccaggccgttttacgcggcctaattgattacgacaccggcattaggctgttagagacacagctgatgatcagcgggctcatctcccccgaactgaggaaatgttttgatctgaaagacgccaaatctcacggcctgatcgatgagcagattctttgccagttgaaggagctatccaaagcgaaggagatcataagcgccgcttcacccaccactattccagtgcttgacgctctcgcccaatctatgatcactgagagcatggcgatcaaagtgctggagatacttctgagcaccggtagtttagtgattccagcaactggcgagcaactcacactgcagaaagcctttcaacagaaccttgtttcttctgcactgttttcaaaagtgcttgaaagacagaatatgtgcaaggacctgatcgacccttgtaccagcgagaaggtgagcctgatcgatatggtccagagaagcacgctgcaggagaacacaggcatgtggctcttgccggtccgaccccaggaggggggccggataaccctcaaatgcggacggaacatctcgattctgcgggcagcacacgagggtctcattgatagagaaactatgttccggctcttgagcgcccagctcctgtccggcggcctgatcaattcaaattctggccagagaatgactgtagaagaggctgttagggagggagttattgacagggacaccgcaagctctattctgacctaccaggtccagaccggcgggatcattcaatctaacccagccaaaaggctaaccgttgacgaagctgtacagtgtgaccttatcacctctagcagtgccctcttggttctggaggctcagcgcggatatgtgggactgatttggccacacagcggcgaaattttccccacaagctcttccttgcagcaggagcttatcacgaacgagttagcttacaaaatcctcaatggaagacagaagatcgcagctttatacatccccgagagttcacaagttatcggactggacgcagctaaacaactgggcattatagacaataacacagccagcatcttaaaaaacattaccctccccgataaaatgccagacctcggcgacctggaggcatgcaaaaatgccagacggtggttaagcttttgtaagttccagccaagcactgtgcacgactatcgccaggaggaagatgtgtttgacggggaagagcctgtgaccacgcaaacatcagaagaaactaaaaagctattcctgtcttacctgatgatcaactcttacatggacgcaaataccggtcagcgccttttgctgtacgacggggatctggacgaggcagttggcatgctcctcgagggatgccacgcggaatttgacgggaataccgcaatcaaagagtgcctagatgttctaagcagcagcggggtgtttctgaataatgctagcggaagagagaaagacgagtgtacagccacaccatcttccttcaacaagtgccactgcggggaaccagaacacgaggagactcccgagaaccgaaagtgtgccatagatgaggagttcaacgagatgcgaaacaccgtgattaactcagagttttctcagtcgggtaaactggcgagtactattagcattgaccccaaagtgaactcaagcccttcggtttgtgtgccatccctgatttcgtatttgacgcaaactgagctagccgacatatccatgctgcgctcagatagtgaaaatattcttactaattacgaaaatcagtctcgcgtggagactaacgagcgggccaacgagtgctctcacagcaagaacatacaaaacttcccctccgatttgattgaaaaccccattatgaagagcaagatgtcgaagttttgcggcgtgaatgaaaccgaaaacgaagacaatactaaccgcgattcccctattttcgactattccccaaggctgtccgctctgctcagccacgacaagctcatgcatagccaggggagctttaacgacacccataccccagagtcaaatggcaacaagtgcgaagcccctgccttgtccttcagtgacaaaacaatgctgtccggtcagaggattggcgagaagttccaggatcaattccttggaatagctgccatcaatattagtctcccgggtgagcagtacggacagaagtccctgaacatgatctctagtaacccccaggtccagtaccacaatgataagtacatttcaaacacgtccggtgaagacgaaaagacccacccggggttccaacagatgccggaggataaggaggacgagtcggagatagaggaatactcctgcgcggtgacacctggcggcgacacagataatgcaattgtgtcgttgacctgtgcgacgcctttgctggacgagaccatcagcgccagcgactacgagacttccttattgaacgatcagcaaaacaacacagggacggatacagacagtgatgacgacttttacgacaccccattgttcgaagatgatgatcatgacagcctgctgctggacggcgacgaccgggactgtctacaccctgaagattatgacacactacaggaggagaacgacgagacagcaagtcccgccgacgtgttctatgatgtcagtaaagaaaacgagaattctatggtgccgcaaggtgcacccgttggctccctgtctgttaaaaacaaggcccactgtttacaggatttcctcatggacgttgagaaggatgagctcgactcaggagaaaagattcacctgaatcccgttggatctgacaaggtgaacggacagtcactcgaaaccggaagtgaacgggagtgtactaacatcctggagggggatgaatccgattcgttgacggattacgacatcgtaggaggaaaagaaagtttcacagccagtctgaagttcgacgactccggttcttggcggggcagaaaagaagagtatgtcacaggccaggagtttcacagtgacaccgaccacctagactccatgcagagcgaggagtcatatggggactacatctacgattctaatgatcaggatgacgatgatgacgacggtattgacgaggaaggcgggggtattcgggatgaaaatggcaagccccggtgtcaaaatgtggctgaggatatggatatccagctctgtgcatctattttgaacgagaattccgatgagaacgagaacatcaatacaatgattctcctggataaaatgcattcttgctcatcactcgagaagcagcaaagagtcaatgtggttcaactcgcaagtcccagcgaaaacaatttagtgactgaaaagagtaatctgccggaatataccaccgagatagccggcaaaagcaaagagaacctcttgaatcacgagatggtcttaaaagacgtgctgcccccgattatcaaagatacagaatccgagaagaccttcggcccggcctccatctcccatgataataataacatctcttcaacaagcgagctcgggactgacctagcgaacacgaaagttaagctcatccaggggtctgaactgcctgaattgacagattcagtgaagggcaaggatgagtacttcaagaacatgacccccaaggtagatagcagtctcgaccatatcatatgtacagagcccgacctgatagggaagcccgctgaagagagtcatctgtccctgattgctagtgttaccgataaagaccctcaggggaatggaagcgatctgattaagggtagagacggcaagtctgacatccttatcgaggatgaaacaagtatccaaaagatgtacctaggcgaaggggaggtgctggtagaggggcttgtcgaggaggagaacaggcatctgaagcttctgcctggtaagaacaccagagattcttttaagctcataaatagccagttccccttcccgcagataactaataatgaagaattgaaccaaaagggcagcctcaaaaaggcgactgtgaccttgaaggatgagcccaacaatctgcagataattgtgtccaagtcacccgtgcaatttgagaatctggaggaaatctttgataccagtgtcagcaaagagatctccgatgacatcacatcagacatcacatcctgggagggaaatacccacttcgaggagagcttcaccgacggcccggagaaggagctggacttattcacctatttaaagcactgcgccaagaacatcaaggcaaaggatgtggccaaaccaaatgaagacgtgcctagccacgtgttgatcactgccccgcctatgaaagaacatctgcagctcggagtcaacaataccaaggagaaatcaacctccacccagaaagattctccccttaatgatatgatccagtcaaacgatctgtgcagtaaggaatccatctccgggggtggtactgagatctcccagtttacccccgagagcattgaagcaaccctgtccatactatcacggaaacatgtggaagatgtgggtaagaatgatttcctgcagagtgaaagatgcgccaacggattgggcaacgacaattccagtaacactctcaataccgattatagctttctggagataaacaacaaaaaggagagaatcgagcagcagctgccgaaggaacaggctttgagccctcgatctcaggagaaagaagtccaaattccagaactctcccaggtttttgtggaagatgtaaaagacattctgaagtcacggctgaaggagggacatatgaatccccaggaagttgaagaaccgagcgcatgcgcagacaccaagattctgatccagaatctgataaaacgaataaccacaagccagctggttaacgaagcatctaccgtgccctctgactcccaaatgagcgacagtagtggggtgtcgcctatgactaacagttcagagttaaaacccgaatcccgcgacgaccctttttgtatcgggaacttgaagtctgagctgttactgaatatcttgaagcaagaccagcattcccagaaaatcacaggcgtgttcgaactgatgagggagctgacccacatggagtacgatcttgagaagaggggaataacatcaaaggtcctgccactccagctggaaaacattttctacaaactgctcgcagacgggtattccgaaaaaatcgagcacgttggtgacttcaatcagaaggcctgttccactagcgaaatgatggaggagaaacctcacatcctaggggatatcaagagtaaagagggcaattactactctccgaacttagagaccgttaaagaaatcggactcgagagtagtacggtgtgggccagcacacttcccagggacgaaaagctgaaagacctctgcaatgacttccccagtcacctagagtgtaccagcggttccaaagagatggcaagtggtgacagctccaccgagcagttcagttctgaattacagcagtgcctgcagcacacagagaaaatgcacgaatacctgacactgctgcaggacatgaagcccccgctggacaaccaggagtcactcgataacaacctcgaagccttaaagaaccagctgaggcagctagaaacctttgaattaggtctggccccaattgcagtgatcctgagaaaagacatgaaacttgctgaggaattcctgaaatccctgccgtccgactttcctcgcggacacgtcgaggagttgtcaatctcccaccagtcccttaagaccgcattcagcagcctctcaaacgtgtcatcagaaagaaccaaacagatcatgttagccatagatagtgagatgagtaagttggctgttagccacgaggaatttctgcacaagctcaaatcattcagcgactgggtctctgagaagagcaaatcagtgaaggacattgagatcgtaaatgtacaggactctgagtatgtgaagaaacgactggagttcctgaaagccaataacgtgctaaaggatctaggccatacaaagatgcagttggaaactaccgccttcgacgtgcagtttttcatcagtgagtacgcccaggatctgtcccccaaccaatccaagcaactgctacgcctcctcaacaccacccagaaatgcttcttagacgtgcaagagtcagtgacaacacaagttgaacggctcgagacacaactgcatctcgaacaggacttggacgaccagaaaattgtcgcagaacggcagcaggagtacaaggaaaaattacaggggatctgcgatctcctcacacagaccgagaaccggctgattggtcaccaagaggcatttatgattggagatggtaccgtcgaacttaagaagtaccaaagcaaacaggaagaactccagaaggacatgcagggaagtgcacaagccctggccgaggtggtgaaaaataccgagaatttcctcaaggagaatggagaaaagctctctcaggaggacaaggctctcatagaacagaaattaaatgaggccaaaattaaatgcgagcaactaaacttaaaagccgagcaatcaaaaaaagaactggataaggtcgtcacaacagcgattaaagaagagactgaaaaagtggccgctgtcaaacagctggaagagtctaaaacaaaaattgaaaatctgctcgactggctgagtaacgtagacaaggatagtgagagggcgggcaccaagcataagcaggttatagaacagaacgggacacactttcaggagggcgacgggaagtcagcgatcggggaagaagatgaagtgaatgggaacctgctcgagacggacgtcgatgggcaggttggtaccacccaagagaatctgaaccaacagtaccaaaaggtcaaagcccaacacgaaaagattattagccagcatcaggccgtcatcatcgctactcaatcagcccaggtcctgcttgaaaagcagggacaatatttgtcaccagaggagaaagaaaagctgcagaagaacatgaaagagctcaaggtgcactacgagactgctttggccgagagtgaaaaaaaaatgaagctgacacacagtttgcaggaggaacttgaaaagtttgacgctgattatactgagttcgaacactggctccaacagtccgagcaggaactggagaaccttgaggctggagccgatgacattaatgggctaatgaccaagctcaagaggcagaagagtttctctgaggatgtaataagtcataagggtgatctgcggtatattaccattagcgggaaccgcgttcttgaagccgcaaaaagctgttcgaagcgcgacggaggcaaggtagacacctcagccacccaccgagaggttcagagaaaactagaccatgctacggaccgctttcgatccctgtactctaaatgcaatgtgcttggaaacaacctgaaagatctcgtcgataaatatcagcactatgaagacgcttcttgcggccttctggctggactccaggcatgtgaggcaaccgcctccaagcacctcagcgagccaatcgcagtggatcccaagaacctgcagcgacagctggaggagacaaaagccctacagggccagattagctctcagcaggtggccgtggagaagctgaagaaaacagccgaagtgctgttagacgcaagaggatccctgttgcctgccaaaaacgatatacagaagacactggatgacatcgtgggcagatacgaagacctgtcaaaatctgtcaatgagcgtaatgagaagctacagattaccctcacacggagtctgtctgtccaggacggccttgatgaaatgctggactggatggggaacgtcgaatcatctctgaaagagcagggacaagtcccactcaattccaccgcgctgcaagacatcatcagtaagaatattatgcttgagcaggatatcgcaggtcgacaaagcagcatcaacgcgatgaacgagaaagtgaaaaaatttatggaaaccacagacccgagtacagcaagctctctccaagccaagatgaaggatctaagcgccaggttctccgaggctagccataaacataaggaaacactagctaaaatggaggaattaaagacaaaagttgaattgttcgagaatctcagtgaaaaactccagacatttctggagacaaaaacccaagcactgactgaagtcgacgtgcctggcaaagacgtgaccgagctgtcacaatacatgcaagagtccacatctgaattcctcgagcacaaaaagcatctggaggtgttacactccctcttgaaagagatcagtagtcacggcctcccgtctgataaagccttggtgctcgagaagacaaataacttgagtaagaaattcaaggaaatggaagacacaatcaaagaaaagaaggaagcggtcacatcctgtcaagaacagctagacgctttccaggtgcttgtgaagtctctgaagagctggattaaggaaactacgaaaaaagtcccgattgtccagccaagtttcggagctgaagatctgggaaagagcctagaagacactaagaaactccaggagaaatggagcctcaaaacccccgaaattcagaaagtgaacaatagtggcatttctttatgcaatcttattagtgccgtgaccactcccgcgaaggccatcgccgccgtcaagtccggtggtgctgtgctgaatggagagggtaccgctacaaacacagaggaattctgggctaataagggactgaccagtataaaaaaagatatgacggatatttctcacggctacgaggacttgggcctcttgctaaaggacaagattgctgaactgaacacgaagctttctaagctccaaaaggcccaggaggaaagctccgccatgatgcaatggctgcaaaagatgaataagactgccaccaaatggcagcagaccccagccccaacagatactgaggcagtgaagacacaggtcgaacagaataagagctttgaagccgaattaaagcagaatgtcaataaggtccaggaactgaaggacaaactcacagagctgttagaagagaatccagacacccccgaagctccccggtggaaacagatgttaaccgagattgattccaagtggcaggagttgaaccagctcacgattgatcgccaacagaagcttgaagagtcctccaataatctgacccagttccagacggtcgaggcccagctgaaacagtggctggttgagaaggaactcatggtgagtgttttgggccctctgagcatagatcctaatatgctcaacacccagcgtcaacaggtccagattttgctccaagaattcgccactcggaagccgcagtatgagcaattgaccgccgcaggccaaggaattctgtcacgcccaggcgaagacccttcactcaggggcatcgtcaaagaacagctagccgccgtcactcagaagtgggatagccttaccggtcagctgtctgacaggtgcgactggatcgatcaggcaatagtgaaaagcacacagtatcagagtctgttgaggagtctttcagacaagttgtcagacctggataacaagctgtcctctagcctcgctgtgtcgacgcatcccgacgcaatgaatcagcaactggagacagcgcagaaaatgaagcaggaaatccagcaggagaaaaaacagattaaggtggcccaagcgctttgcgaggacctgtccgctctcgtcaaagaggagtatttgaaagccgagctatctagacagttggaagggattctgaaaagctttaaagatgtggagcaaaaagcagaaaatcacgtccagcacttacagtccgcttgtgcttcaagtcaccaattccagcagatgtcccgggattttcaggcctggctggatacaaagaaggaagaacagaacaaatcacacccaatatcagcgaaactggacgtgctagagtctcttattaaagatcacaaggacttttccaaaactctgactgctcagagccatatgtacgagaagactattgcagagggagaaaacctgttactgaagacgcaggggagcgagaaggccgcccttcagctccagttaaataccataaaaaccaattgggacactttcaacaaacaagtgaaggagcgcgaaaacaagctgaaggaatctctcgagaaagccctcaaatacaaggagcaggtggagacattgtggccctggattgacaagtgccagaacaatctagaagaaattaaattctgcctggatccagctgaaggtgagaattcaattgcaaagctgaagtcactgcagaaagagatggaccagcatttcggcatggtggagctgctgaacaatacggccaactccctgcttagcgtttgcgagatagacaaagaggtggtgacggatgagaacaaatccctaatccagaaagttgatatggtgacagagcaattgcacagcaaaaaattctgtctggagaacatgactcagaaattcaaggagttccaggaggttagtaaggaatcaaaacgccagctgcagtgcgcaaaagaacagctggacatccacgattccttgggctctcaggcctactccaataaatatcttactatgctccagacacagcaaaaaagccttcaggctctcaagcatcaggtcgatcttgccaaaaggctggcccaagacctcgtagtcgaagcatcagacagtaagggaactagcgacgtactgctgcaggtagaaacaattgcccaagaacactcaacgctgtcccagcaggttgatgagaagtgcagcttcctcgagaccaaactgcagggcattggacattttcaaaacacaatcagggagatgttcagccagtttgccgaattcgacgatgagttagatagcatggcaccagtgggccgggatgctgagaccctgcagaaacagaaagagacgataaaggcctttctgaaaaagctggaagccctgatggcgtccaatgacaacgcgaataagacatgtaagatgatgctagccactgaagagacctcccccgatctggtaggcatcaagcgtgacctggaggcactctccaagcaatgcaacaagctcttggaccgcgcccaagcccgggaggagcaggttgaaggaacaattaaacgacttgaagagttctacagcaaactgaaggaattttcgatccttctgcagaaagccgaggaacatgaggagtcgcagggacctgtgggtatggaaactgagaccattaaccagcaactgaacatgtttaaggtgttccaaaaggaagaaatcgagccgcttcaggggaagcagcaggacgttaactggctcggtcagggcctgatccagtctgctgcaaaaagtaccagcacacagggactggaacacgacctggatgatgttaatgccagatggaaaaccctcaataaaaaggtagcccagagagccgctcaactgcaggaggctttgctgcactgcgggcgttttcaggatgctctggaaagcctcctctcttggatggttgatacagaggagttggtcgcaaaccagaagccaccgtctgcggaattcaaggttgtcaaagctcagattcaagagcaaaaactgcttcagcgtctgcttgatgaccgaaagagtacagtagaggtaatcaaaagggagggagaaaagattgcaaccaccgctgagccggccgacaaggtgaagatcctgaagcagctgagtttactcgacagcagatgggaggcactcttgaataaagctgagacccgcaaccgacaattggagggaatttctgtggtggctcagcagttccacgagacacttgaacctctcaacgagtggttaacaacaatagagaaaaggcttgtcaactgtgaacctatcggaactcaggcgagcaagctcgaggaacagatcgcacaacacaaggccctggaagacgacataattaatcataacaagcatctccatcaagcagtgagtatcggtcagtccctgaaggtgctgtccagcagagaggacaaggacatggtccagtccaagctcgatttcagtcaagtctggtacatagagattcaggaaaagtcgcacagtaggagtgagctcctgcagcaggcactgtgcaatgcaaagatttttggagaagatgaagtggagctgatgaattggcttaacgaggttcatgataaattatcgaagctgagtgttcaggactactccacggaggggttatggaagcagcagtccgagcttcgcgtccttcaggaggacatcttactgcggaaacagaacgtcgatcaggccttactcaacggccttgaactcctgaaacagactaccggagatgaggtacttattatccaagataagcttgaagccatcaaggctagatataaagatatcacgaagctgagcacggatgtggctaaaacgctggagcaagccctgcagctagctaggaggcttcatagtacacacgaggaactttgtacctggctcgacaaagttgaagtggagttgctctcgtacgagacacaggtcctaaaaggtgaggaagcctcacaggcacagatgcggccaaaagagctgaagaaagaggccaaaaacaataaagcactgctggatagcttaaatgaggtcagcagcgccttgctcgagttggttccctggagagcacgggaggggctggaaaagatggtggctgaagataatgagagatatagactcgtaagcgacacaattacgcagaaagtggaggagatcgacgcggcgatcctgcggtctcagcagttcgatcaggctgccgacgcagaactgagttggattacggagacagagaaaaagctgatgtcattaggagatatcaggttggaacaggatcagacctccgctcaactgcaagtccagaagacttttacaatggagatacttcggcacaaggacataatcgacgacctggttaagagcggccataagattatgacagcgtgctcagaagaagaaaagcagagcatgaagaaaaagctggataaagttttgaaaaactatgacacgatctgtcagataaactccgaaaggtatctccaacttgagagggcccagagcctcgtcaaccagttttgggagacctatgaggaactctggccatggctgaccgaaacgcagtccattatatcccagctgccagctcctgcgctcgagtatgagacgctgagacaacagcaggaagagcaccgacagcttagggaactgatagccgagcacaagccgcacattgacaaaatgaataaaaccggcccccaactccttgagctgtcacccggggaaggattttcaattcaggagaaatatgtggctgctgatacgctttacagccagatcaaagaggatgtgaagaagagggcagttgcccttgatgaagctatcagccaatccacccagttccacgacaagatcgaccaaatcctcgaatccctcgagaggattgttgaaagactccgccaaccccctagcatttccgcagaagttgaaaaaattaaagaacagatcagcgaaaataagaacgtcagcgttgatatggagaaactgcagccactgtatgagacacttaagcagcgtggtgaggaaatgattgcacgtagtggcggaacagataaagacatcagcgccaaggcagtgcaggacaaattggatcaaatggtcttcatttgggagaatatacatacattggtcgaggagcgcgaagccaagctcttggatgtaatggagctggctgagaagttctggtgcgaccatatgtcgctgatcgttacaatcaaggacacccaggacttcattagagatttggaagatcccgggatcgatccgtccgttgtgaagcaacaacaggaggcagcagaaacaattagggaggaaatcgatggtctgcaagaggagctagacattgtcattaatttaggctcagagttgatcgcagcgtgcggagagccggataaacccatcgtgaagaaatcaattgacgaactgaactccgcctgggacagcctcaataaagcctggaaggaccgaatcgacaaattggaggaagccatgcaggctgccgtgcagtaccaagatgggctgcaagccgtatttgactgggtcgacattgcaggaggcaagctggcatctatgagtcctatcggaacagatcttgaaacagttaaacagcagatcgaggaactaaaacagtttaaaagcgaggcttaccagcagcagatagaaatggaacgcctgaatcatcaagccgaactgctgctgaagaaagtgacggaggagtccgacaaacatactgttcaggaccctcttatggagctgaagctgatttgggactcactggaagaaagaattattaacaggcagcataagttggaaggagctctcttagccctgggccagttccagcatgcccttgacgagctactggcgtggctgactcacacagagggcttgctgtccgagcagaaacccgtaggaggcgacccaaaagcgatcgaaatagaattggctaagcaccacgtgctgcagaatgatgttcttgcccaccagtcgacagtggaagctgtgaataaagctggcaatgaccttattgaatcgagtgctggtgaggaagcatcaaatctgcagaataaactggaagtcctgaatcagcgctggcagaatgtgctggagaagaccgagcagaggaagcagcagctggacggagcactacgtcaagccaaaggctttcacggcgagatcgaagatttgcagcagtggctgaccgatactgagaggcacttattagctagtaaacccttgggcggcctgccggagactgccaaggagcagctaaacgtgcacatggaagtgtgcgcagccttcgaagcaaaagaggagacgtataaatcccttatgcaaaaaggtcagcagatgctcgctcgctgcccaaaaagcgccgagacaaatatcgaccaggatattaacaatcttaaggaaaagtgggaatccgttgagaccaaactgaatgagaggaagaccaagctggaggaggccctgaatctcgccatggaatttcataactctctgcaagatttcatcaactggctcacccaggccgagcaaacactcaatgtggctagcaggccgagcctaatcttagatacggtgctgttccaaatagacgaacacaaagtgtttgccaatgaggtgaacagtcacagagaacagatcatagagctcgacaagaccggcacacatctcaagtatttctctcaaaaacaggacgtggtcctgatcaagaacttacttatatctgtacagtcccgatgggaaaaagttgtccagagattggtcgaacgaggccgaagccttgatgacgcgaggaagagggcgaagcagtttcacgaggcttggtccaagctgatggagtggctcgaggagtccgaaaaaagcctcgactccgagctggagatagccaacgatccagataaaatcaagacacagctcgcacagcataaggaatttcagaaatcactgggcgcgaagcactccgtttacgacactacaaacagaacaggacgatctctgaaagaaaagacaagtctagcggatgataacctcaaattagatgatatgctaagtgagcttagagacaaatgggatacaatatgcggcaagagcgtcgaaagacagaataaactggaagaggccttactgttctcaggacagtttaccgatgcactgcaggcgttaatcgactggttataccgggtggagccccaacttgctgaagatcagcccgtccacggagacatcgacctcgtgatgaatttaatagacaaccataaggctttccagaaagaactgggtaagcgaacgagctccgtacaggccctcaaacgctccgctcgagagctaattgaaggctctagggatgattcgagttgggtgaaggtacagatgcaggagctgtcaactcggtgggaaaccgtctgcgctctgagtatcagtaaacagacccggctggaggccgctcttagacaggccgaagaatttcatagcgttgtccacgcactgctggaatggctggcagaggccgaacaaactctaagattccacggggtacttcccgatgatgaagacgcactgagaaccctgattgatcaacacaaagagttcatgaaaaagctggaagagaagcgcgccgagctgaacaaggctaccactatgggcgatacagtgcttgctatttgtcatccagattctatcacaactatcaagcactggattaccatcattcgggcccgttttgaggaggtgctggcgtgggcaaagcagcatcagcagcgtttagcgtcagcgttagccggtctgatcgctaaacaagagttgctggaggccctgctcgcgtggctccagtgggccgaaactacactgactgacaaagacaaagaagtgattcctcaggagatcgaggaagtgaaggcattgattgccgagcaccagacattcatggaggagatgacaaggaaacagccagatgtcgacaaagtcaccaaaacctataagagacgcgcggctgatccaagcagtctccagtcacatataccagtgttggacaaaggaagagcagggagaaagagattcccggcaagtagcctttacccttcgggcagccagacacaaattgaaacaaagaaccctagagtgaatctcctggtgtcaaaatggcagcaggtgtggctgctcgctttagagaggaggaggaagctcaacgacgctctggaccgcctggaagaactgagagagttcgcaaacttcgactttgacatatggcgcaagaagtatatgaggtggatgaaccacaaaaagtctcgtgtgatggactttttccgtcgcatcgataaggatcaggatggcaaaattactcgccaggagtttatcgacggcattctgagtagtaaattccccacatccaggcttgagatgtcagcggtcgcagacatcttcgacagggacggggacggctacattgactactatgagttcgtagcagctctccatcctaataaggacgcctataaacccattaccgacgccgacaagatagaagacgaggttactaggcaggtggccaaatgtaaatgcgctaaaaggtttcaagtggaacaaataggggacaacaagtatagagtcagtttccaatctaacttcggggattcccagcagcttcgacttgtgcggatcttgcggagcactgtaatggtacgggtggggggcggctggatggcgctggatgaatttttggtgaagaacgatccctgccgggttcatcaccacggatccaagatgctgcgctctgaatccaacagttccattacaacaactcagccaacaatcgctaagggtcgtaccaatatggaacttagggagaaattcatccttgcagacggcgcttcgcagggtatggccgcatttcgtccccgcggaaggagaagtaggccgagcagccgcggcgcgtcccctaatagatctacaagcgttagctcacaagcagcacaagccgcatccccccaggtcccagccactaccacccctaaaggcacccctattcagggcagcaagctgaggttgcctgggtacctcagcgggaaaggcttccactcaggggaagattccgggctcatcacaactgcagccgcaagagtccgaacgcagttcgccgactccaagaaaacaccctccagaccagggagtcgcgccgggtccaaggcgggatctcgagcatcctctaggcggggatctgacgcctcggacttcgacatatcagagattcaaagtgtgtgtagcgatgttgagaccgtgccacagacgcacagacctacacctcgcgcgggatcgcgccctagcactgccaaaccctccaagatccccacccctcagaggaaaagcccagcgtctaaattagacaagagctcaaaaaggtag

SEQ ID NO: 115322 - DNA, 768 bp, synthetic construct
  misc_feature 1..768: note = Description of Artificial Sequence: Synthetic coding sequence
  source 1..768: mol_type = other DNA
atgaataaaactggcccacaactgctggagctgtcgccgggcgagggtttctctattcaggagaagtatgtcgccgctgacaccctgtattctcagattaaggaggatgttaagaagcgtgcggtggccttggatgaggctatttcccagtccacccagttccatgataaaattgatcagatcttggagtcactcgagagaatagtcgagagactgcgccaacccccaagcatctctgccgaggtcgagaagattaaagaacaaatatcagaaaataagaatgtgagcgtagacatggagaaactccagcccctttacgagactctaaaacagagaggtgaagagatgatagcccgatccggcggcactgacaaagacatatctgcgaaggcggtgcaggataagctggaccaaatggtgttcatctgggagaatattcacactctggtcgaggagcgcgaggcgaagctgctggacgtcatggaattggctgaaaagttctggtgcgaccacatgagcctgatcgtgactatcaaagacacacaggactttatcagggatcttgaggacccagggatagacccctcagtagtcaaacaacaacaggaggctgcggagactatccgagaggagattgacggcttgcaggaagagttagatatcgtcatcaaccttggaagcgaacttattgccgcgtgtggcgagccagataagccaattgtgaaaaaaagcatcgacgaattgaattccatgggatttagtaaatag

SEQ ID NO: 115323 - DNA, 1359 bp, synthetic construct
  misc_feature 1..1359: note = Description of Artificial Sequence: Synthetic coding sequence
  source 1..1359: mol_type = other DNA
atgtttcccgaccagcccgagaagcctctgaacctggctcacatcgtgccaccaagacccgttaccagcatgaatgatactctgttttcccactctgttcccagttctggtagtccatttatcactcgccgattgcccgagggtattagtgcaagctcacccgtcgccgaggaacattcgttgatcaaactttatgttaaccagttggaccatggggcccggtcccctcccaaggacagcgaggttgaacagaacaagctgctggcgagagcggctccagctttcctaaaaggcaaggggatccagtatagtctgaacgtcgccgaccgccttgccgatgagcacgtgctgataggcctttacgtcaatatgctcagaaacaacccaagctgcatgctcgagtcctccaatcgactggacgaggagcaccgcctgatcgcccgctatgctgcacgtctagcagccgagtcgagcagcagccagcctccccagcagcgatccgcaccagatataagcttcaccattgatgccaataaacaacagcgacaacttattgccgagcttgagaacaagaacagagaaatcctgcaagagatacagaggctgaggcttgagcacgaacaagccagccaacccacccctgagaaggcacagcagaaccctacactcctcgccgagttacgtctgctccgacaacgcaaagacgagctagaacaaaggatgagcgccctccaagaatccaggcgggaattaatggtgcagctggagggcctcatgaaactgctaaagacccagggggccggtagtccccggtctagtcccagtcacactatttcccggccaatccccatgccaatccggtctgcatctgcatgtagtactcctacgcacactccccaagattctctaaccggggtgggcggcgatgttcaggaagcctttgcacaatcctcacgccggaatctccgtaatgatttgctggtggctgccgactccataacaaacacaatgtccagcctcgttaaggaactgaattctgaagtgggctctgagaccgagtctaacgtggactcagaatttgcaaggacccaatttgaggaccttgtcccgagccccacttccgagaaggcattcctggcacagatccatgcacgcaagccaggttacatccatagtggagctactacatctaccatgaggggggatatggtcacagaagacgccgatccgtacgtgcaacccgaagatgaaaattacgaaaatgacagcgtcaggcagcttgaaaatgaactgcagatggaggagtatctgaagcagaagctccaggacgaggcatatcaggtgagtctgcaggggtag

SEQ ID NO: 115324 - DNA, 1116 bp, synthetic construct
  misc_feature 1..1116: note = Description of Artificial Sequence: Synthetic coding sequence
  source 1..1116: mol_type = other DNA
atgatcgaggatagcggaaaaagagggaacacaatggcagagcggaggcagctgttcgctgaaatgagggcccaggacctggatcggattcgacttagcacctatcggaccgcgtgcaagctcaggtttgttcagaagaaatgtaacctacacctggtagacatttggaacgtgatcgaagctctgcgtgagaacgctctaaacaacctggaccccaacaccgagctcaacgtaagcaggctcgaggctgttctttccaccattttctatcagctgaataagcgaatgcccactactcatcagatccatgtcgagcagtcaatctcactgctgctgaatttcctgctggccgcattcgacccggagggacacggtaaaattagcgtctttgccgtcaaaatggctctcgccactctgtgcggcggtaaaattatggataagctcaggtatatcttctctatgatcagcgatagcagcggcgttatggtctacggacggtacgaccagttcctccgggaggtgctcaagctacctaccgcggtcttcgagggccccagttttggctacaccgagcagagcgccagatcatgcttcagccagcagaaaaaagtcaccttaaacgggtttttggacaccttgatgtcagacccccctccccagtgcctggtgtggctgccactgcttcataggctagctaatgtggaaaacgtatttcaccccgtggagtgctcatactgtcacagcgagtccatgatgggattccgataccgatgtcagcagtgtcacaactatcagctctgccaagattgtttctggcgggggcacgccggtggaagccattccaatcagcaccagatgaaggaatacacctcttggaaatctcctgcaaagaaactaacaaacgcactcagcaagtcgcttagctgcgccagctcgagagaacctctccatcctatgtttcctgatcagcctgagaagccccttaacctggctcacatagtcccccccaggccggttacttctatgaatgatacactgttttctcactcggtgccgagttccgggtcaccatttatcactcggagttccgatggtgcatttggcggatgtgtgtag

SEQ ID NO: 115325 - DNA, 1188 bp, synthetic construct
  misc_feature 1..1188: note = Description of Artificial Sequence: Synthetic coding sequence
  source 1..1188: mol_type = other DNA
atgttcccagaccagccagagaagccacttaatctggcacacatcgtaccaccaagacccgtaacatctatgaatgacaccctgttctcccactctgtcccctccagcgggtccccattcattactcgtaggctgcccgagggcatcagtgcttcctctcctgtcgcagaggaacattccctgataaaactgtacgtcaaccagcttgaccacggtgcacgtatgctggagtcttctaacagactagatgaagaacatcgcctcatcgcaaggtacgctgcacgccttgctgctgaatcatcctcctcacagcccccgcagcaaagatccgcccccgatatttcattcacaattgacgcaaataagcagcagcgccaactgattgcagaactggagaataaaaatcgagagatcctccaagagatccagcggttgcgattagagcatgaacaagccagccagccaactcccgaaaaagcacaacaaaatcccaccctgcttgccgagctccggttgctgcggcagcgaaaagatgaactcgagcaacgcatgtccgccctccaggaatctcgcagagagctgatggtgcagctggaagggttgatgaagctcctcaaaacacaaggcgcggggagcccaaggtcttctcctagccacaccatttccagaccaattcctatgcctatcagatctgcctctgcttgctctactccaactcatactccccaagactcattgacgggggtgggtggggatgtgcaggaggccttcgcacagtcatcacgtcggaatttgcgcaacgacctgcttgtggctgcggactccataactaatactatgagcagccttgtgaaggagctgaactccgaggtgggcagcgaaacagaatccaacgttgattcggagttcgccaggacccaatttgaggatctcgtaccttctccaacatctgaaaaggcttttctggcccagatacacgctagaaagccaggatacatccattctggcgccactacctctaccatgcgaggggatatggtgaccgaagatgccgatccctatgtgcaacccgaagatgagaactacgaaaacgacagcgtacgtcagctggagaatgagttgcaaatggaagagtaccttaagcagaagctacaggacgaggcttaccaggtgtcattgcaaggttag

SEQ ID NO: 115326 - DNA, 2175 bp, synthetic construct
  misc_feature 1..2175: note = Description of Artificial Sequence: Synthetic coding sequence
  source 1..2175: mol_type = other DNA
atgatcgaagactcaggaaagcgaggtaataccatggccgaaaggcggcagctgttcgccgaaatgagagcccaggacttagaccgtatccgtctgtccacatatcggacagcctgcaaactgcgctttgtgcagaaaaaatgtaatctgcatctggtagacatatggaacgttattgaagccctgcgggaaaatgcccttaacaatctggaccctaatacagagctgaacgtgtctagactcgaagccgttttaagtaccatcttctatcaactgaataagcggatgcctactacccaccagattcatgttgaacaaagcatctcactgctcctgaatttcctgcttgccgcattcgacccggaaggccatgggaagatctccgtctttgccgtcaagatggctttggctactctatgcggagggaagataatggacaagttacggtatatcttctccatgatctctgactccagcggcgtgatggtatacggccgatacgaccaattcctgagagaggtgctcaaactacccaccgccgtgttcgaaggaccttcctttggctacaccgagcagtctgcacgttcctgcttctcacaacagaaaaaggtcacactcaacggctttctggataccctgatgagtgatcctcccccccagtgcctagtctggttacctctgctgcacagactggccaacgttgaaaatgtatttcacccagtggagtgttcgtattgtcattccgagagtatgatggggttccgatatcgttgccagcaatgccacaattaccagctttgccaagactgcttttggaggggccacgctggaggctcacactcaaaccagcaccagatgaaagaatacacatcctggaagtcccccgcaaaaaagcttacgaatgcactcagtaagtcattgtcttgtgcatcttcacgcgagcccctccatcctatgttccccgaccagcccgagaagcccttgaaccttgcccacattgtcccacccagacctgtaaccagcatgaatgataccctattctctcactcagtacccagctccggttccccttttattacacggtctatgctggaatcatcaaatcgattggatgaggagcaccgcctcatcgccaggtacgccgcccgtctcgcagccgagagttcatcttcccagccaccgcagcaaagaagtgccccagatatttcctttaccattgatgccaataaacagcagcgccagctgatcgccgagctggaaaataagaatagagagatcctgcaagagatccaaagacttaggcttgagcacgaacaggcgagccagcctactccagaaaaggcacagcagaatcctacgcttctggctgagctgaggctgctgcgccagcgcaaggatgaattagagcaacggatgagtgctctccaggagagccgaagggagctcatggtgcagcttgaaggtttgatgaaattgctgaaaacacaaggggccggctctcctaggtcctccccttcacataccatcagcaggccaatccccatgcccatcaggagtgcatcggcatgtagcacgccaacacacacccctcaggacagtctaactggggtgggaggcgatgtccaggaggctttcgcacagagcagccggcggaatctgagaaacgatcttctggtggccgccgacagcatcaccaatactatgtcctctctcgtcaaggaactcaactccgaagtgggcagcgaaacagagtccaacgtcgacagtgaatttgctcgaacccagtttgaggacctcgtgccctcaccaacatccgaaaaagcctttttggcccagatacacgcaagaaaaccaggatatatccattctggcgcaaccacgagtactatgagaggtgacatggtgaccgaggatgcagacccttatgtgcagcctgaagatgaaaactatgagaacgactcagtcagacaacttgagaacgagctgcagatggaggagtacctcaagcagaagctacaggacgaggcttatcaactccacgtcagtactgagactcgacttgaacacccatgtcccgtgtccgaaactaaatggcgtgtgctcttctggggtttcgtcttctttggtgggttcctctcccttgcactccaaatttatttttggggcctgttctag

SEQ ID NO: 115327 - DNA, 912 bp, synthetic construct
  misc_feature 1..912: note = Description of Artificial Sequence: Synthetic coding sequence
  source 1..912: mol_type = other DNA
atgctggagacattgagagagcgtctcctgagtgttcagcaggactttacaagtgggctaaaaacgctgagcgacaaaagtcgcgaggccaaggtcaagagtaagcccagaaccgtgccattcttacccaagtactccgcaggactggagttattgtcccgctatgaagacacgtgggccgcactccacaggagggctaaagactgtgcaagcgccggggagctagtcgacagcgaggtggtcatgctgtcagctcactgggaaaaaaagaaaacaagcctggtcgaactccaagagcagctgcaacagctgcctgccctcatcgccgacttggaatctatgactgccaacctgactcacctggaggcgtcctttgaggaggtagaaaacaatcttctccaccttgaagacttgtgtggtcagtgcgagctggaaagatgcaagcacatgcagagtcagcagctggaaaactataagaagaataagcggaaggaactggagacatttaaggctgagctggatgcagagcatgcccagaaggtcttagaaatggagcacacccagcagatgaagctaaaagagaggcagaagttctttgaagaagccttccaacaggatatggaacagtacttaagcaccgggtacctgcagatcgcagagcgccgggaaccaattggttctatgtccagtatggaggtaaacgtcgacatgctggagcagatggatttaatggacatttcagatcaggaggccctcgatgtgttcctcaatagcggcggcgaagagaataccgtcctatccccagcactaggtcgagtagataaattggccctcgctgaaccagggcaatatcggtgtcatagtccacccaaagtgagacgagagaatcacctccccgtcacatacgcgtag

SEQ ID NO: 115328 - DNA, 1056 bp, synthetic construct
  misc_feature 1..1056: note = Description of Artificial Sequence: Synthetic coding sequence
  source 1..1056: mol_type = other DNA
atgttggaaacactgcgggagcgactcttgagcgtgcaacaggactttaccagtgggctgaaaacactgtcagacaagtctagggaggcaaaagtgaagagtaagcccagaactgtccctttcttacccaagtatagcgctgggctggaactgctgagccgctatgaagacacctgggccgctctgcatcgacgggctaaagactgcgctagtgcaggcgagcttgtggacagcgaggtggtgatgctgagtgcgcactgggagaagaagaagacctcacttgtagagctgcaggaacagctgcagcagctgcctgcgttgatagccgacttggagagcatgaccgctaatctgacacacctcgaagcctccttcgaggaggtggagaacaatcttctgcacttggaagatctgtgcgggcaatgtgagctggagcggtgtaagcacatgcagtcccaacaattggagaattataaaaaaaacaagcgaaaggagctggagacctttaaggcggaactggacgccgagcacgcccaaaaagtgctggagatggaacatacacaacagatgaagctgaaagagaggcaaaaattttttgaggaggctttccaacaagacatggagcaatacttatccaccgggtaccttcagatagcagagcggcgagagcccattggctcaatgagctcaatggaagtcaacgtcgacatgctggaacagatggacctgatggatatctccgaccaagaggccttagacgtgttcctaaacagcgggggtgaggaaaacaccgtcttgtctcccgcgctcggccccgagagctcaacctgtcagaacgagatcacattacaggtccctaatccatccgagttgcgggctaagcccccctcttcctcctccacatgtaccgactcagctaccagggacatctctgaagggggagaatcgccagtggtgcagtctgacgaggaggaggttcaggtcgacacagcgctggctacttcccataccgacagggaagctacacctgacggaggcgaggacagcgactcttag

SEQ ID NO: 115329 - DNA, 1059 bp, synthetic construct
  misc_feature 1..1059: note = Description of Artificial Sequence: Synthetic coding sequence
  source 1..1059: mol_type = other DNA
atgttggaaaccctgcgggaacgccttctgagcgttcagcaggactttacctctggactgaagacattgtctgataagagcagagaggccaaagttaaatccaaaccccgtactgtgccctttctcccgaaatacagtgccggccttgaactactgagtcgctacgaagacacttgggctgccctgcaccgaagggccaaggattgcgcctccgcaggggagctggtcgatagtgaggttgtgatgctcagcgctcactgggagaaaaagaaaacttctctggtggagctgcaggagcagctgcagcagctccctgccctgattgcggacctggagagcatgacagcaaaccttactcatttggaagcatcatttgaagaagtggaaaataatctcctgcatttagaggacctttgcggccagtgcgagttggagcgctgcaagcatatgcagtcacagcagctggaaaactataagaagaataagagaaaggagctcgaggtcacgtttcgctccgagctagatgccgagcacgcgcagaaggtgttggagatggagcatacccaacagatgaaacttaaggaaaggcaaaagttttttgaagaggcttttcagcaggatatggaacaatatctcagtacaggctatctgcagatcgcagagcggagggagcctatcggtagcatgtcgagtatggaagtcaatgttgacatgctcgaacagatggacctgatggacatctccgatcaagaggcactggatgttttcctgaacagcggaggggaggaaaacaccgtgctgtccccagcactggggcccgaatcatcaacgtgtcagaacgagatcacacttcaggtccccaatccaagcgaattgagagccaagccgccaagcagtagtagtacctgtacggattcggctacgcgggacattagcgagggcggcgagagtccagtggtccagtctgacgaagaagaagtgcaggtggacacagccctcgccacaagtcacaccgaccgcgaggcgactcctgacggaggtgaagactccgactcctag

SEQ ID NO: 115330 - DNA, 813 bp, synthetic construct
  misc_feature 1..813: note = Description of Artificial Sequence: Synthetic coding sequence
  source 1..813: mol_type = other DNA
atgctatccgcacattgggagaagaaaaaaacatcactggtcgaactgcaggaacagttgcagcagcttccggcgcttatagcggacctcgagtccatgaccgccaatctgacccatctagaagccagcttcgaagaggtggagaataatctgttgcacctggaggatctgtgtggccagtgcgaactggagcggtgcaaacacatgcagagccagcagttggagaactacaagaaaaacaaaagacggagactcaggacatttaagaccgagcttgatgccgaacacgcccagaaagttttggaaatggagcacactcagcagatgaaactgaaggagcgccaaaagttctttgaagaagcctttcagcaagatatggagcagtatttatcaaccggttatttgcagattgcggagcgcagagaacccattggatccatgagctccatggaggtgaatgtggatatgctggaacagatggacctgatggatattagtgaccaagaggctctggacgtgtttctcaattctggaggcgaggaaaatacggttttgagccctgcacttgggcccgagagctccacgtgtcagaatgaaatcacactccaggtgcccaacccaagtgagctacgagccaagccgccctcctcttccagcacttgtactgactccgccacgagagatatctcagaggggggcgaatcccccgtggttcaaagcgacgaagaagaggtgcaggtcgacacggccctggcgaccagccacacagatcgcgaggccactcctgatggtggcgaagactctgattcctag

SEQ ID NO: 115331 - DNA, 912 bp, synthetic construct
  misc_feature 1..912: note = Description of Artificial Sequence: Synthetic coding sequence
  source 1..912: mol_type = other DNA
atgctagaaacccttcgcgaacggctcctgagtgtgcagcaggattttacgtcaggccttaaaacgctgagcgataagtcccgagaagctaaagtgaagtcgaaacccagaaccgtgcctttcctgcctaagtattccgcagggctcgaactgcttagccgatatgaagatacatgggccgcgctccaccgtcgggctaaggattgtgcctccgccggtgaactggtggacagtgaggttgtaatgctatcggcccattgggagaaaaaaaaaacatctctagtcgagctgcaggagcaactccagcagctgcctgccctcattgccgacctagagagcatgacagccaacctcacccatctcgaagcctccttcgaagaggtggaaaataacctcctccatctggaggatctctgtgggcagtgcgaacttgagcggtgtaaacacatgcaaagccagcagctggaaaactataagaagaacaagagcaaggagcttggcactggaaaggcagagctggacgcggagcacgcacagaaggtactggaaatggagcatacccagcagatgaagctgaaagagcgtcagaaattctttgaggaagcgtttcagcaggatatggagcagtatttgagcacggggtatttgcagatcgcagaaagacgggagcctattggttcgatgagctctatggaagttaacgtcgatatgttagagcagatggaccttatggacatctcagaccaagaagcacttgacgtgttcctgaactctggcggggaagagaacacagttctttcaccagccctcggaagggttgacaagctagcgctggcagagcctggccagtaccgttgccattccccccctaaggttagacgggaaaaccaccttccagtgacctacgcttag

SEQ ID NO: 115332 - DNA, 135 bp, synthetic construct
  misc_feature 1..135: note = Description of Artificial Sequence: Synthetic coding sequence
  source 1..135: mol_type = other DNA
atgctcgagactcttcgggagagattgttatcagtgcagcaggatttcaccagcggcctcaagaccctgtcggataagtcgagggaagcaaaagttaaatccaaacccagctggctgaatcaagaacagttctag

SEQ ID NO: 115333 - DNA, 627 bp, synthetic construct
  misc_feature 1..627: note = Description of Artificial Sequence: Synthetic coding sequence
  source 1..627: mol_type = other DNA
atgctggaaactctgcgagagaggctgctgagtgtacagcaagatttcacctccggcttaaaaacccttagcgataaatctagagaggcgaaagtcaaatccaaacctcgctatgaggatacatgggccgcactgcaccgaagagcaaaggattgcgcctccgctggagaacttgtcgactccgaggttgtcatgctatccgcacactgggaaaaaaagaagacaagcctggtggaacttcaggaacagctgcagcagctgcctgctctgatcgcggaccttgaatctatgaccgccaatttgacacacctggaagcctctttcgaagaagtggagaataatctgctccatttagaggatctttgtggccagtgcgagcttgagagatgcaagcacatgcaatcgcagcagcttgagaactataaaaagaacaagaggaaggagcttgaaacattcaaagctgagctggacgccgagcacgcgcaaaaagtcttggagatggagcatacacagcagatgaaactgaaagagcggcagaagttcttcgaagaagctttccagcaggatatggagcagtatctgtcgaccggttacttgcaaattgcagagcggaggggagatccatag

SEQ ID NO: 115334 - DNA, 2235 bp, synthetic construct
  misc_feature 1..2235: note = Description of Artificial Sequence: Synthetic coding sequence
  source 1..2235: mol_type = other DNA
atgattgaagattcaggaaagaggggcaacactatggcggagaggcgtcagctgtttgctgaaatgagggcacaagatctcgatcgcataaggctgagcacttaccggacagcttgcaagttgcgtttcgtgcagaagaaatgtaatctgcacttggtcgatatctggaacgtgattgaagcgctgcgcgaaaacgctttaaacaacctagacccaaatacagaactgaacgttagccgcctggaggccgtgttgtccaccatcttctaccaacttaataagagaatgcctaccacccatcagattcacgtggagcagtccatcagcctgctgctcaatttcctgctggccgcattcgaccccgagggccatgggaaaatttcggtctttgcagtaaaaatggccctagctactctgtgtggaggcaagataatggataaattacgttacatcttctccatgatctcagactcttctggcgtgatggtgtacggaaggtatgatcagtttctacgtgaagtcctgaaactgccaaccgccgtgttcgaagggccttccttcggctatacagaacagagtgcaagatcatgttttagtcagcagaagaaagtgaccctgaatgggtttctcgacaccctaatgagtgaccctccccctcagtgcctagtttggctgccgctactgcatcgcctagccaatgtggagaacgtgttccaccccgttgaatgtagctattgtcactctgagtctatgatgggcttcagatatagatgccagcagtgtcataactaccagctgtgtcaggactgtttctggagaggacacgccggtgggagtcactctaatcaacaccagatgaaagagtacacctcatggaagtcacccgccaagaagcttacaaacgcactgagcaagtcactctcctgtgcctcttccagagaacccctacatccgatgtttccagaccagcccgaaaaacctctgaatctggcacacatcgtgctcgacaatatgcctccccgccccgttacttccatgaacgataccttgttctcgcattcagtcccatcctctggatcccctttcatcacccgctcaagccctccaaaggactcagaagttgagcagaacaaactgctggctcgcgccgcacctgcatttctaaagggtaaaggaattcagtactccctgaacgttgccgaccgcctggcggatgagcacgtactgatcgggttgtatgttaacatgttacgcaataaccctagctgtatgttggaatcttctaatcgcctggatgaagaacatcggttaattgccagatatgcggcccgcttggcggcggagtcaagcagttcccaaccccctcaacagcgttctgccccagatatcagcttcactatcgatgccaacaagcaacagagacagctgattgcggaactggaaaacaagaaccgggagatcctgcaagagatccagaggctgcgcctggaacacgagcaggccagccagcctactcctgagaaggctcagcaaaatccgacactgctggccgaactcaggcttctgcgccaacgcaaagatgagctggagcaacgcatgagcgctctgcaggaatcccggcgagagctcatggtgcagctagaaggcctcatgaagctccttaagacccaaggtgccggctctccccggtctagccccagtcacaccattagtcgacccatccccatgcccatccgctctgccagcgcatgttctaccccaacacatacaccgcaggattccttaacaggggtggggggggatgtccaggaagctttcgctcaaagctcgcggagaaatcttagaaacgaccttctggtcgctgcagatagcatcaccaacaccatgtcctctctcgtcaaggagctcaactctgaggtgggctccgagaccgaaagcaacgttgacagtgagttcgctcgcactcaattcgaagaccttgtaccaagcccgactagcgaaaaagctttcctagcccaaattcatgcccgtaagcccggctatatccatagcggggctaccactagcacaatgagaggggacatggtgactgaggatgctgatccctatgtgcagccggaggacgagaactacgagaatgattcagttaggcaactcgagaatgaactccaaatggaagagtacctcaaacaaaaactgcaggatgaggcttaccaggtttccctgcagggatag

SEQ ID NO: 115335 - DNA, 1713 bp, synthetic construct
  misc_feature 1..1713: note = Description of Artificial Sequence: Synthetic coding sequence
  source 1..1713: mol_type = other DNA
atgatagaagactctggaaagcgaggcaataccatggctgaacggcgccagctgttcgctgagatgcgcgcccaggatttggaccggattcggctgtctacttaccggactgcctgcaagctgagattcgtgcagaaaaagtgcaatttgcatctggtcgacatctggaatgtaattgaggcactacgcgagaacgctctcaacaatctggatcctaatacagaactcaacgtgtctagactcgaagcagtgctttcaacaatcttttaccagttgaacaagaggatgcctacaacgcaccaaatccacgtggaacagagcataagcctcctactaaacttccttctggcagcgtttgacccagaaggacacggaaagatctcagtgttcgctgtgaagatggccttggcgactctgtgcggcggtaaaatcatggataaattaagatacattttctctatgataagtgactctagtggtgtaatggtctacggacgttacgaccaattcctcagggaagtgctgaagctgcctaccgccgttttcgaagggccttcattcggatatactgaacaaagcgccagatcatgcttttcacaacagaagaaggttaccctgaatggtttcctcgacactctgatgtccgatcctcctccacaatgcctggtgtggctcccactgctacataggctggcaaatgtcgaaaacgtctttcaccccgtggagtgcagctattgccactcagagtcaatgatggggttcagataccggtgccaacaatgtcataactaccagctttgtcaggactgtttctggcgcgggcacgctgggggatcccattccaatcagcaccagatgaaagagtacacaagctggaaatctccagcaaaaaagcttaccaatgccctgagcaagtctttgtcttgtgctagtagtagggagcctctgcaccccatgttccccgaccaacccgaaaagcctctgaacctcgcccacattgtcgacacatggccaccacgcccggtgacaagcatgaacgacactctattttcgcattctgtgccgtcatccggtagtccattcatcacacgatccagccctccaaaggatagtgaggtcgagcagaataagctccttgcccgagcggctcctgcctttttgaagggcaagggtattcagtactcactcaacgtcgctgacaggcttgccgatgagcatgtactaattggtttgtatgtgaatatgctgaggaataacccctcctgcatgctggaatcttcaaatagactcgatgaggagcacaggctgatagctcgctacgcagcccgcctcgccgcggagagcagtagcagccagccaccccagcagagaagcgctcctgatatctccttcaccattgacgcaaacaagcagcagcggcaactgatagctgaactggaaaataagaatcgagagatccttcaggaaattcagcgactccggctggagcacgagcaggcatcccaacctacccccgagaaagcacaacagaatcctactttgttggctgagctcaggttgttgcgccagagaaaagacgagctggagcaaaggatgagtgcgctgcaggaatcgcgcagagaactgatggtgcaactggaggggcttatgaagctgctgaaggaggaagaactaaaacaaggcgtgtcttacgtgccgtattgtcgaagttag

SEQ ID NO: 115336 - DNA, 2061 bp, synthetic construct
  misc_feature 1..2061: note = Description of Artificial Sequence: Synthetic coding sequence
  source 1..2061: mol_type = other DNA
atgattgaagactccggcaaacgcggcaacaccatggccgagcgtcggcaactctttgccgaaatgagagcacaagacctggaccggatcagactttccacctaccggaccgcgtgtaaattgagattcgtacagaagaagtgcaacttacatcttgttgacatctggaacgtgattgaagccttgagagaaaacgctctgaataacctggaccccaacacagagcttaacgtgagccgactcgaagcagttctctcaaccatcttttaccagctgaacaaacggatgcccaccactcatcagatccacgtcgaacagtctatcagcctgcttctcaattttcttctcgctgcctttgatccagaaggtcatgggaaaatatcagttttcgctgtgaagatggccctggctactctgtgtggcggtaagatcatggacaagctccgctatatcttttcaatgatctctgatagctccggagtgatggtgtacggaagatatgaccagtttctccgcgaagtcctgaaactacccacagcagtgtttgagggtcccagctttgggtacaccgaacagtcagccaggtcttgcttcagccaacagaagaaggtgaccttgaacgggtttttggacacccttatgtctgacccacccccccagtgtctcgtgtggctacccctgctgcatagactggccaacgtagagaacgttttccatcctgttgaatgctcatactgccactccgagagcatgatggggtttagataccgctgccaacagtgccataactatcagctgtgccaggattgcttctggcggggacacgccgggggctctcactccaatcagcaccaaatgaaagaatatacttcatggaagtcacctgccaaaaagctcactaatgcactgtcgaaaagcttaagctgcgcgtcgtctagagaaccattacatcctatgtttccagaccagcctgagaagcccctgaacctggcccatatagtcgatacatggccccctagacccgttacatcaatgaacgacactttgttttctcatagtgtgccaagcagcggcagcccttttattactcgatcgatgctcgagagctctaacaggctcgatgaggagcatcgcctcatcgcacgttacgctgctagattggccgcggaatcatcctctagtcagcccccacagcaacgctctgcccccgatatctcctttactatcgatgccaataaacaacaacggcagctgattgccgagctagagaacaaaaatcgtgagatcctccaggaaatccagcgtctgcgcctagagcacgagcaggcttcacagccaacgcctgagaaggcccagcagaatcccactcttcttgcggaattacggttactgcgacagcgcaaggacgagctagaacagagaatgtctgctcttcaggaaagcagaagggagctgatggttcagcttgagggcttaatgaaattactcaagactcagggagcggggtccccccgtagcagccctagccatactatatcaagaccaatcccaatgccaattagatcagcgagcgcttgtagtactccgactcataccccacaagactccctcacaggtgttggcggggatgtgcaggaggcatttgctcaaagcagcagaagaaatttgcggaacgatctcctggtagcggccgatagcatcactaataccatgagcagcctcgtcaaagagctgaatagtgaagtgggaagtgagactgagagtaacgtagacagtgagttcgcccggacacagttcgaggacctcgttcctagtcctacttcagagaaggcctttctggcgcaaatacatgccagaaagccaggttatatccatagcggcgctactacctccaccatgcgcggagacatggtgacggaggatgccgatccatatgtgcagcccgaggatgagaattacgagaacgactcagtgcggcagctggagaatgaacttcaaatggaggagtacctgaaacaaaaattgcaggatgaagcttaccaggttagcctccaggggtag

SEQ ID NO: 115337 - DNA, 1125 bp, synthetic construct
  misc_feature 1..1125: note = Description of Artificial Sequence: Synthetic coding sequence
  source 1..1125: mol_type = other DNA
atgattgaggattctggtaagcggggtaatacaatggcagaacgaagacagttgtttgcagaaatgcgtgctcaagatcttgacaggattcggctgagtacctataggactgcgtgtaaattgcgatttgtgcagaaaaaatgcaacctgcacctggtggacatttggaacgtgatcgaagcccttcgggaaaatgctcttaataacctggacccaaatactgagctcaatgtgagcagactggaggccgtgcttagcacgatattttaccagcttaataaacgcatgccaactacacatcagatccatgtcgaacagtctatatcactcctcctcaactttctgttagctgcattcgaccccgaaggccacggcaagatatcagtgttcgccgttaaaatggctctagcgaccctatgcggggggaaaataatggataagcttaggtatatattctcaatgatcagcgattcttcaggggtgatggtgtacgggcgctacgaccagtttctcagagaagtccttaagcttcccacagccgtatttgaagggcccagcttcggctatactgagcagagcgcacggagctgtttctcacagcaaaagaaggtgactctgaatggcttcctcgataccctgatgtcggatccccctccccagtgcctcgtatggctgccactgcttcacagacttgccaatgtggagaacgtgtttcacccggtcgaatgctcatactgtcacagcgagtccatgatgggattccgatatcgctgccagcagtgccacaactaccagctttgccaggactgcttctggcgcggacacgcgggggggagtcatagcaaccagcaccagatgaaagaatatacttcatggaagtcacctgctaagaagctcaccaacgcgctctccaaatctcttagttgcgccagtagccgggaacctctgcaccccatgttccccgaccagcctgaaaagccacttaatctcgcgcatatcgtagatacctggcccccgcggcctgtgacatctatgaatgacaccttattttctcatagtgtccccagcagcgggtccccctttatcacccgctcgtccgatggcgctttcggcgggtgtgtgtag

SEQ ID NO: 115338 - DNA, 1704 bp, synthetic construct
  misc_feature 1..1704: note = Description of Artificial Sequence: Synthetic coding sequence
  source 1..1704: mol_type = other DNA
atgattgaggatagcgggaagcggggcaataccatggcagaacgaaggcagctttttgcagagatgcgcgctcaagacttggaccggatcagactgtcgacctaccgcacagcatgcaagctgagatttgttcagaagaaatgtaacctccatttagttgacatttggaatgtgattgaagccctgcgggaaaacgccctgaataacttggatccaaatacagagctgaacgtaagccgcctggaggccgtgctttccaccatcttctaccagctgaacaaacggatgccaaccacccatcaaattcatgtggagcagtccatctcgctgttactaaatttcctccttgcggcgttcgatcccgagggacacgggaagatctctgtgttcgccgtaaagatggctttagctacattgtgcggcggcaagattatggacaagctccgctatatcttttccatgatctcagatagctcaggagtgatggtgtatgggcgctacgaccagtttctccgcgaggttctcaagctgccaacagccgttttcgagggtccatcatttggatacaccgagcagagtgccaggagctgtttttcgcagcagaagaaggtgactctgaacggatttttggataccctcatgagcgatccacctccacagtgccttgtgtggttacccctgcttcacaggctggctaacgttgaaaatgtgtttcatccagtggagtgttcatactgtcattcggagtcgatgatgggctttaggtatagatgccagcagtgccataattaccagctctgccaagactgtttttggcgcggacacgctgggggatcccactctaaccagcaccagatgaaggagtatacatcatggaagtcacccgcgaagaaactcacaaacgccctgtctaaatctctgtcctgtgcatcttctagagaaccactgcacccaatgttccccgaccagcctgagaaaccacttaacctggcccacatcgttccaccccggccagtgacaagcatgaatgacaccttgttctcgcactcagtcccaagcagcggctctccttttataaccaggtccagtcctccaaaagactccgaagtcgagcagaacaagctgctcgctagggccgcaccggctttccttaaggggaagggcatccagtatagtctgaacgtggccgaccggctcgccgacgagcatgtgctcatagggctgtatgtcaatatgctgagaaataatcctagctgcatgctggaatcatccaatcgcctcgacgaggaacaccggctgatcgcgagatacgccgcccgactggccgcggagtcctcaagtagccaaccaccccaacaaaggtccgcaccagatattagttttaccattgacgccaacaaacagcagcgccagctgattgcagagttggaaaataagaacagagaaatcttgcaagaaatccaacggctccgtttagagcacgagcaggccagccagcccacgccggaaaaagcacagcagaatcccaccctattggctgagctgcggctgctgcggcagcggaaagacgaactcgagcagcggatgtcggcgctccaagagagtaggagggaacttatggtccaactggagggattgatgaagcttctgaaggaagaggaacttaaacaaggtgtctcatacgtcccatattgccgatcttag

SEQ ID NO: 115339 - DNA, 1176 bp, synthetic construct
  misc_feature 1..1176: note = Description of Artificial Sequence: Synthetic coding sequence
  source 1..1176: mol_type = other DNA
atgttccccgaccagcctgagaagcccctaaatcttgcacatatcgtgccccctagaccggttacgagtatgaacgacactttattcagccacagcgtgccctccagtggatctcccttcatcacaagatccagcccgcctaaggactcagaagtggagcagaataagttattggctcgcgccgcaccagccttcctgaagggtaaggggatgctggaaagtagtaatagacttgatgaggagcatcgtttgatagccaggtatgcggcacgcctggcagctgaatcatcctcctctcagcccccacagcagaggtccgcaccagacatcagttttacgattgatgccaataagcaacagcgccaactgattgctgagctcgagaataagaatagggaaatactgcaggaaatccaacgcctcaggctggagcacgagcaggcatctcaaccgactcccgagaaagctcagcagaacccaaccctactggctgagttacgcctgctacgccagagaaaagatgagctcgagcagcgaatgtcggccctgcaggagtccagacgtgaactcatggtgcagctcgagggattgatgaaactgttgaagacccaaggagccggttcaccccgctcaagtccctcccataccatctccaggccaatcccaatgcctattaggtccgcctcggcctgcagtactcctacccatactccccaggactccctgacaggagtgggaggcgacgttcaggaggcgtttgcccagtcctctcgacggaacctgaggaatgacttgctggtcgccgcagactcaatcacaaatacaatgagtagtctagttaaggaacttaactcagaggtagggagtgaaactgagtccaatgtggactcagaattcgcccgcacccagttcgaggatttagttccatccccaacctccgaaaaggcctttctggcgcaaatccacgctaggaagcctggttacatccactcgggagcaaccacatccacaatgcgcggtgatatggttacagaagatgcagatccttatgttcagcccgaggacgagaattatgaaaatgattccgtgagacagctagaaaacgagttacagatggaagagtatctcaagcagaagctgcaggacgaggcatatcaggttagtctgcagggctag

SEQ ID NO: 115340 - DNA, 2232 bp, synthetic construct
  misc_feature 1..2232: note = Description of Artificial Sequence: Synthetic coding sequence
  source 1..2232: mol_type = other DNA
atgatcgaggacagtggaaaaaggggtaatacaatggcagagcgtcggcagcttttcgccgagatgcgtgctcaagacttagatcggatccgcctgtcaacgtacagaacggcgtgcaagttacgattcgtgcagaagaagtgtaatctacacctagtcgatatttggaatgtcattgaagccctgcgcgagaatgctctgaacaacctggatccaaatacagaactcaacgtgagtagactcgaagccgtcctctccactatcttctaccagctgaataagagaatgccaaccacccaccagatccatgtggaacagtccatctctttattgttgaacttcctccttgctgcatttgatcctgaaggccacgggaaaatatccgtatttgccgtgaagatggcattggccaccctctgcggaggaaaaattatggacaaactgcgctacattttttcaatgatcagcgattcctctggagtcatggtttatggaagatatgaccagttcctgagagaagtgctgaaacttcccactgccgtgtttgaaggacccagttttggatacaccgaacaaagcgcaaggtcgtgtttttcacagcagaaaaaggttacactgaatggttttttggatactttgatgtctgacccgcctccgcaatgtctcgtctggttgcccctgttgcacaggctggctaacgtggagaacgtgtttcatccagtggagtgctcatattgccattcagaatccatgatgggcttcagatatcggtgccagcagtgccacaactaccaattgtgtcaagactgtttctggagaggccacgcaggggggtcccattcgaatcagcatcagatgaaagagtacactagttggaaaagcccggccaagaaactaacaaatgcactgtccaagtcacttagctgtgcgagctcccgagaacctctgcatcctatgttccctgatcagccagagaagcctctgaatctagcccatatcgtcgacacctggcccccaagacccgttacttcaatgaacgacaccctgttttcccactctgtccccagttctggttccccttttattactagaagctcccctcctaaagacagcgaagttgaacaaaataagttactggcccgcgctgcaccggcgttcctcaaaggcaaaggtattcagtattctctcaatgttgcagataggctggcggatgaacatgtgctgatcggcctatacgtgaatatgctgagaaataatccttcctgtatgctcgagagctctaacagactggacgaggagcatcgattgatagcacgttacgctgcaaggttggccgccgaaagctctagcagccagccacctcagcagagaagtgctcctgacattagttttaccatcgacgcaaataaacagcagcgccaacttatcgccgagttggaaaataagaatcgggagatattgcaggaaattcagcgcctccggctggagcatgaacaggctagtcagccgaccccggagaaagcccagcagaaccccactctcctcgcagagctgagacttctccgccagcggaaggacgaactggaacagagaatgtccgccctccaggaatctcgaagagagctgatggtgcagctggagggactgatgaagctacttaaaacgcagggcgccggatccccccgttcttcccccagtcacactatatccagacctatccctatgccaatcaggtccgccagcgcctgctctactcccacacacactccgcaggatagtttaacgggtgtgggaggtgacgtgcaagaggccttcgcccagagctcccggcgcaacctgcgtaatgacctcttagtggctgctgactccattacaaatacgatgagtagcctggtgaaagagttgaactccgaggtaggatccgaaaccgaatctaacgttgatagcgagttcgccagaacccagtttgaggacctggtaccttcaccaacatctgaaaaggctttcctggcccaaattcatgcaagaaaacctgggtatattcatagtggggccaccacgtctacgatgagaggcgatatggtgaccgaagacgcagacccctatgtgcagcccgaagacgagaattatgaaaacgatagtgtgaggcaactggagaacgagctgcagatggaagaatacctgaagcagaaactccaggatgaggcctaccaagtgtcccttcagggatag

SEQ ID NO: 115341 - DNA, 2073 bp, synthetic construct
  misc_feature 1..2073: note = Description of Artificial Sequence: Synthetic coding sequence
  source 1..2073: mol_type = other DNA
atgattgaagactcgggtaagcggggtaatacaatggcagagcgacggcagttattcgctgagatgagagcccaggatctcgaccgaatacggctgtctacatataggacggcatgcaaattgcgatttgtgcagaaaaagtgtaaccttcacttggtcgacatttggaacgtcattgaagccctgcgagagaacgcactcaataacctggaccccaacacggagctcaatgtgtccaggctcgaagctgtactgtcaactatcttttaccagttaaacaagcgcatgccgaccacccaccaaatccacgtggaacaaagcataagcttacttctaaacttcctgctggccgcctttgatcccgagggccacgggaagatatctgtttttgccgtaaagatggcactcgcaacactttgtgggggcaaaataatggacaaattacggtatatcttcagcatgatttcagatagttccggggttatggtctatggccgctacgaccagttcctgagggaggtcctgaagctccccactgccgtgtttgagggtcccagttttggctacacagaacaaagcgctaggagctgctttagccaacaaaagaaggtgacactcaacggattcctggataccctgatgtctgatcctcccccacagtgcttagtgtggttgcctttactccacaggttagccaacgtagagaatgttttccacccagtggaatgctcgtactgccattctgaatccatgatgggatttcgatacagatgccagcagtgtcacaattatcagctttgccaggactgtttttggagagggcacgccggcggttcacatagcaatcagcaccagatgaaagaatatacctcctggaagtcaccagccaaaaagcttacaaacgccctgagtaaatctctgtcttgcgcctcctctagggaacccttacatcccatgttcccagaccaaccagagaaacccttgaatcttgctcatattgtgcctccgaggcccgtgacgtccatgaatgatacactcttcagccactccgtgccttcttcaggctcccctttcatcactcgctccatgctggaaagttccaaccggttagatgaagagcaccgcttgatcgccaggtacgcggctcggctggccgccgaatcaagctccagccagcccccacagcaacgaagcgcccctgacattagcttcacgattgacgcaaacaaacaacagcgccaactgattgccgaactggaaaacaagaatcgagagatcctgcaggaaattcagcgtcttaggttagagcacgagcaggcatcacagccgacaccagaaaaagcccaacaaaatccaacactgctcgcggagctgcggttgttacgccagcgcaaggacgaactggagcaaagaatgtcagcacttcaggagagccggcgcgagctgatggtgcagttagagggactaatgaaacttttgaaggaggaagagttaaagcagggcacccagggggccggcagcccacgaagcagtccttcacacaccatatctcgtcctataccgatgccaatacgctctgcatctgcatgctctacaccgacacacactccacaggattccctgactggagtgggcggagacgtgcaagaagcatttgcgcagtcatcaaggcgcaatctcaggaatgacctgctggtggctgctgactctatcaccaacaccatgagcagtcttgtgaaagagctgaacagcgaggtcggcagcgagaccgaatctaatgtcgatagtgagtttgccaggactcagttcgaggacctggttccttcacctacctcagagaaagcttttttagcccagatccatgcacgtaaaccaggatacattcatagtggcgcgaccacatccacaatgcggggagatatggtgaccgaggacgccgatccttatgtacaacccgaagacgaaaattacgagaatgactctgtacggcaactcgaaaatgagttgcaaatggaagaatatctgaagcagaaactgcaagacgaggcctaccaggtgagcttgcagggatag

SEQ ID NO: 115342 - DNA, 2061 bp, synthetic construct
  misc_feature 1..2061: note = Description of Artificial Sequence: Synthetic coding sequence
  source 1..2061: mol_type = other DNA
atgatcgaggattctggcaagcgcggaaacacgatggccgagcgaagacagctgttcgctgaaatgcgcgcgcaggaccttgaccgcattaggctgtccacatacaggacagcttgtaaactgagattcgtgcagaaaaaatgtaacctacacttggtcgatatctggaatgtcatagaggcactgagagagaatgcccttaacaacctggatcccaatacagaactgaatgtgtcgcggctggaggctgttctaagcactatcttttaccagcttaacaaaagaatgcccactacccaccagatccacgtagaacagtctattagcttactcctgaacttcctactcgctgcgtttgatcctgaggggcacggcaaaataagcgttttcgccgtcaagatggcattagctacactctgcggaggtaagatcatggataagctgcgatacatcttcagtatgatcagtgattcctcaggcgtaatggtctacgggcggtacgatcagtttttgcgcgaagtgttgaaactgcctactgctgtcttcgaaggaccatctttcggctacactgaacagtccgcccggtcttgcttttctcagcagaaaaaagtgactctcaatgggttcctcgacacattgatgagcgacccacccccccaatgcctggtgtggctgcctcttctccataggttagccaatgtggaaaacgtcttccaccccgtggaatgctcttactgccattccgagtcaatgatgggttttagatatcggtgccagcagtgtcataactaccagttatgccaggactgcttctggcggggtcacgccggaggaagccactcgaatcaacaccagatgaaggagtacacttcctggaagtcccctgccaaaaagctgacgaatgccctcagtaagagcctatcttgtgcatcttcaagggaacccctccaccctatgttccccgaccagcctgaaaaaccactaaacctcgcacatatcgtttgctttcgcccaccgagaccagtgacctctatgaatgacaccctgttcagccacagtgtgcctagctcggggtcccctttcatcacacggagtatgctggaatccagcaatcggctcgatgaagagcaccgcctcatcgcacgatacgcagcgagactggcagcagagagcagtagcagtcagcctcctcaacaaagaagcgctcctgatatcagttttactatcgacgctaacaaacagcagcgccagttgattgcggaactcgagaacaaaaatagggagatcctgcaggagatccaaagactgaggttggagcatgaacaggcctctcagcctactccagagaaagcgcagcagaaccctactcttttagcagaactgaggctacttcgacagcgaaaggacgagctagagcagcggatgagcgctctccaggagtcacggcgcgaactaatggtgcagttggagggattaatgaaactgctgaaaacacagggcgccggaagccctagaagttctccttcccatacgatttcccggcctatcccaatgcccattcgttccgccagcgcctgctctacacccactcatactccccaagacagcctcactggtgttggaggagatgtgcaggaggcctttgcccagtccagtcgccggaatctgcgtaatgatctgctggttgccgcggactccatcacaaacacaatgagtagcctggtgaaagaactgaactcagaggtgggaagcgaaaccgaatccaacgttgattcagaattcgcacggacccaattcgaagaccttgtaccaagccctacctcggaaaaggctttccttgctcagatccatgcacgaaagccaggatatatacattcaggggcaaccacctccacaatgcgaggagacatggttaccgaagacgcagacccatatgtccagcccgaagacgaaaactacgagaacgattccgtccggcagctggagaacgagctgcagatggaggaatacctgaagcagaaacttcaagacgaagcataccaggtgagcctgcaaggatag

SEQ ID NO: 115343 - DNA, 2232 bp, synthetic construct
  misc_feature 1..2232: note = Description of Artificial Sequence: Synthetic coding sequence
  source 1..2232: mol_type = other DNA
atgattgaggactcaggcaagcggggcaacacaatggctgaaagaaggcagctgtttgccgaaatgcgcgctcaagaccttgaccgcatcagactcagcacttacagaacagcttgtaagttacgcttcgtgcagaagaagtgtaacctccaccttgtcgacatctggaacgttatagaggcccttagggagaacgcactcaataacctcgaccccaatactgaactcaacgtatctaggcttgaggccgtgttaagtacaattttttaccaactcaataagcggatgccaaccacgcatcaaattcacgtggaacagtcaatcagccttctcctgaactttttgcttgcggcttttgaccccgaagggcacgggaagatcagcgtattcgcggtgaagatggcactggcgacactctgtggcggaaaaataatggataaacttcggtatatcttctccatgatctctgattcatctggggttatggtatacggcaggtacgatcagtttctgcgggaggtgcttaagcttccaacggctgtattcgaagggcctagttttggatacactgagcagtccgcccgctcctgcttttcccagcagaagaaggttactcttaacggatttctggataccttgatgagcgaccctcccccgcagtgtctagtatggttgccccttctccaccgactcgctaacgtggaaaatgtgtttcaccctgtcgaatgctcttattgtcatagcgagagtatgatggggttcaggtacagatgccagcaatgtcacaattaccagttgtgccaggattgcttttggcgtggacacgccggcggatcccactctaatcagcatcaaatgaaagagtatacgagctggaaaagccccgcaaaaaagctaaccaatgctctgagcaagagcttatcctgtgcttcttctcgagaacctttacatcctatgttccccgaccagcccgagaaaccgttaaacttagctcacatcgtgtgcttcagacctcctagacctgtcacttctatgaatgacacactgttcagtcatagtgttccatcctctggttctccctttataacaaggagctcaccccctaaagactctgaggtggagcagaacaaacttctcgccagggcagcaccagccttcctgaagggtaagggtattcagtacagcctgaatgtggccgaccgtttagctgacgaacacgtgcttataggcctgtacgtcaacatgctgcgaaataatccctcttgtatgctggaaagtagtaataggttggacgaagaacacaggctaattgccaggtatgccgccagactggcggccgaaagttcctcttcccagcctccccagcagaggagtgcaccggatataagtttcaccattgacgccaacaagcagcagaggcaactcatcgcagagctggagaataaaaacagggaaatccttcaggagattcagaggctgcggctggaacatgagcaggcctcacagcccacccctgagaaagcacaacaaaatccaaccctgctggcggagttaagactgctgaggcagagaaaagacgaactcgaacagaggatgtcagccctgcaggagagcaggagggaactgatggtgcagctcgagggactaatgaagttgctgaaaactcagggggccggtagcccacgatcgagtccatcacacaccatctcccggccaatccccatgcctatcagaagcgcctccgcttgcagtacccccacgcacacgccgcaggattccctgacgggagtcggaggcgatgtgcaagaggcgttcgctcagagctcaagacgaaatctgcgtaacgacttgctcgttgctgccgactctatcaccaataccatgagttcgcttgtgaaggagctaaactcagaagtgggctcagaaactgagagcaacgtagacagcgagtttgctaggacacagttcgaagaccttgtgccgagcccaacctctgagaaggcttttctcgcacaaatccatgcccgcaagcctgggtacatccattctggagccactaccagcactatgcgcggtgacatggtcacagaggacgcggatccctatgtgcagcctgaggacgagaactatgaaaacgacagcgtgcgccagttggagaacgaactgcagatggaggagtatctgaaacaaaagctgcaggacgaggcctaccaggtttcacttcagggttag

SEQ ID NO: 115344 - DNA, 2232 bp, synthetic construct
  misc_feature 1..2232: note = Description of Artificial Sequence: Synthetic coding sequence
  source 1..2232: mol_type = other DNA
atgattgaggattctgggaagcgggggaacaccatggcggagcggagacaattgttcgccgagatgcgtgcccaggacttggacaggattagattgagtacatatcgtaccgcctgcaaacttagattcgtccagaagaaatgcaacctacatcttgtcgatatctggaatgttatcgaggcactgcgcgagaacgcccttaacaatcttgacccgaacactgagttaaatgtgagtagattggaagcagtcctgtcaactattttctaccagctgaacaaacgcatgccaaccactcatcagatccacgtcgaacaatccatttccttgcttctaaacttcctgctggctgcgttcgaccccgaggggcacgggaagattagtgtctttgccgttaagatggccctggccaccctgtgtggggggaagattatggacaaattgagatatatttttagtatgatctccgactcttcaggagtgatggtgtacggccggtacgaccaatttctgagggaggttctgaagctgccaacagccgtgttcgagggcccaagcttcggatacaccgaacagtctgcaagatcttgtttcagccagcagaaaaaggttactctcaacggctttttggacacccttatgtccgaccctcccccacagtgccttgtctggctccccttattacaccggctcgcaaatgtggaaaatgtctttcacccagtggagtgttcatattgccacagtgagtcaatgatgggctttaggtatcgatgtcagcagtgtcataattatcagctttgccaggactgcttctggaggggacacgctggaggcagtcacagcaatcaacatcagatgaaagagtacacctcctggaagagcccagctaagaaactgaccaacgcactgtcaaagtcccttagctgcgcctcaagtcgcgagcctctccacccaatgttccccgaccaacctgagaagcctctcaaccttgcccatattgttgatacatggccccctaggcctgtgacatctatgaacgacacattgttctcgcactctgtcccgtctagcggcagtccctttatcactcggtcctctcctccaaaagatagcgaagtagaacaaaacaagctgttggctagggcagctccggcctttctgaagggtaagggcattcaatacagtttgaacgtcgcagatagacttgcagacgagcacgtcctcattggactctacgtaaatatgctcagaaataatcccagctgcatgctggaatccagcaaccgactcgacgaggagcaccgactaattgctaggtacgcggccagacttgctgccgaatctagtagctctcagcccccacaacagaggagcgccccagatatttcgtttacaatcgacgctaataaacagcagcggcaattaatagctgagctagagaacaagaatcgcgaaatcctgcaggaaattcagcgcctgcgcctggaacacgaacaggccagccagcccaccccagaaaaggcccagcaaaatccaacactcctcgccgaactaaggctgctgaggcagcgcaaggacgagctcgagcagaggatgagtgccctccaggagagccgccgggagctgatggtgcaactggaaggtcttatgaagctgcttaagacacagggtgcgggctcgccccggagcagcccgtcgcatacaatatctagacccatcccaatgcctattcgcagtgccagtgcatgctcgactccaacacacacaccccaggacagcttgactggggtcggcggtgatgtgcaggaagcatttgctcagagctcgcgcaggaatctgcgcaacgacctgctcgtcgcagctgactcaattacaaacactatgtcatcgctggtgaaggagcttaactctgaggttggatctgagactgaatctaacgtcgatagcgaatttgcccggacacagttcgaggacctagtaccttcccccacttccgaaaaggcatttttagcccaaattcatgcgcgaaagcctgggtacatacattcaggggctacgacttctacgatgaggggcgatatggtgaccgaggatgctgatccttatgtgcaaccagaggacgaaaactatgaaaacgattccgtgaggcaactggagaacgagctgcaaatggaggaatatttgaagcagaaactgcaggacgaagcatatcaggttagcctgcaggggtag

SEQ ID NO: 115345 - DNA, 1176 bp, synthetic construct
  misc_feature 1..1176: note = Description of Artificial Sequence: Synthetic coding sequence
  source 1..1176: mol_type = other DNA
atgttcccagaccagcctgaaaagcctcttaacttggcacacatcgttccaccacgtccagtgacctctatgaacgacacattatttagccacagcgtcccttccagcggctcacctttcatcacgagaagctcgccacctaaagatagcgaggtggaacagaacaaactcttagctcgggccgccccggccttcttgaaaggcaagggaatgcttgaatccagtaacagactggacgaggaacacaggctgattgcccgatacgctgctaggttggctgccgagagttcatccagtcagccaccacagcagcgctccgcccccgatatctcattcacgattgatgccaacaaacagcagaggcagctcattgctgagctggagaacaagaatagggagatactccaagaaatccagaggctgcgactcgagcacgagcaggcctcccagccaacccctgagaaagctcaacagaatcctacactgctcgctgagctccgtctgcttcgacagcgcaaagacgaactcgagcagaggatgtccgcgctccaggagtctaggcgggagctgatggtacagctggaggggcttatgaagcttctaaaaacacagggggctggcagccccaggagctctccgtcccataccatttccagaccaattccgatgccaatccgctccgcttcggcatgttctacccccacccataccccacaggactccctgactggagtgggcggcgatgttcaggaggctttcgcccagagctcacgacgaaacttgaggaatgatttgctggtggctgcagactccattacaaacactatgtcgagtctggtgaaggaactgaacagcgaagtagggagcgagaccgagagtaatgttgattcagagttcgccagaacccaatttgaggatctagtgcctagtccaaccagtgagaaggccttccttgctcagatccatgccagaaagcctggctatatccactctggtgccacaacctctacaatgcggggtgatatggtgaccgaggatgcggacccatacgtgcagcctgaagacgagaactatgaaaatgatagtgttcgccagcttgagaacgagctgcaaatggaggagtatctcaagcagaagctccaggatgaagcatatcaggtctctttgcaggggtag

SEQ ID NO: 115346 - DNA, 1116 bp, synthetic construct
  misc_feature 1..1116: note = Description of Artificial Sequence: Synthetic coding sequence
  source 1..1116: mol_type = other DNA
atgatcgaagacagtggcaagcgaggcaacactatggcagaacgccgtcagctgttcgctgagatgcgagctcaagatcttgatagaatccggctcagtacttatcgtactgcttgtaaactgcgcttcgtgcagaagaaatgcaacttacacctggtggacatctggaatgtgattgaagctctgcgggaaaacgcattgaacaacctcgacccgaacaccgagctcaatgtatcgaggctggaggctgtgctgtctacaatcttttaccagctcaataagcgtatgccaacgacacaccagatccacgtggaacagagtattagtctgctccttaacttcctcctggcagcttttgaccctgagggccatgggaagatatccgtattcgccgttaagatggcgctggccacactctgtgggggaaaaatcatggataagttaagatatatcttctcgatgatttcagactcctcaggagtgatggtttacggtcggtacgatcagtttctccgtgaggtgttaaaactgccgactgctgtattcgaaggccccagctttggttatactgaacagagcgctagatcttgcttttcccagcaaaagaaggtcacccttaacggcttcctggatacattaatgtccgatcctcctcctcagtgtctggtgtggctgccgctcctgcatcgtctagctaatgtggaaaatgttttccatccggtcgaatgcagctattgtcattcagagagcatgatgggattcaggtaccggtgccaacagtgccataattaccagctatgccaggattgcttctggcgtggccacgcagggggctcacactccaaccaacatcagatgaaggagtacaccagttggaaatctccagcaaagaaactcacaaatgccctgtctaaaagcctctcatgcgcatcttcaagggagcctctgcatcccatgttcccggatcaaccagagaaaccgttaaatctggcccacattgtgccaccgcggccagttacttctatgaacgacactctcttctcccattccgtccccagctcaggctctccattcataacaagaagttctgatggagccttcggagggtgcgtttag

SEQ ID NO: 115347 - DNA, 1794 bp, synthetic construct
  misc_feature 1..1794: note = Description of Artificial Sequence: Synthetic coding sequence
  source 1..1794: mol_type = other DNA
atgattgaggagtcagggaataagcgcaaaaccatggccgagaagaggcagctgtttattgagatgcgagctcagaattttgacgtgattcggctaagcacatatagaacagcttgcaaactgcgcttcgtccagaagcgctgcaatctgcacctggtggatatctggaacatgattgaagcgttcagggataacggactgaacacactcgaccataccacggagatcagcgtgtcacgattggagaccgtgatctcttccatatattaccagcttaataagaggctcccctccacacatcaaatttccgttgaacaatcaatttcccttctcttgaacttcatgatagcggcatacgattctgaagggagagggaaattgacagtgttctctgttaaggctatgctggctaccatgtgcgggggaaagatgttggacaagctacggtacgtgttctctcaaatgtctgactcaaatgggctgatgatctttagcaaatttgaccagtttctgaaggaggtgctgaagttgccaaccgcagtctttgaaggaccctcgtttggctacacggagcattccgtcagaacctgctttcctcaacaaagaaagatcatgctgaatatgtttctcgatactatgatggctgaccctccgccccagtgtttggtgtggttaccactgatgcatcggctggcacacgttgagaacgttttccatccagtcgagtgcagctactgccgctgcgaatccatgatgggtttccgctaccggtgtcagcagtgtcataactatcagctgtgccagaattgtttctggaggggacatgccggtggaccgcactctaatcagcatcagatgaaggaacactcgtcttggaagagccccgctaaaaagctctctcacgcgatctccaagtcacttggatgcgtcccaacacgagagcctccccatcccgtgttccccgaacagcctgaaaagcctttggacttggcccatattgtgccaccccgtcctctgaccaatatgaacgatacaatggtgtcccatatgtcaagcggtgtgcctacccccaccaagcgccttcaatactctcaggacatcccaagtcatttggctgacgagcacgcactgatcgcctcttacgtggcacggctgcagcactgcgccagggtcctggatagcccgagccgtctagacgaagagcacagactgatcgcaaggtacgcggccaggctagcggcagaggccggtaatgtgaccagacccccaactgatctgagttttaacttcgacgccaataagcagcagaggcaactcatcgcagagctagaaaataaaaaccgggagattctgcaagagatccaacgacttcgcttggaacacgagcaagccagccagcccactccagagaaagcccagcagaaccccaccctgctggccgaattaagactcttacggcagcgcaaggatgagttggagcagcggatgtccgctcttcaggagtctcgtcgtgagcttatggtccaactggaggaacttatgaagctgctgaaagaggcagaggcaagagagtcagctcaggctaccggctctccacatacctcacctacccacgggggaggacggcccatgcccatgcccgtgaggtctacctcggccggtagcacgcctacccactgcccacaggacagtctttccggggtgggcggggatgtccaagaggcatttgcacaagctgaggaaggtgcggaagaggaggaggagaagatgcagaacggcaaggacagaggttag

SEQ ID NO: 115348 - DNA, 567 bp, synthetic construct
  misc_feature 1..567: note = Description of Artificial Sequence: Synthetic coding sequence
  source 1..567: mol_type = other DNA
atgatagaggagtctgggaataaaagaaaaacaatggccgagaaacgccaactcttcattgaaatgcgggcacaaaacttcgacgtgatcaggctgtctacctacaggacggcatgcaagctgaggttcgttcagaaaaggtgtaacctgcatttggtcgacatctggaacatgatcgaggcattcagggataatgggttaaacactctcgaccacacaaccgagatttccgttagccgactggagaccgtcatttcctcgatctattaccagctgaacaaacgccttccctctacccatcagatttccgtggagcagtcgatctcactgttgctgaacttcatgattgccgcctacgacagcgaggggcggggcaagctgacggttttcagtgtgaaagctatgctagctaccatgtgcggagggaagatgttagacaaactacgttacgtcttttctcagatgtctgattccaatgggcttatgatattctcaaaattcgatcagttcctgaaggaagtcctaaagttacccaccgccgtgttcgaagggccttccttcgggtag

SEQ ID NO: 115349 - DNA, 399 bp, synthetic construct
  misc_feature 1..399: note = Description of Artificial Sequence: Synthetic coding sequence
  source 1..399: mol_type = other DNA
atgattgaagaaagcgggaacaagcggaagacgatggcagaaaaacggcagctgttcatagagatgagggcacagaactttgatgtaattcgcctgtcgacttaccgaacagcatgcaaacttcggttcgttcagaagcgctgtaacttgcatctggtcgatatatggaatatgattgaagcctttcgtgacaacgggctgaacaccctcgaccataccactgagatctctgtttctagactagagactgtgatctcctccatttactaccagctgaataagcgtctcccaagtactcaccagatctctgttgagcagagtattagcctacttttgaattttatgattgctgcgtacgattctgaaggtagggggaaattgacagtcttctccgtatag

SEQ ID NO: 115350 - DNA, 450 bp, synthetic construct
  misc_feature 1..450: note = Description of Artificial Sequence: Synthetic coding sequence
  source 1..450: mol_type = other DNA
atgatagaagagtccggcaacaagaggaagacaatggccgagaagagacagctgttcatagaaatgcgtgcccagaactttgacgtgatccgattgagtacctatcgaaccgcctgcaagcttcgcttcgtccagaagagatgcaacctccacctggtggacatctggaatatgattgaagcatttagggataacggtctgaacacgctagaccacactacagagatttcggtgtctaggctcgagacagtaatttcttccatctactatcagctgaataaaagactgccaagcacacatcagatatcagttgaacagtcaattagtttgcttctaaacttcatgattgccgcctacgactccgaggggcgagggaagctcacagttttttccgttaaagcaatgctagctactatgtgtggaggcaaaatgctagataaactgcgctag

SEQ ID NO: 115351 - DNA, 1794 bp, synthetic construct
  misc_feature 1..1794: note = Description of Artificial Sequence: Synthetic coding sequence
  source 1..1794: mol_type = other DNA
atgatcgaagagtccgggaataaacgaaaaaccatggcagaaaaaagacagctttttattgagatgcgagcccagaattttgatgtgatcagactgtcgacctaccgtaccgcttgcaaactgcgcttcgttcagaagaggtgcaacttgcatcttgtggatatctggaacatgattgaggcctttcgggataacgggttgaacaccctggaccacaccacagagataagcgttagccgattggaaaccgttatctcctctatctactaccaactgaataaacgtctcccttccacccaccagatttcagttgaacagagtatttccctactgctaaactttatgattgcagcctatgattctgagggaagggggaaactcacagtcttcagcgtgaaagcgatgttggctactatgtgcggcggcaagatgctggataagcttcggtacgtcttttctcagatgtccgactcaaatggacttatgatattcagcaagttcgaccagttcttgaaagaggttctgaagctaccaaccgccgtattcgaggggccaagctttggctatactgagcattcagtacgcacttgttttcctcagcaaagaaaaatcatgctgaacatgttcctggacaccatgatggccgacccacctccccaatgcctggtgtggctgcccctgatgcaccgcctggcccatgtggaaaacgtgtttcaccccgtggagtgcagctactgcagatgcgagtccatgatgggcttccggtatcgctgtcaacagtgtcataattaccagctgtgccagaattgcttctggcgcggccatgcaggcggaccacatagcaatcaacatcagatgaaagagcacagttcatggaagtccccagccaaaaaactcagccacgcaatctccaagtccttagggtgcgtaccaacaagagaacctccccatcctgtgttcccagagcaaccagaaaaacctctggatctggcgcacatcgtccctccacgcccccttacgaacatgaacgatactatggtgtcacatatgtcgtcaggggtcccgacccctacaaagaggctgcaatattcacaggatatcccatcccacctggctgatgagcatgctctgattgcgtcctatgtggcccgcttgcagcattgtgcaagagtgctagatagccctagtagattggacgaggagcaccgcctgattgcgaggtatgctgcacgcttggctgcagaggctggaaacgtgacacggcctcctacagacctatcctttaatttcgacgctaacaaacaacaacgccaattgatcgcggagctggagaataaaaaccgagagatactccaggaaatccaacggctgagactggaacacgaacaggcgagtcagcctaccccagagaaagcccagcagaaccctacacttctggccgagctgcgtctcctgcgtcagaggaaagacgagctggagcaacgcatgagcgcactgcaggagtcacggcgcgaactgatggtacaactcgaggaactcatgaaattacttaaggaagaagagcagaagcaggctgcacaggccacagggagtcctcatacgagtccgacacacgggggggggcggccaatgccaatgcctgtgcgcagcacttccgccggaagcacaccaactcactgcccacaagactcattgtccggggttggcggagatgtgcaggaagccttcgcccaggcggaggaaggtgccgaggaggaggaggagaagatgcagaatggcaaggatcgcggctag

SEQ ID NO: 115352 - DNA, 1683 bp, synthetic construct
  misc_feature 1..1683: note = Description of Artificial Sequence: Synthetic coding sequence
  source 1..1683: mol_type = other DNA
atgattgaggagtcaggcaacaaacgcaagacaatggcggagaagcgacagcttttcattgaaatgagagcccagaatttcgacgtaattcggttatccacttataggactgcctgcaaactacggtttgtacaaaagcggtgcaatctccatctagtggatatttggaacatgatcgaggccttccgtgacaatggattgaatacactcgatcacactacagagataagtgtctcacgcctggaaacagtgatttcctccatctattaccaacttaacaagagacttccctctactcatcagatctctgtggagcaatctatctccctattgctgaatttcatgatcgccgcctatgattctgagggaagagggaagctgacggtgtttagtgttaaggccatgttggcaaccatgtgcgggggtaaaatgttggacaagctcagatatgtgttttctcaaatgagcgatagtaatggactgatgatcttcagtaaattcgatcagtttctgaaagaggtgctgaagctgcccaccgccgtgttcgaaggcccctcatttggttatactgaacatagcgttcggacctgttttccccagcagcgaaaaataatgttgaatatgtttctggataccatgatggcggacccaccccctcaatgcctagtttggttaccactcatgcacagactggcgcacgtcgagaacgtttttcaccccgttgagtgcagttattgccgctgcgaatcaatgatgggtttccgctatcgctgtcagcaatgtcataattatcagttatgtcaaaattgcttttggcggggccatgccggagggcctcacagtaaccagcatcagatgaaagagcacagcagctggaagagtccagcaaagaaactgagccatgcgatctccaagtctctgggctgcgtgccaacccgggagcccccacatcccgtctttccagagcaacccgagaaaccactggacctggcacacatcgtgcccccgaggcctctcaccaatatgaatgacaccatggtttcccatatgtctagtggggtccctacccccacgaaaagtgtgcttgactcaccatcccggttggacgaagagcatcgcctgattgcgaggtatgctgccaggttggccgccgaggctggcaatgttacgcgcccgcccacagacctgagctttaatttcgacgctaacaaacagcagcgtcagttaattgcggaacttgagaacaagaatcgtgagatcttgcaggagattcagagacttcggctcgagcacgagcaggccagccagccgacaccagagaaagctcagcagaatcctacactcttggcagagctccgactgctccgtcagcgcaaagatgagctagaacaaagaatgagtgctctccaggaatcacgtcgagaactgatggtgcagctggaggaactcatgaagctgctgaaggcccaagccacaggatcccctcatacgagcccgactcatggggggggccgccccatgcctatgcctgtgaggagcacatctgctgggtccacacctacccattgccctcaggattctctatccggcgtggggggagatgttcaggaggcatttgctcaggctgaagaaggtgccgaagaagaggaggaaaagatgcaaaacggaaaagaccgggggtag

SEQ ID NO: 115353 - DNA, 1884 bp, synthetic construct
  misc_feature 1..1884: note = Description of Artificial Sequence: Synthetic coding sequence
  source 1..1884: mol_type = other DNA
atgatagaagagtccggaaacaagcgtaaaaccatggcggaaaagcgtcagctctttatcgagatgagggcccagaactttgacgttatacgcctgagcacttaccggactgcttgtaaattgagatttgtccagaagcgctgtaacctgcacctcgtcgacatctggaacatgattgaggcattccgtgacaatggccttaacactctggatcataccacagagatttccgtcagcaggctggaaacggtcattagttccatttattatcagctgaataagcgcctcccttctacccaccaaatctccgtggagcagtccatcagccttctcctgaactttatgattgccgcctatgactccgagggccgtgggaaattaactgtgttctctgttaaggccatgctggccactatgtgcggcggtaaaatgttagacaagctcagatatgttttctcacagatgagtgactccaatggactgatgattttctcaaagttcgaccagtttctgaaagaggttttgaagctccctacagctgtgtttgaaggtccctccttcgggtatacggagcattctgtaagaacatgtttcccgcagcagaggaagatcatgctgaatatgtttctggacacgatgatggccgaccccccgccacagtgcctcgtctggttgccgctgatgcacaggctggcacatgtagagaacgttttccaccccgttgagtgctcttactgccggtgtgagagtatgatggggttcaggtatagatgccaacaatgtcacaattaccagctgtgtcaaaactgtttctggcgaggacacgccgggggaccacacagcaatcagcaccagatgaaggagcatagttcttggaaatcccctgcaaaaaagctgtcccatgcaatctctaagagtctcggctgtgtgccaactcgggaaccccctcaccctgtgtttccagagcagcccgagaaaccactggacttagcccatattgtaccacctcgaccattaactaatatgaatgacactatggtcagccacatgtccagtggagtccctacacccactaaaaggctgcaatacagccaagatatcccttcgcatctcgcggacgaacatgcgctgatagcctcttacgtggcccgcctgcaacattgtgcacgcgtgctggacagcccctcccgcctggatgaggagcaccgccttatcgccagatatgcggcgaggctcgcggccgaagccggtaatgtgacgcgaccgcctaccgatctctcgtttaacttcgacgcgaataagcagcagcgacagctcattgccgagctcgagaataaaaatcgcgagatcctgcaagaaattcaaaggctgcgccttgaacacgaacaggctagccagcctacacccgagaaggcccagcaaaatcctaccctcctggccgagttgagactgctgaggcagcggaaagacgagctggagcaacggatgtccgcactccaggagagtcgcagggagcttatggtgcagctggaggagttaatgaagttgttaaaagaggaggaacaaaaacaggctgcacaggccactggtagccctcacacctcgcctacacacggaggtggccggccaatgcctatgccggtcaggtctacaagtgcggggagcaccccaacacactgccctcaggactctttgtccggggttggcggagatgtccaggaggccttcgctcaagggacacgccggaatcttagaaacgacttattagtcgctgcggactctattacaaatacgatgagcagtttggttaaagaactccacagcgccgaagaaggcgccgaggaggaggaagagaagatgcagaacggcaaagaccgcgggtag

SEQ ID NO: 115354 - DNA, 1704 bp, synthetic construct
  misc_feature 1..1704: note = Description of Artificial Sequence: Synthetic coding sequence
  source 1..1704: mol_type = other DNA
atgattgaggagtctggaaataagcgcaagaccatggcagagaagagacaacttttcatcgagatgagggcccagaatttcgatgtcatcagactgagcacataccgcacggcctgcaaattacgctttgtgcagaagcggtgcaatctacacctggtagacatctggaacatgatcgaggcgtttagggacaatggcctaaatacccttgatcacacgaccgaaatttccgtctctaggctggagaccgtcatcagctctatctactatcagctgaacaaacgcctcccatcaacccatcagataagcgtagaacaatctattagcctcctgctcaacttcatgattgctgcctacgattcggagggcagaggtaagctcacagttttcagtgttaaggcaatgcttgccacaatgtgcgggggaaaaatgctcgataagcttaggtatgtgttttctcaaatgagcgatagtaatggtctcatgattttcagtaaattcgaccagtttctgaaggaggtacttaagctgcccacagccgtctttgagggcccgtcattcgggtacaccgaacatagtgtgcgcacctgcttcccacagcaacggaagattatgctgaatatgttcctggacaccatgatggcagatcctccaccccagtgccttgtctggctgccacttatgcatcgcttggcccatgtagaaaatgttttccacccggtggaatgctcctattgcaggtgtgaatcgatgatgggcttccgttatagatgtcagcagtgccataactatcagttgtgtcaaaattgcttttggagggggcacgctggtggaccacactcaaaccaacaccagatgaaagagcactcaagctggaagagtcctgccaaaaaattgagccacgcaattagcaaatcactggggtgcgtgcctactcgggagcctccccatcccgtttttccagaacaaccagagaaaccgctggacttagcacacatagtgcccccaaggcctttaactaatatgaatgacacgatggtatctcacatgtcgagcggagtgccgactcccacgaaaagcgtgctggattccccttcccgtctcgacgaggaacaccggctcatcgcacgttacgctgcccgactggcggctgaggcggggaacgttactagaccgcctaccgatctgtcctttaattttgatgccaataagcaacagaggcaacttattgcagagttagagaacaaaaatcgcgagattctccaggaaatccagaggttgaggctagaacatgagcaggcctcacagcccacaccggagaaggctcaacagaatcctacgcttttggcagaacttagattattacgccaaagaaaagacgaactagagcagagaatgagtgcattacaggagtcccgccgtgagcttatggttcagctcgaggagctgatgaagctacttaaagaagaggagcagaaacaggcggcccaggctactgggtcgccccatacaagccccacccatggcggaggacgcccgatgccaatgcccgtaagaagtacttccgctgggtccactcctacccattgcccccaggattctctcagtggcgtcgggggcgacgtacaggaagcctttgcacaggcggaggaaggggcggaagaagaggaggaaaagatgcagaatgggaaggataggggttag

SEQ ID NO: 115355 - DNA, 1773 bp, synthetic construct
  misc_feature 1..1773: note = Description of Artificial Sequence: Synthetic coding sequence
  source 1..1773: mol_type = other DNA
atgattgaagagtctgggaacaaacgaaaaacaatggctgagaaaagacagttatttattgagatgcgggcccagaacttcgacgtgatccgcctgagcacttaccgcaccgcctgcaagctgagattcgtgcaaaaacggtgcaatctacatctggtggatatctggaatatgattgaagctttccgggacaacggtctaaatacccttgatcacacaaccgagatcagcgtgagccgactcgagacagtaatctcttccatctattaccaactgaataagcgtttgccatcaactcaccagatttcagtggaacagtctatctctctgctcctgaatttcatgatcgccgcttatgattccgaaggaagagggaaattgactgtgttcagtgttaaagctatgctggcaaccatgtgtggaggcaagatgctggacaagttgaggtacgtgttttcccagatgtcagattccaacggcctgatgatcttttcaaagtttgatcagttcctcaaggaggtgctgaagttgccaactgctgttttcgaaggtccgtcctttggatacactgagcacagcgtacgcacttgtttcccacagcagcggaaaataatgctgaatatgtttttggataccatgatggcagacccccctccccaatgcctcgtatggctgccgcttatgcaccgtttggcccatgtggagaatgtcttccaccccgttgagtgtagctactgtcgatgtgagagcatgatgggattccgctaccgttgtcagcagtgccacaattaccagttatgccagaactgtttctggagggggcacgcaggcgggcctcactcgaaccagcaccagatgaaggaacatagctcatggaagtctcctgcaaaaaagctgagtcacgcgatatccaaaagcctcgggtgcgtgcctaccagagaaccccctcaccccgtgttcccagagcagccagagaagcctcttgacctggcacacattgtgcccccgcgaccgctaacaaacatgaacgacacaatggtctcacatatgagttccggagtcccaacaccaacaaagagcgtcctcgactccccatcacgcctcgacgaagaacatcggctgattgctcgatacgcagcaagactcgccgctgaagctggcaatgttacacgccccccgactgacttgtccttcaactttgatgctaataaacagcagagacagttgatcgctgagcttgagaacaagaatcgcgagatcctgcaggaaattcaacgtttgcggctggagcacgaacaggccagtcagcctactcctgaaaaggcacagcagaacccaaccttactcgcagaactacgcctgttacggcagaggaaagatgaattagaacagcggatgtccgcactgcaggagtccaggcgggaactgatggtgcagctcgaagagctgatgaagctgctgaaagcccaggctaccggatctcctcatacaagccctactcacgggggaggacgccctatgccgatgccagtaagaagcacttctgctggtagtacacccacccactgtccccaggactctctgtcaggagttggaggtgatgttcaggaggcctttgcgcaaggcacccgccgcaacctcagaaatgatctgcttgtagctgcagacagtattactaatactatgtcctccctggtaaaggagctgcactcagcagaagagggggctgaggaggaggaagagaaaatgcaaaacggcaaggataggggttag

SEQ ID NO: 115356 - DNA, 1830 bp, synthetic construct
  misc_feature 1..1830: note = Description of Artificial Sequence: Synthetic coding sequence
  source 1..1830: mol_type = other DNA
atgatagaggagagtggcaataagcgtaaaaccatggcagaaaagcggcaactgttcattgaaatgagagcgcagaacttcgatgttattaggctgtcgacttatcgcactgcgtgtaagctccgtttcgttcaaaagaggtgcaacttgcatctggtggacatctggaatatgatcgaagcattcagagacaatggattgaacaccctcgaccacacgacagagatctccgtgagcagactcgaaacagtgattagctcaatttattaccagctgaacaaacggctgcctagcactcatcaaataagtgtcgaacagtcaatcagcttgctgttgaattttatgatcgctgcttacgatagcgaaggacgcggtaaactgacagtgttttcagttaaggccatgttggccacaatgtgtggtggaaaaatgttggacaagctaagatatgtgttctctcagatgtctgactccaacggactcatgattttctccaaattcgaccagttccttaaagaagtactaaagcttccgactgcagtctttgaaggaccctcatttgggtacacagagcatagcgttcgcacttgctttcctcagcagaggaaaattatgctgaatatgttcctggatacgatgatggcagatcccccaccacagtgtttggtctggttacccctcatgcatcgccttgcacacgttgagaatgtgttccaccccgttgaatgcagttactgccgttgtgagagtatgatggggttcaggtaccggtgccagcagtgtcacaattatcaactctgtcaaaactgcttctggcgggggcacgctggaggcccgcactccaaccagcaccaaatgaaggagcattcttcttggaaaagcccagccaagaaactaagccatgccatcagtaaatcactcggttgtgtgccgactcgagagccacctcaccctgtgttccctgagcagcctgaaaaacccttggacctggctcatatcgtgcctcctagacctctgactaacatgaatgatacgatggtgtcccatatgagcagcggagtgcccacccctaccaaacgtctccaatactctcaggatatccccagccacctcgctgatgaacacgccttgatcgcaagctacgtcgcgcgattgcagcactgcgcacgtgtgctcgatagtccctcgcggctagacgaggaacaccgattgattgcacggtacgccgcgaggttggcagcagaggctggaaatgtcacgagacctcccacggacctgtctttcaactttgacgcgaacaagcagcagcggcagttgatcgctgagctggaaaataaaaacagagagatactgcaggaaatccagaggctacgtctagagcatgagcaggctagccagcctactcctgagaaagctcaacagaaccctaccctccttgcagaattgcgcctgctcagacaacggaaggacgaactcgagcagcgcatgagtgccctacaagaaagtcgtagggagctgatggtgcagctggaagaactaatgaagttgttgaaagaggaagagcaaaagcaggctgcacaggccaccggatctcctcatactagccccacccacggcggtggacggccaatgccaatgccagtccggtccacctcagccggttccacaccaacccactgtccacaggactccctcagcggcgttggcggcgacgtccaggaagccttcgctcaggggacccggcgcaacctgaggaacgacttgcttgtggcggccgactctataacaaatacaatgagctcgcttgtcaaggaattgcattccgggtag

SEQ ID NO: 115357 - DNA, 1638 bp, synthetic construct
  misc_feature 1..1638: note = Description of Artificial Sequence: Synthetic coding sequence
  source 1..1638: mol_type = other DNA
atgatcgaggccttccgggacaacggacttaatactctagaccacacaaccgagatttctgtgagtagactggaaaccgtgatctcatccatctactaccagctaaacaagagactgcccagtactcatcagatttccgtggaacagtctataagtctgttgctcaattttatgatcgccgcttatgactccgagggcagggggaagttgacagtcttttctgtcaaagccatgttggccactatgtgtgggggcaagatgctggacaagctacgatatgtgttttctcagatgagcgatagtaacggcctaatgattttttcaaagtttgaccagttcctcaaggaagtcctgaaacttcccacagccgtgttcgagggccctagcttcggctacaccgaacattcagtacggacttgcttcccacaacaaagaaagatcatgttgaatatgttcttggacactatgatggctgacccaccccctcaatgcctggtctggctcccactgatgcacagactggctcacgtagaaaacgtcttccaccccgtggagtgcagctattgcagatgcgagtcaatgatgggcttccgatatagatgccagcagtgccataactatcagctgtgtcagaactgtttctggcggggccacgccggcggacctcactccaatcagcatcagatgaaggagcattcttcctggaaaagccccgccaagaaattgagccacgcaatcagcaaaagcctgggctgcgtgccaacgagagagcctccacatcctgtatttccagagcagccagaaaagcctctggacctggcccacattgtgccaccgcgccccctgacaaatatgaatgacacaatggtgagccatatgagcagtggagtgcctactccaaccaaacgcttgcagtactcgcaggacatcccctcccacctcgcggacgagcatgccctcatagcatcctacgtagccagattgcagcattgtgcccgcgtgctggactctccatcccgcctggacgaagagcataggctgattgcacgatatgcagcccggcttgccgccgaagctgggaacgttaccagaccgccaacagatttgagctttaactttgatgcaaacaaacagcaacgtcagttaatcgccgagctggagaacaaaaaccgtgaaatacttcaggaaatacagaggctcaggctggaacacgaacaggctagccagcccaccccagaaaaagctcagcagaatcctaccctgcttgcagaactgcggttattacggcagcggaaggatgaactcgaacaacggatgtcagccctgcaggagagtcggagggaactgatggttcaactcgaagaactcatgaagctcttaaaagcccaggctactgggtctccccacacatcacccactcatgggggcgggcggcctatgcccatgcctgtgcggtcgacaagcgccggatcgaccccaacccactgcccacaggactccctcagcggagtgggtggggatgtccaagaggccttcgcacagggcacacgaagaaacttacgaaatgacctgctggttgcagccgattccattaccaatacaatgtcttctttggtcaaggagctgcatagtggatag

SEQ ID NO: 115358 - DNA, 960 bp, synthetic construct
  misc_feature 1..960: note = Description of Artificial Sequence: Synthetic coding sequence
  source 1..960: mol_type = other DNA
atgacagacgtcttcagtcagatgtccgattctaatggtctgatgatcttctcaaagtttgatcagtttcttaaagaggttcttaaactccccacagctgtctttgaagggccctccttcgggtacaccgagcacagtgtgcgaacatgctttccacaacagaggaagatcatgcttaacatgtttctcgacaccatgatggcagacccaccgcctcagtgtttggtgtggcttcccttaatgcatcggcttgcgcacgtcgaaaatgtctttcatcccgttgaatgttcttactgtcgctgtgaaagtatgatgggattccgataccgttgtcaacagtgccataattaccagctctgccaaaactgtttttggcgcggtcacgccggagggccacactccaaccaacatcaaatgaaagagcactctagctggaagagtcctgcaaagaagctttcccacgcgatcagcaaaagtttagggtgtgtccccacccgagagcctccgcaccccgtgtttccagaacagcctgaaaaacccttagatcttgctcatattgtgccccccaggcctctgacaaatatgaatgatacaatggtgtctcatatgtccagcggcgtaccaactccaaccaagcgcctgcagtactcccaggacatacctagccacctggctgatgagcatgccttgatagcaagttatgtggccaggctccaacactgcgctagggtgctggatagcccatcaagactcgacgaagaacaccggctaattgccagatatgctgcccgcctggcagcagaagccgggaatgttacacggccaccaactgatttgtcttttaacttcgacgctaacaagcagcagcgtcagctgatagccgagcttgaaaacaagaatcgggagattctccaagagatccagaggctgcggctggaacacgagcaagcctcacagtag

SEQ ID NO: 115359 - DNA, 1251 bp, synthetic construct
  misc_feature 1..1251: note = Description of Artificial Sequence: Synthetic coding sequence
  source 1..1251: mol_type = other DNA
atgttaaacatgtttcttgatactatgatggcagacccaccccctcagtgcctggtctggttaccactcatgcacaggctggcccatgtcgaaaacgtatttcacccagtcgagtgctcctactgccgatgcgaatcaatgatgggttttagataccgatgccagcagtgtcacaattaccagctgtgccagaattgcttctggagggggcacgccggaggaccccattctaaccagcaccagatgaaggagcattcatcttggaaaagccccgccaagaagctgagccacgctatttcaaaatcattggggtgcgtccctacgagagagccaccccaccctgtcttccctgagcaaccagagaagcctctggatctcgctcacattgtgccacccaggcctctgactaacatgaatgatactatggtgagccatatgagttctggagttccgacccctaccaaacgtctacagtacagtcaggacataccaagccacttagctgatgagcatgcactgatagcctcctatgtggctcggctgcagcattgcgcacgggttttagacagtcctagtaggctggacgaggaacacagactcattgcacgctatgcagcacgactcgcagctgaggcagggaatgtgacgcggcctcccacagacctgagttttaactttgacgccaataaacagcagcgtcaattgatagccgagctggagaacaaaaatcgggagatcctgcaggaaatccaacggctcagactggagcacgaacaggcctcacagccaacacctgagaaagcccaacagaatccgaccctgctggcagagcttaggctgctaaggcagcggaaggacgaattggaacagagaatgagcgcccttcaggaatcaaggagagagctgatggttcagctcgaagagctgatgaagctgttgaaggcacaggccactggttcaccccatacctcccctacacatggcgggggcagacccatgccaatgcccgtccgatcgacaagcgccggtagtactcccacgcactgcccacaagactctctctccggggtcggtggagatgttcaagaagcatttgcccaaggtacccgccgtaacctccggaacgacctgctagtcgctgcggactccattaccaacactatgagctctcttgttaaggaactgcactccgccgaagaaggtgccgaggaagaggaggaaaaaatgcaaaacgggaaagaccgcggatag

SEQ ID NO: 115360 - DNA, 2688 bp, synthetic construct
  misc_feature 1..2688: note = Description of Artificial Sequence: Synthetic coding sequence
  source 1..2688: mol_type = other DNA
atgcgtatgtcagtgggcctgtccttattgcttcccctgtcaggaagaacttttctgctgctgctctctgttgttatggcacagagccattggccgtccgagccctctgaggcagtacgggactgggagaatcagctggaagcttccatgcactccgtgttatcagatctgcacgaagccgttccgaccgtggttggcattcccgatgggacagctgtggtcgggcggtcgttccgcgtaactataccaactgacctcatagcctctagcggcgatatcataaaggtctccgcagctgggaaagaggcactgccaagttggttgcattgggactcacagagccacaccctcgaaggcctgcctctcgatacagacaagggtgtacactacatctccgtgtccgcgacacggctcggagccaatggatcccacatcccacagaccagctctgtttttagtatagaagtgtaccccgaggatcacagcgaattgcagagcgttaggacagcctctcccgacccaggcgaggtcgtcagtagcgcgtgtgcagcagatgagcccgtgaccgtcctcaccgttatcttggatgccgaccttacaaagatgaccccaaaacagaggattgaccttttgcatagaatgcggtccttctcagaggttgaactgcataatatgaagctggttccagtggtaaacaatcggttgtttgacatgtctgctttcatggccggacccggcaatgcaaaaaaggttgtcgagaatggcgcgttgctgtcctggaagctgggatgctcgttgaatcaaaattccgttccagatattcacggagtagaagcccctgcacgagagggggccatgtccgcacaactcggctatcccgtagttggttggcacatcgcaaacaaaaaaccccccttgccgaagagggtgcggcgtcagatccacgctaccccaacacctgtgaccgctattggaccccccactaccgccattcaggaaccgcccagtagaatcgtacccacacccacctcaccagcaatagcacctcctacggaaacaatggcaccgcccgtcagagatcccgtacctggcaagcccacagtcaccattcggacccggggggcaatcatccagacgcctaccctgggacccattcagcctacaagggtgtccgaggccggtactactgtccccgggcagatccgtccgacaatgaccattccaggctacgtggagcccacagctgtcgccactccccccaccaccacgacaaaaaagccaagagtttccactcccaagcccgcaacacccagcactgacagtacgactacaaccacgcgaaggcctacaaaaaagccacgcacaccaagaccagtgccgcgtgtcactaccaaggtgtctatcactaggcttgagacggctagcccacctactaggatcaggacgactacctctggggtgccacggggtggggagcctaatcagcgcccagaactgaagaatcatatcgatagagtcgatgcttgggttggaacatactttgaggtgaaaatcccatctgacacattctacgatcatgaggatacgacaaccgacaagctaaagctgacgctcaagttgagagaacagcagctagtgggcgagaaatcttgggtgcagttcaactctaattcacagcttatgtacggcctgcctgattcttcacatgtcggtaaacacgagtacttcatgcacgcaaccgacaaaggagggctgagcgcagtagacgcctttgagattcacgtacatcgcaggcctcaaggggatcgggcgcctgcgaggttcaaggctaagtttgtgggggaccctgcattggttctgaatgatatccacaagaaaattgctcttgttaaaaagctggccttcgcgttcggtgacaggaattgttcaacgataacactccagaatatcaccagggggagcattgtcgttgagtggacgaacaatacccttcccctggagccctgtcccaaggagcagatcgccggtctcagtcgccggatcgctgaggatgacgggaagccacggcccgccttcagcaatgccctggagcctgatttcaaggctactagcattactgtcactggctcagggtcctgcagacacttacagtttattccagtagtgcccccgcggcgagttcccagcgaggccccgccaaccgaggtgcctgatcgagacccagagaagagcagcgaagacgatgtgtatctccacacagttattcctgccgtagttgtcgccgcgattttactaattgccgggattattgctatgatctgttatcgcaagaaacggaaaggtaaactcactcttgaagaccaggccacgtttatcaaaaagggggtgcctatcatttttgccgatgagcttgatgacagcaaacctccgccgagcagttcaatgccactgatcctccaggaagaaaaggcccctctgccacctcccgaatacccaaaccaatccgtgcccgaaacaacccctctcaatcaggatacaatgggcgaatatacccccctcagggatgaagaccccaacgcacctccctaccagccaccaccaccctttacagcacctatggagggtaagggttctcggcccaagaatatgaccccctatcggtcacctcccccttacgtgcccccctag

SEQ ID NO: 115361 - DNA, 432 bp, synthetic construct
  misc_feature 1..432: note = Description of Artificial Sequence: Synthetic coding sequence
  source 1..432: mol_type = other DNA
atgacacctaagcagagaatcgatctgctccaccgcatgcgcagcttctctgaagtggagctccataacatgaagctcgtcccagtcgtgaacaaccggttatttgatatgagcgcgtttatggcgggccctggcaatgccaaaaaagtggtggaaaacggtgctcttctgtcatggaaacttggctgctctcttaatcagaactccgttcccgatatccacggtgtcgaagcaccagcgagagagggagctatgtctgctcagctgggctaccctgtggtgggatggcacattgcaaacaaaaagccccctgctctttcaggcccgcctaagcctcagagctcctggcgcgacttcggggattttttcatcttcatcttttgcctgactgcatttggactcttcatcgagaattcttcactgcatttttag

SEQ ID NO: 115362 - DNA, 267 bp, synthetic construct
  misc_feature 1..267: note = Description of Artificial Sequence: Synthetic coding sequence
  source 1..267: mol_type = other DNA
atgaggatgagcgttggattgagcctgctcctgccactcagtggtcggacatttcttctgcttctgtctgtggttatggctcaatcacattggccaagcgagccctctgaggcagtgcgagattgggagaaccagctggaggccagcatgcactccgtgcttagcgacctgcatgaggctgttcctaccgtggttggcattccagacggaaccgctgtcgtaggtagatcattccgcgttacaatcccaaccgatctgattgcctag

SEQ ID NO: 115363 - DNA, 48 bp, synthetic construct
  misc_feature 1..48: note = Description of Artificial Sequence: Synthetic coding sequence
  source 1..48: mol_type = other DNA
atgcgcatgtcagttggcctaagcctccttctgcccctgagcggatag

SEQ ID NO: 115364 - DNA, 321 bp, synthetic construct
  misc_feature 1..321: note = Description of Artificial Sequence: Synthetic coding sequence
  source 1..321: mol_type = other DNA
atgaggatgtccgtggggttgtccttgctgctccctctcagtggtcggacgttcctgctgttgttaagtgtggtgatggcccagtcgcactggccttccgagccttctgaagctgtgagggactgggagaatcagctggaggcctctatgcactccgtactctcagacctgcatgaggccgtgcccacggttgtgggtatcccagacgggactgctgttgtgggtcgctccttccgggtcacaattccgacagacctgatcgccagcagcggagacattattaaagtgagcgctgcaggcaaagaggcgctaccaagctag

SEQ ID NO: 115365 - DNA, 291 bp, synthetic construct
  misc_feature 1..291: note = Description of Artificial Sequence: Synthetic coding sequence
  source 1..291: mol_type = other DNA
atgagaatgagcgtaggacttagtctactcctgccactgtcagggaggacctttttgctgcttctttccgttgtaatggcacaatcacactggcctagcgaaccatcggaggccgtgagggattgggaaaaccagctggaggcaagcatgcactccgtgcttagcgacctgcatgaagcagtccctactgtggtcgggattccggacggaactgcagtcgtggggagaagctttcgagtgactattcccacagacctcatcgcctcatcaggcgacataattaaggtttag

SEQ ID NO: 115366 - DNA, 30 bp, synthetic construct
  misc_feature 1..30: note = Description of Artificial Sequence: Synthetic coding sequence
  source 1..30: mol_type = other DNA
atgcggatgtcagtggggctgtctctctag

SEQ ID NO: 115367 - DNA, 354 bp, synthetic construct
  misc_feature 1..354: note = Description of Artificial Sequence: Synthetic coding sequence
  source 1..354: mol_type = other DNA
atgaggatgtctgtgggactgagcctgctgttacccctgtcagggaggacatttttattactcctctctgtcgttatggcccagtctcattggccaagtgaaccaagtgaagctgtacgtgattgggagaatcaactcgaggcaagcatgcactctgtgctaagcgacctgcacgaggctgtcccgacagttgtgggtatccctgatgggacagctgtggtaggaagatcctttagagtcacaatcccaacagatttgatcgcatcaagtggagatattattaaggtgtctgcggccggaaaagaggctttgcctagctggttgcattgggactcacagagccacaccctgtag

SEQ ID NO: 115368 - DNA, 159 bp, synthetic construct
  misc_feature 1..159: note = Description of Artificial Sequence: Synthetic coding sequence
  source 1..159: mol_type = other DNA
atgcgtatgtccgtgggcctgtcacttctactccctttgagtggaaggaccttccttctcctcttatcagtcgtgatggcccagagtcactggccatcggaacctagcgaggccgttagagactgggagaaccagctggaggcctctatgcatagctag

SEQ ID NO: 115369 - DNA, 261 bp, synthetic construct
  misc_feature 1..261: note = Description of Artificial Sequence: Synthetic coding sequence
  source 1..261: mol_type = other DNA
atgcgcatgagtgttggactatcccttttgttacctctgtctgggcgcacattcctgctgctgctgtctgtcgtgatggctcagagtcattggccatcagaacccagcgaagctgttcgagattgggagaaccagctggaagcttcaatgcatagtgtgctctctgacctgcacgaggcagtgcccaccgtagtaggcattcccgacggcactgctgttgtggggagaagcttcagagttaccatccctactgatttgtag

SEQ ID NO: 115370 - DNA, 126 bp, synthetic construct
  misc_feature 1..126: note = Description of Artificial Sequence: Synthetic coding sequence
  source 1..126: mol_type = other DNA
atgagaatgagcgttggcctgagtctcctcctgccattgagcggaagaacctttctgctgctgcttagtgttgtcatggcgcaaagccattggccctcggagccatcagaggccgtgagggattag

SEQ ID NO: 115371 - DNA, 2688 bp, synthetic construct
  misc_feature 1..2688: note = Description of Artificial Sequence: Synthetic coding sequence
  source 1..2688: mol_type = other DNA
atgaggatgtctgttggactaagtttgttactaccactgtctggtcgcacatttttactgctcctgtcagtcgtgatggctcagtctcactggccctccgaaccttctgaggccgtgagagattgggagaatcagctggaggccagtatgcacagtgtgttgtctgatctgcacgaggcagtacccactgttgtgggcatccctgatggaacagctgttgtggggcgctcctttagggtcaccattcctacagatctgatcgcatctagtggggatattatcaaggtgtccgccgctggaaaagaggccttgccatcttggcttcattgggactcacagtcccacaccctggagggactgcccttagacacagacaagggggtccactacattagcgtaagtgccactaggctgggcgccaatgggagtcacattccccagacgtcttccgtctttagtatcgaggtgtaccccgaggaccactcagaactgcagagcgtgcgcacagcatctcctgaccctggtgaggttgtttcatccgcgtgtgcggcagacgagcctgtgaccgtacttactgtgatcctcgatgctgatttaaccaaaatgactccaaagcagcggattgacctcctgcacagaatgcgaagcttttccgaggtggaactccacaatatgaagcttgtacccgttgtcaacaatagactgtttgacatgtccgcttttatggccggacccggcaatgccaaaaaagtggtcgaaaacggagcgctactgagctggaagcttggatgtagcctgaatcagaattctgtccctgatatccacggagttgaggctcctgcacgggaaggcgcgatgtccgctcagctgggataccccgtggttggctggcatattgcaaacaaaaaacccccactcccaaagagagtcagaagacagatacacgctacacccacccccgtcactgctatcggccccccaaccactgcaatccaagaaccaccctctcggatagtgcctacgcccacctccccagcaatagcgccaccgacagagacgatggcccctcctgtacgcgatcctgtacctggcaaaccaaccgtgacaattcggaccagaggcgctataatccagaccccaacgctagggcccatccaacctaccagggtgtccgaagcagggactaccgtgcctggccagatccgcccaaccatgacaatacccgggtatgtggagccgaccgccgtggcgacccctccaacaaccacaaccaagaaaccacgcgtctcgacccccaagcccgccacaccctctaccgattccacaacaacaaccactcgccgccccacgaagaagccacgaacgccacgtccagtgccgagggtgacaactaaggtgtccataacgcgactggaaaccgcttcaccaccaaccagaattcgtaccaccaccagcggtgtgccaagagggggagaacctaaccagagaccagagctgaagaaccacatagatagagtcgacgcatgggttggaacttattttgaggtaaaaattccttctgataccttttacgaccatgaagatactactacggacaagctgaaactcaccctcaaactgcgggagcagcaattggtcggcgaaaaatcatgggtgcagttcaatagtaactcccaactgatgtatggccttcccgacagtagccatgtaggcaagcacgaatattttatgcacgctactgacaaaggcgggctgtcagctgtggacgctttcgagatccatgtgcatcgcagaccccagggagaccgcgccccagcccgattcaaggcaaagtttgttggtgaccccgcgctggtgttgaacgacatccacaaaaaaattgccctggtaaagaaactggcgtttgctttcggagacagaaattgttcaaccattaccctccagaatattactaggggcagcatcgtggtcgagtggacaaacaacactcttcctctcgaaccctgccctaaagaacaaatcgccggcctcagtcgcaggatcgctgaggacgacggtaaaccaaggccggccttttctaacgcactggaaccagattttaaagcaacctctataacggtcactggaagcggttcttgccggcatcttcaattcatcccggtcgttccaccacgccgagtgccgtccgaggcccccccaaccgaagtgcctgacagagatccagagaagagttcagaagatgatgtatatcttcatacagtgattcctgcggtcgtcgttgccgccattctcctcatcgctggcataattgcaatgatctgttatcggaaaaagcgaaaagggaagctgaccctggaagatcaggccacgttcattaaaaagggcgtgcctattattttcgccgatgagctggacgacagtaagcctcctccatcctccagcatgccccttatcttgcaggaggagaaagcccctctcccccctcctgagtaccccaaccagagtgtgccagagaccactcccttgaatcaggataccatgggtgagtacactccccttcgagatgaagatcccaatgccccaccttaccaaccaccccccccctttaccgcccccatggagggcaagggctctagacctaaaaacatgaccccttatcgaagtcccccaccgtatgtgcccccttag

SEQ ID NO: 115372 - DNA, 2688 bp, synthetic construct
  misc_feature 1..2688: note = Description of Artificial Sequence: Synthetic coding sequence
  source 1..2688: mol_type = other DNA
atgagaatgagcgtgggactgtcgctcctcctgcctctgtccggaaggacattcctgctgctgctgtcagtggtcatggcccagtcgcattggcccagtgagccctctgaagctgtgagggactgggaaaatcagctcgaagcatccatgcacagtgtgctgagcgatcttcacgaagcagttccgaccgtggttggcattcccgacggtacggctgttgtgggccggagcttccgagtcacaatccctaccgacttgattgcctcatctggcgatattatcaaagtgagcgctgccggcaaagaagctctgccctcttggctccactgggactcccagtctcatacactggaaggactccctctggatacggataaaggcgtccattatatctccgtctcagccaccaggctcggggcgaatgggtcgcatattcctcagacttctagcgtattcagcatagaggtgtatccagaagatcactccgaacttcagtccgtgaggaccgcatctccagatccaggcgaggtcgttagctctgcctgcgcggcggacgagcccgtaactgtacttacggttattctagatgcagacctgaccaaaatgacgccaaagcagagaatcgatctgttgcaccggatgcgctcattttccgaagttgaacttcacaacatgaagctcgtccccgtggtgaacaaccggttgtttgatatgtctgcattcatggccggccctggcaatgcgaaaaaggttgtcgagaacggggcccttctgagctggaaactggggtgctctttgaatcaaaactccgtcccggatatccacggcgtagaagctccagcccgcgaaggcgctatgtcagcgcaactggggtatccagtggtgggttggcacatagctaataaaaagccccctctccccaagagggtcaggcgccaaattcacgccacccctacaccagttactgcgataggcccaccgaccaccgcaatccaagagcctccctctaggattgtccctacaccaacgtccccggcaatagcccccccaacagagacaatggcccctcccgtcagagatcctgtgccaggcaaacctacggttacaatccgtaccaggggcgctatcattcagacacccaccttgggtccaatccaacccaccagagtgtctgaagctggtacaaccgttcccggccagattaggcctaccatgaccatacccggttacgtggagccaaccgccgtggctactcctcctaccaccaccacaaagaagccgagagtgagcacacccaaaccggctaccccatctacagattctacaacaactactacccgccggcctacaaaaaagccgcgcacaccccggcccgtgccaagagtcactacaaaggtcagtattaccagactggagacagccagccctccgacacggattcgaaccactacatccggggtgcctagaggcggagaaccaaatcagcgcccagagctcaaaaaccacatcgaccgcgtggatgcctgggtgggcacttatttcgaggtgaaaattccaagcgatacattttacgatcacgaggataccaccactgacaaactgaaactcacccttaagctacgggaacagcagctggtgggtgagaagagttgggtgcaatttaactcaaattcccaactaatgtacggtctgccagatagtagccacgtgggcaagcatgagtactttatgcacgccactgacaaaggaggactgagtgcagtggatgcatttgaaatccacgttcatcggcgcccacagggggaccgggctccagcaaggttcaaagcgaagtttgtcggagatccagcattagtgctgaatgacattcataaaaaaattgccctggtgaagaagctggcattcgcatttggcgatcgtaactgtagcaccattaccttgcagaacatcacacgcggtagtatcgtagtggagtggacaaacaacaccctgccgctcgaaccgtgccccaaggaacaaatcgctggtctcagccggcggatcgcagaagatgacggaaaaccaaggcctgctttctctaacgcactggaaccagatttcaaggccacctccatcaccgtgactggctccggatcgtgcaggcatcttcaatttattcctgtggttcctcctagaagagtcccatctgaagcccccccaacggaagtgcccgaccgcgatccagagaagtctagtgaggacgacgtatacctgcacactgtcattcccgccgtggtggttgcagcaatactgctcatcgcgggcatcatcgcaatgatctgctataggaagaagaggaagggcaagctaaccctagaagaccaggccactttcatcaaaaaaggcgtgcctattatctttgctgatgagctggacgatagcaaaccacctccaagcagctcaatgccactgatactccaggaggagaaagcacccctgcctccccctgaataccctaaccagtccgtgcctgaaacaaccccactaaatcaggacactatgggagaatacactcccctcagggacgaggacccaaacgctccaccttatcagccccccccccccttcactgctcctatggaaggcaagggcagccgtcctaaaaatatgactccctacaggtcgccacctccctatgtccccccctag

SEQ ID NO: 115373 - DNA, 2688 bp, synthetic construct
  misc_feature 1..2688: note = Description of Artificial Sequence: Synthetic coding sequence
  source 1..2688: mol_type = other DNA
atgcgaatgtccgttggcttgagcctgctgttgccactgtccggtaggacatttttgcttcttctctcagtggtcatggctcagtcacactggccatccgaacctagcgaggccgtcagagactgggaaaatcagctagaagcgtcaatgcacagcgttctatccgacttacacgaggccgtgcccacagtagtgggcatccctgacgggacagccgtggtgggccggagtttcagggtgacaatccctacagatttaatcgcgagctccggcgatattatcaaagtgagcgccgcgggtaaagaggctctccccagttggctccattgggacagccagagtcacacactagaaggcctacccctggatactgataaaggggtccactatattagcgtgtcagccactagattgggcgctaatggctctcacattcctcagaccagctccgtctttagcattgaggtgtaccccgaggaccatagtgagttgcagagcgtgcggactgccagccctgaccccggggaagtcgtgtcttccgcgtgcgctgctgacgaacctgtcacagttttgaccgtgattttggacgctgacctgactaaaatgacaccaaaacagcgcattgatctgctgcaccgcatgcggtccttttcggaggtggagctgcacaatatgaaattggtgcctgtcgtaaataaccgtcttttcgatatgtctgcgttcatggcgggccccggcaacgccaagaaggtcgtcgagaacggcgctttgttatcttggaaattgggctgctcgctgaatcagaactctgtgcctgatattcacggggtggaagctcctgccagggagggggcaatgagtgcccagctgggctatcctgtggtcggctggcacatcgcaaacaaaaagcctccgcttccaaagcgggttcgcagacagattcacgctacgcctacaccagtgacggcaattgggcctcccaccaccgcaatacaggaaccacccagccgcatcgtaccgacaccaacaagcccggctattgccccaccaacagaaactatggccccaccagtccgggatcccgtgccgggtaaacctacggtaacaatccggaccaggggtgctattatccagacccctactctcggcccaattcagcctacaagggtgagtgaggctgggactaccgtcccaggccagataaggcccactatgacaatacctgggtacgtcgaaccgacggctgtggctactcctcctaccacgacaactaaaaaaccgcgcgtgtctactcctaaaccggccaccccaagcaccgattctaccaccacgacaacacgacgccctacaaagaagccgagaacaccgcgccccgttcccagagtgaccactaaagtgtcgataacccggctcgagactgcatctccgccaacacgcattcgcacgaccacaagcggtgtgccccggggtggagagcccaatcagcgcccagagctaaaaaatcacattgatcgcgttgatgcgtgggtgggtacctacttcgaagtgaaaatcccaagtgatactttttacgaccacgaggacacaactaccgacaagctgaagcttacactgaagttaagggagcagcagctagtaggggaaaagagctgggtccagttcaactccaactcccagcttatgtatgggcttccagattcgtcacatgtgggcaaacacgagtattttatgcatgcgactgataaaggggggctgtcggccgtggatgctttcgaaatccacgtacacagacgcccacagggcgatcgagcaccagctaggttcaaggctaagttcgtgggggacccagctttggtgctgaatgacatccataagaagatagccctggtgaaaaagctcgcattcgctttcggtgatcgaaactgctccaccatcacacttcagaacatcacacggggctccattgtggtcgagtggaccaataacacacttccactggaaccgtgtcccaaagaacagatcgctggtctgagcagacgaattgctgaggatgacggcaagccgagaccagcattctcaaacgctctggaacccgacttcaaagctaccagcatcactgtgacgggtagcggatcctgtcgccaccttcagtttattcctgtggtgcctcctaggcgcgtgccatccgaagcacccccaacggaggtgccagatcgggatccagaaaagagttccgaggacgacgtctaccttcatacagtgatcccagctgtcgtggtggctgccatccttttgatcgctggcatcatagccatgatctgctatagaaaaaagcgcaagggtaagctgactctggaggatcaggccacctttataaagaagggtgtcccaatcatctttgccgatgaactagacgactccaagcccccgccatcctcttcaatgccacttatcttgcaggaagagaaggctccactgcccccaccggagtacccaaaccagtcggtcccggagacgacccctctcaatcaggatacgatgggagagtatacccctctccgggatgaggatccaaacgcacctccgtaccaaccccctcctcctttcacagcacctatggaaggtaagggttctagacccaaaaacatgaccccctatcgaagccctcccccatacgtgcctccctag

SEQ ID NO: 115374 - DNA, 2688 bp, synthetic construct
  misc_feature 1..2688: note = Description of Artificial Sequence: Synthetic coding sequence
  source 1..2688: mol_type = other DNA
atgcgtatgagcgttggactcagcctgcttctcccactttctggccgcaccttcctgctgctattgtcagttgtgatggcacagagccattggccatccgaaccatcagaggctgtccgggactgggagaatcagctggaggctagtatgcattcggtgctatccgacttacacgaagctgtccccacggtcgtcgggatcccagatggaactgccgtggtgggacgatcattccgcgtaactatccccaccgatctgatagcatcctcaggcgatatcatcaaagtgtcagctgctgggaaggaggccctgccctcctggctccattgggatagccagagccataccctggagggactgcccttggatacagataaaggtgtgcactacatctcggtttccgctacaagactgggcgccaacggcagccacatcccgcaaactagctccgttttctcgatcgaggtgtacccagaagatcactctgagctgcagtcagtaaggactgccagccctgaccccggcgaagttgtatcctccgcctgtgccgccgacgagccggtgacagtgttgacagtcattcttgatgccgatctcactaagatgactcctaagcagcgcatcgatctgctgcatagaatgaggtcattttccgaggtggaactacataacatgaaacttgttcctgttgtgaataatcgccttttcgatatgtctgctttcatggccggtccaggcaatgcgaagaaagtagtggaaaatggagctctcttgagctggaaacttgggtgttctctcaatcaaaacagcgtaccggatatccatggggtggaagctcctgcccgggagggcgcaatgagcgctcaattgggctaccccgtggtggggtggcacatagcaaacaaaaaacccccgcttccaaaacgggtgagacggcagatccacgctactcctacccctgtcacggctattggtcccccaacaaccgccatccaggagcccccttcccggatcgtgcccacaccgacatcacctgcaattgccccccctaccgagacgatggctccccctgtacgggaccccgtccctggcaaacctaccgtgacgattcgcacgcggggagccattatccaaacccccacattgggacccattcagcccactagagtttctgaagcgggcacaaccgttccaggacagatcaggcccaccatgaccatcccaggttatgtggaaccgacagcggttgctacacctcctactacaacaactaaaaagcctcgggtatctactccaaaaccagctactccctcaacagacagcacgaccactacaactcgacgccctaccaaaaaacccaggacgcccaggcccgtacccagagttactactaaagtctctatcacaagactggaaacagcatcgccaccaacaaggatccgaacgactacaagtggggtaccccgcgggggagagcccaaccaaagacccgaactcaaaaaccacatagatcgggttgacgcttgggtcggtacctattttgaggtgaagatcccttctgatacgttctacgaccacgaggatacgaccactgataagcttaaattgactctgaaactcagagagcagcagctggtcggtgaaaaaagttgggtacagttcaacagcaacagtcaactcatgtacgggctgcccgacagttctcatgtcgggaaacatgaatacttcatgcacgccaccgataagggtgggctttctgcagttgatgcattcgaaattcacgtccacaggcgcccgcaaggagacagagcccccgctaggttcaaggctaagtttgtcggagaccccgccctcgtgcttaacgacattcataagaaaattgccttggtaaaaaagctggcttttgcatttggtgacaggaactgctcaacaatcactctgcagaacataacccgcggtagtattgtggtcgagtggactaacaacactctccccctggagccctgcccaaaagagcagatcgcaggcctgtcacggaggattgccgaggacgatggaaaaccaagacctgcatttagcaacgctctagagcccgatttcaaagctacatctataaccgttaccggtagtggttcatgtcgacatctccagttcatcccagtggtgccacctagaagagtgccaagcgaggcacctcctaccgaagtccctgatcgtgatccagaaaaaagctctgaggacgacgtgtacttgcatacagttatcccagctgtcgttgtggcagcaatcttactgatcgctggaatcatcgcgatgatctgctacaggaagaagaggaagggaaaactcactctggaagaccaagctacctttataaagaaaggggtgcctatcatcttcgctgatgaactcgacgatagtaagcctcccccttcctcctcaatgccactgattctgcaggaggaaaaggcacctctcccccctccagaatacccaaaccagtctgtgccagaaaccactccattaaaccaggacacaatgggcgagtacactccgctccgcgacgaagaccctaacgccccaccctatcagccgcctccacccttcacggcacctatggagggcaaagggtccaggcctaagaacatgacaccgtatcggtcccccccaccttatgttccaccctag

SEQ ID NO: 115375 - DNA, 2688 bp, synthetic construct
  misc_feature 1..2688: note = Description of Artificial Sequence: Synthetic coding sequence
  source 1..2688: mol_type = other DNA
atgcgcatgagcgtgggacttagcttgctcctcccactcagtggtcggaccttccttctgctcctttctgtggttatggcacagagtcattggccttccgaaccctctgaggcagtgagagactgggagaatcaactggaagctagtatgcacagcgtactgtccgacttgcatgaggccgttcctacggttgtggggatccccgacgggaccgcggtggtgggtagatcctttcgagtaaccataccaaccgacttgatcgccagtagcggagacattatcaaggtgagtgccgcaggaaaagaagccctgcccagctggctgcactgggactctcagagccacacattggaagggctccctcttgataccgacaaaggcgtccattacatatccgttagcgcaacgcgcctcggggctaatggaagccacatacctcagacttccagcgtattttctatagaggtttatcctgaagaccattctgagcttcagagcgtccgcaccgcttcccccgaccccggagaggtggtaagttcagcttgtgctgccgacgaacccgttacagtgctgacggtaatcctggacgcggacctgaccaaaatgactccaaaacagcgcatcgatctcttacacaggatgaggagtttttccgaggttgagcttcacaacatgaaactggtgcccgtggtaaataatcgcttgtttgacatgtcagcttttatggccgggccaggcaacgctaagaaagtagtagaaaatggcgccctgcttagctggaaacttggctgctctctaaatcaaaactccgtgcctgatatccatggtgtggaagcgcccgccagggagggagctatgagtgcccagttaggctacccagtcgttggctggcacatagcaaataagaagcccccacttccaaagcgagttcgaagacagatacacgcaacaccaacacctgtcacagctatcggtcccccaactaccgccatccaggagcctccgagcagaattgtacccacccctacctcccccgccatagctccgcctactgaaacgatggcaccacccgtgcgagatccagtacctggcaagcccaccgtgactattcgaacccggggggccattatccagacccctacgctgggacccatacagcccacacgcgtgagcgaagcaggcacaacggtccccgggcagattagacctactatgactatccctggatatgtggagccaaccgccgtagcgacacctccgacaacaacaacaaagaaaccccgcgtgagcaccccaaaacctgcaactcctagtactgacagtacaacaacaactactcgcaggccaacaaaaaaacctagaacacctcggcccgtccctcgagtgaccacaaaggtttctattacccggttggagaccgctagccctccaactaggatcaggactacaaccagcggcgtgcctcggggcggtgagccaaaccaacggcccgaactgaagaatcacatcgatagagtcgatgcttgggtgggcacatattttgaggtgaagattccgtcagatactttttacgaccatgaggacaccacaactgacaaactgaagttgacactcaagctgagagagcagcagctggtaggtgagaaatcttgggttcagttcaatagtaactcacagttgatgtacggcctgccagatagttcgcatgttggcaaacacgagtacttcatgcatgcaaccgataaaggaggtctgtctgccgtcgacgcctttgaaatccacgtgcatagaaggcctcaaggtgatagagcccccgcaaggttcaaggctaagttcgttggcgatccagcccttgtgttaaatgatatccacaaaaagattgcccttgtgaaaaagctggcttttgctttcggggacagaaattgctcaaccataacactccaaaacataaccagaggctctatagtggtagagtggaccaataatactctccccttggagccatgcccaaaggaacaaattgcgggtctgtctcggagaatagctgaggacgacggcaaacccaggccagccttctctaacgctctcgaaccagatttcaaagctacaagtatcactgtgacagggagcggctcatgcaggcacctgcagtttatacctgtggtgccaccacgcagagtaccctcagaggctcctcccaccgaggtaccagacagggaccctgaaaagtcctctgaggatgatgtttacctccatacagtgattcctgccgtggtcgttgcggccatccttttgattgccggaatcatagccatgatctgctatcgaaagaagaggaagggaaaactgacacttgaagatcaagctacgtttattaagaaaggcgttcccataattttcgccgatgagctagatgattcaaaacctccaccaagctctagcatgcccctgatcctgcaggaggagaaggctccgctcccccccccagagtacccaaatcagtccgtgcccgagacaacgcctctgaatcaagacacaatgggggaatatactcctcttcgggatgaagaccctaacgctcctccatatcagccaccaccacccttcaccgccccgatggaaggcaaaggatccagacctaaaaatatgaccccatacaggtctcccccaccatatgttcctccctag

SEQ ID NO: 115376 - DNA, 2025 bp, synthetic construct
  misc_feature 1..2025: note = Description of Artificial Sequence: Synthetic coding sequence
  source 1..2025: mol_type = other DNA
atggctgccggcggagctgaaggaggaagcggccctggcgctgccatgggagattgcgcggaaattaagagccagttccgaacgcgggagggattctacaagctcctgcccggggacggcgccgctcgacgaagcgggcccgcatctgcccagactccagtgccaccgcagcctccccagcctccaccagggccggcttctgcatctggcccaggagccgccggtccggccagtagccctcctcccgcaggacctggtccgggacctgcccttccagccgtgaggctgtccctcgtgaggcttggagaacctgactctgctggtgccggcgaaccacccgcaactcccgctggcctggggtcgggaggggatagagtgtgctttaatctaggccgtgaactgtacttctatcctgggtgctgcagacgcggttctcagaggagcatcgatcttaataaacccatcgacaagcgcatctacaaaggtacccagccaacttgccacgactttaatcagttcaccgctgccactgagacgatatcgctcttagtgggctttagtgcaggccaggttcagtatttagacttgattaagaaggacacatcgaagttgtttaatgaggaaagattaattgataaaacaaaagtgacgtatctcaagtggcttcccgagagcgaaagtttgtttctggccagtcacgctagcgggcacttgtacctgtacaatgttagccacccgtgcgcctcagcaccaccgcagtattccctgctgaagcaaggcgaagggttttctgtctacgctgctaagagcaaagctcccaggaatccccttgccaaatgggccgtgggcgaaggcccccttaatgagtttgctttctcccccgacggtcgccaccttgcctgcgtctcccaggacggctgcctgcgggtgtttcatttcgactccatgctgttgcgaggcctcatgaaaagctattttggaggattactttgtgtttgctggagccccgatgggcgatacgtcgtgacaggcggagaggatgacctggtaacagtgtggagctttaccgaagggagggttgtggcaagggggcatggccacaagtcctgggtaaacgcagtcgcgtttgacccttacaccacccgagcagaggaggccgccaccgcagccggagctgacggcgaacggtcaggggaagaggaagaagaagaacctgaagccgccggaaccggcagcgcaggaggagcccctctgtctccactccccaaggctggcagcataacctatagattcggttctgccggtcaagacacccagttctgtctgtgggacttaactgaggatgtattgtacccacacccgcctttagcccgaaccaggactctcccaggtacgcctgggacaaccccacctgccgcatctagcagtcggggcggagagcccggcccgggacccctaccgcgctctctctctcgctctaattcacttccacatcctgcgggaggtggtaaggcgggaggccctggggtggccgcagaaccaggaacacccttctcaattgggaggttcgctactctgaccctgcaggagaggcgcgaccgcggagctgagaaagagcacaagagatatcactcgttgggaaacatctcccggggtggatcaggtgggagtggttccgggggcgagaaaccatctggacctgtgcctaggagtcggctggacccagcgaaggtgctgggcacggcactctgtccccggatccacgaggtgcctctattggaacccttggtgtgcaagaagatagctcaggagaggctgaccgttttactgttcctcgaggattgcatcattacggcttgccaagaaggtctcatttgtacctgggcccggcctggaaaggctttcacagatgaagagaccgaggcacagactggcgagggcagctggccgcgaagtcctagcaagagcgtagtggaaggtataagcagtcagccaggcaacagcccctccggaacagtggtatag

SEQ ID NO: 115377 - DNA, 1890 bp, synthetic construct
  misc_feature 1..1890: note = Description of Artificial Sequence: Synthetic coding sequence
  source 1..1890: mol_type = other DNA
atgtcggccgaagtgcgactgagaagactgcagcaactcgtccttgaccctggctttctggggctggagcctcttctggacttactgctgggagtgcatcaggagttgggcgcatcagagctagcacaagacaagtatgttgctgatttccttcagtgggcggagccaatcgttgtcagactcaaggaagtgaggctgcagagagacgacttcgaaattctaaaggttatcggaagaggggcattctcagaggttgcagttgtgaagatgaagcagacgggacaggtttatgctatgaaaattatgaacaagtgggacatgctaaagagaggagaggtgagttgttttagggaagagagggacgtgttagtgaacggcgaccgcaggtggataactcaactgcactttgcattccaggatgagaattatctctatctcgtgatggaatattacgtgggcggggatctcctcacccttttgtcgaaattcggagagcgcatacctgcggaaatggcgcggttctatttggccgagatagttatggccatagacagtgtgcatagactgggatatgtgcacagggacatcaaaccagataacatcttactcgatcggtgcggtcatattcgactggcagatttcgggtcatgtctgaaactacgtgccgacgggaccgtgcgatcgctggtggccgtgggcacgcccgactacctgagccccgaaatcctccaggcagtcggcggaggcccgggaaccggaagctatgggcccgagtgtgactggtgggcactcggcgtattcgcctatgagatgttctatgggcagacccccttttatgcggactccacagccgagacctatgggaagatcgtgcattacaaggaacacctgtccctgcccctcgtagacgagggagtgcctgaggaagcccgcgactttattcagcgactgctttgcccacccgagacgaggctgggcagggggggagcaggggattttcgtactcatcctttcttcttcggactggattgggacggacttagagactccgtccccccattcactccagattttgagggggcaaccgacacctgcaactttgacctggtggaggatgggctgaccgcaatggtgagcggcggaggtgaaacactgagcgatattagggagggagcaccgctgggcgttcaccttccctttgtcgggtattcttatagttgcatggcattgagagacagcgaagtccccggaccaactccaatggagcttgaagccgaacagctgctcgagccccatgtgcaagccccttctctcgagccatctgtatctcctcaggacgaaacggcagaggtggcagtcccggctgcagtgcctgcggcagaagcagaggcagaggtaacgctcagagaattgcaggaagcccttgaagaagaagtcttgacgcggcagagcctttcaagagaaatggaggctatacgcacagacaaccagaactttgctagtcagctgcgcgaggccgaggcgcggaatcgcgatctggaggcccacgttagacaattacaagaaaggatggagttactccaagctgagggtgcaacagcagtgactggggtaccgagcccccgagcaactgatcctcccagtcatttagatggccctcctgccgtcgccgtcgggcaatgtcccctagttggaccagggccaatgcataggcgccacctgttgctacctgccagagtcccacggcctggactgtctgaagctttatctctgctgctgttcgccgtggtgctttcacgggcggccgcactgggctgcattggcttggtggctcatgccggacagcttacagcagtttggcggaggccaggcgccgcccgagcgccctag

SEQ ID NO: 115378 - DNA, 1968 bp, synthetic construct
  misc_feature 1..1968: note = Description of Artificial Sequence: Synthetic coding sequence
  source 1..1968: mol_type = other DNA
atggtgctgcccgtgcaacacgtaagcaggggagccgccgaggctgccccagcagctggagttgggccaggcctgcctggagccggcgcaccggctaggcccagtcctggccggccgccaggggccggccgcctacggacaggaccaggccaggtacgaggtcggctcctcgcggtaggacccaagagccgtgtcttccaatctgttgtgcaggaacccccggccagcgagtcaagggctgagcccatagtggtacgcttgaaggaagtgaggttgcagcgcgacgacttcgagattctgaaggtgatcggtcgcggggccttttccgaggttgccgtcgtcaaaatgaagcaaacagggcaggtttatgccatgaaaattatgaacaaatgggacatgttaaagaggggggaggtgtcctgctttcgcgaagagcgggacgttctcgtcaatggagaccgtaggtggataacccagctccacttcgcattccaggacgagaactatctctacctggttatggaatattacgtggggggcgatctcctcaccctgcttagcaagttcggggaacggatcccagcagaaatggcacggttttacctggcagagatcgtgatggctatcgactcggtgcaccgactggggtacgttcatcgggatattaaacccgataatatccttttagataggtgcgggcatataaggctggcggatttcggtagttgcctcaagctgcgggcggacggcacggtgcgctctctagttgccgtgggcacacccgactatctaagccccgaaatcctacaagctgtgggagggggtcctggcaccggaagctacggccccgaatgcgactggtgggcccttggtgtatttgcctacgaaatgttctacggccagacacccttctatgccgatagcactgctgagacctatggaaagattgtgcactataaggagcatctcagccttccattggtagacgagggtgtcccagaggaggccagggacttcattcagcggttgttgtgcccaccagaaacgcgccttgggcgcggcggcgccggtgacttcaggacacaccctttctttttcggtcttgattgggatggactgcgtgacagtgtaccacctttcacaccagattttgagggtgctacagatacatgcaactttgatctggttgaggatgggctgacagctatggtcagtggcgggggcgagaccctgagtgacatcagagaaggagccccccttggggtgcatttaccctttgtaggctactcatatagctgtatggctctgcgggattctgaagtgccggggccaacacctatggagttggaggctgagcaactgctggagcctcacgtgcaagccccctctctggaaccctccgtgtccccacaggatgaaacagcggaggttgcagtaccagccgcagtgccggctgcggaggcagaggccgaggttaccttgagggagctgcaggaagcgttggaagaggaagtgcttactagacagtctctgtctcgagagatggaggccattagaaccgacaaccagaattttgcaagtcagttacgagaagctgaggcccgaaaccgagacctggaagcgcatgttagacagctgcaagagcggatggaactactgcaggccgaaggcgcaactgccgtaaccggtgtgccatccccgcgggctacagatcctccatcacatctcgacgggcctcccgcagtagcagtgggccagtgcccacttgttggacccgggccaatgcaccggagacatcttttgttgcccgcacgagttccaaggcccggtctcagcgaagcattgagcctgttgctgttcgcggttgtgctgtcccgggcggccgcgctgggctgcattgggctcgtcgcacacgccgggcagctcactgccgtatggcgtcgtccaggtgccgcccgcgccccttag

SEQ ID NO: 115379 - DNA, 1920 bp, synthetic construct
  misc_feature 1..1920: note = Description of Artificial Sequence: Synthetic coding sequence
  source 1..1920: mol_type = other DNA
atgggaggccacttttggccgcctgaaccttacaccgtgtttatgtggggctcaccctgggaggcggactcaccaagggtgaaacttcgaggtagggagaaaggccgccagactgagggcggggccttcccactggttagttcggcgctcagtggcgaccctagattcttcagtcccacaactccaccagccgagcctatcgtggtcagattgaaggaagtccggctgcaaagggacgacttcgaaattctcaaggtgatcggacggggggcattctccgaggttgcagttgtgaagatgaaacagaccggtcaggtttacgctatgaaaatcatgaacaaatgggacatgctcaaacggggtgaagtgagctgtttcagagaggaaagggacgtgttagtcaacggggatcggcgctggataacccagctgcacttcgccttccaggatgagaattatttgtacctggtcatggagtattatgtgggaggtgatctgctgactctcttaagcaagtttggagaacgcatccccgccgagatggcgaggttctatttagccgagattgtgatggcaatcgattccgtgcataggctggggtatgtacaccgcgacataaagccggacaacattctactcgaccggtgcgggcacatcagactcgccgacttcggtagctgtttgaaattacgagcggatggaaccgttcgcagcttggttgccgtggggactcccgactatctcagtcctgagatccttcaggccgtggggggagggcctggcactggcagctatggacccgaatgtgactggtgggcccttggcgttttcgcttatgagatgttctatggacagacgcccttttacgcagattccactgcagaaacctacgggaaaatagttcactataaagagcatctctcactccccctggtggacgaaggcgtcccagaggaagctcgagattttattcaaagattactatgtcctccagaaacccggcttggtcgggggggggccggagactttaggacacacccgtttttcttcggcttggattgggacggtcttcgcgacagcgtcccgcctttcacccctgacttcgagggcgctaccgacacatgtaactttgaccttgttgaggatggtctgactgccatggtgagcggaggaggtgagacactgagtgatattagagaaggggccccactcggcgtgcacttacccttcgtaggctattcttattcgtgcatggcactgagggactcggaggttcctggtcctacacccatggagctggaggccgaacagctgcttgagcctcacgttcaggcaccctccctcgagccatctgttagcccgcaggatgaaacagcggaggtggctgtgccagccgcagtgcccgccgccgaagcagaagcggaggtgactctgagagagttgcaagaggctctagaagaagaagtgttgacccggcagagtttgagtcgagaaatggaggccatcaggaccgataaccagaattttgcctctcaactgagggaggctgaggctcgcaaccgagacctggaggcccacgtgcgtcagctccaggagagaatggagcttctgcaggcagaaggggctacagccgtgaccggcgtcccctctccacgggcgacagaccctcctagccacttggacgggccacctgctgtggccgtgggtcagtgccctttggtgggccctggcccaatgcaccggcgacacctactgttaccggcaagggtgccacgaccagggctgtccgaggcattgtccctgttactttttgctgttgtgttgagtcgggccgctgctctcggctgcattgggctggtggctcacgctggtcaattgaccgccgtgtggcgtcgacccggtgcggcgcgtgcgccgtag

SEQ ID NO: 115380 - DNA, 1830 bp, synthetic construct
  misc_feature 1..1830: note = Description of Artificial Sequence: Synthetic coding sequence
  source 1..1830: mol_type = other DNA
atgggaggccacttttggccccccgagccatatactgtttttatgtggggatctccctgggaggctgattcccctagggtaaagctgagggggagggaaaagggccggcagaccgagggcggcgctttcccactcgtgtcttctgccctgagtggcgatcctaggtttttttcacccacaacgcccccggcagaacctatcgtagtgcggctgaaagaagtacgccttcaacgagatgactttgagatcctgaaagtgattggccggggggccttcagcgaagtcgccgtggtgaaaatgaaacagaccggacaggtgtacgccatgaagattatgaataaatgggacatgctgaagcggggcgaagtaagttgtttccgcgaagaacgagacgtcctggtcaacggagaccgacggtggataacccagctgcattttgcatttcaggatgaaaactacctatatttggtaatggaatactatgttggaggtgatctgctcactttactgtccaaatttggggagagaatccctgcagaaatggcgcgcttctaccttgctgagattgtgatggctatcgatagcgtgcaccggctcggttatgtgcatagggatattaagccagataacatcctgctggacagatgcgggcatattcgtctagctgattttggtagttgtctgaaattgagagccgacgggactgtgcgcagcttggttgctgtcggcacgcccgactatctgagcccggagatcctccaagccgtaggcggcgggccgggcactggaagctatggccctgaatgtgactggtgggcactgggcgtgttcgcttacgagatgttttatggacagaccccgttttatgccgactctacggcagaaacctacggaaaaattgtccattataaagagcacctgtcgcttcctttggttgacgaaggcgtacctgaggaggctcgcgactttatccaaaggctgctttgtccaccggagacgagactgggcaggggcggcgcaggggattttagaacacaccctttctttttcggcctggattgggacggattaagagattcagtgcccccattcacccctgattttgaaggggcaacagatacttgcaatttcgatcttgttgaagacgggctgaccgccatggtgagtggtggcggggagacccttagcgatattagggagggggcccccctcggcgttcatctgccatttgttggctattcatattcgtgcatggcgctgcgggacagcgaggtccctgggcccacacccatggaactagaggcggaacagctgcttgaacctcacgtgcaagcccctagcctcgagccttccgtctccccacaagatgaaaccgccgaggtggcagtgccggcagccgttccggccgcagaggcggaggccgaagtgactttgcgcgaactgcaggaggctctggaagaagaggtgctgacccgtcaatcgctctcacgggagatggaggccattaggacggataatcaaaactttgcgagtcagctgagagaggcagaggcacgcaatagagatttagaagctcacgtcagacagctgcaggagcgaatggagcttctccaggcagagggagccaccgctgtcaccggggtgcctagtccgagagctacagatcctccgtcccacgtgcccaggccaggcttgtcagaagccctatccctgctgctcttcgcagtggtcttgtccagagccgccgccctggggtgtatcgggcttgtcgcacatgcaggacagctgacggccgtctggagacggcccggagccgcaagagcaccatag

SEQ ID NO: 115381 - DNA, 1593 bp, synthetic construct
  misc_feature 1..1593: note = Description of Artificial Sequence: Synthetic coding sequence
  source 1..1593: mol_type = other DNA
atgagtgcagaagtgaggttaaggagacttcagcagctcgttcttgaccccgggttcctgggcctggaacctttgttggacctgctgctgggagtacatcaggagcttggggctagtgagttggcacaggacaagtatgtagccgattttttacaatgggctgaacctattgtggtgaggttgaaagaggtacgccttcaacgcgatgacttcgagatattgaaggtgatcggcaggggggcgttcagcgaggtggccgtcgtgaagatgaagcagacgggccaggtatatgccatgaagatcatgaacaagtgggatatgctgaaaaggggagaggtgtcctgctttcgggaagaacgcgacgtcctggtgaacggcgacaggagatggattacccagctgcattttgcgttccaggacgaaaattacttgtatttggttatggaatattatgtgggaggggacctactcacactgctgtcaaaattcggcgagcggattcccgcggagatggcaaggttctacctagccgagatagtgatggctatcgattccgtccacagactgggctacgtgcatcgcgacataaaaccagataatatattgctggatcggtgcgggcacatcagattggcggacttcggctcttgtctgaagctgcgcgccgacggcacagtgcgcagtctcgttgccgtgggcacgcccgactacctatcaccggagattctgcaggccgtaggggggggccctggtaccggtagctacgggcccgagtgcgactggtgggccctcggggtgttcgcatacgaaatgttttatgggcagactcccttctatgctgactctacagccgagacatatggcaaaatcgtacactacaaggagcacttgagcctgccccttgtcgacgaaggagtgccagaggaagctcgagactttatacagagattgctttgcccacctgagacacgccttgggcggggcggggccggtgactttagaacccacccgttcttcttcggccttgactgggacggcctgcgcgattccgtgcccccgtttaccccagattttgaaggagcgacagatacctgtaacttcgatttggtagaggatggtctcacggccatggaaactctgtcggacataagagaaggcgcccccctgggcgtacaccttccattcgtgggctatagctatagctgcatggctctgcgggactcagaggtacctggacctacacccatggaactcgaggccgaacagcttttggaaccccatgtgcaggcaccaagcctagaaccatctgtgtcaccacaggatgagacagccgaggtcgcggtccccgccgctgttcctgctgcggaggctgaagctgaggtgactcttcgcgaactccaggaggcgcttgaagaggaagtcctcacccggcagtctttatctcgggagatggaggcaatcaggacggataatcaaaattttgcttcccagctccgggaggcagaagctcgcaaccgcgatcttgaggcacacgtgaggcaacttcaagaacgtatggaactactgcaggcggagggagccaccggtccttag

SEQ ID NO: 115382 - DNA, 1866 bp, synthetic construct
  misc_feature 1..1866: note = Description of Artificial Sequence: Synthetic coding sequence
  source 1..1866: mol_type = other DNA
atgagcgcggaggttcgtctccgccggctccagcagctcgtgctcgaccctggatttctcggcctggagccactccttgacttactgttaggcgtccaccaggaactcggtgcatccgagctagcgcaggacaaatatgttgccgactttcttcagtgggccgaacccattgtggttcggttgaaagaggtaagacttcagagggatgatttcgagattctgaaggtaattggacgcggcgctttcagtgaggttgccgtggtgaagatgaagcaaaccggccaggtctatgccatgaagatcatgaataaatgggatatgttaaagaggggcgaggtgtcatgtttcagggaggaacgtgatgttctcgtgaatggcgatcgtcggtggatcacacagctgcacttcgcatttcaggacgagaattacctgtatctggtgatggaatattatgtgggaggtgacctgctcacactcctcagcaagttcggggagcggatccccgcagaaatggctcgattctatctagcagagattgtgatggctattgactctgtgcaccgcttgggctacgtgcaccgcgatattaagccggacaatatactgctggaccgctgtggacacattcgcctggctgattttggctcttgtttgaagctgagagctgatggcacagtaaggagcctggtggctgtggggacccccgactatctatctcccgaaatcctgcaggccgtgggaggcggaccaggaacaggatcttacggacctgagtgcgactggtgggcacttggggtattcgcatacgagatgttttacggtcagacacctttttatgcggatagcactgccgagacctacggaaagattgtccactacaaagagcatctgagtcttcccctggtcgacgaaggggtccccgaggaggcgagagatttcattcagcggctcctgtgccccccagagacacgattgggccgggggggggctggggattttcgcactcacccattctttttcggacttgattgggacggacttcgggacagcgtcccacctttcactccagatttcgaaggcgccactgatacctgtaattttgacctcgttgaggatgggctcaccgctatggaaacattgtctgacatccgggaaggggcccccctgggtgtccacctcccttttgtggggtactcatacagctgtatggctctgagggacagtgaggtgccaggccccacccccatggaactggaagccgagcaactcctcgagccccacgttcaggccccttcacttgaaccgagcgtgtccccgcaggacgagacggcggaagtggcagtgcccgccgcggtccccgcggcggaagcggaggccgaagtcacgctgagagaacttcaagaagctcttgaggaggaagtgctcacaaggcagagcttgtctagggaaatggaggctataaggaccgataatcagaacttcgctagccagctcagagaagcggaggctcgaaacagggacctagaggcccacgtgaggcagctgcaggagcgcatggaactgctgcaagctgagggggcaacagctgtgactggtgtgcccagcccacgcgccacagatccaccttcccacctggacggccctccttggttatgggccagcgctcggtggtggggccagatgcaccggcgtcacctgttgctgcccgccagagtgccgagacctgggctatcggaggcgctttctctgctgctcttcgctgtcgttttatcccgcgccgctgccctggggtgtataggactggtcgcccatgcgggtcagctgacagccgtgtggagaagaccaggcgcagcacgagccccctag

SEQ ID NO: 115383 - DNA, 1875 bp, synthetic construct
  misc_feature 1..1875: note = Description of Artificial Sequence: Synthetic coding sequence
  source 1..1875: mol_type = other DNA
atgtcagctgaagtccgtctgcgcagactgcagcagttggtgttggatccaggctttctggggttagaaccactgctggacctgctgcttggcgttcaccaggagttgggagcttccgagctcgctcaggataagtatgtcgcagatttcttgcagtgggcggagcccattgtggtgcgactaaaggaggttcgccttcagcgagacgacttcgagattctgaaagtcattggcaggggagccttctctgaagtcgccgttgtcaaaatgaagcagactgggcaggtttacgccatgaaaatcatgaacaaatgggacatgttgaagagaggcgaagtgagttgctttagagaggagcgagacgtgctcgtgaatggggaccgccggtggattactcagcttcatttcgctttccaagacgagaactacctttacctcgtaatggagtactacgtcggcggcgacttgttgacacttctctctaaatttggagagcggattcccgcagaaatggcgaggttctatctcgcagagatcgttatggctatcgattctgtgcatcggctaggttatgtccatagagacattaagccggacaatatacttctagaccggtgtggccatattagacttgctgattttggcagttgtcttaaacttagagctgatggaaccgttagatccctcgtcgctgtgggaacccccgattacctgtcacccgaaatcttgcaggcagtgggaggagggcctggaaccggctcttatggacctgaatgtgactggtgggccttgggggtattcgcttacgagatgttttatggccagacccctttctacgccgactccaccgccgaaacatatggtaagatcgtccactataaagagcaccttagtctgcctctggtggatgagggcgtgcccgaggaggcaagagacttcatacagcgtctgttgtgccctcccgagacaaggttgggtcggggcggagccggagatttccgaacccatccatttttctttggtctcgattgggacgggctgcgggatagcgtgccgcctttcaccccagattttgagggcgctaccgatacctgcaatttcgaccttgtcgaggatggactgactgctatggaaacactctcggatattagagaaggggccccactgggtgtccacttgccgttcgtaggctattcttacagttgtatggccctgcgcgatagtgaagtacccggcccaacacctatggaattagaggcggaacaactcttggagcctcatgtacaggcccccagcttagagccgagcgtcagcccacaggacgaaactgccgaggtcgctgttcctgccgcggtgcctgccgccgaggctgaagcggaggtgaccctgagggaactccaggaggccctagaggaagaagttctgacccgacaatctctctcccgcgaaatggaagctatacggaccgacaatcagaacttcgcttcacaacttcgggaagccgaggcacgcaatcgagacctggaagcgcatgtgcggcagttgcaggagagaatggaactgctgcaggccgagggtgccacagccgtcactggcgtgccgtctccccgggccaccgacccgccatctcatctcgacggtcccccagcggttgcggtaggacagtgtccgttagtcgggcccggtcccatgcaccgccgccatctgctattacccgcacgggtccccagaccagggctgtctgaggcgctcagtctgctgctgtttgcggtggtcctatcccgtgcagctgccctggggtgtattggtctggtggcccacgccgggcaactcaccgccgtctggagaagaccaggcgctgcgcgtgccccctag

SEQ ID NO: 115384 - DNA, 1878 bp, synthetic construct
  misc_feature 1..1878: note = Description of Artificial Sequence: Synthetic coding sequence
  source 1..1878: mol_type = other DNA
atgtccgccgaagtgagactccggaggcttcagcagttggtgctggacccgggtttcctgggtctcgaaccgctgttggatcttctgcttggcgttcaccaggagctgggggcctctgagctggctcaggataagtacgtcgcggactttctccagtgggcagaaccaatcgtggtgcgactcaaagaggtccgccttcaacgagacgatttcgagatactcaaggtgattggaagaggcgccttttccgaggtcgccgtcgtcaaaatgaagcaaaccggccaagtttacgcaatgaagattatgaataagtgggacatgctcaagcggggcgaagttagctgctttcgtgaagaacgtgacgtattggtgaacggagaccgcaggtggattacccagcttcacttcgcttttcaggatgagaattacctctacctagtcatggaatactatgttggcggagacttgctgaccctcctatccaaattcggggaacgaatccccgccgaaatggcaaggttttatctggctgaaatcgtaatggccattgactccgtgcacagattaggctacgtgcatagggacatcaagccagataatatccttctggataggtgtgggcatatccgcctggccgacttcggcagctgtctgaagctacgggccgatggaacagtccgcagtctcgtggctgtgggcacgcccgactacttgtctccggaaattttacaagctgttggcggtggacctgggaccggatcttacggacctgaatgcgactggtgggccctgggggtgtttgcatacgagatgttttatggtcagacccctttttacgccgatagcaccgccgagacttatggaaagatcgtccactataaagaacatctgagtctccccctagtggatgaaggtgtaccagaagaggcaagggacttcatccagagattactgtgccccccagagacaaggctggggcggggcggtgcaggagacttccgcacgcaccccttcttttttggcctggattgggacggactgagggattccgttcctccctttactccagacttcgagggagcgactgatacctgcaacttcgacctggtagaggacggcctgacggccatggagaccctttccgacatccgcgagggggcgccgcttggagtgcacctgccatttgtgggctattcttatagctgcatggctcttagggactctgaggtgccaggccccaccccaatggaacttgaggcggagcagttactagaaccccacgtgcaggcccctagcctggagccatctgtctctccccaggacgagacagccgaagtggccgtgcccgccgccgtccctgcagccgaggcagaggccgaggttactttaagagaattgcaggaggctcttgaggaagaggtgctgactaggcagagtctcagtcgggagatggaagctattcgaacagacaatcagaactttgcctcccagttacgggaggctgaagctagaaatcgcgaccttgaagctcacgtgcggcagctgcaagaaagaatggagctactacaagccgagggggccacggccgtgaccggggttccatctcctcgggctacagatcctccctcacacatggctcctcgaccatggctctgggccagtgccaggtggtggggccaggctccatgtactgcagcaacttgttgtagcctgcctggatctctaggcctggcttacagaagaagatttccttgctcctgcagcccactgttctgtttggtgccccccccctgggctgctctaggttggtggccaactcctgccaacagtccccagtcaggtgcggcacaggagccccccgcactgcctgagccgtag

SEQ ID NO: 115385 - DNA, 129 bp, synthetic construct
  misc_feature 1..129: note = Description of Artificial Sequence: Synthetic coding sequence
  source 1..129: mol_type = other DNA
atggaactgcttcaggcggaaggtgccacggctagatggccgccaggccgaggctgcgggcctgtccctgcagggggcgcccgtcctcatgcccctcctcccccagccgccccctgccagggcccatag

SEQ ID NO: 115386 - DNA, 3402 bp, synthetic construct
  misc_feature 1..3402: note = Description of Artificial Sequence: Synthetic coding sequence
  source 1..3402: mol_type = other DNA
atgccatcttctctgatgcttgaagtgcccgcactggctgatttcaaccgggcttggaccgaactcacagattggctgagtctcctcgaccaagtaataaagtcacagcgcgtgatggtaggagacctggaggatatcaatgagatgatcattaaacagaaagcaaccatgcaggaccttgaacagagaagacctcagttggaggaactgattactgctgcccaaaacctaaagaataagactagcaaccaggaggccaggaccattataactgatcggatagagaggatccagaaccagtgggacgaggtgcaagaacatctacagaatagacgtcaacagctgaatgaaatgttgaaagatagtactcagtggctggaggccaaggaggaggctgaacaggtcctggggcaagcacgggcaaaactggaatcttggaaagaaggtccctacaccgtggacgcgatccaaaaaaagatcaccgaaaccaaacaattagccaaggacctacggcagtggcagacgaatgtagatgtagccaacgacctcgccctgaaattgcttcgagattactccgctgacgacacaagaaaggtgcacatgatcacagaaaacataaatgcaagctggagaagtatccacaagagagtctctgaaagagaggcagcattggaagaaacacaccggctactacaacaattcccccttgacctcgagaagtttctcgcgtggctgaccgaagcggagacaacagctaatgttttacaagacgccactaggaaagagcgtctgctggaggacagtaagggcgttaaggaactcatgaagcagtggcaggatctccagggagaaattgaggcccacaccgacgtgtatcacaatctggatgagaattctcaaaagatcctgcggagcttagaggggtccgacgatgccgtgttgctgcaaaggaggctggacaatatgaatttcaagtggtctgagctccggaaaaagtccctcaacatcagatctcacctggaggcatctagtgatcagtggaagaggctgcacctatccttgcaggaactcctcgtgtggctccaactgaaagacgacgagctgtctcgtcaggcccccatagggggagacttccccgcggtgcaaaaacagaacgatgtgcatcgagccttcaagcgtgagttgaagacgaaggaaccggtgatcatgtccactttggagaccgttcggatttttctgactgagcagcccctggaaggcctggaaaaactgtaccaagagcccagggaactgccaccagaagagagagctcagaatgttactcgactgctgcggaaacaggcggaggaagtcaacaccgaatgggaaaagctcaatctgcactccgcggattggcagagaaagatcgatgaaactcttgagcgccttagggagctccaggaagcgacagatgaattagacttgaaactgaggcaagccgaagtcatcaaggggagttggcagccagtgggcgaccttcttattgattcattgcaggaccacctagagaaggtaaaagccctgcgcggagagattgccccacttaaggagaatgtgtcacacgtgaacgacctagcaaggcagctgacgaccttaggtatccaacttagcccgtataatttgtctacgctcgaggatctgaatacgcggtggaagctcctccaggtcgccgtggaagaccgcgtaagacagctgcacgaggcacaccgggacttcggaccagccagccagcacttcctttctacatccgtgcagggaccctgggaaagagcaataagcccaaacaaggtgccttattacatcaatcacgagactcagaccacttgctgggatcaccctaaaatgaccgagctttaccagagtctggccgatctgaacaatgttagattcagcgcttataggactgccatgaagctgaggcgcctccagaaggcactctgcttagacttgctgtcattatcagctgcctgcgatgcgctggatcagcataatctgaagcaaaacgatcagccgatggatatcctccagatcattaattgtttgaccactatttacgacaggttggagcaagaacacaataatttggttaacgtgcctctgtgcgtcgatatgtgcctgaactggctgctcaacgtgtacgacacgggaagaactggtcgcatccgagtgctttcatttaaaacaggcattattagtctatgtaaggcccacctggaagataagtataggtatctatttaagcaagtcgcctcttccacaggcttttgtgatcagcggagactgggtcttcttcttcatgattcaatacagattccacgccagctcggggaggtcgccagctttggaggctctaatatcgagcctagcgtacggagctgcttccagtttgcaaacaataagcccgagattgaagccgcgcttttcctagattggatgagactagagcctcaatctatggtgtggctgccagttctgcacagagtcgccgctgcagagactgccaaacatcaggccaaatgtaacatctgtaaagaatgtccaatcatagggtttcgctacaggtctctcaaacactttaattatgatatatgtcagagctgcttctttagcggcagagtggccaaaggtcataagatgcactatccaatggtcgagtactgcacccccaccacgagcggggaagatgtacgggacttcgccaaagtcctgaaaaacaagtttcggaccaagcgctacttcgctaaacatcccagaatgggctatcttcccgtgcagacagttctagagggagacaatatggagaccaatctgcaggccgagtatgaccggctgaaacaacagcatgagcacaagggtctgtcccccttaccttctccaccagaaatgatgccgacaagcccccagtctcctcgggatgccgaactgatcgctgaggcgaagttgctgcgacagcacaaagggaggctggaggcccgtatgcaaatcttagaggatcacaataagcagctagaaagccagctgcatcgtctaagacagcttctggagcaaccgcaagcagaggcgaaggtgaatggcactactgtaagttcgccctcaacatcccttcagcggtccgactcgtctcaaccgatgctccttcgagtggtcggcagtcagacttccgacagcatgggcgaggaagatcttttgagccccccccaagacactagtaccgggctggaggaagtaatggagcagttgaataattcctttccttctagcaggggacacaatgtgggttctctttttcacatggcagatgacttaggaagggctatggaatccctcgtgtccgtaatgacggatgaggaaggagccgagtag

SEQ ID NO: 115387 - DNA, 11058 bp, synthetic construct
  misc_feature 1..11058: note = Description of Artificial Sequence: Synthetic coding sequence
  source 1..11058: mol_type = other DNA
atgctgtggtgggaggaggtggaggactgttatgaaagggaggatgtgcagaagaaaacatttaccaagtgggtcaacgcccagttttccaaatttggaaaacagcacatcgagaatctgttctctgatctgcaggacgggcgccgtctgctggatctcctggaggggctgaccggccagaaactgccgaaggagaaaggcagcacccgagttcacgcactaaataacgtgaataaagcactgcgggtgctgcagaataataatgtcgacctggtaaacattggatccacggatatcgttgacggtaaccacaagctcactcttgggctcatctggaatatcatcctacattggcaggttaagaacgtgatgaagaacatcatggccgggctccagcagaccaactctgagaagattctgctgagctgggtgcgccagtccactcgtaactacccccaagtaaatgtgattaacttcacaacctcctggtctgatggactggctctaaacgctctgattcattcccaccggccagatctgttcgactggaattcggtcgtgtgccagcagagtgctacccagagactcgaacacgctttcaacattgcccgttatcagttaggcattgagaagttgctcgatccagaggacgtagataccacctatcccgacaaaaagtcaattttaatgtacatcacctccttattccaagtactgccacaacaggtttccatcgaagccatccaggaggtggagatgctacctcgaccgccaaaggttaccaaagaagagcatttccagctccaccaccagatgcattactcccagcaaatcacggtctcattagcacaaggctatgaaaggacgagttccccaaagcctcgattcaaatcctacgcatacacacaagctgcatacgttaccaccagtgatcctacaaggtccccattcccctcgcaacatcttgaggcgcctgaagacaaatcttttggctcttcacttatggagagcgaggtgaacttggatagatatcagaccgccctggaggaggtcctttcgtggctgctgagcgccgaagacacgctccaggcacagggcgagatcagcaacgatgtggaagttgtgaaagaccaattccacacacacgaagggtacatgatggatctcacggcccaccagggtcgtgtggggaacatcctccagctcggatctaagttaattggaacagggaagttgtcagaggatgaggagacggaagtgcaagaacagatgaatctcctcaacagccgctgggaatgcctcagagtggcctcaatggagaaacagagcaatctgcatagggtgctgatggacctgcagaaccaaaagcttaaagagttgaatgactggcttaccaaaacagaggagagaacaagaaagatggaggaggagccgctggggcctgacctggaagatcttaagagacaggtgcagcagcacaaggtgctgcaggaggatctggaacaggagcaggtgcgagtaaattccctgacccatatggtggttgtcgtcgacgagtcgagcggagaccacgcaacagcggctctggaagagcaactaaaggtgctgggagaccgctgggccaatatttgccggtggaccgaggatcgatgggtcctactgcaggacatcctccttaagtggcagaggctgacagaggagcagtgcctgtttagcgcctggctgtcagagaaagaggatgccgtaaacaagatccataccacgggatttaaggaccagaatgagatgctgagcagcttacagaaactggctgtgcttaaggccgacctggagaaaaagaaacaaagtatgggaaagctgtatagcctgaaacaggatctcctgtcaacattaaagaataagagcgtcacacagaagaccgaggcctggctggacaattttgctaggtgctgggacaatctggtgcagaagcttgagaagtctacagcccagatttcccaagccgtgaccacaactcagccttcactcacgcaaaccacagttatggagaccgtcaccaccgtaactacccgcgagcaaatcctggtgaagcacgcacaggaggaacttccgcccccgccaccccaaaaaaagcgccagatcaccgtagattcggagatccgaaagcggcttgacgtcgatattactgagttgcactcttggatcactcgcagtgaagccgtactgcagtcaccggagtttgcaatcttcagaaaggagggtaatttctctgatcttaaggagaaggtgaatgcgatcgaacgcgagaaggcagagaaattccggaagctccaggatgctagccgcagtgcacaggcgctggtcgagcagatggtaaatgagggagtgaatgccgactccatcaagcaggccagcgaacaactcaattccagatggatagaattttgccaactgctaagtgaaaggcttaactggctggaataccagaacaacattatcgctttttacaatcaactccagcaactggaacaaatgacaaccacagcagagaattggctgaagatccagcccacgactccctcagaacccactgccatcaagtcccagctaaagatctgcaaagacgaggtcaatagactgagcgatcttcagccacagatcgaaaggctcaaaatccaaagcattgcactcaaggaaaaagggcagggacctatgtttctggacgccgacttcgtcgccttcaccaatcacttcaagcaggtcttttccgacgtgcaagccagggaaaaggagctgcagacaatcttcgatactctcccaccgatgcgttaccaggagactatgagtgctattcggacttgggtccaacagtccgagactaagctgtctatcccacaattgtccgttacagactacgaaatcatggaacagcgcctgggcgaactgcaagccctccagtcttctctacaagagcagcagtccgggctatactacctctcgacaacagtgaaggaaatgtcgaagaaagccccaagcgagattagcagaaaataccagagcgagtttgaggagatcgaaggaaggtggaaaaagttgtcatctcagctggttgagcactgtcaaaaattagaagaacagatgaacaagctgagaaaaattcaaaatcatattcagacgttaaagaaatggatggctgaagtcgacgtctttttgaaggaggagtggcctgccctcggcgactctgagatccttaagaaacaattgaagcagtgcagactgttggtgagtgacatccaaaccatacagccttcattaaactcagtgaacgagggcggtcagaagataaagaacgaagccgagcccgagttcgcctcacgactggaaacagagttgaaagagttaaatacccagtgggatcacatgtgccagcaagtctatgcacgcaaagaagccctgaaaggcggcctggagaagacggtgagcctgcagaaggacctgtctgagatgcatgaatggatgacacaggcggaggaggagtatctggagcgcgacttcgagtataagacgcccgacgagcttcagaaggcagtagaggagatgaaacgagctaaggaagaagcccaacagaaagaggccaaggtcaaacttttgactgaatcggtgaacagtgtgattgcacaggctccaccagtggcacaagaggcccttaagaaggagttagaaactctgacaacaaattatcagtggctttgcacaaggttgaacggcaaatgcaagactctggaggaagtgtgggcctgttggcatgagctgctctcttacctggaaaaagctaacaagtggcttaatgaggtagagtttaaactcaagactacagaaaatattcccgggggagctgaagaaatttccgaggtcctggatagcctggaaaatctaatgcgccatagcgaggacaatccaaaccagattcgcattctcgcccagactctgaccgacggaggggtgatggacgagttaattaacgaggagttggagacctttaattcaaggtggagggagctccatgaagaagccgttaggaggcagaaacttctggagcaaagcatccagtcagcccaggagactgaaaaatcattacatctcattcaggagtctctgaccttcatagataaacagctcgcagcttatatcgcagataaggtcgatgctgcacagatgccacaagaggctcagaagattcagtccgaccttacctctcacgaaattagtctcgaggaaatgaaaaaacacaatcagggtaaggaagcagctcagcgggtcctgagccaaatcgacgtggcgcagaaaaagttgcaggacgtgagcatgaagttccgtctgtttcagaagccggccaacttcgagcaaaggctccaagagagcaaaatgattctggatgaggtgaagatgcatctgcctgcgctggaaactaagtcggtggagcaggaggtggtccagagccagctcaaccactgtgttaatctttataaatcactttcagaggtcaaaagcgaagtggaaatggtgatcaagactggccggcagatcgttcagaagaaacaaacagagaatcctaaagaactggacgagcgggtgactgcgctgaaattacattataacgaactgggggctaaggtaaccgagagaaaacagcagctcgagaagtgccttaagctgtcacgtaagatgcggaaggagatgaatgtgctgacagagtggctggccgctactgacatggagctcaccaaacgatcagcggtagagggaatgccttctaacttagacagcgaagtggcatggggcaaagcgacccaaaaggagatcgaaaagcagaaggtacacctcaagagcataaccgaagtgggcgaagctttgaaaacagttctggggaaaaaggaaacactggtagaagataaactctctctcctgaactcaaactggatcgctgtgactagtcgcgccgaggagtggctgaatcttttactggaatatcagaagcatatggagaccttcgaccagaatgtggatcacataacgaagtggatcatacaggccgacacactgctggatgaatcagagaagaaaaaaccgcagcagaaggaagacgtgcttaagcggctgaaggccgagctgaatgatatcagaccaaaggtggacagtacccgcgaccaggctgcgaacctcatggccaataggggagatcactgccgtaagctggttgaaccccagatcagtgagttgaatcatcgctttgcagctatttctcaccggattaaaaccgggaaggcctctatccccctcaaagaactggaacagttcaattccgacatccagaagttgttggagcccttggaggccgaaattcagcagggagtaaacctcaaagaggaagactttaataaggatatgaacgaggacaatgagggcactgttaaggaattattgcagagaggagataatttgcaacagcgtattactgatgagcgaaaacgggaggaaatcaaaataaagcagcagttgctccagacgaagcacaacgccctgaaggatcttcggagtcaaaggaggaagaaagcccttgaaatttcccaccagtggtatcagtataagagacaagcagacgacctgctgaagtgcctggatgacattgagaaaaaactggccagtctgcccgaaccgcgggacgagcggaaaatcaaggaaatcgatagagaactgcaaaagaagaaagaagagctgaatgccgtacgccggcaagcagaagggctgagcgaagacggcgctgccatggcagtcgaaccaacgcagattcagctaagcaagaggtggcgcgaaattgagtccaaatttgcacagtttaggagacttaatttcgctcagatccacaccgtccgggaagaaactatgatggtgatgacagaagacatgccactcgagatatcatacgtcccgtccacttatctcacggagatcacccacgtctcgcaagcactgttggaagtcgagcaactgctcaatgcgccggacctctgtgccaaggactttgaggacctgttcaaacaggaggagtcactgaagaacataaaagactcactccaacagagctcaggtaggatagatatcatccacagtaagaaaaccgccgccctgcagtcagccacacctgtggaacgggtcaaactgcaagaggccctgagtcagcttgatttccagtgggagaaagtgaacaaaatgtacaaggacagacagggacgcttcgatagatctgtggaaaagtggaggcgattccactatgatatcaagatctttaaccagtggctcacagaggcggaacaattcttacgaaagacccagattccggagaattgggaacacgctaaatacaagtggtatctaaaagagctgcaggatggcatcggacagaggcaaaccgtcgtgcgcacattgaacgcaactggagaggaaattatccagcagtcatcaaagactgacgcaagtatactccaggagaagctcgggtccctgaacttgcgctggcaagaagtgtgtaagcagctgagtgaccggaaaaagcggctggaagaacagaagaatattttgtcggagttccaacgagacctgaacgaattcgttctgtggctggaggaagccgacaatatcgcctccatcccacttgagcccggcaaagaacagcagcttaaagaaaagctggagcaggtgaaactgttggtggaagagctaccactcagacaaggaatcctgaaacagctgaatgagaccggaggaccggtgctggtgtccgcacccatcagcccagaggagcaagacaagctggaaaacaagctgaaacagacgaacctgcaatggatcaaggtgagccgagcattgcctgagaagcagggcgaaattgaggcccagatcaaggacctgggtcaattggagaagaaactggaggacttggaagagcagctgaatcatctgctgttgtggctgtcccccatcaggaatcagctggagatctacaaccagcccaatcaagagggcccattcgacgtcaaagaaactgagattgctgtccaggccaagcaacccgatgttgaggagatcctttctaaaggacaacacctgtacaaggagaaaccggctacacaacctgtgaaacggaagctcgaagacttatcctcggaatggaaagcagtaaaccgactgttacaggaacttcgcgccaaacagcccgatctggcccccgggctcactacaattggggcatctcctacacagactgtgacactcgtcacccagccagtggtcacaaaagagacagccattagtaaactggagatgccctctagtttaatgctggaagtccccgcgctggcagacttcaatcgagcttggaccgaattgacagactggttaagcctgttagaccaggtgatcaagagccagcgcgttatggtcggggatctagaggacatcaatgagatgatcatcaaacaaaaggcaacaatgcaggacttagagcagcgtaggcctcagttggaggagctcatcacggccgcacagaatctgaagaacaagacctccaaccaggaagccaggaccatcatcacagataggatagagaggatacagaaccagtgggatgaagtgcaggagcacctgcagaatcggcgccaacagctgaacgaaatgctgaaagacagtacccaatggctcgaggccaaggaggaagccgagcaggtgctcggccaagccagggcaaagctggagtcatggaaagagggcccatacactgtcgacgccatacagaaaaagatcaccgaaaccaaacagctggccaaggacctccggcagtggcagactaacgtcgacgtggcaaacgatttagccctgaagctacttcgcgattactccgctgatgatacccgtaaagtgcatatgattacggagaacataaatgcatcctggcgcagcattcataagcgtgtgtctgagagggaggccgccctcgaagaaacacacaggctgcttcaacaattccccctcgatctcgagaagtttctcgcctggctgacggaggctgagactaccgctaacgttctgcaagacgcgacccggaaagagcgactgctggaagattctaaaggagtgaaggagctgatgaaacagtggcaggatctgcagggagagatcgaggcacacaccgatgtatatcataatcttgacgagaatagccaaaaaatcctgaggagcttggagggatccgatgatgccgtcctattgcagagaagactcgacaacatgaatttcaaatggagcgagctgcgaaaaaagagcctcaacattcgctctcacttggaggcatcttctgaccagtggaagcggttacacctgagcttgcaggaactcttagtctggctgcagcttaaagacgatgagctcagccgccaggctcccatcggaggcgatttccccgccgtgcagaagcaaaacgatgtgcacagagcattcaagcgggagctcaagaccaaggagcccgtgatcatgagtaccctggaaactgtgcgaatttttcttaccgaacagcctctcgaagggcttgaaaaactctaccaggagccccgtgagctgccccccgaggaaagggcccagaatgtgacaagactgctgcgaaaacaggcggaggaagtcaacactgaatgggaaaaattgaatcttcactcagctgactggcagagaaagattgacgagacgctggagcggctgcgggaattgcaagaggctaccgatgagctggacctcaaactgaggcaggcggaggttatcaagggttcgtggcagcctgtgggagatctcctgattgactccctccaagaccacctagaaaaggtgaaagccctgcgcggggagattgccccattaaaggaaaatgtgtctcatgtgaacgatctcgcccgacagttgaccactctgggcatccaactctctccatataacctaagcactcttgaagaccttaacactcgatggaagctcctgcaggtggccgtggaggatcgagtgagacaactgcacgaagcgcatagggacttcgggcccgcaagccagcactttctgagcacctctgttcagggcccctgggaacgcgccatcagtcctaataaggttccctattatattaaccatgagacccaaaccacatgctgggatcaccccaagatgacagagctctaccagtctctcgccgatctgaacaacgtgcgcttttccgcctaccggacagcgatgaagctgagaaggctccagaaggctctttgcttggatttgctaagtttgtctgcagcctgtgatgcgcttgaccagcacaatctgaagcagaatgaccaacccatggacattctgcagataataaattgtttgacgactatctatgaccggctagagcaggagcacaataatttggtgaatgtgcctctgtgcgtggatatgtgcttaaactggctgcttaacgtgtatgacaccggacggaccggacgcatccgcgtgctttcattcaagactggcatcattagtttgtgcaaagcccatctggaggacaagtatagatatctgttcaaacaggtggcatcttccactgggttttgtgatcagcggcgactcggtcttctcttacatgactcgatccaaatcccccgacagcttggcgaggtggcctcattcggcggcagtaacatcgaaccatcagtgcgatcctgttttcagtttgctaacaacaaaccagagatagaagctgccttgttccttgattggatgcgcttagagcctcagagcatggtttggctgcccgtcctgcatcgtgttgcggccgccgagaccgcaaagcatcaggccaagtgtaacatctgtaaggaatgccctataattgggttccgttaccggtcactcaagcacttcaattacgacatctgccagtcttgcttcttttctggacgcgtggccaaaggacacaaaatgcactaccccatggtagagtattgtacacccacaacaagcggggaagatgtccgggattttgctaaggtattgaagaataaattcaggactaaaaggtacttcgccaaacacccgcggatgggctatctaccggttcagacggttcttgaaggcgacaacatggagacgcccgtaacattaatcaatttctggccagtggactctgctcccgcgtcatcaccccagttgtctcacgacgatacacactcacggatcgagcactacgccagcagactcgcggagatggagaacagcaacgggtcgtatctcaatgatagcatatccccaaacgaatcaattgatgatgaacacttgctgattcagcattattgccagagcctcaatcaagattctcctctaagtcagccgaggagcccagcgcagatccttatttcgttggagtctgaggagcgtggagaactcgagcggatactggccgacctggaagaggagaacagaaacctgcaagcagagtacgaccgcttgaaacagcagcacgagcacaagggtttaagtcccctgcctagcccacccgagatgatgccgacaagcccccaaagcccccgagacgcggaacttattgcagaagccaagctccttcgacaacataaagggcggctggaggcgcggatgcagatcttagaagatcacaacaagcaactcgagagccagttacacagactgcggcagttattagagcagcctcaagctgaggctaaggttaacgggactacagttagtagcccatcaacttctctgcaaagatccgatagttctcaacccatgcttttgagagtggtgggctctcaaacatccgattctatgggggaggaagatctgttgagtccccctcaggacacatccacagggctggaagaggttatggaacagctcaataactccttccctagttcaaggggaaggaatacacctggaaagcctatgagggaggacactatgtag

SEQ ID NO: 115388 - DNA, 3693 bp, synthetic construct
  misc_feature 1..3693: note = Description of Artificial Sequence: Synthetic coding sequence
  source 1..3693: mol_type = other DNA
atgccaagttccctgatgctcgaggtccccgctttggccgatttcaatagagcctggacagagctgacggactggttgtcactcctggaccaggtgattaaatctcagcgggtgatggttggagaccttgaagacattaatgaaatgattataaaacaaaaagccaccatgcaagacttggaacagcggcggccgcagcttgaagaattaattacagcggctcagaatcttaaaaataagacttcaaatcaggaggccagaacaatcatcacagataggatcgagagaattcagaaccagtgggatgaggtgcaggaacatcttcagaataggcggcagcagctcaacgagatgctaaaggattccacccagtggctagaggctaaagaggaagccgaacaggtactgggacaggctcgagctaaactcgaatcatggaaggagggaccctacactgtcgatgccatacagaagaagatcacagagactaagcagctggcgaaggatttacggcagtggcagacaaatgtggatgtcgccaacgacttagctctgaaactactcagggattattctgctgacgatacacgtaaggtccatatgatcacagagaatatcaatgcctcttggcgatctatccataagcgggtgagcgaacgagaagcagccctggaagagacacatcgcctgctgcagcagttcccccttgatttggagaaattcctggcatggctgacagaggcggaaacgactgctaatgtcctgcaagacgccaccagaaaagaacggctgttagaagatagcaaaggagtcaaagaactcatgaagcaatggcaggatctgcaaggcgagattgaggctcatactgatgtctaccataacctcgatgagaactcccagaagattctccgcagtctggaaggatccgacgatgcggttctgctgcagcgccgcctggacaatatgaacttcaagtggtccgagttgcggaaaaagagcctgaacattcgctcacatctcgaagctagttctgaccagtggaagcgcctgcacctgtcactgcaggagctgctcgtgtggctgcaactgaaagatgatgaactctcacggcaggctccaattggcggggatttccccgccgtgcaaaaacagaatgacgtccacagagcgttcaagcgcgagctcaagaccaaagagcctgtgattatgagtaccctggaaacagttcggatttttctcactgaacagccattggagggccttgagaaactctaccaagagccacgggagctgccaccagaagagcgggcccagaatgttactcgcttactccgcaaacaggcagaagaagtgaatacagaatgggagaaactgaatctccactccgccgactggcagaggaagatagacgaaacactcgagaggttacgggaactgcaggaagctaccgatgagctggacctgaagcttaggcaggctgaggttataaaaggatcttggcagcctgtcggcgacctcctgatagacagtctgcaagaccacttagagaaggttaaggccctgcgtggggagattgccccgttgaaagagaatgtgtcacatgttaacgatctggcccgtcagctaacaacacttggcatccaactgagtccatacaacctctcgacactcgaggatctcaacaccagatggaagctactgcaggtggctgtcgaggatcgcgtgcgccaactgcacgaggctcacagagatttcggcccagcttcccaacactttctgagtactagtgttcaaggcccctgggagagagccatttcccctaataaggtcccttattacattaaccacgaaacgcaaacaacatgctgggatcaccccaagatgaccgagttgtaccagagtcttgctgacctgaacaacgtgcgttttagcgcctatcgtaccgccatgaagctaagacgattacagaaagccctctgcttagacctgctgtccctttcagcagcctgtgacgcactggaccaacataacctcaagcagaacgaccagccaatggacattctgcaaattattaattgcctaaccactatctacgaccggctggagcaggagcataacaacctggtgaacgttcccctgtgtgtcgatatgtgccttaattggctgctgaacgtgtatgatacaggccgcactggcagaatccgtgttctctcctttaagacagggatcatttccttgtgcaaagcccatctcgaggacaagtataggtacttatttaaacaggtggcttcttcgactggcttttgtgaccaacgcagactgggattactcctgcacgactccatccaaattccgagacaactgggggaggtggccagctttggcggctctaatatagaaccttcagtgcgatcttgcttccaattcgccaataacaagcccgaaatagaggccgcgctgttccttgattggatgcgtttggagccgcagagtatggtgtggctgcctgtcctccaccgagtcgctgctgccgagaccgcgaagcatcaggccaagtgtaacatttgtaaagagtgccccatcatcgggtttcgataccgcagcctgaaacactttaactatgacatttgccagagttgctttttctcaggtcgcgttgctaaggggcacaaaatgcattatcccatggttgaatactgcacccccacgacgagcggtgaggacgtccgtgactttgccaaagtcttgaagaacaagttccgcaccaagagatattttgcaaaacatcctagaatgggttatctgcccgttcagacagtgctagagggagataacatggaaacacctgccagcagtcctcaactgagccatgacgacacacactcccgcattgaacattacgcaagtcgcctagcggagatggagaactccaacggtagctacctgaacgattcaatcagccctaacgagagcattgacgatgaacacctgttgatacagcactattgccaaagcttgaaccaggactcccctctgtcacaacccagatctccagcccagatattgataagccttgaatccgaggagaggggcgaattggaaagaattctcgctgacttggaggaggaaaatcgaaacctccaggccgagtacgaccgtttaaagcagcagcacgagcataaaggactctcacccctgccgagccctccagagatgatgcctacatccccccagtccccaagggacgcagagcttattgctgaagcaaagctacttcggcagcataagggtcgcctggaggcccgaatgcagattcttgaggatcacaacaaacagctggaaagtcagctccataggttgagacagctacttgagcaaccccaggcggaggccaaggtcaatggcaccacagtatctagcccatctactagtctgcaacggtctgacagcagtcagcccatgttgctccgcgtggtcggaagccagactagtgactcaatgggggaggaggatctgttgtcaccaccccaggatacctctaccgggctcgaagaggttatggagcaactgaacaactccttcccctcctctagggggcacaacgtgggctccctgtttcacatggctgacgatctgggccgcgccatggaatctcttgtcagtgtgatgacagatgaggagggcgctgaatag

SEQ ID NO: 115389 - DNA, 1869 bp, synthetic construct
  misc_feature 1..1869: note = Description of Artificial Sequence: Synthetic coding sequence
  source 1..1869: mol_type = other DNA
atgcgggagcagctgaagggtcacgagactcaaacaacgtgttgggatcacccaaagatgactgagttgtaccagagtcttgcggatctcaacaacgtgcgattttcagcctataggactgctatgaaactgagacgcttacagaaagccctgtgcctggacctcttatctttgagcgctgcttgtgacgctctcgaccaacacaatctaaaacaaaacgaccagcccatggatattctgcagatcatcaactgtctgacaaccatatatgaccggttggagcaggagcataacaacctggtcaatgttccgctgtgcgtcgacatgtgtttgaattggctcttgaatgtgtacgacaccggtcggacaggacgcattcgggttctctcttttaagacaggcattatctctttgtgcaaggcgcacttggaggacaaataccggtacctctttaaacaggtggcttcttctactggcttctgcgatcagcggaggttgggcctgctgctgcatgacagtattcagatccctcgacagctaggggaagtagcatcattcgggggcagtaacatcgagccttctgtgaggagctgcttccagttcgccaataacaagcccgagattgaggccgctctgttcctggactggatgcggcttgagccccagtcaatggtttggctcccagttctccatcgcgttgccgccgcagagacggctaagcaccaagcaaagtgcaatatctgtaaagaatgcccaatcatcggatttagatacagatcgctcaagcacttcaattacgatatctgtcaatcctgcttcttttcaggtagggttgccaaaggccataagatgcactaccctatggtagaatattgcacccccaccacgtctggagaagacgtgagggacttcgccaaagttctgaaaaacaaatttcgaaccaagcgttattttgccaagcacccccgtatgggctaccttcccgtccagaccgtgctggaaggtgataatatggagaccccagcatcatcaccccagctttcccacgacgacactcatagccgaatagagcactacgcctctaggttggccgagatggaaaactccaacggatcttatcttaacgactccatttcgccaaacgagagcatcgatgacgaacatttgctgattcagcactactgccaatccttgaatcaggactccccactctcgcagcccagatcgcctgcccaaattctgatctcattggaatctgaggaacgtggcgagttggaacgaattttggcagacttagaggaagagaacaggaatctgcaggccgagtatgatcggctaaagcagcagcatgagcataagggcctaagtcccttacctagcccccccgagatgatgccgacttccccccagtctccacgggatgccgaattgatcgccgaggctaaactacttagacagcataaggggcggctggaggcccggatgcagatccttgaggaccacaacaagcagctggaaagccagttgcatagactcagacaactcctcgagcaaccacaagctgaggctaaggtgaatggtactacagtgtctagcccatctaccagcctacagaggagcgacagtagccagccgatgctcctgcgcgttgtgggctcccaaacttccgattccatgggtgaggaagatctgctctcaccacctcaggatacctccacggggctggaggaagtgatggaacagctgaataattccttccctagcagtcgtgggcacaacgtgggaagtcttttccacatggctgatgatctgggacgagctatggaatctttggtgtctgtgatgaccgacgaggagggggccgagtag

SEQ ID NO: 115390 - DNA, 11046 bp, synthetic construct
  misc_feature 1..11046: note = Description of Artificial Sequence: Synthetic coding sequence
  source 1..11046: mol_type = other DNA
atgagtgaagtaagctctgacgagcgggaggacgtccagaaaaagactttcacaaagtgggtaaatgcccagtttagcaaatttggaaaacagcacattgaaaatctgtttagtgatcttcaggacggccggagactcttagacctcctggaaggacttaccgggcaaaaactgccgaaggagaagggctccacgagagtccacgccctgaacaatgtgaacaaggcactgcgggtcctgcagaataataatgtggatcttgtgaacatcggcagcacagacattgtcgatggcaaccacaaattaacactcggactgatttggaatatcatcctgcattggcaggttaagaatgtaatgaaaaatataatggcaggcctccagcagacaaatagcgaaaaaattctgctgagctgggttcggcaaagcacacggaattacccgcaagtaaatgtcataaattttactacctcttggagtgacggcctcgctctgaacgccctgattcacagccatcggccagacttgttcgactggaactccgtggtatgtcagcagagtgcgactcagcgactggagcatgccttcaacattgcaagataccagctgggcatcgagaaattgttggatcccgaggacgtagacacaacatacccagacaagaaatcgatactcatgtacataactagcctgttccaagtgctgcctcaacaggtgagcattgaggccattcaggaggtggaaatgctacctcgtcccccaaaggtgaccaaagaggagcatttccagttgcatcatcagatgcattactctcagcagattacagtttcactggcccagggctacgaacggacgtcttctcccaagccacgcttcaagagctacgcatacactcaggccgcttacgtgacaacttctgaccccacgcggtctccctttcccagccagcatctagaggctccagaagataagagctttgggagcagtctgatggagtccgaagttaacctggatagataccagaccgccttagaagaagtactctcttggttactgtcggccgaagacactctgcaagctcaaggagagatctctaacgacgtcgaagtcgttaaggatcagttccacactcacgaagggtacatgatggacttaacagctcaccaaggccgggtgggtaatatcctacagttggggtcgaaactcatagggacagggaaactaagtgaggatgaagaaaccgaagtgcaggagcaaatgaacttattgaactctcgttgggagtgtttgagagttgcgagcatggagaaacaatcgaacctccatcgggtactgatggatttacaaaaccaaaaactgaaagaactgaatgattggttgactaagacggaggaaagaactaggaaaatggaagaagaacctttggggcccgacctagaggacctaaagcggcaggtacagcaacataaggtgctgcaggaggatctagagcaagagcaagttagggtaaacagtctcacacacatggtggtggtcgtagatgaaagcagtggcgaccatgctaccgccgccttggaggagcaactgaaagtgttgggggataggtgggcaaatatctgtcggtggactgaggaccgctgggtgttgttacaggatatcctgctaaagtggcagaggctcacagaagagcagtgcctgtttagtgcttggctgagtgaaaaagaagatgcagtgaacaagatccacaccaccggatttaaggaccagaacgaaatgctgtcgtctcttcagaaactcgccgtccttaaggcagatcttgaaaagaagaaacaatccatggggaagctgtacagcctgaaacaagacttgctatcgacactaaagaataaatccgtcactcagaagacagaagcctggctcgataattttgccagatgttgggataacctcgtccagaaactggaaaaatccacggcccagatttctcaagccgtgaccacaactcagcctagccttactcaaaccaccgtgatggagaccgtgaccactgttacaactagagaacagatactggtgaagcacgctcaggaggagttgcccccaccacctccgcaaaagaaacggcagattacagtagacagcgagattaggaagcgcctggacgtggatatcactgaactgcattcttggattacaaggtccgaagccgtcctgcaatcgccagagttcgctatcttccgaaaagagggcaatttctctgacctgaaagaaaaagtgaatgccattgagagagagaaagctgagaagtttaggaaacttcaggacgcatcaagatccgcccaagccctcgtagaacagatggttaacgagggggtaaatgccgactctattaaacaggcatccgaacagctgaactcccggtggattgagttttgtcagctgctgagcgagcgccttaactggcttgagtatcaaaataacatcatcgcattttacaaccagctacagcagctcgagcagatgaccacgactgcggagaattggctgaaaattcaacccacgacacccagtgagcctacagccataaagtctcagctcaaaatttgtaaggatgaggttaaccgcctgtcagatcttcagccccaaattgagcgcctgaagatccagtctatcgcgctcaaagaaaaaggacaggggcccatgttcctggacgccgactttgttgcatttacaaatcacttcaagcaggtgtttagcgatgtgcaggcccgggaaaaggagttacagaccatatttgatacactgccccccatgcgttatcaggaaactatgtctgctatccgtacctgggtgcagcagtcagaaaccaaattatcaattcctcagctcagcgtaactgattatgagataatggagcagagactcggcgaactgcaggccctgcaatcaagcctgcaggaacagcagtccggactatattacctgtcaaccacggtgaaggaaatgtctaagaaggccccatccgaaatctcacggaagtatcagagtgagtttgaagagatcgagggaaggtggaagaagctctcttcccagttggttgagcattgtcagaagcttgaggaacaaatgaacaagctgcggaagattcagaaccacatccaaaccttgaagaaatggatggccgaggttgacgtcttccttaaagaagaatggccagccctgggcgattctgagattctaaaaaagcagctgaagcagtgtagactgctggtgtctgatattcaaactatccagccgagcctgaattctgtgaacgaaggaggccagaagatcaaaaacgaagcagaacccgaattcgccagcaggctcgagaccgagctcaaggagctaaacacccagtgggaccacatgtgtcaacaggtctacgcccgcaaagaggccctgaaaggcggactggaaaaaacagtgagcttgcagaaagatctgagcgagatgcatgagtggatgactcaggccgaggaggagtatttagagcgggactttgaatataaaactccggatgaactccagaaggctgttgaggagatgaaacgagctaaagaggaggctcaacagaaggaggcgaaggttaagcttctgactgagagtgtgaactctgtgatcgctcaggctccacccgtggcacaggaggcgctgaaaaaagagctggaaacactgactaccaactatcagtggctctgtacacgcttgaacggcaagtgtaaaaccctggaagaagtttgggcgtgttggcatgagctcctaagttacctagaaaaagctaataagtggttgaatgaggtggagttcaagctcaaaactaccgagaatatcccaggcggcgccgaagagatttccgaggtgttggattcactcgagaacctgatgcggcacagcgaggacaatcccaatcagattcgtattctggcacagacattgacagatggaggcgtcatggatgagcttatcaatgaggaattagagacttttaacagccggtggcgtgaactccatgaagaagctgtgagaagacagaaactgctcgagcagtccatccaatcggcccaagaaacagagaaaagcttacatctgattcaggaatccctaaccttcatcgacaaacaattggctgcctatatcgccgacaaggtcgatgctgctcaaatgccccaggaggcacagaaaatccaaagcgatctcacatctcatgagatctcgctcgaagagatgaaaaaacacaatcagggcaaggaggctgcccagagagttctgtcgcagatcgacgtcgctcagaagaaattgcaggatgttagcatgaagtttcgactgttccagaagccagctaacttcgagcaaagattgcaggaatcaaagatgattctggatgaagtaaaaatgcatctgcccgccctggagacaaagtccgtggagcaggaggtcgtacagtctcaattgaaccactgcgtcaatctgtataagtctttatccgaggtaaaaagcgaggtcgagatggtgattaagacgggcagacagatcgtacagaaaaaacagaccgagaatccaaaagaactcgacgaaagagtcacggccttgaagctacattataatgagctgggggccaaggtgaccgaacgtaaacagcagttagaaaagtgtcttaagcttagtaggaaaatgcgaaaggaaatgaatgtgcttaccgaatggctcgccgccaccgatatggagctgacgaaacgaagcgctgtcgaaggcatgccttctaatctggactcagaggtggcctgggggaaagcaacacaaaaggagattgagaaacaaaaagtccacctgaagagcatcacagaggtgggcgaagctctgaaaaccgtactggggaagaaggagacactggttgaagataaactgtctctgctgaacagcaattggattgccgtgacctccagagcagaggagtggttaaatcttttactcgaataccagaagcacatggagacctttgatcagaatgtggaccacattaccaagtggattattcaggccgataccttactggacgagtccgaaaaaaagaagccccaacagaaagaagacgttttaaagcgcctcaaggccgaactgaatgacattaggccaaaagttgattccaccagagaccaggccgctaatctgatggccaatcggggggatcattgcaggaagttggtggaaccccagatcagcgagctgaaccatcggtttgctgccatcagtcaccgcattaaaacagggaaggcctccatccctctgaaagaactggagcaattcaactccgacattcagaaattgctggaaccgctggaagccgaaatccagcagggtgtgaacttgaaggaggaagattttaacaaggatatgaacgaggataacgagggaacagtgaaagagttactgcaaagaggggataatctgcagcagaggatcacagacgagcggaaacgcgaagagatcaagatcaaacagcagctgttacaaaccaagcacaacgccctaaaagatctgcgctcccagcgccggaaaaaggcactggagatctctcatcagtggtaccagtacaagcgccaggctgatgatctcctcaagtgtctggatgatatcgaaaaaaagctcgcttcacttcctgaacctcgtgatgagcggaaaattaaggagatcgaccgggaactccagaagaaaaaagaggagcttaatgccgtcagacgtcaagcggaaggcctaagcgaggatggggccgccatggccgtggagcctacacaaattcagctctcgaagcggtggagggaaatcgagtctaaatttgcacaattcaggaggctgaatttcgcccagatccacactgtccgcgaggagacgatgatggtgatgactgaagatatgccactggaaatatcgtacgtgccctccacttatttgacagaaatcacacatgtgtcccaggcactcctggaggtggaacaactcttaaatgcgcctgacctgtgcgctaaggattttgaggatttattcaaacaggaggaatccttaaagaacattaaggactccctacagcagagcagtgggaggatagatataatccacagcaaaaaaactgccgcgcttcagtccgccactcccgtcgagcgggtgaagcttcaggaagccctgagccagttggactttcaatgggaaaaggtcaacaagatgtataaggaccgtcaggggcgctttgataggagtgtggagaaatggcggcgattccactacgatatcaagatttttaatcaatggctcaccgaggccgaacaatttctgcgcaaaactcagattcccgagaactgggaacatgcgaaatataagtggtatctgaaggagctgcaggatggaattggtcaacggcagactgtggtgcgtaccttgaatgccaccggggaggagatcatccaacagtcatctaaaactgatgccagcatccttcaagagaagcttggctctctgaatctgaggtggcaagaggtctgtaagcagctcagcgaccggaagaagcgccttgaagagcagaagaacattctgtctgaattccagagggatttgaatgaatttgtgttatggctcgaggaggcagacaacatcgcctcaatcccccttgagccaggtaaggagcagcagctcaaggaaaaactggaacaggttaagttactggtcgaagagttacctctaaggcagggtatcctcaaacagctaaatgagacaggcgggcctgtgttggttagcgcccccatctcgccagaagaacaggacaagctcgaaaacaagctcaagcagacgaatctgcagtggataaaagtgtctcgggccctgcctgagaagcaaggcgaaatcgaagcccagataaaggacttagggcaactcgagaaaaagttggaggatctggaggagcagctaaaccatctcctgctgtggctgagccctataagaaatcaattggaaatttataaccagccgaaccaggaagggcctttcgatgtgaaggaaacagagatagccgtccaggcaaaacagccggatgtggaggaaatcctgtcaaagggccagcatctgtacaaggagaaaccggccactcaacccgtaaagcgcaaactggaggacttgagctctgagtggaaagcagtcaataggcttctgcaagagctgcgcgctaaacaacccgacctggcgccaggattgactacaataggcgcaagcccaactcagaccgtgaccttggtaacccagccggtggtcactaaggagacagctattagcaagctagaaatgccttcaagccttatgctagaggtaccggccttggctgattttaatcgcgcatggactgagctaacagactggctctccctcctggaccaagtcattaagtctcagcgcgtgatggtgggagatctcgaggatataaatgaaatgatcatcaagcagaaagccactatgcaagatctagagcagcggcgaccacagctggaggagctcattaccgcagcccagaacttaaaaaacaaaaccagcaaccaggaggctagaacgatcattactgaccgcattgagcggatccagaaccagtgggacgaggtgcaggaacatctgcaaaaccgcaggcagcagctaaatgagatgctgaaggactctacccaatggttagaggccaaggaggaggccgagcaggtgctcggtcaggctcgcgcgaagcttgaaagctggaaagagggaccttatacagttgacgcgatacagaaaaagatcacagagaccaagcagttggccaaggaccttagacagtggcagaccaacgttgacgtggctaatgacctggcacttaagctgttgcgcgactactccgctgacgatacgaggaaagtgcacatgatcactgagaatattaatgctagttggaggtcgattcataagagggtgagtgagagggaagccgccttagaggaaacccaccgcctcctccagcaattccccttagacttagaaaagttcctggcatggctcactgaagccgagacaacagctaacgtgctgcaagacgcgacgcgtaaagagcgtctgttagaggattccaaaggtgtgaaagaactcatgaaacagtggcaagaccttcaaggcgagatcgaggctcatacggatgtataccacaatctcgatgaaaatagccagaaaatactgaggtccctcgaggggagcgacgacgctgtgctgctccagcggcgcttagataacatgaactttaaatggtcagagcttagaaagaagtctctgaacattagatcacatctcgaggccagtagcgaccaatggaagcgcctgcatctctcactgcaggaacttctcgtgtggctgcagctgaaagacgacgagctgtctaggcaagctcctataggaggagatttcccagccgtacagaagcagaacgacgtgcatcgcgccttcaaaagagagcttaagactaaagagcccgtgataatgagtaccttggaaaccgtgaggatctttctcacagagcagccgcttgagggcctcgaaaaattgtaccaggaaccccgcgagttaccccctgaggagagagctcagaacgtaacaagactcctgaggaagcaggctgaagaggtcaatactgaatgggagaagctgaatcttcattcggccgattggcagaggaagattgacgagacattagagagacttagggaactgcaggaggccacagacgagttggacctgaaactgcggcaggcagaagtaattaaggggtcctggcagccagttggggatctgctcatagactccctccaggaccacctggaaaaagtcaaagccctgcgtggcgaaatcgcccccctgaaagagaatgtcagccacgtgaatgacctcgcaaggcaactcacaacgctagggattcaactgtcaccatataacctgtccactcttgaagatctgaatactcggtggaaactcttgcaggtcgccgttgaagatagagtgcggcagcttcacgaggcgcaccgggacttcgggcctgcaagccagcattttctatccacatccgtccaagggccgtgggagagagctatctcccctaacaaagtcccatactacattaaccatgaaacccaaacaacctgttgggaccatccaaagatgacggagctgtatcagagcctcgcggacctgaacaacgtcaggttttccgcctaccggaccgcgatgaaactgcgcagactgcagaaagcactgtgcttggacctcttatcacttagcgcagcttgcgatgccctcgaccagcataaccttaaacagaacgaccagcctatggatatcctgcaaatcatcaattgcttaactacaatttatgaccggctggaacaggagcataacaacttggtgaacgtgcccttatgtgtagatatgtgtttgaactggttgctcaacgtctatgacacaggacgaactggacggataagagttctttcgttcaagaccggaatcatcagcttgtgcaaggctcatctcgaggacaagtataggtaccttttcaaacaggttgcctcttcaacggggttctgcgaccagaggcgcttaggcctgctgctccacgattctatccaaattccccggcagttgggtgaagtcgcctctttcggcggaagcaatatcgagcccagtgtaaggtcatgttttcagttcgccaacaacaaaccagaaatcgaagcggccctgttcttggattggatgcgtttggagccgcagtctatggtgtggctaccagtcctccatcgggtggcagctgctgaaaccgcaaaacaccaagctaagtgcaacatctgcaaagagtgcccaatcattggattccgttatcggtcacttaagcattttaactacgacatttgccagagctgcttcttttcaggccgagttgccaagggccacaagatgcactatcctatggtagagtactgtacaccaacaacctccggagaggacgtaagggactttgcgaaggtgcttaagaacaaattccgcaccaaacggtacttcgccaaacacccccgtatggggtacttgccagtgcaaacagtgctggagggtgacaacatggaaaccccagtgactctgatcaacttctggccagtcgacagtgcgcccgcatccagtcctcagctgtcccatgacgacacgcactcccgcatcgagcactacgcatcaagacttgccgaaatggagaattctaacggttcctaccttaatgattccatcagtcctaacgaatccattgacgacgaacacctgctgatccaacactattgccagtccttgaaccaggatagtccattaagccagccacgttcccctgctcaaatcttgataagtctagaatctgaagagcgcggagagctggaacgcatccttgctgatctggaagaagaaaatcgcaatttacaggctgaatatgatcgacttaagcaacagcacgaacataagggtctcagtcctttgccttcacctcccgaaatgatgcctactagcccacagtcaccacgcgacgccgagttgattgccgaagccaaacttctgcgtcagcataaaggtcgtttagaagcccggatgcagatacttgaggatcataacaagcagctcgagtctcaactgcaccgactgaggcaactcctggagcagccgcaggccgaagccaaagtaaatggtaccacggtcagcagccctagcacaagtctgcaacggtccgactcatctcagccaatgctgctccgcgtggtcggaagtcagacttcagattccatgggggaggaggatctcttgagtccgcctcaggatacgagtacagggctcgaagaggtgatggagcagctgaataactcttttccatctagcaggggccgaaatactcccgggaagcctatgcgcgaagataccatgtag

SEQ ID NO: 115391 - DNA, 7035 bp, synthetic construct
  misc_feature 1..7035: note = Description of Artificial Sequence: Synthetic coding sequence
  source 1..7035: mol_type = other DNA
atgacggagatgatactgctgattttcttcccggcgtacttcttgaacgcagtgcggcgccagaagctgctcgaacagagtatccagagtgcacaggaaacagagaaatcgctgcatctgattcaggagagtctcaccttcattgacaaacagttggctgcctacatcgccgacaaagttgacgctgctcagatgccacaggaggcccagaagattcaaagtgatttaacttcccacgagatctccctcgaggaaatgaagaagcacaatcagggcaaggaggccgcacagagagtgctgtcccagattgacgtcgcccaaaagaaactgcaggatgtcagtatgaagttccgtctgtttcagaaacccgccaatttcgaacagagattacaggagtcaaagatgatcttagatgaggtaaagatgcacctgccagccctggaaaccaagtccgtggagcaggaagtggtgcaatcccagctcaatcattgcgtgaatctctacaagagtctgtctgaggtgaaaagcgaagtagagatggtcatcaagacggggagacaaattgtccaaaaaaagcaaaccgagaacccaaaagagctggacgaaagagtaacagcgctcaaactacactacaatgaacttggcgccaaggtaactgagaggaaacagcagctggagaagtgcctgaagctgagccgaaagatgagaaaggagatgaacgtactgacagagtggctggcagcaactgacatggaacttaccaagcgaagcgccgttgaaggtatgccgtctaatctggatagcgaggtcgcttggggcaaggctacacagaaggagatcgaaaaacagaaagtgcatctcaaatccatcaccgaggtcggtgaggccctcaagacagtgttgggaaaaaaagagactctggtggaggataagttatccctgctgaattccaattggatcgccgttacttccagggctgaagagtggttaaacctcttgttggaataccagaagcacatggaaacatttgaccagaatgtggaccatatcaccaagtggatcattcaggctgacaccttgctcgatgagtctgagaagaagaagccgcagcagaaggaggacgtgctcaaaagactcaaggcagagctgaacgacatcagacctaaggtagacagtacgagggaccaagcagccaacctgatggctaaccgaggggaccattgtcggaagctggtggaaccacagattagtgaattgaatcatcggttcgctgcgatttctcatcgcattaaaactggcaaggctagcattccgctgaaggaactggagcagtttaatagcgatatccagaagcttttagagccactggaggcggaaatccagcagggagtaaacttgaaggaggaagatttcaataaggatatgaacgaggacaatgagggaactgtaaaggaactgctgcaacgtggcgataacttacagcaaagaataacagacgaaaggaagagggaggagataaaaatcaaacaacaactactacagaccaagcacaacgctctgaaggaccttaggtcacagcgtcggaagaaggccctagagatttcgcatcagtggtatcagtataaaagacaggctgacgatcttttgaagtgcctggacgatatagagaagaagctcgcaagcttgccagaaccccgcgatgaaagaaaaatcaaggaaattgatagggaactgcagaaaaagaaggaggagctgaacgccgtacggcggcaagctgagggcctctctgaagatggcgcagctatggccgttgagcctacgcagattcaattaagcaagcgctggcgcgagatcgagagcaaattcgcacaatttcgccgccttaatttcgcccaaatccatacagtgagggaagagacaatgatggttatgaccgaggatatgcccttggaaattagctacgttccgtccacttacctcaccgaaattacacacgtgtctcaggccctccttgaagttgagcagctattgaacgccccagatctctgtgcaaaggactttgaggacttgtttaaacaggaggaatcactgaaaaacatcaaggattctctgcagcagtcctcgggaaggatcgacatcattcactcgaagaagaccgcagcattgcagtcagcgacaccagtggagagggtcaagctccaagaggcactgagccagctcgatttccagtgggagaaggtgaacaaaatgtataaagatcggcaaggtcgatttgatcggtccgtggaaaagtggaggcgtttccactatgatataaaaatctttaaccagtggctgaccgaagccgagcagtttttacgcaagacgcagatccctgaaaactgggagcacgctaaatataagtggtatctgaaggaactacaggacggcatcggccagcgtcagacggttgtgcgcactttgaatgccacaggcgaggaaatcattcagcagtcttctaagacagatgcatccatcctgcaggagaaactggggtcccttaatctgcgctggcaggaggtttgcaagcagctgagtgatcggaaaaaaaggttagaagagcaaaagaacatcctttcagaatttcagagagacctgaacgaattcgtcttgtggctagaggaagccgacaacatcgcctccattccactggagccaggcaaagagcagcaacttaaggagaagcttgaacaggtgaagctcctggtggaggagctgcccctcagacaagggattcttaagcagctcaatgagacgggaggtcctgttttagtatctgcccctattagtccagaggagcaggataagttggagaataagttgaagcagaccaatctgcagtggatcaaagtgtcacgtgccttgcctgagaaacaaggcgagattgaggcacagataaaggacctgggccagttggaaaagaagctcgaggacctggaggaacaacttaatcatctgctgctgtggctgtcaccaatccgaaaccagcttgagatttacaatcagcctaaccaagaggggccctttgacgtgaaggaaactgagatcgccgtgcaggccaaacaaccagacgtggaagagatcctgtccaagggtcagcacctttacaaagaaaaacctgccacccagccagtgaaacgaaaacttgaggatttgagcagcgagtggaaggcagtaaaccgactcctgcaggaactccgcgccaaacagccagatctggccccaggtcttacaacaattggagcgagcccaactcaaaccgtgacgcttgtgactcagccagttgttaccaaagagaccgccatatcgaaactagagatgccgtcaagcttgatgctggaagtgccagcacttgcagactttaatcgcgcctggactgagctgacagactggctgtcactgctagaccaggtgattaagtcccagcgcgttatggttggcgacctggaagatataaatgagatgattattaaacaaaaagccactatgcaggacctggaacagagacgccctcagctcgaggaacttataactgctgcgcagaatttaaagaacaagacgtcaaatcaggaggcccgtacgatcatcactgaccgaatagagcgtatccagaatcagtgggatgaggtgcaggagcatcttcagaatagacgccagcagttgaacgagatgcttaaggattcaacgcagtggctggaagcaaaggaggaggcggaacaggtgctgggccaggctagagccaagctcgagtcatggaaagagggcccttatacggtcgacgcaatccagaaaaagattaccgaaaccaagcagctggcaaaggatttgcggcagtggcagacgaatgtggatgttgctaacgatttggccctgaagctcctgagggattacagcgccgacgatacacgtaaagtgcacatgatcacggagaatatcaacgcctcttggagatctatccacaagagggtatccgaacgcgaagctgccttggaggagacccaccggctccttcagcagttccctttggatttggagaagttcttagcctggctcaccgaggcagagacaacagccaacgttttgcaggatgcgactaggaaggagcggcttcttgaggactctaaaggagtaaaggagctgatgaagcagtggcaagaccttcagggggagattgaggcccatacagatgtctatcacaatcttgacgagaattcccagaaaattttgcgctctctggagggctcagacgatgcggtgctacttcagagaaggctcgacaatatgaatttcaaatggagcgaactacgaaaaaagtcactgaacattcgctctcacttagaagcaagttccgaccagtggaagcgactccacctcagcttgcaggaactgctggtgtggttgcagttgaaagacgatgaactgtcacgccaggcaccaattggaggtgacttccccgcagtccaaaagcagaacgacgtccatagggcttttaagagggagctgaagactaaagaacctgtgatcatgagtactctggaaactgtgcgaatattcttgacagagcagcccctggagggcctagagaagttgtatcaggagcctagagagttgccaccagaggagagagcccagaacgtcacacgccttctgcggaagcaggctgaggaagtgaacactgaatgggagaaactgaaccttcacagtgccgattggcagcgaaaaattgacgagaccctcgagagactccgcgagctgcaagaggcaacggacgaattagatctgaagctgcgccaggccgaagtgatcaagggaagctggcagccagtcggtgatctgcttattgattccctccaagaccaccttgagaaagtgaaggccttgcgaggggaaatcgcaccgctgaaagaaaatgtgagccatgtgaatgacctggcaagacagctgacaacactggggatccagctgtcaccatataacctatctacacttgaagatctgaacacccgctggaagctgctgcaggtggctgtggaggatcgcgtccggcagcttcacgaagcacatagagactttggccccgcaagtcagcactttttatctacctcagtccaagggccgtgggagcgcgctattagccccaacaaggtgccatattatattaatcatgaaacccagacaacgtgctgggaccacccgaagatgactgagctctatcagtcactggccgacctaaacaacgtgcgattctcagcttatagaaccgccatgaagctaaggaggcttcagaaagccctgtgcttagatctcctgtcccttagtgctgcatgcgacgcgctggaccagcacaacttgaaacagaacgatcaacctatggacatcctccagattatcaactgccttaccaccatatacgatagactggagcaggaacacaacaaccttgtgaatgtgcctttgtgcgtggatatgtgtctcaactggctgctcaacgtttacgatacaggtagaacaggacgcatccgggtgctgtccttcaagaccggtatcatatctctgtgtaaggctcatctggaagacaaataccgctatctattcaaacaagttgctagctccacagggttttgtgatcagagaagactggggctcctgttgcatgacagtattcagatacccaggcagctgggtgaggtggcttctttcggcgggtccaacatcgagccttcagtgaggtcctgctttcagtttgcgaacaacaagcctgagatagaggcagccctgtttcttgactggatgcggctggagcctcaaagcatggtttggctccccgtgctgcatcgcgtggccgccgccgaaaccgccaaacatcaggccaagtgtaatatatgtaaggagtgcccaattattggctttcgctatcgttcactcaagcatttcaattatgacatctgtcagtcctgcttcttcagcggccgcgttgccaaaggtcacaaaatgcactatcccatggtcgaatactgcacacccaccactagcggcgaggatgtgcgcgactttgctaaggtcttgaaaaacaaatttcggaccaaacggtatttcgccaagcacccacgaatgggctacctgccagtacagacagtgctcgaaggcgataatatggagacacctgtgacactgatcaatttctggccagtggatagtgcccctgcctcatcaccacagctgagccacgacgatacacactccagaatagaacattatgccagtaggctcgctgagatggagaactcaaacggctcttacttaaatgattccatatcacctaacgaaagcatcgacgacgagcacttactgatacagcattactgccagtccctcaatcaagacagtcccctatcacagccgcgtagccctgcccagatcctgatatcactagagtccgaggagaggggggagttggagcggatcctggcagacttggaggaggagaacagaaacctacaagccgagtacgacagactcaaacagcaacacgagcacaagggcctatcgcccttgccgagtccccctgaaatgatgccaacatctcctcagagcccacgggatgccgagctgatcgcagaggctaaacttctgcggcagcataagggtagactggaagcccgtatgcagatcctagaggatcacaacaaacagctggagagccagctgcatagactgcgtcagctactggaacaaccgcaggcagaggctaaagtcaatggtacaaccgtgtcaagcccctccacgtcactgcaacgcagtgattcctctcaacccatgctgctgcgtgtcgttggttcacagacgagcgactcgatgggggaagaggatctgctcagccctccccaggacacttctaccggactggaagaggtgatggagcagctcaacaacagctttccctccagcaggggccgaaacaccccagggaaaccaatgcgcgaagacaccccttag

SEQ ID NO: 115392 - DNA, 7026 bp, synthetic construct
  misc_feature 1..7026: note = Description of Artificial Sequence: Synthetic coding sequence
  source 1..7026: mol_type = other DNA
atgtccgcgagaaaactgcggaatctgagctacaagaaggccgtgaggagacagaaattactggagcagtccatccagagcgcccaggaaaccgagaagtctttgcatctgatccaggaaagcttaaccttcatagacaaacagctcgctgcttacattgctgacaaggtcgacgcagcgcaaatgccacaggaggcccagaaaatccaatcagatctgacatcccacgagatcagcctggaggagatgaaaaaacataaccagggcaaagaagctgcacagcgtgtcctgtcccagatcgacgtggcgcagaagaagctacaagatgtgtctatgaagttcagactgttccagaaacctgccaacttcgaacaacgcctgcaggaaagtaaaatgatactcgacgaggttaaaatgcatctaccggcacttgaaacaaagtccgttgagcaggaggttgtgcagtcccagctcaaccactgtgttaacctgtacaaaagcctatcggaggtaaaatctgaggtcgaaatggtgatcaagactggtaggcagattgtccaaaagaaacagacagagaacccaaaggagcttgacgaacgggtgactgcattgaagctgcattataatgagctcggcgcaaaggtcacagagcgcaagcagcagctggagaagtgcctgaaattgagccgaaagatgagaaaagaaatgaacgtactgactgagtggctggccgccaccgacatggaactgactaagcgttccgcagtggaggggatgccctcaaacctggacagtgaggtcgcatggggcaaggcaacacaaaaagagatagaaaagcagaaagtgcacctaaagtccattaccgaggtcggtgaagcccttaagactgtgttaggaaaaaaggagaccctggttgaggacaaactctccttgttaaatagcaattggattgcagtgacctcccgagctgaggagtggctcaacctgctccttgaataccagaaacacatggagacttttgaccagaacgttgatcacattaccaaatggattatccaggcagacaccctgctcgacgagtcggaaaaaaagaaacctcagcagaaggaagacgtcctcaagcgactcaaggcagaattaaatgatatcaggccaaaggttgattccacgcgggaccaggctgcaaacctcatggcaaaccgcggagatcattgccgcaaactcgtggagccccagatatctgagctgaaccatcgcttcgctgctatctctcaccggataaaaacgggtaaagcaagcatccctttgaaggagttagagcaattcaactctgatattcaaaaacttttagaacccttggaggctgagatccagcagggcgtcaatctgaaagaagaagatttcaacaaagatatgaacgaggacaatgagggcactgtaaaggagttgctacaacggggcgataacctccagcaacggatcactgacgagcggaaacgcgaggagattaagattaagcaacagctgctgcagacgaagcacaatgccctgaaagacttgcgatcccagcgacgaaagaaagcacttgagatatcacaccaatggtatcaatacaaaaggcaagcggatgacctgctgaagtgtctggacgacatcgagaagaaactggcttctctcccggagcccagggatgagcggaaaattaaagagatcgaccgagagctccaaaagaagaaggaagagctcaacgctgtgcggcgccaggctgaaggcctgagtgaggatggcgcagccatggcagtcgagcccacccagatccagctgtcgaagcggtggcgggaaatcgagtctaagttcgcacagtttaggagactaaatttcgcccagatccacaccgtgcgagaggagaccatgatggttatgactgaggacatgcctttagagatttcctacgtccctagcacctatctcacagaaattacccacgtaagccaggccctcctcgaggttgagcagctcctcaacgcgccggatctctgcgctaaagacttcgaggatctgttcaaacaagaggagagcctcaaaaatatcaaagacagtctgcagcagtcgtctggtcgaattgatatcatccactccaagaagaccgccgcattgcaatctgcaaccccagtagagcgcgtgaaactgcaggaggctctatcgcagctggatttccagtgggaaaaggtaaataaaatgtataaagatcgacagggacggtttgatcgttcggtagagaagtggagacgcttccactacgacataaagatattcaatcaatggctgaccgaagcggaacagtttcttagaaagactcaaatccccgaaaactgggagcacgcgaagtataaatggtatctaaaggagctacaggacgggattggccagaggcagaccgtggtccgcacattaaatgcaaccggagaggagattattcaacagtcttccaagactgatgcctcaatcttacaggagaagctgggtagtctgaatcttcgatggcaggaggtgtgcaagcagctgtctgaccgtaaaaagcgcctcgaagagcagaaaaatattttaagcgagtttcagagggatctaaacgagttcgtgctgtggctggaagaagcagataacattgcttctataccactggagccaggcaaggagcagcagctgaaggaaaagcttgagcaggttaaattgctggtagaggagcttcccctcaggcagggcatccttaaacagttgaatgagaccggcggcccagtgctcgtctctgcccccattagcccagaagagcaagacaagctcgagaataaattgaagcagactaatctacaatggatcaaagtaagcagagctctaccagaaaagcagggggaaatcgaggcccaaataaaggacttgggccaactggagaaaaaattggaagatcttgaggagcagttaaaccatcttctgctgtggctgagccctatccggaaccaactggagatctacaatcagccaaatcaggaagggccgtttgacgtgaaggaaacagaaattgctgtgcaggccaagcaaccagatgttgaagaaatcttgtcaaagggacagcatttgtacaaggagaaaccagcaacacagccagtgaaacgcaaacttgaagacctttcctccgaatggaaagctgtaaatcgccttcttcaggaattgcgagccaaacaacccgatctcgctcccggcctcactactataggtgctagccccactcagacagtgacgctggtgacacagcctgtggtgactaaggaaactgctattagtaagctagagatgcctagtagccttatgcttgaggtcccagcactggctgattttaaccgggcatggactgagctaacagattggctgagtcttcttgatcaagtgattaagtcccagcgcgttatggtgggagatctagaggacataaatgagatgataataaaacagaaggccacgatgcaagatcttgagcagcggaggccacagctggaagaattaataactgcggctcaaaacttgaaaaataagacctctaatcaagaggcccgaacgattattacggatcgtatagaacggatacagaatcagtgggatgaggtgcaagaacacctccagaacaggaggcagcagctgaatgaaatgctgaaggatagtacccaatggctggaagcaaaagaagaagcggaacaggtgttaggacaggccagagctaagcttgaaagctggaaggaggggccatatactgtggatgccattcaaaagaagattacggagaccaagcagctggcaaaagaccttcgacagtggcaaacaaacgtggacgtggcaaatgacctcgccctgaaacttctgagagactacagcgcagatgacactcgcaaggttcatatgatcaccgagaacattaatgcctcttggcggagtattcacaaaagggtttctgagcgggaggctgcccttgaggagactcaccggcttctgcaacaattcccattggacttggaaaaattcttggcctggctgaccgaggcagaaacaactgctaacgtgttgcaggatgcaactcgcaaagaaagacttctggaagactctaagggcgttaaagaactgatgaagcagtggcaggacctgcagggtgagattgaggctcacacggacgtgtaccacaatctggatgaaaactcacagaagatcctgcgtagtctcgagggctcagatgatgccgttcttctgcagagacgcctcgataacatgaacttcaaatggtctgagctgcggaaaaagtctctcaatattagatcccatctggaggcatctagtgaccagtggaaacgcctgcacctgtctctccaagaactgctggtctggctccaactcaaggatgatgaactatctagacaggccccgattggtggtgacttccctgctgtgcagaaacaaaacgatgtgcaccgggccttcaagagagagctaaagactaaggaaccagtaataatgagcaccctagagactgttcgaattttcctcactgaacagccactcgaagggctggaaaaactttaccaggagcccagggagctgcctccggaggagagagcgcagaatgtaactcggttgctgaggaagcaggccgaggaagtgaataccgagtgggagaagctgaacctccatagcgcagactggcagagaaaaattgatgagacattagagcgcctgcgagaactccaggaggccactgacgagctcgatctcaagctgagacaggccgaagtgattaagggctcctggcagcctgtgggcgacctgctgatagatagcctgcaagatcatctcgagaaggtgaaggctctcaggggcgaaattgctccactgaaagaaaacgttagccatgtaaatgatctcgcccgacaactcacaaccctgggaatccagctgagcccctataacctttcaactttagaggatctgaacacacgttggaagctgctccaggtggctgtggaagatcgcgtgcggcagcttcacgaggctcacagagactttggaccagcctcacagcattttctcagcacatccgtgcagggcccttgggagcgcgccattagccctaacaaagtgccatactatattaaccatgaaactcagaccacctgttgggaccaccctaagatgactgagctttatcagagcctggctgacctcaataacgttcggttctctgcttatcgaactgcgatgaagctgaggagattacagaaagcgctgtgcctggatcttctgtcactttcagcagcttgcgacgccctggaccagcacaatctcaagcagaatgaccaacccatggatattctgcagattattaattgcctgaccacaatatatgaccggttagagcaggagcataataaccttgtgaacgttcccctatgtgtcgatatgtgtctgaactggctgttgaacgtgtacgataccggacgaacgggccggattcgggtgcttagcttcaagaccggcatcatatcactatgcaaggcccacttggaggacaagtaccgctatctctttaaacaggttgcttcatctactggcttctgtgatcaaagaaggctcgggctgctcctacacgattccatccaaatcccccgacagcttggggaagtagccagtttcggggggtctaacattgagcccagtgttcgctcttgcttccaattcgccaacaacaagcccgagatcgaagccgctctgttccttgattggatgcgcctagagccacagagcatggtgtggctccctgtgctccatcgcgtcgccgccgcagagacagcaaaacaccaggctaagtgtaacatctgtaaggagtgccccataatcggatttcgttaccgctcactgaagcattttaattacgacatctgccaaagttgcttttttagtggacgtgtggcgaagggtcacaagatgcattatccaatggttgagtactgtacccccaccacctcaggcgaagacgttagagatttcgcgaaggtgcttaagaacaagttcaggaccaagagatactttgctaagcacccacgtatggggtatctgcccgttcagaccgtgctggaaggtgataatatggagactcccgttacccttataaacttctggccagtggacagcgcacccgcttcatcaccacaattgtcacacgacgacacccattcccggatcgagcattacgcttccagactcgcagagatggaaaatagcaatgggagttacttaaacgacagcatcagtccaaacgaatcgatagacgacgagcacctgcttattcagcattactgccagtcgctgaaccaggatagtccattgtcacagcctcgctcacccgcacaaatcctgattagcctggaaagcgaggagaggggcgaactcgagcgaatcctcgctgatctggaagaggagaacaggaatctgcaagctgagtatgatagacttaagcagcaacacgagcacaagggactcagtccactgccctcaccgccagagatgatgcccacatcgcctcaaagccctagggatgccgaacttatagcggaagccaagctcttgcggcagcataaaggtcgactggaagcccgcatgcagattctcgaggatcataataagcagctggagagtcagctgcatcgactcagacagctgctggagcagccacaggcagaggccaaagttaatggtacaaccgtttcttctccatctacttccctccaaaggagcgactccagccagcctatgctgttgcgcgtcgttgggagccaaacctctgacagcatgggtgaggaagacctgctgagccctcctcaggacacttctacaggtctagaagaagtcatggaacagttgaacaacagctttccctcaagtcgtggccgaaataccccagggaagccaatgagagaagacacaccctag

SEQ ID NO: 115393 - DNA, 1854 bp, synthetic construct
  misc_feature 1..1854: note = Description of Artificial Sequence: Synthetic coding sequence
  source 1..1854: mol_type = other DNA
atgcgtgaacagcttaagggccacgagacacagaccacatgctgggatcaccctaagatgacagagttgtatcagtccctggcagacctgaacaacgtcaggttctccgcttaccgaacagccatgaagcttcggagactgcagaaagcattatgcctcgacttgttgagcctttccgctgcctgtgatgctctagatcagcataatctgaaacagaacgaccagccgatggacatcctccaaatcataaactgcttaaccaccatctacgacaggctggaacaagagcacaataatttagtcaatgttccactgtgcgtggacatgtgcctgaattggctcttgaatgtgtatgatactggaaggaccggaaggattcgcgtactgtcatttaaaacgggaatcatctcactgtgtaaagcacacctcgaagacaagtaccggtatttattcaaacaagtggcttctagcacaggcttctgcgaccagcgaaggttaggattactgctccatgattcaattcaaatcccgcggcagctcggcgaagttgcgagcttcggcggtagtaacatcgaaccatccgtgagatcttgtttccagtttgctaataataaacccgagatcgaggccgccctcttccttgattggatgcgcttagagcctcaatcgatggtgtggctgcccgtgctccatagagtggctgctgccgaaacagctaagcaccaggcgaagtgcaatatctgcaaagagtgtccaataattggatttcggtatcgctccctaaaacattttaactacgatatttgtcaatcttgtttcttctctggaagggtcgctaagggtcacaaaatgcactacccgatggtggagtactgtacgcccaccaccagcggagaggacgtacgggatttcgcaaaagtgctgaagaataaattccgcacaaaaagatacttcgccaaacaccctagaatgggctacctgcctgtgcagaccgtgttggagggcgacaatatggagacaccagtcactctcatcaatttttggcccgttgacagcgcgccagcttcttccccacaactatctcatgatgacacccatagtagaatcgaacactacgcttcaagactcgcggagatggagaacagcaacggcagctacctcaatgatagcatttcgcctaacgagagtattgacgatgagcaccttcttatccagcattattgtcagtcattaaatcaggattcccccctgtcccagccacgatctccggcccagatcctcatcagcttggaaagcgaagagcgcggagagctcgagagaatcttggccgaccttgaagaagaaaaccgcaacctgcaggcggagtacgaccgattaaaacaacagcacgaacacaaaggcctgtcacccctgccctcccctcctgaaatgatgcccacctccccgcagagcccgagggacgctgagttgatcgctgaggctaaactgcttcgtcaacataaaggtcgcctcgaggcccgtatgcagattctggaggaccacaataagcagctggagtctcagctacatcgcctgaggcagcttctggagcagccacaggccgaagccaaggtgaatggcacaaccgtgtctagcccttccacaagtctacagcgctctgattcctctcaacccatgctgctaagggtggtgggcagtcagacatccgattcaatgggcgaggaagatcttttgagccccccacaggatacctctacgggcctggaagaggtgatggagcagctgaataactcatttccgagttcccgaggacgcaacacccctgggaagcctatgcgagaggatacgatgtag

SEQ ID NO: 115394 - DNA, 3678 bp, synthetic construct
  misc_feature 1..3678: note = Description of Artificial Sequence: Synthetic coding sequence
  source 1..3678: mol_type = other DNA
atgccctcttccctaatgctggaggttcccgccctggccgacttcaaccgcgcctggactgaacttaccgattggttaagtctattggaccaagtcatcaagtctcagagagtgatggtgggagatctggaggatatcaacgagatgataattaagcagaaagcaacaatgcaggacttggaacaacgcagaccacaattggaggagttaatcaccgcagctcagaacctgaaaaataaaaccagcaatcaggaggcgcgcaccataattactgaccgtattgaacgcatacagaaccagtgggatgaggtgcaagaacacctccagaaccggaggcagcaattaaacgaaatgctgaaagattctacgcagtggctggaggcgaaagaagaagctgagcaggtgctgggtcaggcaagagcaaagttggagtcctggaaagaaggaccttatactgtagacgccatccagaagaaaattactgaaactaagcagctcgctaaggacttgaggcagtggcagactaatgtggatgtggcaaatgacctggctctcaagcttctcagggattattccgccgatgacacacggaaggttcacatgataaccgagaacatcaatgcgtcctggagatcgatccacaagagggtttccgaacgggaggctgcgctggaagaaacccatcgactcctgcaacagttcccacttgacctggagaaattcctcgcttggctgactgaggcagaaactactgcgaacgtcctccaggatgccactcggaaggagcggctcttggaagacagtaagggcgttaaagaactaatgaaacaatggcaagacctgcagggcgagatcgaggcccacacagacgtgtatcacaatcttgatgagaactcacagaagatccttcgttcactggagggcagcgacgatgccgtactgctccagaggcgcttagataacatgaacttcaagtggagcgaactgagaaagaagtcactcaatatccgcagccacctcgaagcatcctccgaccagtggaagagattgcacttatcactccaagaattgcttgtctggttacagcttaaggatgacgagttgagccggcaagcacctatcggaggcgattttcctgccgtacagaagcagaatgacgtccacagggcctttaagagagagctgaagaccaaagagccagtcattatgtcaacactagagacggtgcggatcttcctcactgaacaaccactggagggtctggagaagctgtaccaggagcctcgggagctccctccagaggagcgtgcccaaaacgtcactaggttactgaggaagcaggctgaggaggtgaacaccgaatgggaaaagttgaatctccactccgccgactggcagcgtaagatcgatgaaacgctcgaacgccttcgggagctgcaggaggccaccgatgagttagacttaaagctgcgtcaggctgaagtgataaaggggagctggcagcccgttggggacttattaattgatagcctgcaggaccatctggaaaaagtgaaagctctgaggggggaaatcgctcctctcaaggaaaacgtgagccacgtaaatgacttggcgaggcagctcacgaccctcgggatacagctgtccccttacaacctctcaactctggaagatcttaatacgcgctggaagctgctccaagttgcagtggaggaccgtgtgaggcagctccatgaggctcacagagatttcggccccgcttcacaacactttctgtccacctctgttcaggggccctgggaacgcgcaatcagccccaataaggtgccatattacattaatcacgaaactcagacaacctgttgggaccacccaaaaatgacagagctttatcagagcctggcggacctcaacaacgtgaggttcagcgcttacagaaccgccatgaaattaaggaggttacagaaagcactctgtctggatctcctgtcactaagtgccgcctgtgacgctcttgaccagcacaacctgaagcagaacgaccaacccatggatatcctccaaatcatcaattgcttaacgaccatatatgaccgcctggaacaggagcacaacaacctggtgaatgtccccctgtgcgtcgacatgtgcctcaactggctcctgaacgtttacgacaccggccgcacggggcgcatcagggtattgtctttcaagacgggaatcatctccctgtgcaaggcacatctggaggacaagtatcgttacctctttaagcaggtcgcctcctctaccggtttttgtgaccagcgccggctggggttgcttctgcacgatagcatccaaatcccccgccagctgggcgaagtggcgtcattcggtggcagcaacattgagccgtccgtgagatcctgctttcagttcgcaaataataagccagagattgaggccgctcttttcctcgactggatgcggctggagccccaaagcatggtgtggctgcccgttttgcaccgcgtggctgcggcagagacagctaaacaccaagcaaagtgtaatatctgcaaggaatgccctattattggatttcgctaccgatccctaaaacattttaattatgacatctgccagtcctgttttttcagcggaagagtggcaaagggccacaagatgcactatcctatggtggaatattgcaccccaacaaccagtggtgaggatgtacgggatttcgcgaaagtgctgaagaacaaattcagaacgaagcgctatttcgcaaaacatcccaggatgggttacctgcccgtacagactgtgctcgaaggagacaatatggagacacctgtgactctgatcaacttttggccggtggactcagcccccgcgtcatcaccacagcttagtcatgacgacacacacagccgcattgaacactatgctagccggctggcagaaatggagaactcaaacggctcttaccttaatgactccattagtcccaacgaatctatcgacgacgaacatctgctgatccagcactactgccagtcactcaaccaggattctccactgagccagccaagaagtccggctcagatcctgatctctttagaatcagaagagagaggtgagctcgagcgcatcctagccgacttagaagaggaaaacagaaacctgcaggctgaatacgaccgcctaaagcagcaacatgagcataaaggactgtcaccgttgccgtcacctccagagatgatgcctacttctcctcagtctccccgggacgccgagctcattgccgaagccaagctccttcgccaacataaaggacgcctggaagccagaatgcagatccttgaggatcataacaagcagcttgagtctcagctgcaccgacttagacagctgctagagcagcctcaagctgaggcgaaggtgaacggtacgacagttagttccccatccacctcactgcagcgctctgactcctcccagcctatgttgttgagagtcgtggggtcacagacttcggacagcatgggggaagaggacctgctctcacccccacaggacactagcacaggcctcgaagaggtcatggaacaacttaacaatagtttcccttcgtctaggggccgaaataccccgggaaagcctatgagggaagacactatgtag

SEQ ID NO: 115395 - DNA, 1908 bp, synthetic construct
  misc_feature 1..1908: note = Description of Artificial Sequence: Synthetic coding sequence
  source 1..1908: mol_type = other DNA
atgcgcgaacagcttaaaggccatgagactcagacaacatgctgggaccaccctaaaatgaccgaattgtatcaaagcctcgccgatctcaataacgtgaggttttccgcctaccgcactgccatgaaactgcggcgcctgcagaaagctctttgtcttgacctgctgtcattgagcgccgcatgtgacgcactggaccaacataatctgaagcagaacgatcaaccaatggacatattacagatcattaattgtctcactactatctacgacaggctggagcaggagcacaacaatctagtgaacgtcccgctgtgcgtcgacatgtgcctcaactggttgctgaacgtgtatgacactggtcggacgggcagaattcgggtgttgagcttcaagaccggcatcatttcactctgcaaggctcacctggaggacaagtatcgttatctgttcaagcaggttgcatccagtaccgggttctgtgatcagcggagattgggtctgcttctccatgatagcatacaaattccccggcagcttggggaggtagcctcattcgggggctcaaatatcgaaccttcagtgagatcttgttttcaatttgcaaataataaaccagaaatcgaggcagctttattcctggactggatgcggcttgagccacagagtatggtgtggctgcccgtgctgcaccgggtggcagccgcggagacggccaaacatcaagccaagtgcaacatctgtaaggaatgccccataataggtttccgctaccgttccctgaaacacttcaactacgacatttgccagtcatgtttctttagcggcagggtggctaagggacataagatgcactatcctatggtggaatattgcactccgaccacatccggtgaggacgttcgagactttgccaaagtgttgaagaataaatttaggaccaaaagatactttgccaaacatcctcggatggggtacctgcccgtccagactgtgctcgagggcgacaacatggagacccccgtgaccctcatcaatttttggccagtggactcggctccagcgagtagtccccagctgagccatgacgatacgcacagccgcatagaacattacgcttctcggctggctgagatggagaactccaatggtagctaccttaacgactccatctccccaaacgagtccatcgatgatgagcacctgctgatacaacactattgtcaatctttgaatcaggactctccactgtcccagccccgaagccccgcccagatactaatatccttggaatcggaagagcggggggagttggagcgaattcttgccgatttagaggaagagaatcggaacctgcaggctgagtacgatagattgaagcagcagcacgagcataaggggctgtctccccttccatcccctccagaaatgatgcccacatctccgcagagccctagggacgctgaattgatcgctgaggcgaagctgctcaggcaacacaaaggacggctcgaagcgagaatgcaaatactcgaggaccataacaaacaattagagtctcaattacacaggcttcgccaactgctggaacaaccgcaggcagaggcaaaagttaacggcactactgtcagcagtccatcgacttcactccagcggagtgacagctcacagcccatgctgctaagggtggtaggtagccagacttctgacagcatgggagaagaggacctactgtctccacctcaggacacgtcaacagggcttgaagaagtgatggagcaactgaacaattcatttcctagcagtcgcggacataacgtgggttcactgttccatatggctgatgatcttggccgcgctatggagtcacttgtgtcggtgatgacagatgaagagggcgccgagtag

SEQ ID NO: 115396 - DNA, 3732 bp, synthetic construct
  misc_feature 1..3732: note = Description of Artificial Sequence: Synthetic coding sequence
  source 1..3732: mol_type = other DNA
atgccttcaagcctgatgctagaggtccccgctcttgccgacttcaaccgggcatggactgagcttacagactggcttagcctgctggaccaggtgatcaagtctcagagggtgatggtaggagacttggaggacattaatgagatgatcatcaagcaaaaggcaaccatgcaggatttagagcagaggcgaccccagctggaagaactgatcaccgcagcacaaaacctcaaaaataagacttccaaccaagaggcaagaacgattatcaccgaccgtatcgagagaattcaaaatcagtgggacgaggttcaggagcatttgcagaatcggaggcagcagctgaacgagatgctgaaggacagtacacagtggcttgaagccaaggaagaggctgagcaggtgcttggtcaggcgcgtgctaagctggaaagttggaaggagggtccttataccgtcgacgcgatacaaaagaagattaccgagaccaagcagttggctaaggatctgcggcagtggcagacaaacgtggacgtggcaaacgacttggctttaaaactattgcgtgactatagtgccgatgacacccgcaaggtacacatgatcaccgagaatatcaatgcttcgtggaggagcatacacaaaagggtgtccgaacgcgaggctgctttggaagagacccatcgcctgcttcagcaatttcccctggatctagagaagttcctggcttggctcactgaagcggagactacagccaacgtgcttcaggatgctacccggaaggagcgactgctcgaggattccaaaggagtcaaggagttgatgaagcagtggcaggatttacaaggcgagatagaggcacacactgacgtttaccacaaccttgatgagaatagccagaagattctgaggtctctggagggctctgatgatgccgtactgctgcaaaggaggttagacaacatgaacttcaagtggtcagaactaaggaagaaaagtcttaacatacggtcacatctggaagcaagctctgaccaatggaaaagattgcacctgagcctgcaggagctgttagtgtggcttcaactgaaggatgatgaattgagccggcaagcccccattggcggagacttccccgcggtgcagaaacagaacgacgtgcatcgggcttttaagcgggagctcaagaccaaggagccagttatcatgtccaccctcgaaacagtgcgtatctttctgaccgagcagcccctcgaggggcttgagaagttatatcaagaaccccgggaactcccccccgaagaaagagcccagaatgtgacccggctattgagaaaacaggctgaagaggtaaatacagagtgggagaaactgaatctgcattcagctgactggcagaggaaaatcgacgagaccctggaacgcttaagggagttgcaggaggccaccgacgaactcgatctgaagctaaggcaagcggaagttatcaagggctcttggcagcccgtgggagatcttctgatcgactcacttcaagatcacctggagaaggtaaaggcgctccgtggcgaaatcgctccgctcaaggagaatgtgtcacatgtgaacgacctagctcgccagctgactacgctgggcatacaactgtccccatacaatttgtccaccttagaggatttgaataccaggtggaaactccttcaggtggccgtagaagatagagtacgacaactccacgaggcccacagagacttcggtcctgctagtcaacacttcctgtccactagcgtgcagggaccatgggagcgagcaattagccctaataaagtgccttattacattaaccacgagacccaaacgacttgttgggatcatcctaagatgaccgagctgtaccaaagtctagccgatctgaataatgttcggttcagcgcatacaggaccgccatgaaactgcgcaggcttcagaaagctctgtgtctggatttgctgtcattgagtgctgcatgcgatgccctggatcagcataatctgaagcaaaacgatcaaccaatggacatcctgcaaatcataaactgtctgactactatttatgaccgcctggagcaagagcacaacaacctcgttaacgtgccactctgcgtcgacatgtgcctcaactggttgctgaacgtgtacgacacaggcagaacgggtaggatccgcgtactgtcgtttaaaacgggcatcattagtctttgcaaagcccatctagaggataagtatcgctatctgtttaagcaggttgcatcaagcacaggtttctgtgaccagcggaggctcgggcttctcctccatgactctatccagatccccaggcagttaggggaggtagccagcttcgggggaagcaacatcgaaccttctgtgcgcagctgtttccagttcgctaataacaaacccgagatcgaagctgctctgtttttagattggatgagacttgaaccacagagcatggtttggctgcccgtccttcaccgagtagcagcagcagaaaccgccaaacatcaggctaaatgcaacatttgcaaggagtgccctattatcggctttaggtaccgctccctgaagcactttaattacgatatttgccagagctgtttcttttctggtcgagttgccaagggtcacaaaatgcactatccaatggttgagtactgtactcccaccacgtcaggggaggatgtgagagactttgcaaaagtccttaagaacaagttccggaccaagcgctactttgccaagcacccacggatgggatatctgcccgtgcagacagttcttgaaggggacaatatggagactccagttaccctcatcaatttctggcccgtggactctgcacctgcctctagcccacagctctcccacgacgacacgcattctcgaatcgagcactacgcatccagactcgcggagatggagaatagcaatggaagttatttaaatgatagtatttcccccaacgagtccatcgatgatgagcatctgctgatccaacattactgccagagcctcaaccaggatagcccattatcccagccccgctctccggcccagatactcatcagtctggagtccgaagaacgaggggagttggaacggattctggccgacttggaagaggagaatcgaaaccttcaggctgagtatgatcgattgaagcaacagcacgagcataaaggcctctcgccactgccttcacccccagagatgatgcctacaagtccccagtcgccgcgagacgccgaactgattgcggaggctaagctcttgcgacaacacaaaggacggttggaggccaggatgcaaatattggaggaccacaataagcagctcgagagccaacttcatcggctgcgacagctgctggagcagcctcaggctgaggctaaggtcaatgggactaccgtgagctctccaagcactagcctgcagaggtccgatagctcgcagccaatgctcctgcgcgtggtcggatctcagacctcggactctatgggcgaggaagatctgctttcaccaccccaggatacctccacgggacttgaagaggtaatggagcagctgaataattcttttccttcgtccagaggacacaatgtcgggtcactcttccacatggcagacgatctgggtcgggcaatggaaagtttagtgtctgtgatgacagatgaggaaggagccgaatag

SEQ ID NO: 115397 - DNA, 11034 bp, synthetic construct
  misc_feature 1..11034: note = Description of Artificial Sequence: Synthetic coding sequence
  source 1..11034: mol_type = other DNA
atactggacgaacgcgaggacgtccaaaaaaaaacttttaccaagtgggtcaatgcgcaatttagcaagtttggaaagcaacacatagaaaacctgtttagcgacctgcaggatggtcgcagactgttggatctgcttgaaggtttgacgggacagaagttacctaaagaaaaagggtccacccgcgtccacgcactgaataacgttaataaggctctcagagtcttgcagaacaacaatgtcgacttagtcaacatcggaagcaccgatattgtcgatggcaaccataagctaactctgggattgatctggaacatcattctgcattggcaggtcaaaaatgtcatgaaaaacatcatggcgggcctccagcagacgaacagcgaaaagatactgttgagctgggttagacaatcgactagaaactatccacaggtcaacgtaatcaactttaccacctcgtggtcagacggcctggccctgaatgctcttatccactcccaccggcccgaccttttcgactggaattccgtcgtgtgccagcagagtgcaacacagcggctggagcacgcctttaacattgctcgctaccaactcggcattgagaagctgctagatcccgaggatgtagataccacgtaccccgataagaagagcatactcatgtacatcaccagcttattccaggttctaccacagcaggttagtattgaagccattcaggaagttgagatgcttccccgtccacccaaggtcactaaggaagaacactttcagctccaccatcagatgcactattctcagcagataacagtcagcctagctcaagggtacgagaggaccagctccccaaaacctcggttcaagagctatgcctacacacaggcagcttatgtgacaacaagtgacccaacccgtagcccctttccatcccagcatctagaagctcctgaagacaagtcgtttggaagttctctcatggaatcagaggtcaatttggaccgataccagaccgcactcgaggaggtattgtcatggttattgtccgccgaagataccctgcaggcccagggagaaattagcaatgacgtggaggtggtgaaagatcagtttcatacgcacgaggggtacatgatggatctgacagctcatcagggccgcgtgggtaacatcctccaattaggatccaaactaatcggcacaggaaaactgtccgaggatgaagagactgaggtccaagaacagatgaatttactgaactcgcggtgggagtgcctgagggtggcgagtatggagaagcaaagcaacttgcaccgagtgttgatggatctgcaaaaccagaagctcaaagagctgaatgattggttaaccaaaactgaggaacggacacgaaaaatggaggaggaacctttaggccccgacctggaagaccttaagagacaggtgcagcaacataaggttttgcaggaagacctggagcaggagcaagtccgtgtgaatagtctgacacatatggtggtggtcgtagatgagagctctggggatcatgccactgccgcacttgaggaacaactgaaagttctcggcgaccgctgggcgaatatctgcaggtggacggaagatcgctgggtcttgcttcaggatattctactcaagtggcagcggctgaccgaggaacagtgtctgttctctgcctggttatcagaaaaagaagatgctgtcaacaaaatccacaccacaggtttcaaggatcaaaacgagatgttgtcgtccctgcagaagttggctgtgctgaaagctgatctagaaaaaaaaaaacagagtatgggaaaactgtactctctgaaacaggatttgctgtctacattgaaaaataagagtgtgacccaaaaaactgaagcctggctcgacaactttgcgcggtgttgggataacctggtgcagaagctggagaaaagtactgcgcagatctcacaggccgtgacaaccactcagcccagtctgacccaaaccacagtgatggagacagttacgactgtgaccacccgggagcagattctggtcaaacacgcgcaggaagagctcccacctccccctcctcagaagaagaggcagattaccgtggacagtgagatccggaagcgtctggatgtggatatcaccgagcttcacagttggattacacggagtgaagcagtgcttcagagtcccgagttcgctattttccgtaaagagggcaatttttccgatctgaaagaaaaggttaatgctattgaacgcgagaaagcagaaaaatttaggaaactccaagatgcttctcgaagcgctcaagccctcgtcgaacaaatggtgaatgaaggggtcaatgcagactcgatcaagcaggcctccgagcagctgaacagtagatggatcgagttctgccagttgctgagtgagagactcaattggttggagtaccagaataacattatagctttctataaccagttacagcagttggagcaaatgacaaccactgccgagaactggttaaagatccagcctacgaccccttccgaacccaccgcaattaagtctcagttaaaaatctgtaaagacgaggtgaatcgtttgagcgacctgcagccccagatcgagcggctgaaaattcagagcattgcactgaaggagaagggtcaagggcccatgtttctggacgctgattttgtagccttcacaaaccatttcaaacaggttttcagcgatgtccaggccagagaaaaagaactccagaccatcttcgatactcttcccccaatgagatatcaagagaccatgagtgccattaggacatgggtgcagcagtctgagacaaagctctccataccacaattgagtgtgaccgactatgagataatggaacaacgcttgggcgagttgcaagcgctgcagtctagcctgcaggagcagcaaagcggactgtactacctcagtacaacagtgaaggagatgagcaagaaagccccatctgaaattagccgaaaatatcagagcgagttcgaggagatcgagggtcggtggaagaaactgagcagtcagctcgtggagcattgtcaaaagctcgaggaacagatgaataagctacgcaagatccaaaatcatatacaaacccttaagaagtggatggcagaagtagatgtcttcttgaaggaagagtggcccgccctgggggattctgaaatactgaaaaagcagctcaaacagtgtcggctccttgtgtctgatattcagactattcagcctagccttaattctgtgaacgaaggcggtcagaagatcaagaacgaagccgagcctgagtttgccagtcggcttgaaacggagttgaaagaactgaacactcaatgggaccacatgtgccagcaggtttacgcacggaaagaggctctgaagggcgggcttgaaaagacggtgagcttgcaaaaagatctgtctgagatgcacgagtggatgacacaggcagaagaagaataccttgagcgcgactttgagtacaaaacccctgatgaactccagaaagcagtggaggaaatgaaaagggcaaaagaagaggcccaacaaaaagaagccaaggtgaagcttctcactgagagcgtgaatagcgtcatcgcccaagcccccccggtggcccaggaagcgctgaagaaagagttggaaacattaacaaccaattatcaatggctctgcactcggcttaatggcaaatgtaagacattggaagaggtctgggcctgctggcatgagctgctcagctatctggaaaaagccaacaaatggcttaatgaagtggagtttaaactgaagactacagagaatatccccgggggcgccgaggaaatctcggaagtcttggactctttggaaaatctgatgcggcactccgaagacaatcctaatcagatcaggattctggcacagacattgacagatggaggcgttatggacgagcttattaatgaagagctggagaccttcaactcccggtggagagaacttcatgaggaggctgtaaggcgccagaaacttttggagcagagcattcaatcagcacaagaaacagaaaaatccctccacttgatacaggagtcattgactttcattgacaagcagctagccgcctatatagccgacaaagtggatgctgcacagatgccccaggaggcccagaagattcagtcagatctaaccagtcatgagatctcactggaagagatgaagaaacacaaccaaggcaaagaagcagctcagagggtgctgagccaaattgatgtcgcccagaagaagctgcaagacgttagcatgaagttccgcttgtttcagaaacctgcgaactttgagcaacggctccaagagtcaaagatgatactagatgaggtgaaaatgcacctcccagccctggagacgaagagtgtggagcaagaagtggtccagagccagttgaaccactgtgtgaacttgtacaagtccctgtccgaggttaagagcgaagtggagatggtaataaagacaggcaggcagattgtccagaaaaagcagaccgaaaacccgaaggaattggacgaacgcgtgactgccctgaagctgcattacaacgagctgggtgcaaaagtgacagaacgcaagcagcagctagagaaatgcctgaagctgtcccggaagatgaggaaagagatgaatgttctcacagaatggctagccgcaaccgacatggagctgaccaaacgatccgccgtagaaggtatgccaagtaatcttgactctgaagttgcctggggcaaggctacgcagaaagagatagagaagcagaaggtccatctgaagtctatcacagaggtgggggaagctctgaaaacagtgcttgggaagaaggaaaccctcgtcgaagataagctgtcgcttttgaactcgaattggattgccgtgacctcaagggcagaagagtggctgaacctgttactggagtatcagaagcatatggaaactttcgatcaaaacgtggatcatatcacaaaatggattattcaggccgatacccttttggacgaatccgaaaagaagaagccccaacagaaggaagacgtcctcaagcgcctgaaggcagaacttaatgatattcgacctaaggttgactcaacacgggatcaagctgcaaatttgatggcaaacagaggcgatcattgtagaaaattggttgagccacagatctccgaactgaaccatcgcttcgccgcaatcagtcatcgcataaaaacgggtaaagcgagcatcccactgaaggagctggagcaattcaattccgacattcaaaaactgttggagcctctcgaagccgagatccaacaaggggtcaatcttaaagaagaggacttcaacaaggacatgaacgaggacaacgaaggtactgtcaaggagctgctccaacgcggggataacctgcaacagcgtattaccgacgagcggaaaagagaagaaatcaagatcaagcagcagttgctccaaaccaagcacaacgccctcaaggacctgaggagccagaggaggaaaaaggcgttagaaatctctcatcagtggtaccagtacaagagacaggctgacgacctgctaaagtgtttggatgacatcgaaaagaaattggccagtctgccagaaccgcgtgatgagcggaagatcaaggaaattgatcgggagctgcagaaaaaaaaggaggagctgaatgcagtgcgaaggcaggcagagggcctctccgaggatggcgcggccatggctgttgaacccacccagatccagctctccaagcggtggcgcgagattgaaagcaaatttgcccagttccgcagattaaattttgcacaaattcacaccgtgagggaagaaactatgatggttatgactgaggacatgcccttggagatctcctatgtcccttccacctatcttactgagattacgcacgtaagccaggcattactggaagttgagcaactgctgaatgccccagatctgtgcgccaaagattttgaagacctatttaagcaagaagagtccctaaagaatattaaggactctcttcagcagagcagcgggaggatcgatattatccacagcaagaaaactgccgccctgcagtcagcaaccccggtcgagcgcgtgaagctgcaggaggcgttgtctcagctcgacttccagtgggaaaaagtcaacaagatgtacaaggaccgccaagggcggttcgaccgttcagtggaaaagtggcgaagattccactacgacattaaaatctttaaccagtggctgaccgaagcggagcagtttcttcgtaaaacacagatccctgaaaactgggagcacgccaaatataaatggtacctgaaagagttacaggacgggattggacagcgacaaaccgtagtgaggactttaaacgctacaggggaggaaattattcagcaatcatccaaaaccgatgcttctattctacaagagaaattgggatcacttaacctgaggtggcaagaggtgtgcaaacagcttagtgatcgcaaaaagcgactggaggagcaaaagaatatcctgtccgaatttcagagggatctgaacgaattcgtcctttggcttgaagaagctgataacatagcctctattccacttgaaccaggtaaggaacagcagctcaaagaaaagctggagcaggtcaagctgctggtggaagagctaccactgaggcaaggaatcttgaagcagttgaatgagactggcggccctgtgctcgtctccgcaccgattagcccggaggaacaggacaagctcgaaaataagcttaaacagaccaatctccagtggattaaagtgagccgggcgctgcctgaaaaacagggcgagatcgaggcccagataaaagacctcgggcaactggagaagaaacttgaggatctcgaggagcagctgaatcatctgctgctttggctttcgcccattcggaatcagctggagatctataaccagcctaaccaggaaggcccttttgacgtgaaagaaactgagattgccgtccaggcaaaacaacccgatgtggaagaaatcctgtcaaaaggtcagcacctatataaggaaaaaccagctacacagcccgtgaagcgtaagttagaggatctctcatctgagtggaaggccgtcaacagactcctgcaggaactgagggctaagcagccagatctcgcaccagggcttacaacgatcggagctagtccaactcagaccgtcacactggtgacacaacctgtcgtgacaaaagaaaccgccatctctaagcttgagatgcccagctccctcatgctggaggtcccagctttggcggattttaaccgagcatggactgaactgactgattggctcagtctgctcgaccaggtcatcaagtcccagcgggtcatggttggagatttggaggatattaacgagatgatcattaagcagaaggccaccatgcaagatctggagcagcgacggccccagctcgaagaactgatcactgcagcccagaatctaaagaataaaactagtaaccaggaagctcgcactattatcacagatcgcatcgagaggatccagaatcagtgggacgaagtgcaggagcacctgcagaaccgtcggcagcagctgaatgagatgctgaaagactctacacaatggttggaggctaaagaagaagctgagcaggtcctgggccaggctcgggctaagctcgagtcttggaaggagggaccctacacggtcgacgccatccagaagaaaatcactgagactaaacagctcgccaaagatttaaggcaatggcaaaccaatgtagacgtggctaatgatttggctctcaagctcctgagggactacagcgctgacgatactcggaaagtccacatgataacagaaaatataaacgcgtcatggagatctatccataagagagtgagtgagcgggaggctgcccttgaggaaacacaccgcctactgcagcagtttcccttggacctagagaagtttctggcctggctgacagaagcagaaaccaccgctaatgtccttcaggatgccacccgcaaagagagactgctggaggactccaaaggcgtgaaggagctcatgaaacaatggcaagacctgcagggcgaaatagaggctcacactgacgtataccataacctcgatgagaatagtcagaagatcctacggtccctggaggggtcagatgacgctgtgctattgcagcgacgcttggataatatgaatttcaagtggagcgagctcaggaaaaaaagtttgaacatcagaagtcaccttgaagcatctagtgatcagtggaaaaggctgcacctgtcactgcaggagctgctcgtgtggcttcaactgaaggatgacgagttgagtagacaggccccaattggcggggatttccccgccgtccagaaacaaaacgacgtgcacagggcctttaaaagggagctgaaaaccaaggaaccagttattatgtctacattggaaaccgtcaggatcttcctcacggagcaaccactagagggcctggaaaagctgtaccaggagcccagggaactgcccccggaggaacgcgctcaaaatgtcactcgcctattacgcaagcaggcagaggaagtcaatactgaatgggagaaattgaacttgcacagcgccgattggcaaaggaagattgatgaaactttggaaagactgcgcgaactgcaagaagccaccgatgaactggacttgaagctgagacaggctgaggttattaaagggagctggcaacccgtgggggatctgctgattgatagcctacaagaccatctggagaaggtaaaagcactcagaggcgagattgcccctttgaaggagaatgtgtctcatgtaaacgacctggctcgccagttaactacactggggatccaactatcaccatataatctcagtacccttgaagacctgaacacccgatggaagttgctgcaagtggccgtggaggaccgcgtcaggcagcttcacgaggcgcaccgtgatttcggcccggcctcccagcatttcttgagcacgagcgttcaggggccgtgggagcgggcaatctctccaaacaaggtgccctattacattaaccacgagacacagactacttgctgggaccatcccaagatgacagaactctaccaatctctggctgacctgaataatgtccggttttctgcctaccggactgccatgaagctgcgccgcttgcagaaagccctatgtctcgacctcttgtctttatcagctgcatgcgacgcactggaccagcacaatctgaaacagaatgaccaacccatggatatcctccaaatcataaattgtctgaccaccatctacgatcggctggagcaggagcacaacaatctggtgaacgtgccactttgcgtggatatgtgcctcaattggctgctgaatgtctatgatactgggcgcactggtcgaatccgtgttctgtctttcaagacaggaataatcagcctatgtaaagctcatctggaggacaaatacagatacctgttcaagcaggttgcctcttccacaggattttgcgatcagagaagactcggcctcctgcttcacgactctatacagattcctcgacaactcggcgaggttgcctcatttggaggatctaatatcgaaccctccgttcggagttgtttccagtttgctaataacaaacccgagattgaggccgctctcttcttagactggatgagacttgaaccacaatcaatggtctggctgccagtcctacatcgcgtagcagctgccgaaaccgccaagcaccaggccaaatgcaatatttgtaaagagtgcccaattattggctttcggtataggtcattgaaacatttcaactatgacatatgccaatcatgctttttctctggtcgggtcgcgaaagggcacaaaatgcactatcctatggtcgagtattgcacccctaccacgtcaggcgaggacgtgagggattttgccaaagttctgaaaaataagtttcggaccaagcgctatttcgcaaagcaccctcgcatgggatatctccccgtacagaccgttttggaaggtgataacatggaaacacctgtaacattaattaacttttggcctgtggacagcgcgcccgcttccagcccacagctgtctcacgacgatactcactctaggatcgagcattatgcatcaagattagcagaaatggaaaattccaatggctcctatttgaacgactctatttcccctaacgagtccatcgacgatgagcatctcctcatccagcattattgccagtccttgaaccaggattcacctctgtcgcagccgcgctctcctgcacaaatattgatcagcctcgagtctgaggaaaggggggagttagaacgcatcctggcggacctggaggaagaaaatagaaatctgcaggccgagtatgacagactcaaacagcagcacgaacataaaggtctgagtcctctgcccagcccacccgagatgatgcccactagcccacaaagcccaagagacgccgaattaatagcagaagccaagctgctgcggcaacataaaggcagattagaggcccggatgcaaatactggaggaccacaataagcagctagaaagtcaactgcaccgccttagacagctcctagagcagccacaggctgaagctaaggtaaatgggacaacggtgtccagcccgtctacttccttgcagaggtcagattcctctcagcccatgctgttacgcgtggtcggaagccagacaagtgatagcatgggcgaagaggatctgctgtccccccctcaggacacatccacaggactcgaggaggtaatggagcaacttaataatagcttcccttcaagtagagggcggaataccccaggaaaaccaatgcgcgaggatactccgtag

SEQ ID NO: 115398 - DNA, 10689 bp, synthetic construct
  misc_feature 1..10689: note = Description of Artificial Sequence: Synthetic coding sequence
  source 1..10689: mol_type = other DNA
atgaagaacattatggccggcctgcaacagacaaattctgagaaaattttgctgtcctgggtgcggcagtctaccagaaattatccccaagtaaacgtgatcaatttcaccaccagctggtcagacggcttggctctaaatgccctgattcattcacatcggccggatttgttcgactggaattcagtggtgtgccagcagtcagcaacccagagactcgagcacgctttcaatatcgctcgataccagctgggaatcgaaaaacttctggatccggaagatgtcgatactacatatcctgataagaagtccattcttatgtatatcacctccctgttccaagtgctgccccaacaggtgtctatagaggcaatccaggaggtcgaaatgcttcctcgaccaccaaaggtgacaaaggaagagcatttccaactgcatcaccagatgcactatagtcagcagataaccgtgagtctcgctcaaggatacgagaggacttcatccccaaagccccggttcaaaagctatgcttatacccaggccgcatatgtgactacaagtgaccccactcggtcgcctttccccagccagcatctagaggcccccgaagacaagagcttcggctcgagccttatggaaagtgaagtgaacctggaccggtatcagaccgcactggaggaggtgctgtcatggctgctgagcgccgaggataccctgcaggcccagggagaaatctctaacgatgtggaagttgtgaaggatcagtttcatacgcacgaaggttacatgatggatctgaccgcgcaccaaggacgcgttggtaatattctgcagcttgggtcaaagctcattggtacggggaaattgtcagaggatgaagaaacagaggtccaggagcagatgaatctgttgaactcgaggtgggagtgtttgagagttgcatccatggaaaaacaatctaacttacatcgggtgctgatggacttgcaaaaccagaaacttaaagaattgaatgactggctcaccaaaacagaagaaaggacacggaagatggaggaggagccattgggccctgatttagaagacctcaagaggcaagttcaacagcataaggtgctccaggaggacctggagcaggagcaggtgcgtgttaacagtctgacacatatggttgtagttgttgatgaaagcagcggggatcatgcgacagcagccctggaggaacaactgaaggttctcggcgatagatgggcgaatatttgtaggtggaccgaggatagatgggtcctgctgcaggatatcttgctaaaatggcagagattgaccgaagaacagtgccttttctcagcctggttgagcgaaaaagaagatgcggtgaacaagattcacaccacaggcttcaaagatcagaatgagatgctctccagcctgcagaagctggccgtgctgaaggccgaccttgaaaaaaaaaagcagagcatgggcaagctttactccctgaaacaagacttgctgagcaccctgaagaacaaatccgtcacacagaaaaccgaagcgtggctggataactttgctcgatgctgggataatttagtgcagaaactagagaagtcaactgcccagatatcacaggccgttacaacgacgcagccttctcttacgcaaactaccgttatggaaaccgtgaccaccgtcacaacacgggaacagatcctggtgaagcacgcgcaggaggaactcccaccgccaccgccacagaagaagaggcagatcaccgtagatagtgagatcaggaagcgcctggatgtggatataacagagcttcattcgtggattaccagatctgaggccgtgctgcagagcccggaattcgcgatcttccgcaaggaggggaacttctcggacctcaaggagaaagtcaatgcgatcgagcgcgaaaaagctgagaaatttcgtaagttgcaggacgcctctcggagtgcacaggcgttggttgagcaaatggtgaatgaaggcgtaaacgcagacagcatcaagcaggcatctgagcagctgaattctaggtggatcgagttctgtcagctgctgtcagagaggctgaattggttagagtaccagaacaatatcatcgccttctacaatcagcttcagcaattagaacagatgaccactacagccgagaactggttgaagattcagccgaccaccccgtcagagcctacggccatcaagagccagctgaagatctgcaaggatgaagttaacaggcttagtgatttacagccacagatcgaacgccttaaaattcagtcaattgctttaaaggagaaaggtcaaggcccaatgttcctcgacgcagatttcgtggcctttaccaatcacttcaaacaggtgtttagcgacgtgcaggcccgggaaaaagagttacagacgatttttgataccttgcctcctatgcggtatcaggagaccatgtccgcaattaggacctgggttcaacagtccgagactaagctcagtatcccacagctgagtgtcactgactatgaaattatggagcagcgactgggcgaattgcaggcattgcagtcgtccctgcaggagcagcagtctggtttgtattacctgagcacaactgtgaaggagatgtctaaaaaagcgccgtcagagattagtagaaagtaccagtctgaattcgaagaaatagagggcaggtggaagaaactgagctcacagctcgtggaacactgtcagaagcttgaagagcagatgaataagctcagaaaaatccagaatcatatacagaccctgaagaaatggatggccgaagtggacgtatttctgaaagaggagtggccagcactgggtgatagtgaaatcttgaagaaacagctgaaacaatgccggcttctggtgagcgacatccagaccattcagccttccctgaactccgtgaatgaaggaggccaaaaaattaagaacgaagctgagcctgagtttgcgagtcggttggagactgaactgaaggaactcaacacacaatgggatcatatgtgtcagcaggtgtacgcgcgcaaagaagcattgaaggggggactcgaaaaaacagtctcactacagaaagacttatcggagatgcatgaatggatgacgcaggctgaagaggagtacctcgagcgggacttcgagtataaaacacccgatgagttacagaaagctgtagaagagatgaaaagagcgaaggaagaggcacaacaaaaagaagctaaggttaagctcctgaccgagtccgtaaattccgtcattgcccaggccccaccagtggctcaggaagccctgaagaaggagctggaaaccctaacaacaaactaccagtggctgtgtacgcggctgaatggcaagtgtaagaccttggaagaagtgtgggcttgttggcacgaactgttatcttacctcgaaaaggccaataaatggcttaatgaagtggaattcaaactcaaaacaaccgagaatattccaggtggtgctgaagagatcagtgaggttctggattcgctggagaatctgatgagacatagcgaagacaatcccaatcagatacgtattctggcgcagacccttactgatgggggtgttatggatgaattgataaatgaagaattggaaactttcaacagtagatggcgggaactgcatgaggaggcggtccgccgccagaagttgctcgaacagtctattcagtcagcgcaggaaacggaaaaatctctgcacctgatccaggagtcgcttacctttatcgacaaacagctcgcagcctatattgctgacaaagtcgatgctgcccagatgcctcaggaagcgcagaagatccagagtgatctgacttcacacgagatctccctggaggaaatgaagaaacataatcagggaaaagaggctgcgcaaagggtgttatcccagattgatgttgcgcagaagaagttgcaagatgtatcaatgaagttcaggctgttccagaaacccgcaaactttgagcagcgcctccaggaaagcaaaatgatcctggatgaagttaagatgcacctgccagcactagagacgaaatccgttgagcaggaagttgttcaatctcagcttaaccattgtgtgaacctctacaaaagtttgagcgaggtcaaatccgaggtagaaatggtgatcaagaccggcagacaaatcgtacaaaaaaaacagaccgagaatcccaaggaacttgacgagcgagtcaccgcgctgaagcttcattacaacgaactgggcgcaaaggttaccgagagaaaacagcaactggagaaatgcttgaagctgtcacggaaaatgcgcaaagaaatgaatgtgttaaccgaatggctggccgctactgacatggaattaactaagagatccgccgtcgaagggatgccatccaacctggactcggaagtcgcatggggaaaagccacacaaaaggagatcgaaaagcagaaggtccacctgaagtccattacagaagtcggagaagcattgaagacggtgctgggtaagaaggagaccctcgtagaagacaagctgtccctactgaactccaactggatcgccgtgacatccagagcagaagagtggctgaatctactgctggagtaccaaaagcacatggagacatttgaccagaacgtggaccatattactaaatggatcatccaggcagatacactgctggatgagtctgaaaaaaagaaaccgcagcagaaagaagacgtgctgaagcggctgaaagcagaactgaacgatattcgtccgaaagtcgattcaacccgcgatcaagctgccaatctgatggcgaatcggggcgatcactgtcgcaagctcgtagaaccacagatctcagaactgaaccataggtttgcagccatctcccaccggattaagactggaaaggcttcaatccccctcaaggagctcgaacaattcaactccgacatacagaagcttctcgagccccttgaggcagagattcaacagggagtgaacctgaaggaagaagacttcaataaagatatgaatgaagataatgagggaaccgtgaaggagctgctacagcgtggcgacaacttgcagcagagaattacagatgagcgcaagagagaggaaattaagatcaagcaacagctgttacagacgaaacacaacgcactgaaagacctgcgtagtcagcgcaggaaaaaggcattagaaatctcccatcagtggtaccaatacaaacggcaggccgacgacctgctcaagtgcttggacgacattgagaagaagcttgcatcgctaccagagcccagagacgaacgcaaaataaaggaaatcgaccgcgaattgcaaaaaaaaaaagaagaactcaatgccgtgcgccgtcaagccgaagggctcagtgaagatggggcggccatggcagtcgagccgacccagatacaactctccaagcgatggcgggaaatagagtccaaatttgctcagtttaggcggctgaactttgcacaaatccatactgtgcgcgaagaaactatgatggtgatgactgaggacatgcccctggaaatttcatatgtaccttcaacctatctgacggagattacgcacgtgtctcaggcgctcctcgaggtcgaacagctgctgaatgcccctgacctgtgtgcaaaggactttgaggatctcttcaagcaagaagaaagtctgaagaatattaaggacagcctgcagcagagtagtgggaggatagatatcattcacagtaagaaaacagcagccctgcagtcagccacaccagtggagagggtaaagcttcaggaagccttatcgcaactggattttcagtgggagaaagttaacaaaatgtataaggataggcagggacgtttcgacagatcagtggagaaatggcggcggtttcactacgacattaaaatctttaaccagtggttgacagaggccgaacagttcctacgaaaaacccagattccagagaactgggagcatgccaaatacaagtggtatttgatcgctctgaaggatgggataggccagaggcagacagtcgtgagaaccctgaatgcaacgggggaagaaataatacagcagtcctcaaaaaccgacgcttcaattttacaagagaagctcggctctctcaacctgcggtggcaggaggtttgcaagcagctaagtgacaggaaaaagcggctggaagaacagaaaaatatattgtccgagttccaaagggaccttaatgagtttgtcctgtggctcgaggaggcggataacatcgcttcaatcccacttgagcctggcaaagagcagcagctgaaggagaaactggagcaggtgaaactcttggtggaggaactgcccctccggcagggcatactgaagcagctgaacgagaccgggggacccgttctggtgtcagctcccattagccccgaagagcaggataaactggagaataagctaaagcagactaacctacagtggatcaaggtgtcccgcgcattgcccgaaaaacaaggtgagattgaggcccagatcaaggacctgggacagctggaaaaaaagctagaggatctcgaagaacaattaaatcacctcctgttatggctgtcccctatccggaaccagttagagatctataaccaaccgaatcaggagggccctttcgatgtcaaagaaactgaaatcgccgtgcaggccaagcagccagacgtggaggaaatcctgtcaaaagggcaacatctgtacaaggagaaacccgcaacgcagccagttaagcgcaaattggaagacctcagttctgaatggaaggcagtgaacaggctccttcaagaactacgagcgaagcagccggacctggctcctggactaaccacaatcggagcctctcctacgcaaaccgtcactctggtaactcaaccagtggttacgaaagaaaccgccataagcaagttagagatgcctagcagcctcatgcttgaggtgcccgctctggctgacttcaaccgagcatggactgaacttacagactggctgtcactgctggaccaagtgattaagagccagagggtgatggtgggcgatcttgaggatatcaatgaaatgatcattaagcagaaagctaccatgcaagatttagagcagcgaaggccacaacttgaggagttaattaccgccgcccaaaacctgaagaataagacttctaatcaagaggcccgaacaatcattactgataggattgagcgcatccaaaatcagtgggatgaggtccaagaacaccttcaaaatcgtcgacaacagctgaatgaaatgcttaaagatagcacccagtggctcgaggccaaggaagaggccgaacaggtgctgggccaggcccgggcaaagttagaatcttggaaagaaggaccctatacagtggacgcaatccagaagaaaattaccgagacaaagcagcttgcaaaggatttacgccagtggcaaaccaatgtcgacgtcgcaaatgatctggccttaaagctcttgcgcgactacagcgccgatgacactagaaaagtgcacatgatcaccgaaaacattaatgccagctggaggtccatccacaaacgcgtttcagagcgcgaggctgccctggaagaaacccatcgtttactgcagcaattccccctggatctggaaaaattcctggcctggctgacagaagctgagacaacggccaacgtgcttcaggatgcgacaagaaaggagaggctcctggaggatagcaaaggtgtcaaagaactgatgaagcagtggcaggaccttcagggggaaatagaagcacacaccgacgtctaccacaatctggacgagaatagccagaagatcctgcgttcccttgaaggctcagacgatgccgtcttactccagcgccgccttgataacatgaacttcaagtggtcagaactgaggaagaagagcctcaacatccgctcgcatctggaggccagtagtgatcagtggaaacgattgcatctgagtctgcaagagctcctggtatggttacagctaaaggacgacgagctgagtcggcaggcaccgatcggcggggactttcctgctgtgcagaaacagaacgacgtccatagagccttcaagagggaactgaagacgaaggaaccagtcatcatgtccacactggaaacggtcaggatatttttaaccgaacagccactggagggcctcgagaaactataccaggaaccccgagagctcccacctgaagagcgtgcccagaacgtgacccggctcttgagaaaacaggcagaagaggtgaatacagagtgggagaaattgaacctacactccgcggactggcaacgcaagattgacgagacccttgagcgactcagagaacttcaggaggcgactgacgaactggacctcaaactgagacaagctgaggtgatcaagggtagctggcagcctgtgggcgatttgctgatagatagtctccaggaccacctagagaaggttaaggcgctaaggggggaaatcgcgcccctgaaagagaatgtaagccacgtgaacgacttagcccggcagctgaccacactcggcatacagctgtccccttacaatctgtcaactttggaggatctaaacacacggtggaaactcctccaagtggccgtggaggatagggttaggcagctgcacgaggcccacagggattttgggccggcgtctcagcacttcctctctacaagtgtccagggtccctgggagagggctatctcccctaataaggttccctactacattaatcacgaaactcagactacttgttgggaccaccctaagatgaccgagctgtaccaatcactagctgatttaaataatgtcagattctcggcctaccgcacagcgatgaaattgcgcaggctacagaaggctctgtgtctggacttactgagtctgagcgctgcctgtgacgctctcgaccagcacaatctgaagcagaacgaccagcccatggacatactgcaaatcataaattgtctgacaactatctatgaccgactcgagcaggagcacaacaacctggttaacgtgcccctgtgtgtggatatgtgtctgaattggctgttgaacgtgtatgacactggcaggaccgggcgaatcagagttttgtcgttcaagactgggattataagcctgtgtaaggcccacttggaggataagtatcgatacctttttaagcaggttgcatcatcaacaggcttctgtgaccaaaggagactggggttgctgttgcacgacagtatccagatcccacgacagttgggcgaagtggcttcttttggaggatctaatatcgagccctccgtgcggtcctgctttcaattcgccaacaataagcccgaaatcgaggccgccctgttcctcgactggatgcgactcgagccacagagcatggtctggctgccagtcttgcatagggtggctgccgctgaaaccgccaaacatcaggccaagtgcaacatttgtaaggagtgtccaattataggattccgctatcggtcattgaagcatttcaactacgatatttgccaatcatgttttttctccggccgggtggccaaaggccataagatgcactaccccatggtggagtattgcacgccaacgacctcaggcgaggacgtgcgggactttgcaaaggttctgaaaaataagtttcggacaaaacggtacttcgcgaaacacccacggatggggtatttacccgtgcagaccgtgttagagggagataacatggaaacccctgtgacacttataaacttctggcctgtagacagcgcccccgcaagcagccctcagctgtcacatgacgacacacactcccggattgagcactacgccagtaggttagccgagatggagaattcaaacggctcttacttgaatgacagtatttccccaaatgagtcaatcgacgatgaacacctgctaatacagcattactgccaaagcctgaatcaagactcacccttgagtcaacctcggtctccagcgcagatactcatttcccttgaaagtgaggaaagaggggagctggaaaggattctcgccgatcttgaggaagagaaccggaacctgcaagccgagtatgatcgtctgaaacagcaacacgaacacaaaggcctgtctccgctgccttcccctccagagatgatgccgactagcccccagagtcctcgcgatgcagagctcatagccgaagctaagcttctccgacaacacaaggggcggttagaggcccgaatgcaaatcttggaggatcacaacaaacaactggaatctcagctgcaccggctgcggcagctgctggagcaaccccaggctgaagccaaggtaaacggcaccactgtgtcctcacccagtacctccctgcagagatccgacagcagccaaccaatgttgttgagagtggtaggctctcagacgtcggatagtatgggagaggaagatcttctgtcccctcctcaggatacgtccaccggcctggaagaagtgatggaacaactcaataacagctttcctagttcccgcggaagaaacactcccggtaagcccatgcgcgaggacaccatgtag

SEQ ID NO: 115399 - DNA, 3348 bp, synthetic construct
  misc_feature 1..3348: note = Description of Artificial Sequence: Synthetic coding sequence
  source 1..3348: mol_type = other DNA
atgcctagctccctgatgctggaggtgcccgccctcgcagacttcaatagggcctggacagagctcactgactggctgtcactgttggaccaagtcatcaaaagtcaaagagttatggtcggtgatttagaggatattaacgagatgattataaagcagaaggccactatgcaggatctggaacagcgccgcccccaactggaggagctgattacagcggcgcagaatctgaaaaataagaccagcaaccaggaagcccggaccattattacagatcgtatagaacgcatacagaaccagtgggacgaagtacaggaacatctccaaaaccggagacagcagctgaacgagatgctcaaggacagcactcaatggctcgaggccaaggaggaggctgagcaagtgctgggtcaggccagggcaaaactggaatcatggaaagaaggcccttacactgtagatgccatacagaagaaaatcaccgagaccaaacagctggcaaaagatcttcgacaatggcagacgaatgtcgacgtggctaacgatctcgctctcaagctgcttagagactactccgccgatgacacacgaaaagtccacatgataactgaaaacatcaatgctagctggagatcaattcacaagcgggtatcagaacgggaagccgcactggaggagacgcacaggttactgcagcagttccctttagatttggagaaatttctggcctggctgacagaggccgaaaccaccgctaatgttcttcaggacgccacaagaaaagagcgacttctcgaagatagtaaaggagtaaaagagctgatgaagcagtggcaggatttgcaaggagagatcgaagcccacactgatgtctaccacaatctggatgagaactcccagaagattctccgatccttagagggtagcgatgacgcagtgctgctccagcggaggctggacaacatgaacttcaaatggtccgaattaaggaaaaagtctctcaatattagaagccatctggaggccagcagtgatcagtggaaacgtttacacctctcgctgcaagagctactagtttggcttcagcttaaagacgatgaactttctcgccaggcaccgattgggggcgattttccagccgttcaaaaacaaaacgatgtgcatagggcctttaaacgtgaacttaagaccaaggaacccgtgatcatgagtacactggagactgtgaggatattcttgacagagcagcctctcgaagggcttgaaaagttatatcaggagcccagagaactaccccccgaagagcgtgcacaaaacgtgactagacttctaaggaagcaggccgaagaagtgaacacagaatgggaaaagctgaacctgcattccgccgattggcagcgcaagatcgatgagactctcgagaggttgcgggagctgcaggaggctaccgacgaactggacctcaagctgagacaggccgaagtgatcaaaggaagttggcagccagttggtgatctgctgattgacagccttcaagaccacttagagaaagttaaagctctgcgcggggagatagcacccctgaaagaaaatgtgtctcacgtgaacgacctagccagacagctcacaacacttgggatccagctgagcccttacaatctgagtactctggaagacctgaacactcggtggaagctgttgcaagtggcagtagaggacagagtccggcaactgcacgaagcacaccgcgattttggtccagcttcacagcactttctgagtaccagtgttcagggcccatgggaacgtgcaatctcaccaaataaagtgccatattacattaatcacgaaacccaaacgacctgttgggatcaccccaagatgacagaactatatcagagcctggctgacttaaataatgttcgattctctgcatatagaacagctatgaaactgcgccggctccaaaaggccctgtgtttagacctcttgtctctgagcgcagcttgtgacgccctagaccagcacaacttaaagcagaatgaccagcccatggacatcttgcaaatcatcaattgtctcactacgatttacgaccgtttggagcaagagcacaataatctggtgaatgttccactctgtgtggatatgtgtctgaactggcttttgaatgtgtacgataccggccgcaccggacggattcgcgttctctccttcaagacagggatcatatctttgtgtaaagcgcacctggaggataagtatcgttatctctttaaacaggttgcctcgtctacgggattttgtgaccagcgtagactcggattgctactccatgatagcatccagatcccacggcagctcggggaggtggcttcttttggcggaagcaacatcgagccctcggttaggagttgtttccaatttgctaacaacaagcccgagatcgaagcagcgcttttcctggattggatgcgccttgagcctcagagtatggtttggcttcccgtccttcatagggtagctgcagccgagaccgcaaaacatcaggccaagtgcaacatctgcaaagagtgtcctattattgggttccggtacaggtcactcaaacattttaactacgacatttgccagtcctgcttcttcagtggacgggttgcgaaggggcacaagatgcattacccaatggtagagtattgcacacctaccacgtcaggtgaggacgtaagggatttcgccaaggttcttaagaacaaatttcgcactaaacggtactttgcaaagcaccctcggatgggttatctgcctgtgcagaccgtgctggagggagacaacatggaaaccaatctacaggccgagtatgaccgcctgaaacagcaacacgaacacaaggggctgtcccctctcccttctccccccgagatgatgcccaccagcccacaatcgccccgcgacgcggaacttatcgctgaggcgaaattactgcgccagcacaagggtagactggaggcccggatgcaaatccttgaggaccacaataagcagttagagagccaactgcaccgtctgagacagctgctcgaacagccacaggccgaggcaaaggtgaatggaacgaccgtgtcgagtccgtccactagcctgcagaggtcagacagctcacagccaatgttgctcagagttgttgggtctcagaccagcgatagcatgggcgaggaggacctcttaagccccccccaggatacaagtacgggcctggaggaagtgatggaacagctgaacaattcttttccatcttcacgcggccgcaatacaccaggcaagccaatgcgagaggatacaatgtag

SEQ ID NO: 115400 - DNA, 11058 bp, synthetic construct
  misc_feature 1..11058: note = Description of Artificial Sequence: Synthetic coding sequence
  source 1..11058: mol_type = other DNA
atgctgtggtgggaggaagttgaggactgttacgagagagaagatgtacagaaaaagacgttcaccaagtgggtgaatgcccagttttctaaatttgggaaacagcatatagagaacctatttagcgacctacaggatggacggagactactggatcttcttgaaggtcttacaggtcaaaagctcccaaaagaaaagggcagcacccgggtgcatgctcttaacaatgtaaacaaggcactccgcgtgctccagaacaataacgtggacctggtcaatatcggatcaaccgacatcgtggatggaaaccataaactgaccctcggacttatttggaacattatcctgcattggcaggtaaagaatgtcatgaagaatatcatggccggcctgcagcaaacgaatagtgagaagatactgctgagctgggtgcgacagagcactcgaaactaccctcaggttaacgtcatcaactttacaacgtcctggagtgacggactcgctctgaatgcactcatccattctcaccgacccgacttattcgattggaactccgttgtgtgccagcagagtgctactcagaggctcgagcacgcgtttaacatcgcccgataccagttaggaattgaaaagctccttgacccagaagatgtcgacacaacatatccagataaaaaaagcattctgatgtacatcacaagcctgttccaggtgctcccacaacaggtgagtatagaagctatccaggaagttgagatgctgcccaggcccccaaaagtgaccaaggaggaacacttccaattgcaccatcagatgcactactctcagcaaatcactgtaagtcttgctcaggggtatgaaaggacatcctcacctaaaccacgattcaagagctacgcctatacgcaggcggcctatgtcactacaagtgatccaacccgcagtccgttcccttctcagcatttggaagcccccgaagacaagtccttcgggtcatctctgatggagagcgaggtgaacctcgatcgctaccagactgcactcgaggaggtgctcagctggctattatctgctgaagataccctacaggcccagggggaaatctctaacgatgtcgaagtcgttaaagaccagttccatacccacgaaggctacatgatggatttaacagctcatcagggacgcgttggaaacattctgcagctgggctcaaagctgatcggtacaggaaaattgagtgaggacgaagagaccgaagtgcaggagcagatgaacctgctcaactcacgttgggagtgtctgcgggtcgcctcaatggagaaacagtccaacctccaccgggtgctcatggatctgcagaatcagaagctcaaggaactaaacgattggctgaccaagaccgaggagaggaccaggaagatggaagaggagccccttggtccagatctggaggaccttaaaagacaggtgcagcagcataaagtcttgcaggaggaccttgaacaagaacaagtgcgggtgaactcgctgacccacatggtcgtggtggtggatgagagtagtggggatcacgccacagccgccttagaggagcaactcaaagttctgggcgaccgctgggccaatatttgccggtggaccgaggaccggtgggtgttgttgcaagatatcctgctgaaatggcagagactgactgaagaacagtgtctgttctcagcctggcttagtgaaaaagaggatgccgtgaataaaatccataccaccggcttcaaggaccagaacgagatgcttagctccctacaaaagcttgcggtgctgaaagccgacctggagaaaaaaaagcaatctatggggaaactctattccctgaagcaggacctccttagtactttaaagaataagtcggtcacacaaaagacggaggcctggcttgataattttgcccgatgctgggataacttggtgcaaaagctggagaagagcacagcacagatctctcaggcggtcaccaccacacaaccaagccttactcagaccactgtgatggagacagtaacaacggtgactacgcgagagcaaatattggtgaagcacgctcaggaggagcttcccccaccaccaccgcagaagaagagacagatcaccgtcgacagcgagatccggaagcggcttgatgttgacatcaccgaactgcattcttggattactcgatctgaggctgtactgcagagccctgagttcgccatattccgcaaagaaggtaacttctcggatttgaaagaaaaagtgaacgctattgagcgggaaaaagctgaaaagttcagaaagttgcaggatgccagccgctccgcgcaagccctggtggagcagatggtgaatgaaggagtgaatgccgattccatcaaacaagcctctgagcagctgaactccagatggattgagttctgccaactcttatctgaacggctaaattggctggaataccagaataacatcatcgctttctataaccagctacaacaactggaacagatgacaacaacagctgaaaattggctgaagattcaacctaccacacccagcgagccgacggctattaagtctcagctgaaaatatgcaaggacgaggtcaaccgcctttctgatttgcagccccagatcgagcggttaaagattcagagcatcgcccttaaggaaaaaggacagggtccaatgttcctggacgccgacttcgtggcatttacgaaccacttcaagcaggtcttttcagacgtccaggccagagaaaaggaactccagactatttttgacacactgcctccaatgcgataccaggagaccatgagcgctatcaggacatgggtacaacagagcgagaccaagctttccatccctcagctctccgtgactgactacgaaattatggagcagagactcggagaattgcaggcactgcaaagcagtctccaggaacagcagagcggactgtattacctgtcaaccacagtcaaagaaatgtctaagaaggctccttccgaaatcagtaggaagtaccaatctgagttcgaggagattgaggggcgttggaagaaactcagctcacaattggttgagcattgccagaagctggaagagcaaatgaacaaactgcgcaaaatccaaaaccacatccaaacgctgaaaaagtggatggccgaggtcgacgtatttttgaaggaggaatggccagctctgggggatagcgagattctgaagaaacagctgaagcaatgccgccttctagtgtcagacatccaaaccatccagccctctctcaactctgtgaacgaaggagggcagaagattaagaacgaagccgaacccgaattcgcctcaaggctggagacagagctcaaggaattaaatacacagtgggatcacatgtgtcagcaggtgtacgctagaaaagaggctctgaaagggggtcttgagaagacggtgtcccttcaaaaggatttgtcagaaatgcacgaatggatgacccaggccgaagaggaatacctggagcgggacttcgagtataagactccagatgagctacagaaagcagtagaggagatgaagcgggctaaagaggaagcgcagcagaaagaggcaaaggtcaaactgttgacagagagtgtaaatagtgtaatcgcccaggcaccacctgtggcgcaggaggccctaaagaaagagctggagacacttacaaccaactaccagtggctttgcaccagactgaatggcaaatgcaagaccctcgaggaggtctgggcctgttggcatgaattactttcatatctggaaaaagccaacaaatggctgaatgaggtagagtttaaactgaaaactacagagaacatacccgggggcgcagaagagattagcgaggtgctggacagcctcgagaacttaatgagacattccgaagacaatcccaatcagatccgaatcctggcccagaccttaacagacgggggcgtgatggacgagcttattaacgaggagctcgaaaccttcaatagcaggtggcgcgagctgcacgaggaagccgtccggaggcaaaaattactggaacagtccatccagtcagctcaagagaccgagaaaagcctgcatcttatacaggaaagcctcacatttattgacaagcagctggctgcttatatagctgataaggtggatgccgctcagatgccacaggaggcccaaaagattcagtccgacttgacgtctcatgagattagtctggaggagatgaaaaaacacaaccagggcaaggaggcagcccagagagtcttgagtcaaattgatgtcgcccagaagaagttgcaagacgttagtatgaagttcaggctgttccaaaaacctgccaacttcgaacagcggctgcaggagtctaagatgatcctcgacgaagtgaaaatgcacttgcccgcactggaaactaagtcagtggagcaggaagtggtccaaagccagctgaaccattgcgtgaatctgtacaagagtctgtccgaagttaagagtgaggtcgagatggtaataaagacggggcggcaaatagtgcagaaaaagcagacagaaaaccctaaagagctggatgaaagagtcaccgctctgaagctccactataatgaactgggtgccaaggtgaccgagaggaagcagcagctggagaagtgcttaaagttgagtcgaaaaatgcggaaggagatgaatgtgttgaccgaatggctggccgcaactgacatggaactgactaagagaagcgccgtggaaggcatgccttcaaacctcgactcagaagtagcctggggtaaggctacgcagaaagagattgagaaacagaaagtgcatctaaaatctattactgaagtgggggaagcattaaaaactgtgttgggaaagaaggaaacactcgtggaagacaagttgagccttctgaatagcaactggatcgctgtgacatcccgggcggaggagtggttgaatctcctgctcgagtatcagaagcatatggaaacatttgaccaaaacgtcgatcatatcaccaagtggatcattcaggcagacaccctattggacgagtctgaaaaaaagaaaccacagcaaaaggaagatgtgctgaaacgcctgaaggcagagctcaatgatatacggccgaaggtggacagcaccagggatcaggcggctaacctaatggccaacaggggagatcactgtcgcaaacttgtagaaccgcagatcagtgaactaaaccatcgattcgcagccatttctcaccgcattaagacaggcaaggcatcgatcccacttaaggagctcgaacagttcaactcagacatccagaagctgctggaaccccttgaggccgaaatccagcagggcgtgaatttgaaggaggaagatttcaataaagatatgaatgaggataacgaaggcacggtgaaggagctgcttcagcgcggggataaccttcagcagagaataactgatgaaaggaaacgggaagaaataaagatcaagcagcaactgctgcagactaagcataacgctctgaaggatctccgcagccagcgacggaagaaagccctggaaatctcacaccagtggtatcaatataagcggcaggccgacgatcttctgaaatgcctcgacgatatcgagaaaaagctggcctccttacctgagcccagggacgagaggaagattaaagagatagatcgcgagctacagaaaaagaaagaggagcttaacgcagtacggcgccaggctgaaggcctctctgaggacggcgccgctatggcggtggaacctacacagattcagctgagtaagcggtggcgggagattgaatcaaagtttgctcaattccgtcgactaaattttgcccaaatccacacggtgcgtgaggagacaatgatggtgatgaccgaggatatgcccttggagatctcttatgtgccctcaacatatttaacagaaatcacccatgtgagccaggccctgctggaggtggagcagctgctcaacgcacccgatctgtgcgctaaagatttcgaagatcttttcaaacaggaagagagcctgaaaaacattaaggacagtctgcagcagagttccgggcggatcgacataatccattccaagaagaccgcagccctgcagtctgcaactcctgtcgaaagagtcaagcttcaggaagccctgagccagctggactttcagtgggagaaggttaacaagatgtacaaagatcggcagggccggtttgaccgaagtgttgagaagtggagacggtttcattacgacatcaagatcttcaatcagtggcttactgaagcagaacagtttttaagaaagacgcaaattcccgagaattgggagcatgctaaatacaagtggtatcttattgcgctgaaggatggaatcggtcagaggcagaccgtggtccgcaccttaaatgcaaccggagaggagattatccagcagtccagtaaaacagacgcgtcaatcctgcaagaaaaactggggtctttaaaccttagatggcaggaagtttgtaagcaactcagcgatcggaagaaacggttagaggagcagaaaaacattctttccgagttccagcgcgatttaaatgagtttgtgctttggctagaagaagctgataatatagcctctataccgctcgaaccaggtaaggaacaacagttgaaggaaaagttagagcaggtgaagctgttagtggaggaacttcctctgcggcagggcatactcaaacagttaaatgaaactggagggcctgtgctagtgtctgcacctattagcccagaggagcaagataaactcgagaacaaacttaagcagacaaacctccagtggatcaaagtgtcaagagcgctccccgagaaacagggggaaatcgaagcccagataaaggatctaggtcagttagaaaaaaaactcgaggaccttgaagaacagctgaaccaccttctactgtggctgtctcccattagaaaccagctagaaatttataatcagccaaatcaggaggggccctttgacgtcaaggaaactgaaattgcggtccaggctaagcagcccgatgtggaggagattctgtcaaaagggcagcacctgtataaggagaagccagctacccaacccgtgaaacgtaagttagaagatctgagcagtgaatggaaggctgtgaaccgcttgctccaggaactgcgagccaagcagcccgatctcgcccccgggctcaccaccattggggcctccccaacacagactgtaaccctcgtaacccaaccagtggtaaccaaggaaactgctattagcaaattggagatgccttcaagtctcatgctggaagtgccagccctcgcagacttcaatcgggcctggacagagctaacggattggctgtcgctactggatcaggtaatcaaatcccagagagtcatggtgggggacctggaggatataaatgaaatgatcatcaaacaaaaggctactatgcaggatctggagcagaggaggcctcaactggaagagttaatcacagctgcccagaatcttaagaataaaaccagtaatcaggaagctcggacgatcattaccgaccggatagaacggatccaaaatcagtgggacgaggtgcaggagcatcttcaaaatcggcgccaacaactaaatgagatgctgaaagactccacacaatggctggaggcaaaggaggaagctgaacaagttttggggcaggctcgggccaagctggaatcatggaaagaaggaccttacacggtcgacgctatccaaaagaagattaccgagacgaagcagctggccaaggacttgcgccagtggcagacaaatgtcgacgtagccaacgacctggccctgaagttgctgcgggattacagcgctgatgatacacggaaggtgcatatgatcactgagaacataaacgccagttggagatcaatccacaaaagggtgtcagaacgggaggctgccctcgaggagacccacagactgctgcaacagttccccctagaccttgaaaaattcctagcctggctgacagaagccgaaacaacagcaaatgtgctgcaggatgcaaccaggaaggaacgactgttagaggactcaaaaggggtcaaagagctaatgaagcagtggcaggatctacagggagaaatagaagcacatacggatgtttaccataacctggacgagaactcccagaagatactgcgatcccttgagggcagcgacgacgcagtgctcctgcaaagaaggctggacaacatgaactttaagtggtccgagctgcgcaagaagtcgctgaacatccgatcacaccttgaggcctcttcagatcagtggaagaggcttcacctcagcctacaagaactactggtatggctgcagttaaaagacgatgagctgtctcgtcaggcgccaattggaggggattttccggcagtgcagaagcagaatgacgttcacagggcctttaagagagaactgaaaactaaagaacccgtcataatgtccacgttagagaccgtgcgcatatttctgactgagcaacccctggagggtctggagaagttatatcaagaaccccgcgagctgccacccgaagagagagcgcagaatgtcacccgcttgttgcgaaagcaagctgaggaggtgaataccgaatgggagaaacttaatctccacagcgcggattggcagcgaaaaatagacgagactctggaaagacttcgggaactacaagaggccaccgacgagctggatctgaaattgcggcaggctgaagtaattaagggctcttggcaaccggtgggtgacctcttgattgacagcctgcaggatcaccttgaaaaagtgaaggccctgcgcggagaaatagcaccactgaaggagaacgtttcacacgtcaacgacctggctcggcagctgacgacattgggcatacagctctcaccgtacaatctgagcactttagaagaccttaatactagatggaagttgttgcaagtggccgtggaggaccgcgtcaggcagctgcatgaggcacatagagatttcgggcccgccagccagcactttctgtcaaccagtgttcagggcccatgggagcgcgccatctcaccgaataaggtcccttattacatcaaccacgaaacacagaccacatgttgggaccaccctaagatgacagagctttaccagtctctggctgacctgaacaacgtccgttttagcgcttatcgaactgcaatgaagcttaggcgactgcagaaagctctgtgtctggatctgctatcactgtctgctgcctgtgacgcactggaccagcacaatctgaagcagaacgaccagccaatggatattctgcaaatcatcaattgcctgaccacaatctacgatcgcctggagcaagagcataacaacctcgtaaacgtgcccctctgcgttgatatgtgtctgaactggttgctaaatgtttatgacactgggcgcacagggcggatcagggtcctcagctttaaaaccggcattatctcgctgtgtaaggcccacttggaggacaagtaccgctacttgttcaaacaagtggcaagctcaacgggcttctgcgatcagaggagactgggactgctcttgcacgattccatacaaattcctaggcaactgggggaggtggcgagctttgggggctccaacattgaaccttccgtgaggtcatgttttcagtttgccaacaataagcctgagattgaggctgctttgtttctggactggatgaggctagaaccacagtccatggtgtggctgccagtcctgcaccgggttgctgcagctgagacggccaagcaccaagcgaaatgcaatatatgtaaagagtgcccgatcatcggatttagatacaggagcctgaagcattttaattacgatatctgccagagctgttttttcagtggcagggtggcgaagggacataaaatgcattatccaatggtggagtactgtacgccaaccacaagtggggaggacgtccgcgattttgctaaggtcctgaaaaacaaattcagaacaaagcggtacttcgctaagcaccccagaatgggctatctcccggttcagacagtgttggaaggtgacaatatggagactcctgttacacttattaatttttggcccgtcgactctgcacctgcctcttcccctcagcttagtcatgacgatacgcattctaggatcgaacactacgcttcccggctcgcagagatggaaaactcaaatgggtcctacctaaatgactctatcagtcctaacgaatcaatcgacgacgaacatttgctgatccagcactactgccagagtctcaatcaggactccccgctgagccagcccaggtctccagctcagattctgattagcttggaatccgaagaacgcggagaattagagcggattctagccgatctggaagaagaaaaccgaaacctgcaggccgagtatgacaggcttaaacagcaacatgaacacaagggactgtcccctctccccagccctcccgagatgatgccaacttcaccccaaagcccccgcgacgcagagcttatcgctgaggctaaactgctgcggcaacataaaggtcggctggaggcccggatgcaaattttggaggatcataataagcagttagaatctcagctccataggctacgtcagctgctggaacaaccccaggctgaagccaaagttaacggcacaactgtctcatcaccatctacttcactgcagaggtccgatagctctcagcctatgttgttaagagtggtcggcagccagacatctgattctatgggagaggaggatttactatccccaccacaggataccagtaccggtctggaggaggtaatggagcagctgaacaatagctttccgtcaagccggggcaggaatacgcccgggaaacctatgagggaggatactatgtag

SEQ ID NO: 115401 - DNA, 2874 bp, synthetic construct
  misc_feature 1..2874: note = Description of Artificial Sequence: Synthetic coding sequence
  source 1..2874: mol_type = other DNA
atgcagccaatggtcatgcaagggtgcccatacacactcccaagatgccacgattggcaggcggccgatcagtttcaccattctagttccctgcggtcaacgtgcccccatccgcaagttagagcggccgtgacctcaccagcaccaccccaagacggcgcaggagttccatgcctcagtctgaaacttctgaacggttcagtcggcgccagtgggccgctggagccccccgctatgaatctgtgttggaatgaaatcaagaaaaagtctcacaacctaagagctcggctggaagctttcagcgaccacagcgggaaactgcaactgcctctgcaagaaattattgattggctctctcaaaaggacgaggagctgtccgcccaactgccactgcagggcgatgtggctctggttcagcaggaaaaagagacccatgctgctttcatggaggaggttaaatcaaggggcccctatatctatagtgtgctggagtctgcccaagctttcctctctcagcacccctttgaggagttagaagaaccccactctgagtccaaggatacctctcccaagcagcgtatacagaatctctcgcgcttcgtgtggaagcaagccactgttgcctcagagttgtgggaaaaactcaccgcaaggtgtgtcgaccagcatagacacatagaaagaacactcgagcagctccttgaaatccagggggctatggaggagctttctactaccctgagtcaggcagaaggcgtccgcgccacctgggaacccattggcgacttgtttatagacagtcttcccgaacacatacaggccattaaactgttcaaggaggaattctcccccatgaaagacggggtaaaactcgtcaatgacctggcccatcagctcgcaataagcgacgttcatctcagtatggaaaattctcaagcactggagcagatcaacgtgcgctggaaacagttgcaagccagcgtttcagaaaggctcaagcagcttcaggacgcgcatagggatttcgggcctggatctcagcacttcctgtcttccagcgtccaagtgccatgggaacgagctattagtccgaataaagtgccctactacatcaatcaccaagcccaaaccacttgttgggaccacccgaagatgactgaactatatcagacactcgccgacttaaacaacatcaagttctccgcttacagaaccgcaatgaaactccgacgcgtgcagaaagccttgcggctcgaccttgtcacgctgaccaccgcgcttgagatttttaacgagcatgaccttcaagcgtctgaacatgtgatggacgtggtagaggttatccactgtctcactgctttatatgagcgcctggaggaagaacgagggatcctcgtgaatgtgcctctctgtgtggatatgagtctgaactggctactcaatgtgttcgactccggcaggagcgggaagatgcgggccctctccttcaagaccggcattgcttgcttatgtgggaccgaggtgaaggagaaactgcagtacctgttctctcaagttgctaactcgggttcacagtgcgatcagcgccacttgggggttttgttgcacgaggctatccaagtgcctcgacagctaggcgaggtcgcagccttcggaggaagcaatgttgagccaagtgttcgctcctgttttaggttcagcacaggcaaacccgtgattgaggcctcacaatttctcgaatgggtcaaccttgagccccagtccatggtctggcttgccgtgctgcacagagtcacaatcgctgaacaggtcaagcatcagacgaagtgctccatctgtagacagtgccctatcaagggatttcggtatcgtagcttaaaacagttcaatgtcgatatctgtcagacctgcttccttaccggtagagcttcaaagggcaataaattgcactatccaatcatggagtactacactccaaccactagtagtgagaacatgagagacttcgccaccactctgaagaacaaattccggtcaaaacactatttttctaagcatccccagcgcggatacttgcctgtacaaagtgtactcgaagccgactactcagagacccctgcatctagcccaatgtggccccatgccgacactcactctcgcatcgaacactttgcatcccggctcgcagagatggagtcccagaactgcagcttctttaatgactccctgtcccctgacgactccatcgatgaggatcaatacctgctgcgacattccagcccgataacagatcgggagccagctttcggccagcaggcaccttgtagtgtcgctactgaatcgaagggcgaacttcaaaagattcttgcccacctggaggacgagaacagaatcctgcagggcgagctgcgccgcctgaaatggcagcatgaagaagctgctgaagcccccagtctcgctgacggatcaactgaagcggccacagatcaccgaaacgaggagctgctcgctgaagcccgaatcttacgccaacacaaaagtcgacttgagacgcgcatgcagatattggaggatcataataagcagctggagtcccagctccagcggctgcgggagctactgctgcagccgccaactgagagtgatggttcaggctccgctggctcgagtcttgcatcgtcacctcaacagagtgaaggatcgcatcccagagaaaagggtcaaactacacctgatactgaggcagctgatgacgttggctctaagtcacaggatgttagcctgtgtctggaagacatcatggagaaattacggcacgccttcccctctgtgcgcagttcggatgtaacagctaacactcttttggcgtcatag

SEQ ID NO: 115402 - DNA, 2874 bp, synthetic construct
  misc_feature 1..2874: note = Description of Artificial Sequence: Synthetic coding sequence
  source 1..2874: mol_type = other DNA
atgcagccaatggttatgcaggggtgtccgtacaccctcccgcggtgccacgactggcaggccgccgaccagttccatcacagttcctcccttaggtcgacctgcccccacccacaggtgcgggccgcagtgacatctcctgcaccaccccaggatggagcaggagttccatgcctttcacttaagctgttgaatgggtctgtcggggcatcaggaccactggagccccccgccatgaacctttgttggaatgaaataaaaaagaaaagccataaccttcgagcccgcctagaggctttcagcgatcatagcggaaagttacaattaccactccaggaaataattgactggctatcccagaaagatgaagagctgtccgctcagttgcccttacagggagatgtcgctctggtccagcaagagaaggagactcatgcggcattcatggaagaggtcaaaagccggggaccgtatatctattcggtcctggagtctgcccaggccttcctctcacagcatcctttcgaagagcttgaagagccccactccgaatccaaagatacatcacccaagcagaggatacagaacctctcccggtttgtctggaaacaggctacagtcgcatccgagctttgggagaagctgacagctaggtgtgtcgaccagcataggcatattgaacgtacactcgagcagctcctggaaatccaaggggcgatggaagagcttagtacaaccctgagtcaggcagaaggggtacgtgcgacgtgggagcccatcggcgatctctttatcgattcattgccggaacacatccaggcgatcaagctattcaaggaagaattcagccctatgaaagatggagtgaagctggtgaatgacctcgcgcaccagctagccatcagcgatgtgcatttgtctatggagaatagtcaggccctagagcagattaacgtaaggtggaagcagctgcaggcatctgtaagcgagagactaaaacagctacaagatgcacatagagattttggtcctgggtcgcagcacttcctgagttccagcgtgcaggtgccctgggaaagagcaattagcccgaacaaagtgccttactacatcaaccaccaggcgcagacaacatgttgggatcacccaaagatgactgagctgtaccagactctagccgacttgaataatatcaagttcagtgcctacagaaccgctatgaagcttcgccgcgtccagaaagcattaaggttagacctggtgactctgactaccgccctcgaaattttcaatgagcacgacctgcaggcgagtgagcacgtaatggatgtggtggaggtgatccattgtctcacggctctgtacgagagactggaagaagagcgcggaatcttggtgaatgtgcccctctgcgtggatatgtcacttaactggctgctgaatgtgttcgatagcgggaggtccggaaaaatgagagctttgtcattcaagactggtatcgcttgtttatgtgggacggaggttaaggagaaactgcagtacctgtttagccaggttgctaattccgggtctcagtgtgatcagcggcatttaggggttctcctgcacgaggcgattcaggtgccacgacaactcggtgaggtggcagccttcggggggtctaacgttgaacccagcgtcaggtcctgttttagatttagtaccggcaagcccgttatcgaggcttcacagtttttagagtgggtgaacctagaacctcaatccatggtctggctcgccgttctgcacagggttactatcgcggaacaagtcaagcaccagactaagtgttccatctgcaggcaatgtcctattaaggggttcaggtaccgcagcctgaagcagttcaatgtggacatatgtcagacgtgttttttaacaggacgggctagcaaagggaacaaactacattaccccatcatggaatactacaccccaaccacctccagtgagaatatgagggactttgcaaccacgctgaagaacaagtttcgctcgaagcattactttagcaaacaccctcagcgcggctacctgcccgtccagtcggtgcttgaagccgattactcagaaacgcctgcttcatcgccaatgtggccccatgccgacactcatagccggattgaacacttcgcaagcagactcgcggagatggagtctcagaattgtagcttcttcaacgacagcctgagccccgacgactctattgatgaagatcagtatttactgaggcattcctcccccattacagacagggagcccgcgtttgggcagcaggcaccatgctctgtggccactgaaagcaagggggagcttcagaaaatcttggcacaccttgaagatgaaaatcgcattctccagggggaactaagacgattgaagtggcaacacgaggaagccgcagaagctccgtcgctggcggatgggagcaccgaagccgctacagaccatcgtaatgaagagctgttggctgaggcacggattctcaggcagcataaatctcggttagagactcggatgcaaatcctggaggaccataacaagcaactcgaatcccagcttcagaggttgagagagctcctgctgcaaccaccaactgaaagtgatggaagcgggtccgcagggagtagcctggcaagcagccctcagcagtccgaaggcagccatccccgcgagaagggtcagaccactccggatacagaggctgcggacgatgtaggctcaaagagccaggacgtttctttatgtctcgaggatataatggagaaactgcggcacgcgttcccaagcgttaggagcagtgacgtgacagccaacacgctgcttgcctcttag

SEQ ID NO: 115403 - DNA, 2874 bp, synthetic construct
  misc_feature 1..2874: note = Description of Artificial Sequence: Synthetic coding sequence
  source 1..2874: mol_type = other DNA
atgcagccaatggtcatgcagggatgtccatataccctgccacgttgccacgattggcaggccgccgatcagttccatcactccagcagcctccggagcacctgtccccaccctcaggtgagggctgcagtgacaagtcccgcaccaccccaggatggagcaggcgtaccctgcctttccctcaaactgctgaatggcagtgtcggagcgtctggcccactggagccccccgccatgaatttgtgctggaacgaaattaaaaaaaagagccataacctgcgcgcacgcctggaggcgttttccgatcatagcgggaaacttcagttgcccctgcaggagattattgactggctgtctcagaaggatgaggaactctctgcacagctgccacttcagggtgacgtggctttagtccagcaggagaaagagactcacgctgccttcatggaggaagtcaagagccggggtccctacatctacagcgtgctggagagtgcgcaagccttcctgtcgcagcatccattcgaagaacttgaggaacctcacagcgagtccaaggatacttcaccaaagcagcggattcagaacctcagtcgattcgtttggaagcaggctacggttgcatccgaactgtgggaaaagctaaccgctcgctgtgtagaccaacacaggcacattgaacggacattagagcagttacttgaaattcagggtgcgatggaagaactgtctactaccctatctcaggccgagggagtgcgcgcgacttgggaaccaataggggacctgttcattgacagtctcccggaacacatccaggccatcaagctcttcaaagaggagttcagccctatgaaggatggcgtgaaactcgtaaatgatctggctcaccagctggccatttctgacgtgcacctctctatggagaatagtcaggccctcgaacagattaacgtaagatggaaacaactccaggcaagtgtgagcgagcggctgaaacaattgcaggatgcacatcgcgacttcggccctgggtctcagcacttcctgagctcaagtgtccaggtaccttgggagcgcgcaattagcccaaacaaggtgccgtactacattaatcaccaggcccagacaacttgttgggatcatccaaaaatgaccgagttgtaccagacactggctgatctcaacaatattaagttcagcgcttatcggaccgccatgaagctccgtcgcgtccagaaggccttacgcctggacctggtcaccctcacgacagcccttgaaatcttcaacgagcacgatctccaggcatccgaacacgtgatggacgttgtcgaggtgattcactgcctgactgctctgtacgaaaggctggaagaagagcgcggtattctcgtcaatgttccgctgtgcgtcgacatgagccttaattggcttctgaatgtgttcgatagcggtagaagtgggaaaatgcgggcgctttctttcaaaaccggcatcgcctgcctgtgcgggaccgaggtgaaagaaaagctgcaatatttattctctcaggtggccaattccgggtctcagtgcgatcagaggcacctgggcgtactccttcacgaggccattcaggtccctcgccaactgggagaggtggccgcttttggcggaagtaacgtggagccatctgtgcggagctgctttaggttttctacagggaaaccagtcatcgaggctagccagttcctcgagtgggttaacctggagccgcagtctatggtgtggctggcagtgctgcatcgagtgacaattgcggaacaagttaaacaccaaacaaagtgttccatttgcaggcaatgccctattaaaggctttcgttacagaagcctgaagcaattcaatgtggatatttgtcagacctgctttttaacaggacgggcctcaaaggggaacaagctgcattatcctattatggagtattacaccccaactacttctagcgagaatatgagggattttgccaccacactcaagaacaagttccgttcaaaacattacttctctaagcacccacaaagaggatacctgcctgtgcagagcgtcttggaggccgactattcagagacccctgcttcctctccaatgtggccacacgctgacacacattccagaattgagcatttcgcgagcaggctcgcagaaatggagtcgcaaaactgcagcttcttcaatgatagtctgtctccagacgattccattgatgaagaccagtacctgctgagacactcatctcccatcaccgacagggaaccggccttcggacagcaggctccttgcagtgtcgcaaccgagagtaagggcgagctgcagaaaattctggcccatttagaggatgagaacagaatccttcaaggagagttacgccggctcaaatggcagcacgaggaggccgcagaggcgccttcattagctgacggatccactgaggccgcgactgaccaccggaacgaggaactgctcgcagaggcacgaatcctgcggcagcataagtcccgcctggagacgcgtatgcagattcttgaggaccacaacaagcagcttgagtctcagttacagaggctgcgcgaactgctcctgcagccccctaccgagtccgacggaagcggtagcgctggaagctccctcgcaagctcaccccaacagtctgaggggagccatccccgggaaaaagggcagactacccctgacaccgaagcggccgatgatgtggggagcaaatctcaggacgtttctctgtgcttagaggatataatggagaaactaaggcacgcttttccttccgtgcggtctagtgacgtgacggccaacacacttttggcctcctag

SEQ ID NO: 115404 - DNA, 2640 bp, synthetic construct
  misc_feature 1..2640: note = Description of Artificial Sequence: Synthetic coding sequence
  source 1..2640: mol_type = other DNA
atgaacctctgttggaatgagatcaaaaaaaagagccacaatctgcgggcccggcttgaagcatttagtgatcacagcggaaaattacagcttcctcttcaagaaataattgattggttatcgcagaaggacgaggaattatcagcccagctgccgttacagggtgacgtcgcgcttgtccagcaggaaaaagagacccatgcagcctttatggaggaggttaaaagtcgaggaccgtacatctattccgttctcgagtccgcacaagccttcctcagtcaacatccattcgaagaactggaagaaccccactctgagtccaaggacacctctcccaagcagaggatccaaaacttaagtaggtttgtctggaagcaagccacagttgctagcgagctctgggaaaaattgaccgctagatgcgtagatcagcaccggcacatcgagcggacactagaacagctactggagatacagggtgctatggaggagttgagtaccaccctgagtcaggccgagggcgttcgggccacatgggagcctataggagaccttttcattgactcactgccagagcacattcaggcgataaagctttttaaagaggaattctcccccatgaaagacggcgttaagttggtgaatgacttagctcaccaactggccatctccgatgtacacctgagtatggagaactcccaagcccttgagcagataaatgtgcgctggaaacagttacaagcctctgtttccgaaagactaaaacagcttcaggatgcacacagagacttcgggcccggtagtcagcacttcctgtcatctagtgtacaggttccttgggagcgcgctatttcaccaaacaaggtgccttactatattaatcaccaggcccagacaacttgctgggaccacccaaagatgactgagctttatcagaccctcgcggatttgaacaatatcaagttcagcgcctatcgcaccgcgatgaagctcaggcgggtccagaaggccttgagactggatctggtcacgctcacaacagcccttgaaatatttaacgagcacgacctgcaagcctctgagcacgttatggatgttgtggaggtgattcactgcctgacagcgttatatgagaggttagaagaagaacgggggattcttgtgaacgtcccactgtgcgttgatatgagtctcaattggctactaaatgtattcgatagcgggcggtcaggtaagatgcgggccctctcatttaagacagggattgcttgcctgtgtggtaccgaagtgaaggagaaactgcagtatctgttttcacaggtagcaaattcgggttcacagtgtgatcagcggcatctcggggttctcctacacgaagctatccaggtcccgcggcagcttggagaagtagccgctttcggtggttctaacgtagagccgagcgtgcggtcatgcttcagattctccactggtaagcctgtgatcgaggcttctcagtttcttgaatgggtgaacctggaacctcagtcgatggtgtggctcgccgtactccaccgagtcaccattgcagaacaagtaaagcaccaaacgaagtgctccatttgtaggcagtgtcccattaaggggttccgctacaggagtctaaaacaattcaatgtggatatctgccaaacctgctttctgacagggagggcatctaagggcaataaactgcattacccaattatggagtactacaccccaacaacaagttcagaaaacatgagagacttcgctactaccctgaagaataagttccggtcaaaacattattttagcaagcaccctcagcgggggtacctgcctgtgcagtctgtcttagaggccgactacagcgaaacaccggcttcatcgccaatgtggccacacgcagatactcactcaaggattgaacacttcgcaagccggctggccgaaatggagagccagaattgttcatttttcaatgatagtctgagccccgatgactcaatcgacgaggatcagtatctcttgagacattcctccccaatcactgatcgtgaaccagcctttggtcaacaggcaccctgctctgtggcgaccgaatccaagggagagttacagaagatcctggctcacctggaggacgaaaaccgcatcctgcagggggagctgcggcggctcaaatggcagcacgaagaggctgcggaggctccaagtctggctgacggcagcactgaggccgcaacagaccataggaacgaggaactccttgcagaagcacgaattctgagacagcataaatccagactggagacaaggatgcagattctcgaagatcacaacaagcagctagaatctcagctccagcgcctgcgagagctactcctgcagcctcccaccgagtcagacggctctgggtctgccggctcatctctagcctcatccccccagcagagcgaggggtcgcacccccgggaaaagggccaaacgacccctgacactgaagcagccgatgacgttggttccaaaagtcaggatgttagcctctgcctggaggatattatggaaaagttgcgccatgcctttccttccgtgagaagttccgacgtaaccgccaataccctccttgctagctag

SEQ ID NO: 115405 - DNA, 9129 bp, synthetic construct
  misc_feature 1..9129: note = Description of Artificial Sequence: Synthetic coding sequence
  source 1..9129: mol_type = other DNA
atgcaccacgggacgggcccccagaacgtgcagcaccaactgcagcgttctcgtgcctgccccggctctgagggtgaggagcaacctgcacacccaaatcccccacctagcccagctgcccccttcgcaccctccgcctctcctagcgccccacagtcccccagttatcaaatacagcagttaatgaatcgttcgcctgctaccggacagaacgtcaacattaccctccaatccgtgggcccagtcgtcggcggcaaccaacagattaccctcgcccccctccccctcccatctccaacgagccccggcttccaattttccgcacaaccgcggcgcttcgaacatggttctccatcctatattcaggttactagccctctttctcagcaggtgcagacccaatctcccactcaaccatctccaggacccggacaggctctgcagaacgtaagggcgggagctccagggccaggcttgggcctctgctcgagctcccccactggggggttcgttgacgcatccgtcctggtgagacagattagcctgtcaccctcctctggtggccatttcgtatttcaggacggctccgggcttacacagatcgcccaaggcgcgcaggtacagctacagcatccgggaactcccattaccgtgagagaacgacggcctagtcaaccccacacgcagagtgggggcactatccaccatttaggcccccagagtcccgcggccgcggggggagccggcttgcagccactggcttcgccctctcatattactacagctaatcttcccccccagatctccagcattatacagggacagctcgtccagcaacagcaggtgctccagggcccaccccttcctcggcctctgggattcgagcgcacgcctggagttcttttgccaggggctggcggcgcagccgggtttgggatgacttcccctcctcctcccacttcccctagcaggaccgcagtgccacccggactttcctcactgccactgacctctgtcggcaacactgggatgaagaaagtgcctaaaaaactcgaagaaattcctccagcctcccccgaaatggctcagatgcgtaagcagtgtctagattatcactatcaagagatgcaggcacttaaagaggtgtttaaggagtatctcattgagttgttctttttacagcacttccaggggaacatgatggattttctcgcattcaaaaaaaagcactacgccccattgcaggcatatctgcgtcaaaatgaccttgacatcgaggaagaggaagaggaggaagaggaagaggaagaaaaatccgaggtgatcaatgacgagcaacaggcccttgctggctcacttgttgcgggcgcggggtctacagtcgagacagatttgtttaagcggcagcaggctatgccctctacaggcatggcagagcagagcaagcgcccacggctggaagtgggccaccagggcgtcgtgttccagcacccgggcgccgacgctggcgtgccgctccagcagctcatgcctactgcacaggggggcatgccacctacgcctcaggccgcccagctcgccggacagaggcaatcacagcagcagtacgatccctcaaccgggccccccgtgcagaatgctgccagtctccatacccctcttccacaactacctgggcgcctccccccagccggcgtccctacagccgctctgtcttctgccctgcagttcgctcagcagccacaggtcgtagaggctcagacacaattacagatccccgtcaaaacccagcagccgaacgtgccgattccagcccctcctagttctcagctccctatccccccttcgcaacccgcacagctggcattacacgtccctacccccgggaaggtccaggtgcaggctagccagctttcctcccttcctcaaatggtggctagtacacggctgccagtggatcctgctcctccgtgtcctcgaccgctgcctacctcatccaccagctccctcgcccccgtgagcggctccgggcccggtccatcacccgcacgttcttcccctgtgaaccgcccgtcctccgcgacaaataaagccctgtccccggttaccagtcggactcctggagtcgtagcctcagctcccactaaacctcaatcccccgcacagaatgctacttccagccaagattcttcgcaggatactttgaccgaacaaataacacttgaaaatcaagtccaccaaaggattgcagagctaagaaaagctggactgtggagccagcgcaggctgcctaagttacaggaagccccaagacccaaatcgcactgggattacctgttagaggaaatgcagtggatggcgacagacttcgcccaagaacgccggtggaaagttgccgctgctaagaaactcgtcaggacagtagttagacatcatgaagagaagcaactgagagaagagaggggcaagaaggaggagcagtcgagattgcgccggattgccgcctcaactgctcgcgaaattgaatgcttttggtccaatatcgagcaggtggtggagatcaagctacgagttgaattggaggaaaaaagaaagaaggctctgaatttgcagaaagtcagtagacggggcaaagagctgcgccccaagggctttgatgcattacaagagtcctctctggattctgggatgtcaggtcggaaaaggaaggcctccataagcctgacagacgacgaagtggatgacgaggaagaaacaattgaggaagaagaggctaacgagggtgtagtcgaccaccaaaccgaactgtccaatttagcaaaggaagcagagctccctctgttggacttaatgaagctgtacgagggggcgtttctgcctagttctcagtggcctcgccccaagcctgatggggaggatacctcgggcgaagaggatgcggatgattgtccaggagacagagagtccagaaaggacctggtcctcatcgattccctgtttattatggaccaatttaaagcagcagagcgaatgaacatcggaaagccaaatgccaaggatatcgcagatgtgactgccgttgcagaggctatcctgcctaaagggtctgccagagtgacaacaagcgtgaaattcaacgccccctctctgttatacggagcgttgagggactaccagaaaatcgggttggattggttagccaaactataccggaagaatctcaacggcattttggctgacgaggccggactgggcaaaaccgtccagattattgccttcttcgcacacttggcctgtaatgagggcaactggggtccgcatttggtcgtggtacggtcttgcaacattttaaagtgggaacttgaactgaaacgttggtgcccaggattgaagattctcagttacatcgggtcacaccgagagctgaaggctaagcggcaggaatgggccgagccaaacagcttccatgtctgtattacctcctacacccagtttttccgcgggctcactgcgtttacccgggtgcgctggaagtgtctggttatagatgaaatgcaaagagtcaaaggaatgacagaacgacactgggaagcagtgttcactctgcagagccagcagcgactcctcttgattgactctcccctgcataacactttcctcgaactttggacaatggtgcacttcctagtccctggaatcagtcggccctacctgagctcacccctgagggctcccagtgaagaaagccaagattactaccataaggtggttattcgactgcatcgggtgacgcaaccatttatcttacggcgaaccaagcgggacgtcgagaaacaactgaccaagaaatatgagcacgtgttaaagtgccggctatccaacagacagaaggccctgtatgaagatgtgattctgcagccgggaactcaagaggcattgaagtcaggccactttgtgaatgtacttagtatcctggtgagactgcagaggatatgcaatcaccccggcctcgtcgaaccacgtcatccagggtccagctacgttgctggtcctcttgagtatccctccgcatcccttattctgaaagctttagagcgcgacttttggaaagaggccgacctgtcaatgttcgaccttatagggttggagaacaagataacacgccatgaggctgagcttctctccaaaaaaaagatccctcgaaaactgatggaagagattagtacatctgcagcccccgctgcacggccagcagcagccaagctgaaagcgagtcgattattccaacccgtccaatacggccagaagcccgaagggaggactgtcgcattcccctctacccatccgccgcgcaccgctgctccgaccactgcctccgcagcacctcaaggacctttgaggggacgaccgccgattgcgaccttctctgccaatccagaggctaagggaggcgaggtcgtgaaaattgcccagctcgcctctattacgggcccccagtctcgggttgcccaaccggagaccccagtgacattacagttccaaggttctaagttcaccctctcccactcgcagttgagacaactaacggcggggcagcctctgcagctccagggatcagtcctgcaaatcgtgtcagcccccggacaaccgtacttgcgcgcccctggccctgtggtgatgcagaccgtgtcacaggctggggccgtgcacggcgcattgggctccaaaccccccgcgggcggaccctcacctgcccccctcactcctcaggtcggggtgcccggccgcgtggccgtgaatgcactcgcagtgggggaaccagggaccgctagtaagccagcaagcccaataggcggacctacacaagaggagaagactcgcttacttaaagagagacttgaccagatttatctggtgaacgaaaggcggtgtagccaagcaccggtctacgggcgtgatctgcttcgcatttgcgccctgccatcgcatgggagagtgcagtggcggggctctctagacggcagaagaggaaaggaggcagggcccgcccactcttatacctcttccagtgagagcccgtccgagctgatgctaaccttgtgccgatgcggagaatcgctgcaggacgtaatcgatcgggtagcctttgtaattccacccgttgtggcagctcctccatcactgcgggtacctagacccccccctttgtacagccataggatgcggatcctaaggcagggcttaagagaacacgcagcaccctattttcagcaactgcggcagactacagcacccaggctactacagtttccagaactgaggctcgtgcagttcgatagcggaaagttggaagcactggcaattctcctgcagaagctaaaaagtgagggccggcgagtcctgatactatcccagatgattctgatgctcgacattctggagatgtttctcaactttcattatctgacatacgtacggatcgacgaaaacgcaagttcagagcagagacaagagctgatgcgcagttttaaccgcgataggagaatcttctgtgcgattctgtctacacactcccgcacaacgggcattaatctggtggaagctgacacagtagtgttctatgataatgacctgaatcccgtcatggacgcaaaggcgcaagagtggtgcgataggatcggcaggtgtaaagatattcacatatacagacttgtaagcggtaactcaatcgaagagaaactgctaaagaatggcacaaaggatctgataagagaagtggcagcccaggggaatgactacagtatggcatttctaacccagcgcacgatccaggagctgtttgaagtctattcccctatggacgatgccggattccccgtaaaagccgaggagttcgtcgtgttgagccaggagccctccgtcacggaaaccatcgcccctaagattgcccggccttttatcgaggcactcaaatctattgaatatctggaagaggacgcccagaagagcgctcaagaaggagttctgggcccccatactgacgccctgtctagtgattctgagaatatgccctgtgacgaggaaccatctcaactggaagaactagctgactttatggagcagctaacacctattgagaaatacgcattaaattatctggagctgttccacacgagtatagaacaggaaaaggaacgcaatagtgaggatgctgttatgaccgccgtgagagcctgggagttctggaacctgaaaactctccaggagagagaggcgcggctgcggctcgaacaggaagaagcagaactgctgacatacacaagggaagatgcttattctatggagtatgtctacgaggatgtggacggccagacggaagtcatgcctctttggaccccaccgacccccccgcaggacgatagcgacatctacctcgatagcgttatgtgcctgatgtacgaggcaacacccatccccgaggctaagctgcctccagtatacgttcgtaaggagcgaaaacgacacaagacagacccctccgctgccggtcgaaaaaagaagcagcggcatggggaggccgtagtcccccccagaagtctgtttgaccgtgcaactcccggcctgctaaagattcggagggaggggaaggagcagaaaaagaatattctgttaaagcaacaggtgccttttgccaaaccattgcctacctttgctaaacctacagccgagccaggccaagacaatccagagtggctgatcagtgaggattgggccctgctgcaagccgtgaagcagctcttagagctaccgctgaatcttaccattgtgtcccccgctcatacaccaaattgggatttagtatcagatgtggtgaattcatgtagcaggatttatagatctagcaaacagtgccggaaccggtatgagaacgttattattcctagagaagaagggaaatctaaaaataacagaccccttcgcaccagccaaatctacgcacaggatgaaaatgccacacacacccaactttacacttctcacttcgatttgatgaagatgacagcggggaagaggagcccgcctattaagcctctgctgggaatgaacccctttcagaagaatccgaagcacgcttcagttcttgctgagagtggcataaactatgataagcctttacctccaatacaagtggcttctttgagagccgagagaattgctaaagaaaaaaaggcactagccgatcagcaaaaggcccagcagcctgctgtggcacagcccccccctcctcagcctcaacctccaccacctcctcagcaaccacccccaccactgccacagcctcaggctgcagggagccagccacctgcgggtcctccagccgtacagccgcagcctcaacctcagccacagactcaacctcagcccgtgcaggcaccagcaaaggcacagccagctattacaacaggcggcagtgctgctgttctagcaggcacgatcaagacaagcgttactggtacatctatgccgactggggccgtgagcggcaatgtcatcgtgaatactattgctggcgtaccggcagccacgttccagagcataaacaaacgcctcgctagccccgtggctccgggcgcattgaccacgccagggggttccgctcctgcccaggtagttcacactcagcctccaccacgcgccgtgggttcccccgccactgcgacccccgacctggtctcaatggctaccacacagggagtgcgggccgtaacatccgtgaccgcatcagccgtggtgacaacaaatctcacccctgtgcaaacacctgcaagatcactcgtaccccaggtgtctcaggccaccggcgtgcagctgcccggaaaaactattacacctgcccacttccagctcctgcgacagcagcagcagcagcaacagcagcagcagcagcagcagcagcagcagcagcagcagcaacagcagcagcagcagcagcaacagcaaaccacgactacttcccaagttcaagtcccgcaaatccagggccaggcgcaatctcccgcccaaatcaaagcagtgggcaagttaacccctgagcatctgattaaaatgcagaagcagaaacttcagatgcccccacaacctcctccgccccaggctcagtccgcacccccacaacctaccgcacaagtacaggttcagacttctcagccacctcagcagcagtcacctcagttgaccacggtgaccgccccccgaccgggcgccctccttaccggcactaccgtggcgaacctgcaagtagctaggcttacacgcgttcccacctctcagctgcaagcgcaaggacagatgcagacccaagcgccccagcccgctcaggtggccctggctaaacctccggtggtttcagtacctgccgccgtcgtgtcaagtcctggtgtcactacactgcccatgaacgtcgccggcatttcagtcgcaatcgggcagccacagaaggctgccggtcagaccgtcgtcgcccagcccgtccacatgcagcagcttctgaaacttaagcagcaagccgtgcagcagcagaaggcaatccagccgcaggccgcccaaggacccgccgctgtgcaacagaaaatcaccgcacaacagataacaacccctggcgcgcagcagaaggtcgcgtacgcggcgcagcccgcccttaaaacccaattcctcactactcctattagccaagctcaaaagctcgccggtgcccagcaggttcagacccaaatccaggtggccaaactcccccaggtggtgcagcagcagacccccgtcgcttccattcagcaggtcgcgagcgcatctcagcaggcttcaccccagaccgtggcactcactcaggcgacagcagcggggcagcaggtgcagatgataccagcggtgacagccacagcccaggttgttcagcagaaactgatacagcagcaagtggtcacaaccgcaagcgcccctctccagacacctggagcccctaatccggcccaggtgccagcaagtagcgactctccctctcagcagcccaagctccaaatgcgagtgcctgccgtgcgtctgaagactcccaccaagcccccgtgccagtag

SEQ ID NO: 115406 - DNA, 9261 bp, synthetic construct
  misc_feature 1..9261: note = Description of Artificial Sequence: Synthetic coding sequence
  source 1..9261: mol_type = other DNA
atgcaccatggtacaggcccccagaatgtgcagcaccaacttcagcggtcacgcgcctgtccaggatctgagggggaagaacagcccgcccatccaaacccacctcccagtcctgccgctccattcgcccctagcgcaagcccttcagcaccccagtctccatcataccaaattcaacagcttatgaacagatctcccgctactggtcagaacgtcaacattactctgcagagcgtggggcccgtcgttggcggcaatcagcagatcactctggcacccctgccactcccttcaccaacatctcctggatttcagtttagcgcgcagccaagaagatttgagcacggctccccgtcctacatccaggtaacctcacccttatctcagcaagtccagacccaatcaccgacacagccctcccccggccctggccaggccctccagaatgtacgggccggagctccagggcctggactcgggctgtgctcctcctcccctaccggcggttttgttgatgcgtccgtgcttgttcgccagatttctctgtcacccagtagtggcggacattttgtgtttcaggacggctcagggcttactcagatcgcccaaggcgcacaagtgcagcttcagcaccccggcactccaattacagtccgggagcggcgcccttcacagccgcatacacagtcaggaggtactatccaccatctgggaccccagtctccagcagcagctgggggggctggtttacagcctttagcctcgcccagccatatcacaaccgctaatctgccacctcagatctcgtctattatccaggggcagttggttcagcaacaacaggttttgcagggtccccccctgccacggcccttagggtttgaacggaccccaggagttctgttgccaggagccggtggcgcggcaggttttggcatgacatctccacctccgcccacatcaccgagccggacagccgtgcctccagggctgagctcccttccactgaccagcgtcggaaacaccggaatgaagaaggtgccaaaaaaattggaagaaattccacccgcgtcacccgagatggcacagatgcggaaacaatgtttggactaccactaccaagaaatgcaggcgctgaaggaggtcttcaaggaatatctgattgagttgtttttcctgcagcactttcaaggcaacatgatggatttcttggcgtttaaaaagaaacattatgccccccttcaggcttatttacgtcaaaatgacctcgacatcgaggaggaggaagaagaagaagaagaggaagaagagaagagtgaggtgattaacgatgagcaggcactcgcaggctctctggtggccggtgccggatctacagtggaaacagatctgtttaaacgccagcaggcgatgccttcgacaggcatggccggcggcatgccacccactcctcaggcagctcagctcgcgggtcagcgacaaagtcagcagcaatacgatccatccactggtccaccagtccagaacgctgcctcgcttcatactccccttccccaactgccaggaaggctgcctcctgccggcgtcccaacagcagccctatcctcagcactgcaattcgcgcagcagccgcaagtcgtcgaagctcagacgcaacttcagattcccgtcaagacacagcagccaaatgttcccatcccagcacccccatcatcgcagctgcccattccaccctctcagcctgctcaacttgcactccatgtaccaacacctggaaaggtacaagtgcaggcctcccagttatcctccttaccccagatggtcgcgagcaccagactgccagttgaccctgccccgccttgtccccgccccctgcccacatcctctacaagttcgttggctccagtgtccggctctggccccggtccgagtcctgccagaagctctccggtgaatagacccagttcggccactaataaggccctttcccctgtcacttccaggacccccggcgtcgtcgcctctgcccccacaaaaccacagtcacctgctcagaatgctacctcctctcaggactcctcacaagataccctgactgaacagataaccttggagaatcaggtgcatcagcggatcgctgagttgcgcaaagccggcctgtggtcccagagaaggctgccaaaactgcaggaagcgcccaggcccaagagccattgggactaccttctcgaggaaatgcagtggatggccaccgattttgcacaggaacgccgatggaaagtggcggccgccaaaaagctggtgaggaccgtagtgagacaccacgaagagaagcagttgcgagaggaaaggggcaagaaggaagagcagtctagactgcgtcgcatcgcggccagtaccgcaagggaaatagaatgtttctggtcaaacattgagcaggtcgtggaaatcaaactgcgcgtggagctggaggaaaaaagaaaaaaagccctcaatctgcagaaggtgtctcgacgaggcaaggaactgcgtccgaaaggtttcgacgctctgcaagagtcaagcctcgactccggtatgtccgggcggaaacggaaggcctcaattagtctgacagatgacgaggtggatgatgaggaagaaactattgaggaggaagaggccaacgagggcgtagtcgatcatcagacagagctatccaaccttgccaaggaggcagagctgcccctcctggatctaatgaagctatacgaaggcgcatttctgcctagcagccagtggccgagacctaaaccggatggagaggacacaagcggggaagaagacgccgacgactgtccaggggatcgcgaatcacggaaagacctcgtgcttatagactctctgtttatcatggatcagtttaaagcagcagagaggatgaatatcgggaaaccaaacgccaaggacatcgccgacgttactgccgtcgcagaggccatcctccctaaggggtcagcccgagtgacaacaagcgtcaagtttaatgcacccagcctcctatatggcgcactacgggattaccagaaaataggcttggattggttagccaaactgtaccgtaagaatctgaacggtattctggccgacgaggctgggctcggcaaaacagtgcagatcatcgccttctttgcccacctggcgtgtaacgaaggaaactggggaccgcaccttgtggtagtgaggtcctgcaacatattgaagtgggagctcgaactcaaacgttggtgtcccgggctgaagatcctctcttacattggatcgcaccgcgagcttaaagcaaagagacaggaatgggccgagccaaactcattccatgtctgcatcacctcttacacccagttctttcggggtctgactgcatttacacgggtacggtggaagtgcttggtgatagacgagatgcaacgcgttaagggtatgacagagagacactgggaagccgtttttaccctacagtctcagcagcgcctcctcctcatcgactctccacttcacaacacatttctggagttatggaccatggtccattttctggtgcccggcatctctcgcccctatctgtcttcgcccctgagagctccttctgaggagagtcaggactattatcacaaggtcgtaatcagactccatcgagttacccagccgttcattctcagacgcaccaaacgagatgtcgaaaagcaactcactaagaagtacgaacacgtgctgaagtgccgcctaagtaaccgacagaaggccctgtacgaggacgtaattctgcagcctggcacccaggaggctctcaagagcggacattttgtgaatgtgctctccattctggtgagattgcagcgaatttgcaatcatcctggcttggttgagccccggcatccagggagctcttacgtcgccggacccctggaataccccagcgcatccttgatcctgaaagctctcgagagagatttctggaaagaggccgatttgtcaatgttcgacctgataggcctggaaaacaagataactaggcatgaagctgaactactgagcaaaaagaagattccacgtaagctgatggaagagatctccaccagcgcagctcccgcagcaagaccagccgctgctaaactcaaagcatccaggctatttcagcccgtgcaatatgggcagaaacctgagggaaggaccgtcgccttcccttccactcatcctccaagaactgccgctccgacgactgcgtcagctgcgcctcaggggcccctcagaggccgtccgcccatcgccacattttccgccaacccagaggcaaaggcagccgctgctccatttcagacctctcaggcatccgcttctgccccaaggcaccagccggcctctgcctcctcaacagccgcatcgccagcccatccagctaagttgagagcccagaccactgcacaggcctcgacgcccggccaacctccaccccagcctcaagcgccaagtcacgccgccgggcagagcgcccttcctcaaagactagtgctgccttctcaggctcaagcgagacttcccagcggagaagtggttaaaattgcacaattagccagtatcaccggccctcagagccgagtcgctcagcctgagactcctgtaacccttcagtttcagggctctaagttcactttgagccacagtcagcttcgacagctcactgccggccaacccctgcagttacagggttcagtcttacaaattgtctctgccccaggacagccatacctgagggctcctggaccagtggtgatgcagaccgtgtcacaggcaggagccgtgcacggtgccctgggtagtaagcccccagctgggggcccttctccagcaccgttgacaccgcaggtgggtgtccctggccgagtggctgtgaatgcactggctgttggggaacctggaacagcctctaaacccgcttctcctatcgggggacccacccaggaagaaaagacaagactgctcaaagagcggctggatcagatatacctcgtaaacgagagacgttgttcacaggcaccagtgtacggcagggacctcttacgcatatgtgccctgccttctcacggccgggtgcagtggcgcggatcactggatggacggagaggtaaagaggcagggccggcccattcttataccagcagttcggaatcaccgtctgaactcatgctgactctctgtcgatgcggtgagtcgctgcaggacgttattgatcgtgtggcctttgtcattcccccagtggttgcagccccaccgtcactcagagtgccgcgccctccccctctgtactcacacagaatgcgcatcctgcggcagggcctacgggagcatgccgccccatactttcagcagctgcgccagacaaccgcaccaaggctcctgcagttcccagagttgcggttagtgcaatttgacagcggaaagttggaagcgctggccattctgctccaaaagctcaaatccgagggtagacgggtactcatcctgtcacagatgatactgatgcttgatatactcgaaatgttccttaactttcattacctgacctatgtccggatagacgaaaatgcttcaagtgaacagagacaggaactcatgcggtcgttcaatcgcgataggcggatcttttgcgctatcctctctacgcacagcaggactacagggattaacctggtcgaggcagatacagtggtgttctatgataacgatctgaatccagtaatggatgctaaggcacaggagtggtgtgatcgcattggtagatgtaaggacattcatatctacaggttagtctccggtaactccatcgaagagaaactcctcaaaaatggaaccaaggacttaataagggaggtggctgcccagggcaatgactatagtatggcattcctaacccagaggaccattcaggaactgttcgaggtgtacagtcctatggacgatgccggctttccagtgaaggctgaagaattcgtcgtgctgagccaagagccctctgtcacagagacaattgcccccaaaatcgcacggcccttcattgaggcgctgaagagtatcgaatacctggaagaagatgcgcaaaaaagtgcgcaggaaggcgtgttggggccccatacagatgccctgagcagcgattcagaaaacatgccttgcgatgaagagccatcacaattggaggaacttgccgacttcatggaacaactcaccccgatcgagaaatatgcactgaattatttagagctattccacacctccatcgagcaagaaaaagagcggaattccgaagacgcagtgatgacagctgtgcgagcatgggagttttggaatttaaaaacactgcaggaacgagaagcacgccttcggctggaacaggaggaagctgaactgctgacctataccagggaggacgcctactctatggaatacgtctatgaagatgtcgacggacagactgaagtgatgcccctgtggactccacccacacctccgcaggatgattcggatatctatctggacagcgttatgtgccttatgtatgaagccactccaatcccagaagcgaaactccccccggtttacgttaggaaagagagaaaacggcataaaacagatccaagtgccgccggccgtaagaaaaagcaacgccacggtgaagccgttgtccccccccgttctctattcgatagggcaacccctggtcttcttaaaatccgacgggagggaaaagagcagaagaaaaatatcctgcttaaacagcaagtcccattcgctaagccactccccactttcgccaagcccacagcagagcccgggcaggacaatcccgaatggttgattagtgaagattgggccttgctgcaggcagtgaaacagctacttgagctgcctctgaatttaacaatcgtttctccagcccatactccgaactgggacttggtcagcgacgtggtgaactcttgctccaggatctaccggtcgagcaagcagtgtcgtaatagatatgagaacgtgattatcccaagagaagaaggaaagagtaagaataaccgaccactgaggacaagtcagatttatgcacaagacgagaatgccacgcacacacagctttatacaagtcattttgacctcatgaagatgaccgccggaaagcgcagcccaccgattaagcccctgctcggcatgaatcccttccagaagaatccaaagcacgcaagtgtccttgccgagtcagggataaattacgacaagccactcccaccgatccaggtcgcgtctcttagagctgagcggatcgcaaaggagaagaaggccttggcagatcagcagaaggcacagcagcccgccgtagcacaaccaccacccccacaaccgcaacctcccccaccaccgcagcagcctccaccacccctgccccagccacaggccgccgggagtcaacccccagccggaccgccagcggtacagccacaaccccaaccgcaaccccagactcagccccagccagtccaagctcctgccaaagcgcaacctgctatcacgaccggtggcagcgctgcagtcctcgcagggaccattaaaacttcggttactggcactagcatgccgacaggcgccgtaagtgggaatgtcatcgtgaatacaattgccggcgtacccgccgcaacctttcaaagcattaataagagactcgctagtcctgtggctccaggtgcacttacaacgcctggtggctctgcacctgcccaggtggtgcacacccagccacctccccgcgctgtagggtcgcctgctacagcgaccccagaccttgtgagtatggctacaacacagggggtgcgcgctgtaaccagcgtcaccgccagcgctgtggtcacaaccaatttgacgcctgtgcaaaccccagctcgctcattggtcccgcaggtctcccaggctactggcgtgcagctgcccgggaagacgattacacctgcgcacttccaactcctgcgtcagcaacagcaacagcagcagcagcagcagcagcagcaacaacagcagcagcagcagcagcagcagcagcagcagcaacaacagcagacaactacgacttcccaggttcaggtgccgcagattcagggccaggcacaaagccctgctcagatcaaggctgtcggcaagctgacccccgagcaccttatcaagatgcagaagcagaagctccagatgccgcctcaacctcccccaccccaggcccaatcagcaccgccgcagccaacggcccaagtccaggttcagacttcccagccgccgcagcagcagtctcctcagctcaccacagtgaccgccccaagacctggcgccttgctgacagggaccacagtggcaaatctgcaggtggctagacttacacgggttccgacctcccagctacaagcacagggccaaatgcagacacaggctccacagccagctcaggtagccctggctaagccgccagttgtgtccgtgccggcagccgtggtgtcaagtcctggagtaacaaccctccctatgaatgtggccggaatatcggtagcaattgggcagccacagaaggctgccggacaaaccgtcgtggctcagcctgttcacatgcagcagctgctgaagctgaagcaacaggcagtgcagcaacagaaggccatccagccccaagccgctcaggggccagctgccgtgcaacaaaagattaccgctcaacagatcactactcccggcgcccagcagaaagtggcctatgctgcccagcccgcattaaagacacaattcctgactacacccatttcccaggcacaaaaattggctggcgctcagcaagtgcagactcagattcaagtggccaaattgccccaggtggtacagcagcaaacgcccgtcgcctctatccaacaggtagccagtgcctcacagcaggcttccccgcaaacggtcgctctgacccaagctacggcggccggtcaacaggtacagatgatccctgccgtgaccgcaaccgctcaggtcgtccagcaaaagttaattcagcagcaggtcgtgacgacagcatcagcgcccctgcagacacccggagcacccaatccggcacaggttcctgcaagcagcgacagcccatcccagcagcctaaactccagatgcgggtccccgctgtgcgcctgaaaacacccacgaaacccccatgtcagtag

SEQ ID NO: 115407 - DNA, 9480 bp, synthetic construct
  misc_feature 1..9480: note = Description of Artificial Sequence: Synthetic coding sequence
  source 1..9480: mol_type = other DNA
atgcaccacggcaccgggccccaaaatgtgcagcatcagttacagcgatccagagcttgtcctgggagcgagggcgaggagcaaccggcccacccaaatccgcccccaagccccgccgcacccttcgcaccgagtgcatctccatcagcccctcaaagcccctcttatcagattcaacagttaatgaaccgatcgccagcgacaggtcagaatgtaaacattacattgcagtccgtgggccccgtcgtagggggaaatcagcaaataactctggcccctctgcccctgccgtcacctaccagcccaggatttcagttttccgctcagcctagaaggtttgagcacggctccccatcatatatacaggttacaagccctctcagccagcaagttcagactcaatctcccacccagccctcaccaggccccgggcaggccctgcaaaacgtgagggctggggctccaggtccagggcttggcctgtgtagcagtagcccaacgggtggatttgtggacgcatctgtgttagtgagacaaatcagtctctcacctagttccggcgggcactttgtgtttcaggacgggagcggcctcacacaaatcgctcagggcgctcaggtccagctgcagcacccaggcacacctatcactgtaagggagcgaagaccttctcagcctcacacacagagcggaggtaccatccatcacttaggacctcagtcccccgccgccgccggcggtgcaggtctccaacccctggcttctcccagccacatcactacagcaaatctccctcctcagatctcatccattatccaaggacaacttgttcagcagcaacaggtactccaagggcctccgcttcctcgtccactcggatttgaacgcacccctggagttcttttgcccggggctggcggggccgcaggatttggtatgacctcccctccacccccaaccagtccttcccggaccgcagtgcctcctggcctgagtagcttgccccttacatccgtcggtaacacagggatgaaaaaagtgcccaaaaagcttgaggagatccctcctgcctccccggagatggcacaaatgcgaaagcaatgcctcgactaccattaccaggaaatgcaggcactgaaagaagtatttaaggaatacctaatcgaacttttcttcctgcagcacttccagggcaacatgatggactttctggccttcaagaaaaagcactacgccccactgcaggcatacctgagacaaaacgatctcgacatagaagaagaagaagaagaggaagaggaggaagaggaaaaatctgaggtcataaacgacgaggttaaagtcgtcaccggtaaggatgggcagactggaacacccgtagctattgcgactcagctgccccccaaggtgtccgccgcattcagttcccagcagcagccttttcagcaggccctggccggctctttagtcgcaggggcaggaagtaccgtcgagaccgacctgttcaaaagacagcaggccatgccctctaccggcatggccgaacagtccaagcggcctcgcctggaagtggggcaccaaggagtggtgtttcagcacccgggagccgacgcaggtgttcctctccagcagctgatgccaaccgctcaaggtggaatgcctcctacaccgcaggccgctcagctcgctggccaaaggcaatcccagcagcaatatgacccttctaccgggccgccggtccaaaacgccgcctcattgcacacaccactgccacagttgcccggacgcctccctccggccggcgtgcccaccgctgcgctcagcagtgcgctgcagtttgcacagcagcctcaggttgtagaggcacagacccagctgcaaattcccgtaaaaacgcagcaacctaacgtgcccatccctgcccctccatccagccagttgcctatcccaccatcacaacccgctcagctagccttgcacgtcccaacccctggaaaagtgcaagtccaagctagccaactgtcatctctgccccagatggtcgccagcacaagactgcctgtcgacccagctccaccttgccctaggcctcttcctacctcatcaacctctagtctggctcctgtgtctggcagcggccctggccccagtcccgctcggtccagtcccgtgaaccgaccatccagcgctaccaacaaggccctgtcacctgtcacctccagaacgcccggcgtcgtagcttcagcccccactaaaccacaaagccctgcacagaatgctacatcatctcaggactcttcacaggatacgctcacggagcagattaccctggagaaccaggtacatcaaaggattgcagaactgagaaaagccgggctctggtcccaacgccggctcccaaaactccaggaagcgccccgacccaagtctcattgggactaccttctggaagaaatgcaatggatggctactgacttcgctcaagaacgcaggtggaaggtagctgcagccaagaagctcgtgcgaacagtcgtgcgccaccatgaagaaaagcagctccgtgaggaacggggcaaaaaggaagagcagtcaaggctccggcgaatcgccgcttcgactgcaagggagatcgaatgtttttggtctaatattgaacaggttgtggaaatcaaactgcgggtcgagttagaagagaagaggaaaaaagcactaaacctacagaaggtctccagaaggggaaaggaactacgaccaaagggctttgatgcattacaggaaagtagtctcgattcggggatgagcggacgcaaaagaaaggcatccatttctctgacagacgatgaagtggacgatgaggaggagactatcgaggaagaggaggcgaatgagggggtggtagaccaccagacagagcttagtaacctagccaaggaggctgagctgccacttctggatctcatgaagctgtacgagggggcgtttttaccctctagccaatggccaagacctaagccagatggagaagatacgagcggcgaggaggatgctgatgactgcccgggagaccgggaatcccgcaaggatctggtgctgatcgactcactgttcataatggaccaatttaaggccgcagagcggatgaatatcgggaagcccaatgctaaggatatcgccgacgtgaccgcagttgcagaggccattctgccgaaggggtctgcccgggttactacatctgtgaaattcaacgctcctagcttgttgtacggagcattgcgtgattaccaaaagatcgggctggactggcttgcaaaattatatcggaagaaccttaacggcattcttgccgacgaggcaggactgggcaagacagtgcagatcattgctttttttgcccatctggcctgcaatgaagggaattggggtcctcacctggtcgtggtcagatcttgtaatatactcaagtgggagctcgagctgaaacggtggtgtccgggactgaaaattctttcatatataggaagccatagggagctcaaagctaaacgccaggagtgggccgagccaaattctttccacgtatgcattacaagctacacccagttctttcggggcctgaccgctttcactcgagtacggtggaaatgcctggttattgacgagatgcaacgggtgaaaggcatgaccgaacggcactgggaagccgtcttcaccttacaaagccagcaacgcctgctcctgatagattccccattgcacaataccttcctagagctgtggactatggtgcatttccttgtccctggaatctcccgcccctatctgagctccccacttcgtgccccttcggaggagtcccaggactactatcacaaagtcgtgatccgtctgcacagagtgacccagccatttatcttgcgacgaaccaagagagatgtggagaagcagttaacgaaaaagtatgaacatgtactgaaatgtcggctcagcaaccgccaaaaggcgctgtatgaagacgtgattttgcaaccgggtacccaggaagctctaaagtctggccactttgtgaacgtcctctccattctggtccgtctgcaaaggatttgtaaccacccgggcctggttgagcctaggcaccctggttcttcatatgtggctgggcccctggagtacccttccgctagcctcatacttaaagctttggagcgcgatttttggaaagaggctgacctctccatgtttgaccttatcggcctcgaaaataaaataacccgccacgaagctgagcttctgtcaaagaaaaagattccacgcaaattaatggaggaaatctccactagcgccgcgcccgctgctaggcccgcggccgccaagctgaaagcctcgcgcctttttcagccagtccaatacggccagaagcccgaagggcggaccgttgctttccctagcacccatcccccgcgaactgccgcccccaccactgcatcagccgccccgcaaggccctctccgcggtcggccaccaatcgcgaccttcagtgccaatcctgaggccaaagccgccgcagcacctttccagacttcccaggcatctgcgtctgcccccaggcaccagccggcaagcgcctcatcaacagctgcttctccggcccaccccgcgaaattacgcgcgcagactaccgctcaggcctctactccaggccagccccccccccaaccgcaggccccgagccacgcggctggccagtcagctctccctcagcggctggtgctaccaagtcaggcacaggctcgcttgcctagcggagaggttgttaaaatcgctcagcttgcctctataacaggcccacagtccagggttgcccagcctgagactccagttacgctccagttccagggttccaaattcactctctctcatagccagctgcgccagctgaccgctggccagcccttgcaactccaaggctcagtcctgcagattgttagtgctcctgggcaaccatacctccgggcccctggacccgtggtaatgcagacagttagccaagcaggcgctgtgcatggcgcattggggtccaagcctccagctggcgggcctagtccagcaccactgaccccgcaagttggagtgccaggtcgcgtggctgtgaacgctttagcagtgggggaacccggcacagcctctaaacctgcaagtccaatcggcggacctacccaggaagaaaaaacccgactgcttaaggagcgtctggatcaaatatatctagtgaacgaaagacggtgttcacaggcaccagtctatgggcgcgacctgttgcgaatctgtgccctccctagtcacggtagagttcaatggaggggctccctggacggcagacggggaaaggaagctgggccagcacactcctatactagctccagcgaatccccctctgagctgatgctgaccctgtgccgttgtggagaaagcctgcaggacgtaatagaccgcgtcgctttcgtaattcctccggtggtcgctgcacccccttccctacgggtgccccgacccccacctctttatagccatcgcatgaggatcttgaggcagggcctccgcgagcacgcggctccttatttccagcagctgaggcagacaactgctccacggctgctgcagttcccagaactgcgactggttcagttcgacagcggcaagctcgaggcccttgcaatcttgctgcaaaagctaaaaagcgaaggtcgcagggtgctgatattgtcacagatgattctaatgctggatatcctggagatgttcctcaatttccattacctaacctacgttagaatcgacgaaaacgcaagctccgagcagcgtcaggaattgatgcggtcatttaatcgagaccgacggatcttttgcgctatactgtccacacacagtcggacaaccggtataaacctcgtggaagccgataccgtcgttttttacgacaatgacttgaaccccgtaatggatgccaaggctcaggagtggtgcgatcgcatcggtagatgcaaggacatccatatctaccggttggtgtctggcaactcaatcgaagagaagttgctcaaaaatggcacaaaagacttgatcagggaggtagccgcccaagggaacgattatagcatggcctttctcacccagcgaactatccaagagctgtttgaggtctactcacccatggatgatgcggggtttccagtgaaagcggaggagttcgtggtcctcagccaggagccttcagttactgaaactatcgctccgaaaatcgctagaccgtttatcgaggccctgaaatcaatagaatatctcgaggaggatgcgcagaagtctgcccaagagggagtactcgggccccacaccgacgctctaagctccgactccgagaacatgccttgcgatgaagagccctcgcagctcgaggaacttgctgactttatggagcagcttacccctattgagaaatacgctcttaactacctcgaacttttccatacatccattgagcaggagaaggaaaggaacagtgaagatgctgttatgacggcagtgagggcatgggagttttggaacctcaagacgctacaggagcgcgaggcccggctgcggctcgaacaagaggaagcagaacttctgacctacacaagggaagatgcatatagcatggaatatgtgtacgaagatgtggatggccagacagaagtcatgccactgtggacacctccaacccccccccaggatgacagtgacatctacttagactcggttatgtgcctgatgtacgaggcgacccccattccggaggcgaagctgccacccgtgtacgtacgaaaagagaggaagcggcataagaccgacccatctgccgcagggagaaaaaagaagcagagacatggggaggctgttgttccaccccggtccctgttcgacagggcaacacctggcctcctcaagatccggcgggagggaaaagagcagaagaaaaacatcttgctcaagcaacaagttccattcgccaagccgctgcctaccttcgcgaagccaactgcagaacccggccaggacaacccagaatggctgatctcagaggattgggctctgctgcaggcagtcaagcaactgcttgaactccccctgaacctgacaatcgtgtctcctgcccacacgccgaactgggacctggtgtcggacgtggtgaactcctgctcccgaatttacaggtcctcgaaacaatgtcggaatcggtatgaaaatgtgataattcccagagaggaaggaaaatctaaaaataatcgccccctgagaacatcccagatatatgcccaggacgagaatgccactcatacccagctctataccagccactttgatttaatgaaaatgactgcggggaaacggagcccgcccatcaaacctctcttgggaatgaacccttttcagaagaatccaaagcacgcctcggtactggcggaaagtggtattaattatgacaagccgctaccaccgatccaggtggcttcgcttagggcagagaggatcgcaaaagagaaaaaagccctggctgatcagcagaaagctcagcagcccgccgtagcgcaaccccccccaccacagccacagccgccaccccctccccagcagccgccaccccctttgcctcaaccgcaggcagccggatcccagccgcccgctggacctccggcagtgcaaccccaaccgcaaccgcagcctcaaacacaaccgcagccagtgcaggctcctgctaaggcacagccggctattaccaccggtggctcggccgcggtgttagctggcactatcaagacaagtgtcacaggcacgtccatgcctaccggggctgtgtcaggcaatgtgattgtgaacaccattgcaggcgttccagccgctacctttcaatccataaataaaaggctcgcatctccggtggctccgggagccctgacgacgcctggtggatccgcgccagctcaggtggttcacacacaaccccccccgagggccgtcgggtctcccgcaacggcaacccctgatctggtttcaatggccaccacgcaaggggtgcgggcagtcacatctgtcaccgcttctgcggtggtcacaaccaacttgaccccagtgcaaaccccggccagaagcctcgtccctcaagtgtcccaagccaccggcgttcagctcccgggtaagactattacgcccgcacatttccagcttcttagacagcagcaacaacagcagcaacaacagcagcaacagcagcagcaacaacagcagcagcagcagcagcaacagcagcagcagcaacagaccacgaccacatcccaggtgcaggttccccagatccaaggtcaggcgcagtctcctgcccaaatcaaggctgtgggaaagttgactcctgagcatctgatcaagatgcagaaacaaaaattgcagatgcccccccagcccccacccccacaggcccagtctgcacccccacaacctactgctcaggttcaagtgcagacctcccagcctccacagcaacagagcccccagctgacaaccgttactgcaccgcggcccggtgccctgctcactgggactactgtggctaacttgcaagtggcacgcttaactcgggtgccaaccagtcagctccaagcacagggacagatgcaaacccaagccccacagccagctcaggtggcacttgccaagcctcccgtggtcagtgtgcctgctgcggttgtgtcttctcccggagttacaactcttcctatgaatgtcgcaggcatctcagtcgcgatcgggcaaccccagaaagccgctggacaaaccgtcgttgcacagcctgtccatatgcagcaactgcttaaattaaagcagcaggctgtgcaacaacaaaaagccattcagccacaggcggctcaggggccggccgccgtccagcagaaaattacggcgcagcaaattaccacacccggagctcaacagaaggttgcttatgcggcccagcctgccttgaagacacagttcttaaccacccctatcagtcaggcacagaagcttgcaggagcccagcaggtgcagacacagattcaggttgccaagctgccccaggtggtgcagcaacagaccccggttgcctctattcaacaggttgcctccgcaagccagcaggcctctcctcagaccgttgctctcacccaggctaccgccgccggtcagcaagtgcaaatgatccccgcggtaactgctactgcacaggttgtgcagcaaaagttaatccaacagcaggtggtgaccaccgcctctgcacctctccagacccctggagctcccaaccccgcccaagtccccgctagcagcgatagcccgtcacagcaacctaaactacagatgcgcgtgccagcggtccgactgaagacccccactaagccaccttgccagtag

SEQ ID NO: 115408 - DNA, 9372 bp, synthetic construct
  misc_feature 1..9372: note = Description of Artificial Sequence: Synthetic coding sequence
  source 1..9372: mol_type = other DNA
atgcaccacgggactggaccccagaatgtccagcaccagttgcagcgcagcagagcctgccccggcagtgagggtgaggagcaacccgcccatcccaaccctccgccatccccagccgccccttttgctccatctgcttctcctagtgcaccacaatccccgtcttatcagattcagcagctcatgaatcgatcccctgccactggacagaatgttaatattactctccagagcgtgggcccagttgtaggcgggaatcagcaaatcaccctggccccccttcctctcccttctcctacctccccagggtttcagttcagcgcccaaccccgacgcttcgagcacggttccccatcttatatccaagtcacgtcaccactgtctcaacaggtgcagacacagagtccaacacagccttccccaggacccggtcaggctctccaaaatgtacgggctggcgcacccggcccgggcttggggctctgttcaagttcccccaccggagggttcgtggatgcttctgttctggtcaggcagatttcactgtcgcccagctccggaggacactttgttttccaggacgggagcggactgacacagatagctcaaggagctcaggtgcaattacagcaccccggcacccctatcaccgtgcgggaaaggaggcctagtcagcctcacacccaatcaggagggacgattcatcacctcggaccgcaatcccccgctgccgccgggggggcaggactccagcccctggcctccccctcacacattactacggccaacctgccgcctcaaatttccagcattatacaggggcagctcgtccaacagcagcaggtactgcaagggcctccgttaccaagaccattaggttttgagagaacccccggggtgctgctcccaggtgcagggggcgcggcgggcttcggaatgaccagcccaccgccaccaacaagtcctagccggacggctgtccctcctgggctttcaagtttgcccctgacgagtgtgggtaacaccgggatgaagaaggttcccaagaaactcgaggagatccctccggccagcccggaaatggcccagatgcggaaacaatgtttagattaccattaccaggagatgcaggccttaaaagaggtgttcaaggaatacctgatagagcttttcttcttgcaacacttccagggaaatatgatggactttttggccttcaaaaagaagcattacgcccctctgcaggcctatctgcgacagaatgacctcgacattgaggaagaagaggaggaagaggaagaagaggaagagaaatctgaggtgatcaatgatgagcaacaggccctcgccgggagcttagtggctggggccggaagcacggtggaaacggacctcttcaaacggcagcaggctatgcctagcactggtatggcagagcaaagcaagcggccacgattggaagtgggacatcagggcgtcgtgtttcagcatccaggcgccgacgctggcgtgccattgcagcagctcatgccaaccgctcaggggggaatgccccccactccccaagcggctcagctggcaggtcagcggcagtcccaacagcagtatgacccctctaccggtccccctgtgcagaatgcagccagcctccacacacccctgccacagcttccgggccgcttgcctcccgccggagtgcctactgccgcattaagctccgccctccagtttgcccagcagcctcaggttgtggaggctcagacacaattgcagatacccgttaagacacagcagccgaacgtgcctatccccgcgcccccctcttcccagctacctataccccccagtcaaccggcacagctagccttgcatgtgcccacccctgggaaggtgcaggtccaggcaagtcagctgtccagccttcctcagatggtggcaagtacccgtctgcctgtggaccctgctcctccgtgtcctcggcccctgcctacttccagcactagcagcctggctccagtgtctggcagcggtcctggcccctccccagctagaagctccccggtgaaccgtccctcctccgcaactaacaaggccctcagccctgtgaccagtaggactcctggtgtggtcgcatcagctccgaccaagccacaaagtcccgcacaaaacgctactagcagccaggactccagccaggacactctgacggagcagattaccttggaaaaccaggtccaccagcgaatcgccgagctcaggaaggcagggctgtggtctcagagaaggcttcctaagcttcaggaggctccacgacctaagtcacactgggactacctgttggaggagatgcagtggatggctactgacttcgctcaggagcgacggtggaaggtggctgccgccaagaaactggtgcgcacggtggtccggcaccatgaagagaagcaactgagggaagagagaggcaagaaggaggagcaatcacgcctccgtcgcatcgctgcctctacagctcgagagatcgaatgcttttggtcaaacatcgagcaggtcgtggagattaagcttcgagtggaactggaagagaagaggaaaaaagcgttgaatcttcagaaagttagtcggcgaggaaaggagctacgccccaaagggttcgacgcattacaggagtcctctctcgattccgggatgtccggaagaaagaggaaggcatcaatcagtttgactgacgacgaggttgacgatgaggaagagaccatcgaagaggaggaggctaatgagggcgtggtggaccaccagaccgagcttagcaacctggctaaggaggctgaattgcctttattggacctcatgaagttatatgaaggggccttcctgccaagcagccaatggccccggcctaaacccgacggagaggatacctccggtgaggaggatgccgacgactgtcccggtgatcgcgagtcccggaaggacctagtgctgattgattcactattcatcatggaccaatttaaagccgcagagcgaatgaatattggaaagcccaatgcgaaagacatcgccgacgtcactgcagtagccgaggcaatcctgccaaaaggcagtgcccgggttacgacctcagtcaagttcaatgcccctagcctgttgtacggtgctcttagggactatcaaaagataggtttggactggcttgctaaactgtatagaaaaaatctaaacgggattcttgctgatgaggcaggcctggggaaaacagtccagatcatcgcgttctttgcccatttggcttgtaacgaaggaaactggggaccacatctcgtggtggttaggtcatgtaatatcctaaaatgggaacttgaactgaagaggtggtgtccaggcctgaagattctgtcttacataggctcacaccgggagctgaaagctaaacggcaagaatgggctgaacccaattcttttcatgtgtgcatcacctcctacacgcaatttttccgtggtctcaccgccttcactagagttcgctggaagtgtttggtaattgatgaaatgcagcgggtgaaaggaatgactgaacggcattgggaagccgtgtttacgctccaatcgcaacagagactccttcttatcgactctcccctccataacaccttcctggagctatggacaatggtgcacttcctggttcccggtatatctcggccttacctgtcgtctccgttgagggctccctcagaagagagccaggactattatcacaaggtggttatcagacttcatcgggtcactcagccatttattttgagaaggaccaagcgcgacgtggagaagcagctgacaaaaaagtacgagcacgtgctcaagtgcagactgtccaatcggcaaaaggctctgtatgaggacgtaatcctccagccagggacacaggaggctcttaaaagtggccattttgttaacgttctgagcattttagtgcgcttacagcgcatttgcaaccatcctggattagtcgagcctaggcaccccgggtcctcttacgtggccggccccctggaatacccatccgcaagccttatccttaaggctttggaacgcgatttttggaaagaggcggatctgagcatgttcgaccttatcgggttagagaacaaaatcactcgtcatgaggcggaactactctcgaaaaaaaagatccccaggaagctaatggaagagatctccacctctgccgccccggctgcccggcctgccgctgccaagcttaaagccagcaggctattccaacccgttcagtacgggcaaaagccagagggaaggacagtagcttttccctccacacaccctccccgcacggctgctccgaccaccgcaagcgctgcaccgcagggacctttgcggggaagaccccccattgctaccttttctgcaaaccccgaagctaaggctgctgccgcaccattccagacctcccaggctagtgcctcagccccccggcaccaaccagcttctgcatcttctactgcagcgagccctgctcatcccgctaagctgcgtgcccagaccacagcacaggcttctacaccgggacagcccccaccgcagccacaagccccatcacatgcagcagggcaaagcgcactgccccagcgccttgtgttacctagccaggcacaggcccgcctgccctccggggaggtcgtgaagatcgcccagctggcctccatcactgggccccaaagccgagttgcccagcctgagacaccagtcaccttgcagtttcagggttctaaatttactctcagtcactcacaattgcgacagctgaccgcggggcagcccctgcagctgcagggttccgtgctgcagattgtgagcgcaccagggcagccctacttgcgcgcaccaggccccgttgtcatgcagacagtgtcacaggctggcgcagttcacggtgctttgggtagtaaaccaccagctggtgggcctagccccgctcctctgaccccccaggtgggcgtgccagggcgggtcgccgtgaacgcgctggcagtgggggaacctgggacagcatccaaacctgcctcaccaatcggcggacccacccaggaggagaagacccgcctcctaaaagagcgactagaccaaatttaccttgtgaacgagcggcggtgttcacaagctcccgtgtatggcagagatctgttacggatttgcgcactgcccagtcacgggcgtgtacagtggcgcggttctctggacggccggcgcggaaaggaggccgggccagcccactcctacacctcctcatctgaatctccgagcgaattgatgctcaccctgtgccgctgtggagaatcgctgcaagatgttattgaccgggtggccttcgttatccctcccgtcgtggctgcccctccatcccttagggtgcctcggcccccacccctgtacagtcacagaatgcgcattctgagacagggcctcagggagcacgccgcgccatattttcaacaactccgacagacaaccgctccccggctactccagtttcccgaacttaggctggtacaattcgatagtggcaaactggaagccttggccatcctgcttcaaaaactaaaatctgaaggtaggagggtgctcatcctgagccagatgatactgatgctcgacatcctggagatgttcctcaattttcattatctcacgtacgtgagaatcgacgagaatgcatctagcgagcagcgacaggagctgatgcgctcatttaaccgtgatcgcaggatcttttgtgcaatactgtctacccactcccggacaaccggcatcaacctggtcgaggcagatacagtggtattttatgataatgacttgaatccagtgatggatgcaaaagcgcaggaatggtgcgaccggatagggcgatgtaaggacatccatatctatcggctcgtgtccggtaactctattgaagaaaaactgctgaagaatggcaccaaggatttgattagagaagtggcagcacaaggaaatgactatagcatggccttcttaacgcagcgcacaatccaggagttgtttgaggtgtattcacccatggatgatgccggattcccagttaaagccgaagagttcgtggtgctctctcaggaacccagtgtcaccgagactatagcgccaaagatcgctcgcccattcatcgaggccttgaagtcaattgagtacctggaggaggacgcgcagaagtctgcacaggaaggagtgctgggacctcacaccgacgctcttagctccgactcagagaacatgccatgtgatgaagagccttcccagctcgaagaacttgctgacttcatggagcagctgacccctattgagaagtacgcactcaactaccttgaactattccacacgtcaatcgagcaggagaaggaacggaattctgaggacgctgtgatgaccgctgtgcgggcctgggagttttggaacctcaaaacccttcaggaaagggaggcccgactgcgactcgagcaggaagaggcagagcttctgacatataccagagaggacgcctattctatggaatatgtgtatgaggacgtggacggccaaaccgaagtgatgcctctttggaccccccccacgccgccccaagacgattctgacatatatctggactcagtgatgtgtctaatgtatgaggctactccgatacctgaggccaagctgccgccggtgtacgtcaggaaagagcgcaagcgacacaagaccgatccaagcgccgctggacggaagaagaagcagcggcatggagaggccgtagttccacccagaagtttattcgacagggcaacacctggactgcttaaaattaggcgggaagggaaggagcagaaaaagaatatccttttgaagcagcaggtacccttcgccaagcctctcccgacctttgcgaaaccaacggccgaacctggccaagataatcccgaatggctgatctctgaagactgggcgctgttgcaggccgtaaagcagcttctcgagcttcccctgaaccttactattgtaagcccagcacacacacctaactgggacttagtgagtgatgtagtcaattcttgttctcgcatctataggtcatcgaagcagtgtagaaacaggtacgagaatgtgattatcccacgggaggaaggcaagtcaaagaacaaccgacctttgcggacctcacagatttacgcacaggacgaaaacgccacacacacccagctgtacacttcacacttcgatctcatgaaaatgaccgctgggaaaagatccccacctattaagcccttgctcgggatgaatcccttccaaaaaaaccctaagcatgcgtccgttctcgccgagagcggtatcaattacgataagcccctcccgccgattcaagtcgctagcctgcgagccgaacggattgcaaaagaaaaaaaggcccttgccgatcagcaaaaggcgcagcaaccagccgttgcacaaccaccccccccccagccacagccccctccccccccccagcagcctccgcccccactgccccaaccacaggccgcgggctcacagccgccagcgggtccccccgctgtgcagccccagccccagccgcagcctcagacccaaccacaacccgttcaggctcccgcgaaagcgcaaccggctatcaccaccggtggctcagctgcagtactggccggaacaatcaagacttccgtgacaggaaccagtatgcctacaggagcagtctccggcaatgtaatcgttaacacgatcgcaggtgtgccagccgccacctttcagtctattaacaagagactcgcatcacctgtggcccctggagccctgactactccaggaggatcagctccagcccaggtggtgcatacccagccacctccaagggcagtgggctctcccgcgaccgccacacccgatctggtctctatggcaaccacacagggcgttcgggctgtaacctccgtgaccgcaagtgccgtggtcactaccaatctcacccctgtccagacgccagctcggtctcttgtgccccaagtctcacaggctaccggggtccagcttcctgggaaaactattacccccgcgcacttccagctactgcggcagcagcagcagcagcaacagcagcaacagcaacagcagcagcaacagcagcagcagcagcagcagcaacaacagcagcagcagcaaaccacaactaccagtcaggtccaagtgccacagattcaaggccaggctcagagcccagcgcagatcaaggctgtcgggaaacttacccccgagcaccttataaagatgcagaaacagaaactgcaaatgccaccacagcctccgccacctcaagcgcaatccgccccgccccagcccaccgcacaggtgcaggttcagaccagccagccccctcagcaacaaagccctcagctcaccacagtaaccgcacctcgaccaggtgcactgttaactggcaccacagtggccaatctacaggtggcacggctgacccgcgtcccaacatctcagctgcaggctcagggacagatgcaaactcaggccccccagcctgcgcaggtagcactcgctaagcctcccgtcgtaagcgtacctgccgcggtggtttcatccccaggcgtcaccaccctacccatgaatgtggccggcatttctgtggctatcggacagccccagaaggccgccgggcagacagtggtggctcagcccgtgcatatgcagcagctcttaaaactgaagcagcaggctgttcagcaacaaaaggccatccagccacaggccgctcagggccccgccgccgttcagcagaagataacagcccagcaaataacgaccccaggagcacagcaaaaggtggcctacgctgcacagccggccttgaagacgcagttcctgacaactccaatctctcaagcgcagaaactggccggggctcagcaggttcagacccagatacaggtggccaaactgccacaggtggttcaacagcaaaccccagtcgctagtattcaacaagtggcctctgcctcccagcaggcgagccctcagacagttgccctgacgcaggccaccgctgctggtcagcaggtgcaaatgatcccagcggttactgccaccgcgcaggtggtacagcaaaaactgatccaacagcaggtggtgaccaccgcatctgcacctcttcagaccccaggggcacccaaccctgcacaggtgccagcaagctcagattcaccaagtcagcagcccaaactgcagatgagggtacccgccgtacggctgaaaacgccaaccaaaccaccctgccagtag

SEQ ID NO: 115409 - DNA, 9369 bp, synthetic construct
  misc_feature 1..9369: note = Description of Artificial Sequence: Synthetic coding sequence
  source 1..9369: mol_type = other DNA
atgcaccacggcactgggcctcagaatgtgcagcaccagctacagcgcagccgagcttgtccaggctctgagggcgaggaacagcccgctcaccccaaccccccgcctagtcctgcggcccccttcgccccttcagcgtcccctagtgccccccagtctccgtcttaccaaatccagcagcttatgaacagatcccccgctaccggtcagaatgtaaacatcacgttgcaatccgtcggcccagtggttggtggcaatcagcaaatcactttggcccctctgcccctccctagcccaacaagtccaggattccagttttcagcccagccaagacggtttgagcacggcagccccagctacatccaggtgacaagcccgctgagccagcaggtgcagactcagtcccccacccagccctcccccgggccgggacaggctctccagaatgtaagagcaggcgcgccaggaccaggcctcggcctgtgcagttcatcccccaccggtggatttgtggacgcctctgtcttggtgagacagatttcactgtctccatctagcggtggacatttcgtgtttcaggacggctcgggtctcacacagatagcgcaaggggcccaggtgcagctgcagcacccaggaacaccaattacagtgcgtgagagacggccttctcagcctcatacacagtccggcgggacaattcatcacctcggaccccagagccccgctgccgctgggggtgcagggctccagcctcttgcctccccgtcccatattacaaccgctaacttgccaccccaaatctcttctatcatccaggggcagctggtccaacagcaacaagtgttgcagggccctccactacctagacctctgggtttcgaaaggacaccaggcgtgctacttcctggggctggaggggcggccgggtttggcatgacgtcaccaccacctcctacgtccccttcacggaccgctgtcccacccggcctttcctcactgcctctgactagtgtcggcaataccggaatgaaaaaggttccaaaaaaattggaagagatccctccggcaagtccggagatggctcaaatgcgaaagcaatgcctagactatcattatcaggaaatgcaagccctaaaagaagtgttcaaggaatatcttattgaactttttttcctccaacatttccagggcaatatgatggatttcctggcctttaaaaagaaacattacgctccccttcaagcatacctgaggcaaaatgatctagatatcgaagaggaagaggaagaagaagaggaagaagaagagaagtccgaagttatcaacgacgaacaggcactggcagggtctctggtggctggagccggctctactgtggaaaccgacttgtttaagaggcagcaggccatgccctcgactggtatggccgagcagagtaagcggcctagactagaagttgggcaccagggagtagtcttccagcaccctggagccgatgccggtgtgccactccagcagctgatgcccactgctcagggcggaatgcctccaaccccccaggcagcacagcttgccggtcagaggcaatcacagcagcagtacgaccctagcacaggacctcccgtgcagaatgcagcctccttgcatacacctctccctcagctgcccgggaggctgccacctgctggcgtccccaccgctgccctttcatcagcccttcagttcgcgcagcagcctcaggttgtcgaagctcaaacacagctccaaatccccgtgaaaacacagcagcctaatgtgcccatcccagccccgccctcaagccaacttccaataccccctagtcagcctgcgcaattagccctgcacgtgcccactccgggaaaagtccaagtccaggcctctcagctatcctctcttccccagatggtcgctagcacccggctcccagtcgatcccgcccctccctgccccaggcccttgcccacctcctctaccagtagcctcgccccggtcagcgggtctgggcctgggcctagtcccgcacggagttcccccgtcaaccggccctccagcgccacaaataaggcgctatcccctgtgacttctagaaccccaggcgtggtggcatcagctcccacaaaaccccaatctcccgcccagaatgcgacatcatcacaagattccagccaggatactctaacagaacaaattacactggagaatcaagttcaccagcgcatcgcagaactgcgtaaagccggtctctggtcacagagacggttgcccaaacttcaggaagcaccacgccccaaaagccactgggattatctcctcgaggagatgcagtggatggctaccgattttgcccaagagcggagatggaaggttgcggccgccaaaaaactggtgaggaccgtggtccgacatcacgaggagaagcagctccgagaggagcggggcaagaaggaagagcagtctcgcctacggcggatcgccgcgagtacagcgcgggagatcgagtgcttctggtcgaatatcgaacaggtcgttgaaatcaaattacgagtagaacttgaggaaaagaggaagaaagcactgaacctgcagaaggtctccaggaggggaaaggaactgcggccgaagggctttgacgcccttcaagagagtagcttagatagcggcatgtctggaagaaaacggaaagcctctatcagtctgaccgatgatgaagtcgacgatgaggaggagacaattgaggaggaagaggccaacgaaggagtggtcgatcatcagactgagctgtccaacctggcaaaagaagctgaactgcccctgttagacttgatgaagctctacgagggtgcctttttgccttccagccagtggccccgccctaaaccagacggggaggatacctctggagaagaagacgctgatgactgccctggggatcgggaatccaggaaggatctggtgctaattgactcattatttattatggaccagtttaaagcagcggagcgaatgaacattggtaaaccgaacgccaaggacattgctgatgtcaccgctgtggcagaagccatacttcccaaaggctcagctcgagtcaccacatccgttaagttcaatgccccctccctgctgtatggggcactgcgcgattaccaaaaaatcggacttgactggctcgccaaactgtataggaaaaatctgaacggcatccttgcagacgaagcagggctcgggaaaaccgtacagataattgccttttttgcccatctcgcctgcaacgaaggtaactggggtcctcacttggtggtggtgagatcttgtaatatactgaagtgggagctcgagctcaaacgatggtgccctggattgaaaatcttgtcttatatcggcagtcatcgtgagctcaaggcaaagcgtcaagaatgggccgagccgaacagttttcacgtgtgtatcactagctacacccagttcttccgtggccttacagcgtttacgcgagtccgatggaagtgcctggtgattgacgaaatgcagagagtgaagggtatgactgagagacattgggaggcagttttcactttgcagagccagcaaagactgctgctaattgacagtcctctgcataacacttttctcgagctttggaccatggttcactttctcgtgcccggcatttcacgcccttacctatcttcaccactgcgcgcccctagcgaagaaagccaggattactaccataaagtggttatacggctgcaccgggttacccagcccttcattctgcgccggaccaaacgagatgttgaaaaacagctaactaagaagtatgaacacgtgctgaagtgtcgtctgagcaaccggcagaaagctttgtatgaggatgttatcctccaaccagggactcaggaggcacttaagtctggccacttcgtgaacgtcctttcaattctcgtgcggttgcagaggatctgcaaccatcccggactggtggagcctagacaccccgggtcttcctacgtggcagggccccttgaatatccatctgcgtcgctcattctcaaggccctggagcgtgacttctggaaggaagccgatctgtccatgtttgatctgattggactggagaacaaaatcacaaggcacgaggctgagctgctctcaaaaaagaagattccgagaaaactgatggaggaaatttcaacaagcgccgctcctgccgcacgccctgccgctgcaaagctcaaagccagcaggcttttccagcctgtgcagtacggacagaaacccgagggaagaacagtggcttttccatcaactcatccacctcggacggctgcacctaccaccgcttcagctgctccccaggggcccttgaggggacggccccccattgcgaccttttcggccaatccggaggccaaggcagccgccgccccatttcaaacttctcaggcctctgcctcagcgcctagacaccagcccgccagtgccagtagcactgccgctagcccagctcatcctgcgaaacttcgcgctcagactactgcccaggcctcgaccccaggccagcctccaccccagccccaggccccctctcatgcagctggccagagcgcattgccacagcggcttgtgttgccatcacaggcacaggcacggctgcccagcggtgaggtggttaagatcgcgcagcttgcctctattaccggcccgcaatcacgcgttgctcagcctgaaacacccgtgactttgcagttccagggtagcaagtttactttgtcccactcacagcttagacagttaactgccgggcagccactgcagcttcaggggagtgtgctgcagatagttagtgctccaggacaaccttatctgagggctcccgggcccgtggtgatgcaaaccgtttcacaggcgggggcagtccacggcgccttaggctccaagccgccggcaggtggcccctcgcccgctcctttaactccccaggtcggcgttccaggccgggtcgcagtgaacgcccttgccgtcggagaacctggcacagcctcaaagcctgctagccctatcggagggccaactcaagaagagaaaacccgactgttgaaagagcgcctagaccagatttatttggttaatgaacgccgatgttctcaggctcctgtctatggcagagatctgctgaggatctgtgccttgccttctcacggaagggtacaatggagaggctcgctcgacggaaggagagggaaggaggccggccctgcccactcgtatacatcatccagcgagagccccagcgaactaatgctgactctgtgccgctgcggtgaatcactgcaggacgtgatcgatagagttgcgttcgttattccccctgtcgtagccgcaccaccttctctaagggtgccgcgaccgcctccactgtactctcatcgtatgcgcattctgcggcagggactccgcgagcatgccgccccatattttcagcagttacggcaaacgaccgctcctaggctcctgcagtttcccgagttgcgcctcgtgcagttcgacagcggcaagcttgaggcgttggcgatactcttgcagaagctgaagtcggagggccggcgcgttctgatactgtcacaaatgattcttatgttggacattctcgaaatgttcttaaacttccattatctgacctatgtcagaattgacgagaatgcatcatccgagcagcgtcaagagctaatgaggtcattcaaccgcgaccgcaggatcttttgcgcaattctcagcacacattctcgcaccaccggtatcaacctcgttgaagctgacacagtcgtcttctacgataatgatctgaatccggtgatggacgccaaggcccaggaatggtgcgatcggattggccggtgtaaggatattcatatttaccggttagtctcaggcaatagcattgaagagaaactcctgaaaaacggcacaaaagacctgatcagagaggtggccgcacagggtaacgactactctatggcgttcctcactcagcggacaatccaggagctgttcgaggtgtactcacctatggacgacgccggtttccccgtcaaggccgaagaattcgtcgttctcagccaggaaccaagtgtcacagaaactatagcccctaagattgcccgcccctttattgaagccctgaagtctattgagtatctggaagaagacgcccagaagagcgcccaggagggggttctgggtcctcacacagatgcattgtcttcagattccgagaacatgccgtgtgatgaagagccctcccaactggaggaacttgcagactttatggagcagttgactcctatcgagaaatatgccctaaactacctggaattatttcataccagtatcgagcaggagaaagaacgaaactctgaggatgcagtcatgaccgctgttcgggcgtgggagttttggaacctgaaaacgctccaggagcgtgaggctcggctccgcttagaacaagaagaggccgaattgctgacttacaccagggaggatgcatatagtatggagtatgtgtacgaagatgtggacgggcaaaccgaggtgatgcctttatggacaccacccacacctccgcaagacgattctgacatttatctggatagtgtgatgtgcctgatgtacgaggctacgcctatcccagaggccaagctccctccggtgtatgtgcgcaaggaacgcaagcgtcacaagacagatccttctgctgccgggcgaaagaagaaacaacgccatggcgaggctgtcgtcccaccacggtccctgtttgacagagcaacacccggactgctgaagatccggagggaaggtaaagagcagaagaaaaacatcctgctgaagcagcaggtgccatttgctaaacccttaccaactttcgccaaacccacagcagagcctggacaagacaatccagagtggctaatctccgaggactgggccctactgcaggcagtaaagcagctcctggagctcccgctcaatctgaccatcgtgtcaccagcccacacgcctaattgggatctggtgtctgacgttgtgaacagctgttccaggatctatagaagctccaagcagtgtcgaaataggtacgagaacgttataatccctcgagaagaagggaaatctaagaacaaccgtcccctacgtaccagtcagatttacgcccaagacgaaaatgcaacacatacccaattgtatacaagccattttgacctgatgaaaatgaccgccggaaagcgatcacctccaataaagccgctgctcgggatgaatccctttcagaaaaacccaaagcacgcgtctgtcctggctgagtccggcataaactatgataaaccactgccccctattcaagttgccagcctcagagccgaacgtatcgcaaaagaaaaaaaagctctagccgatcagcaaaaggctcagcagccagctgtggcccagccaccaccccctcagccccagcctccaccgccaccccaacaacccccccctcctcttccacagcctcaagctgcagggagtcagcccccagctggtccacctgcggtgcagccccaaccccaaccccaaccacaaactcagccccagccagtgcaagcacccgcaaaggcacagccagctatcacaaccggaggttcagcggctgtgttagcagggacaatcaaaactagcgtcactggcaccagcatgccaacgggcgccgtgagtggaaatgtgattgtgaatacaatcgccggcgtcccagctgccactttccagagtatcaataaaaggctagcatcacctgtcgcgcccggggccctaactactcccggcggctcagcccctgcccaggtggttcatacacagccccctcctcgggcagtgggaagcccagccacagcaacacccgacctcgtctccatggccacaactcagggcgtgagggcagtgaccagcgttacagcaagcgcagttgttaccactaatctaacccccgtccaaacaccggcccgcagcttagtgccacaggtgtcccaggccacgggcgttcaactgccgggcaagacaatcactccagctcacttccagctgctgcggcagcagcaacagcaacagcagcagcagcagcagcagcagcaacaacagcagcagcagcagcagcaacagcagcaacagcagcagcagaccacgacgaccagtcaagtgcaggtgccacagattcaggggcaagcacagagccccgcgcagatcaaagcagtggggaagttgactcctgagcatctgattaaaatgcaaaaacagaagctgcagatgcctccacagcctccacccccacaggcacagtctgcccccccacagcctacggcacaggtgcaggtgcagacatcccagcccccgcagcagcaatcacctcagctgacaacagttacagcccctaggccgggagccctcctcacagggactactgtcgccaatttgcaagttgcccggttgactcgcgtcccaacatctcagctgcaggcccaggggcagatgcagacccaagctccgcagcctgctcaggtagctctcgccaagcctccagtggtgtcagtcccagccgctgttgtgtccagtcctggtgtgacaaccttgcccatgaacgttgcgggaatctccgtagctattggccaaccccaaaaagccgccggccaaactgtcgtagcacagcccgtccacatgcagcagttgcttaagctgaaacagcaggccgtgcaacagcagaaagccatccagccccaggcagctcaaggccccgcagccgtgcagcagaagataacagcacagcagattaccacaccgggcgcccagcagaaagtagcgtacgctgcccagcccgcactcaagacccagttcctgactacccccataagtcaggcacagaaattggccggtgcacagcaggtgcagacgcagattcaggtggcaaaacttcctcaggttgtccagcagcagacacctgtcgcttctatacaacaggtcgcctccgcctctcagcaggcttcgccacagactgttgcccttacgcaggctaccgccgcggggcagcaggtacagatgattcctgccgtgaccgctactgcccaggtcgtccagcagaaattaattcaacagcaggttgtcaccactgcctccgcaccactccagacccctggcgctccaaatccagcccaagtcccagcaagttctgatagccccagtcagcagccaaaactgcagatgagggtgcccgctgttagactgaaaacccccactaagccaccctgtcaatag

SEQ ID NO: 115410 - DNA, 2475 bp, synthetic construct
  misc_feature 1..2475: note = Description of Artificial Sequence: Synthetic coding sequence
  source 1..2475: mol_type = other DNA
atgcaccacggaactggccctcagaatgtgcagcaccagttacagaggtcaagggcctgccctggaagcgagggggaagaacagccggcacaccccaacccaccacctagcccagccgcccccttcgcccccagcgcctccccttctgccccacagagccccagctatcagatccagcagctcatgaacagatctcctgccaccgggcagaacgtgaacatcacccttcagtctgtgggccccgtggtcggggggaaccagcagataactctggccccactaccactgccttcacccacgtcccccggtttccaattcagcgcccaacccaggagatttgaacatggctcaccatcctacattcaggtgaccagccctttaagtcaacaggttcaaacccaaagccctacccagccgagcccagggcctgggcaggctctacagaacgtgagggctggggcccccgggccgggcctgggtctctgctcctcttccccaaccggcggatttgtggacgcgagtgtactggtcaggcagatctcgctttctccctcctctggcggccacttcgtgtttcaggatgggtctggcctgactcaaatcgcccaaggggcccaggtgcagcttcaacaccccggtacgcctatcaccgtaagggagaggcgcccctctcaaccacatacacagtcaggcgggactattcaccacttgggccctcagtccccggctgctgctggaggcgccggccttcagcccctcgcgagcccttcacatatcacaactgccaaccttccccctcagatttctagcataattcagggacaattagtgcagcaacagcaggtcctgcaaggacccccactccctcggccattaggttttgagaggactccgggtgtgttgctgcccggggcggggggcgccgcaggtttcgggatgactagcccgccgcctcctacttctccaagcaggacagccgtgcctcctggcttgtcaagtctccctctgactagtgtgggcaatactggtatgaaaaaggtccccaaaaaattagaagaaattccgcccgcctctcctgagatggcgcaaatgcgcaagcagtgtttagactatcactatcaagagatgcaagcactaaaggaggtttttaaagaatacctgatagagcttttttttctgcagcactttcaggggaacatgatggacttcctggcgttcaaaaagaaacactatgccccactgcaggcttatcttaggcagaacgacctagacatcgaagaggaggaggaggaggaggaggaagaagaggaaaagtccgaggtcatcaatgacgaacaggcactcgcggggagcctcgtggcgggggcaggttctactgtcgagaccgacctgttcaagcgccaacaggccatgcccagcactggaatggccggcggtatgcccccaaccccacaggcggcacagcttgcggggcagcggcaatcccagcagcagtacgatcccagcaccgggccacccgtccaaaatgctgcctctctgcatactcccctgccccaactgccgggccgcctacctcctgccggggttccaacagcagccctcagctctgcacttcagtttgcccagcagccccaggtggtagaggctcaaacccagttgcagattccagtgaaaacacagcaacctaatgttcctatccccgcgcctcccagttcacaattgccaattccaccatctcagcctgcccagctggccctccatgtccccacaccaggcaaagtgcaagtccaggcctcccaactgtcctcccttccccagatggtggctagcacgcgcctcccagtcgaccctgcacctccatgtcccaggccgctccctactagttccacctctagcttagcacctgtctccggctcagggcctggcccttcaccagcccgatcatcacccgtaaatagacccagttctgctaccaacaaggccttgtcacctgtgacttcaaggacaccaggggtggtggcttcggcgccgacaaagcctcagtcacccgctcagaacgccacctcaagtcaagactcctcacaggacactctgaccgagcagataacactggagaatcaggttcaccagagaattgcagagctacggaaggcgggcctgtggtcacagaggagactgccaaaactgcaggaggctccccggccaaagagccactgggattatctgcttgaggaaatgcagtggatggccactgacttcgcgcaggagcggcgttggaaagtggcagccgcaaagaagctggttcgcactgtggtgcgtcatcacgaagagaaacagctgagggaggaacggggaaagaaggaggagcaatcaaggctacggcgaattgccgccagcactgctagggaaattgaatgtttctggtcgaacatagagcaggttgtagaaatcaagctgcgggtggagctggaatag

SEQ ID NO: 115411 - DNA, 9372 bp, synthetic construct
  misc_feature 1..9372: note = Description of Artificial Sequence: Synthetic coding sequence
  source 1..9372: mol_type = other DNA
atgcaccacgggaccgggcctcaaaacgtacagcatcagctccagagatcgagagcatgtcctgggagcgagggcgaagaacaaccagcccatccaaatcctcctccctctcccgcagccccctttgcaccaagtgcttcgccgtcagctccccagagtcccagctaccagattcaacaattgatgaaccgatcacctgccactgggcagaatgtcaatatcactttgcagtccgtcggacctgtagtcggggggaaccaacaaatcaccctggccccactccctttaccctctccaacatcccccggcttccagttctcagcacagccgagacggtttgagcacgggtcaccgtcttacattcaggtaacgtccccacttagtcagcaggtgcaaacccagtctcccacccaaccgtctcctggccctgggcaggctctgcagaatgtcagggcaggggccccgggcccaggcctgggcttgtgtagtagctccccaaccggcggcttcgtggatgccagcgtgctggtgcggcagatttctctgtccccatccagtggcggacactttgttttccaggatggttcgggactaacacagatcgcgcagggagcccaggtgcagctgcagcaccctggcacgcccatcactgtccgcgaacgtcgcccatcccagccacatacccaatctggcgggaccattcatcacctcggaccccagagcccggccgccgccggcggagccgggctacagccactggcgtccccaagtcatatcaccacggctaatctcccaccgcagatttccagcattattcaaggtcaattggttcagcagcagcaggtcttgcagggccccccccttccacggcctctcggcttcgaacgtacccccggagtgctcttaccaggggcaggaggggctgccgggttcggcatgacatctccaccaccgcccacctcaccgtctcgcactgccgtgccacccggcctgagttcgctgcccctaacatccgtggggaacaccggcatgaaaaaagttcccaaaaaactggaagagatacctcctgcttcacccgagatggcacaaatgaggaagcagtgcctagattatcattatcaggagatgcaggccctgaaggaggtgttcaaggagtatcttattgaactatttttcctgcagcattttcaaggcaatatgatggattttctcgcatttaaaaagaaacactatgcaccgttgcaggcctatctgcgccagaatgacctcgacatcgaggaagaagaagaggaggaggaggaagaagaagaaaagtcagaggtgataaatgacgaacagcaggccttggccggctcacttgtcgctggcgctggttcaacagttgaaaccgatctgttcaagcgccagcaggcaatgccatcaaccggcatggcagaacagtccaagcgaccaaggctggaagtggggcatcagggggttgtttttcagcaccccggcgcagatgcaggcgttcctctgcaacagctcatgcctaccgctcagggaggaatgcctcctacgcctcaagctgctcagctcgccgggcagaggcagtcacagcagcagtatgatccgagtacaggtcctccagtacagaatgcggcttcgctccacacacctctgccccaactgcctggacggctgccccctgcaggagtccccaccgctgctctgtcatcagccctccaatttgcacagcagcctcaggtcgtagaagctcaaacccaactgcagatcccagtgaaaacccagcagccaaatgtgccaatccctgccccaccttctagccagctccctattcccccatcccagcctgcacagctggcactgcatgtcccaacacccggtaaagttcaggtacaagccagtcagctgtccagtctgcctcagatggtggctagtacccgactgcccgttgatcccgcccccccctgtcccaggcccctccctacctccagtaccagctctctagctcctgttagcggctctggtcctggcccttcaccggctcgcagttctcctgtgaacagaccctcttctgcaactaataaagcgctttccccagtgacctcaagaactccgggtgttgtcgccagcgcccctaccaagccacagagcccagctcagaatgccacaagcagccaggattccagtcaggacactcttacagagcagatcaccctagagaaccaggtgcatcagcgtattgctgagctgcgcaaggccggcctatggtctcaacggcggctccccaaactgcaggaggccccccggcctaagagccattgggattacctgttagaggaaatgcagtggatggctacggattttgctcaggagcggcggtggaaggtagcagcagctaaaaagttagtgcggactgtggtccggcaccacgaagaaaaacagcttcgagaagagcgaggcaagaaagaagaacaaagcaggctcaggcgaatcgctgcctcaactgccagagagatcgaatgcttttggagcaacattgagcaagtcgtggagattaagctaagggtggagctcgaggaaaaaagaaaaaaggcattgaatcttcagaaggtgtcccggcgcgggaaggagctgaggccaaaggggttcgacgccttgcaggaaagcagccttgatagtggcatgagtggaagaaagaggaaagcaagcatttctttgactgacgacgaagtggacgacgaggaggagactatcgaggaggaggaagccaacgagggcgtggtcgaccaccagactgagctgtcgaaccttgccaaagaagctgagctgcccctgctcgatctgatgaagctgtacgagggcgcctttctcccaagcagccaatggcctcggcccaaacctgacggtgaggatacatccggagaggaagacgccgacgactgcccgggcgatcgagagtcccgcaaggacctggtgctgatagattcacttttcatcatggatcagtttaaggcagctgaaaggatgaatatcggcaaaccaaatgctaaggacatcgctgatgtgaccgcggtcgctgaagctattctgcccaagggctctgccagggtaaccacatccgttaagtttaacgcaccatccctgttatacggcgctctgagagattaccaaaagatcgggttagattggctggctaaactatataggaagaacttgaacggtatcctagcagatgaggctggcctgggaaagaccgttcagattatcgcatttttcgcacatttggcctgcaacgaaggcaactggggccctcatctcgttgttgtgaggtcatgcaatatcctcaaatgggagcttgagctcaagagatggtgtcctggattaaagatactcagttacattggcagccaccgagagctgaaagctaaacgacaagagtgggccgaacctaactcatttcatgtgtgcattacgagttacactcagttcttcaggggtctcacggcctttacgcgtgtgcgatggaagtgcttagtgattgatgagatgcagcgagtgaagggcatgacagagaggcactgggaggccgttttcacgctccagtcacagcaaaggctgctgctgatcgattctcctctgcacaacacttttctagagttgtggactatggtacacttcctcgtgcctgggatttcccgcccctatctgtcctcccctttacgggccccatctgaagagtcccaggattactaccacaaagtcgtgatacgcctccatagggtcactcaaccatttattctgcgccggactaagcgggatgtcgaaaaacagttaactaaaaagtacgaacacgtgttaaagtgccgactttctaaccgtcagaaggctctgtacgaagacgtgatccttcagccagggacacaggaagccctgaaaagcggccatttcgtgaacgtgttaagcattctagtgaggctgcagcgcatctgtaatcacccaggactggtggagccaagacatccaggatcaagttacgttgccgggcccttggaatacccttctgcgagcttgatcctcaaggctctggagcgagacttctggaaggaggctgatctttctatgtttgatcttatcggactggagaataaaattacacgacatgaagccgaactgctgagtaaaaagaagatcccgcgcaagctcatggaggagatatccacctccgccgctcccgctgcccgcccagccgctgcgaagcttaaagctagcaggttgttccaaccagtccagtacgggcaaaaacctgaagggagaacagttgccttcccctctactcacccccctaggaccgctgcaccgaccaccgcctctgccgccccccagggacctttaagaggccgcccccccattgccaccttcagcgccaatcccgaggccaaggcggctgcagccccctttcagaccagtcaagcatcagcgtctgctccgcggcaccagcctgccagtgcgtccagcactgccgctagtcccgcgcatcccgccaaattgcgagctcaaaccaccgcccaggcctcaaccccaggacagcccccccctcaacctcaggctccgtctcacgcagctggacaatctgctttaccacaaagactggtgctgcctagtcaggcccaagcacgcctccccagcggggaagtggtcaagattgcccaacttgcttctattactggcccccaatctcgcgtggctcagccagaaacacccgtgacgcttcagtttcagggaagcaaatttacattgtctcattctcagctcagacaactgacggccggacaacccctccagctgcagggaagcgtcttgcagattgtatctgccccaggtcagccataccttcgagccccgggccccgtcgtgatgcagactgtgtcccaggccggggctgtgcatggtgctctcggaagcaaaccgcctgcagggggcccatcacccgcgcctcttaccccgcaggtgggagtacctggcagggtggcagtcaatgcactggcagtcggagagcccggtaccgcttctaagcccgcaagcccaatcggtgggcctacacaagaggaaaagacacgcctgctaaaagagcgattagatcagatatatctggtcaacgagagaagatgtagccaagccccagtgtacggccgggacctcctcaggatctgcgcactgccctctcacgggcgcgtgcagtggcggggcagcctggacgggcgaagaggaaaagaggctggccccgcacactcctacacgtctagctcagagagccccagtgaactcatgctcaccctttgcaggtgcggtgagtccctgcaagatgttattgacagggtagccttcgtcatccctccagtcgtcgctgcacctccaagtcttcgggtcccacggcccccccccctttactcacataggatgaggattttaagacagggcctgcgggagcatgctgcgccctatttccagcaactgcgtcagacgactgccccccgactgctgcagtttcccgagttgagactcgtgcagttcgactccggcaagctcgaggccctggcgattttgcttcaaaagctgaaatctgaaggcagaagggttctcatcctcagccagatgatccttatgctggatattttagagatgtttttaaatttccattatctgacttacgtgagaatcgacgagaacgctagctctgaacagcgccaggaattaatgcgctcctttaacagggataggaggatcttctgtgccattctgtcaacgcattcccgcacaactggaatcaacctggtggaagccgacacggtggtcttttatgacaatgacctgaacccagtcatggatgctaaggcacaggagtggtgcgaccggatcggacggtgcaaagacattcacatctatcggctggtctcgggcaactcgatagaagaaaagctgctcaagaacggcaccaaagacttgatcagagaggtggctgcacagggaaacgactatagtatggcttttctgacacagcgaacgatacaagagctgttcgaggtttatagcccaatggacgatgccggctttcctgtcaaagcagaggaattcgtcgtgctcagtcaggagccgagcgtgaccgaaacaatcgctcctaaaattgccaggccctttatcgaggccctgaaaagcatcgagtatctggaggaagatgctcagaaatcagcccaggaaggtgtgttaggcccccacaccgatgccctcagcagcgacagtgaaaacatgccctgcgatgaggagccttctcaattggaggagctggcagacttcatggagcagctcacccccattgaaaaatatgccctgaactaccttgagttgttccacactagtattgagcaggaaaaagagcggaactcagaagacgcagtaatgactgcagtacgcgcgtgggaattctggaacctgaaaacgctacaggaaagggaggcacgattaagactagaacaggaggaggccgagctcttgacatatactcgtgaagacgcctattcaatggaatacgtgtatgaggacgtggacggacagacggaggtgatgccactctggaccccacctaccccccctcaggacgactctgatatttatcttgacagcgtcatgtgtctgatgtacgaggccacaccaattcccgaggcgaaactcccccctgtgtatgtcaggaaagagcggaaacgccataagactgatccctctgcagctggaaggaagaagaagcagcgtcatggggaggcggtcgtcccaccacgctctctgtttgatcgcgctacgccaggactcctgaagatccgacgcgaaggaaaggagcaaaagaagaatatcctcctgaaacagcaagttcctttcgctaagccccttccaacctttgcaaagcccacagcagaacctggccaggacaacccagaatggctgatttctgaagactgggctctcctgcaggccgtgaagcaactgttagaacttcctttaaacctgacaattgtcagccctgcccataccccaaattgggacctggtgagtgacgtggtgaattcctgtagcaggatatatcggagtagtaaacagtgcagaaatagatatgagaacgttattattcctcgagaagaaggcaagagcaaaaataataggccgcttagaaccagccagatttacgctcaggatgaaaatgcaacccacacacagctgtatactagccacttcgatctcatgaaaatgaccgccggaaagagatcaccgcctatcaagcctttgttgggcatgaatccctttcagaagaatcctaagcacgcgtccgtgctggcggagtccgggataaactacgacaagcccttacctcccatacaggtcgccagcttgcgcgctgaaaggatcgcaaaggaaaagaaggccctcgccgaccagcagaaagcacaacagccagctgtcgcccagcctccccccccccagccacaacccccacccccaccacaacagcccccacctcccttaccacagcctcaggcggctggctcacagccccctgctggacctccagctgtacagccccagccgcaacctcagccccagacacaacctcagcccgtgcaggcccccgctaaggctcaacccgctatcaccaccggcggaagtgctgctgtgctggctggcactattaaaaccagtgtgacaggcacgagtatgccaactggagcagtgtcaggtaatgtcatagtcaacaccatcgctggcgtgcctgcagcaacatttcagtccatcaataaaagactggctagtcccgtggctcccggcgctcttacaacacccggcggcagtgcaccagcccaagtcgtccacacccaacccccaccccgcgccgtagggtccccggccaccgccaccccggacctggtgtcaatggctacaacccagggggtaagagcagttacttctgtgactgcatccgctgtggtcaccacaaacctgacaccagtccagactcctgccaggagccttgtccctcaggtctcccaggccaccggagtgcagctgccagggaagactataacacctgcccactttcagctcctgcggcaacagcagcagcaacaacagcaacagcagcagcaacagcagcagcagcaacagcagcagcagcaacagcagcagcagcagcagcagactacaactaccagtcaagtgcaggtgcctcagatccaggggcaagcacaatcacccgcacagattaaggctgtcggcaaactcacccccgagcacctgattaaaatgcagaagcagaagttgcagatgccgcctcagccgcctccgcctcaggcccagtccgctccaccccagccaacagctcaggtccaggtgcaaacatcccagccgcctcaacaacagtccccccagttgaccaccgttactgcgcctagacctggtgcacttctcaccggcaccaccgtcgccaatttacaggttgcccgtctgactagggtgccaacatcgcagttacaggcacagggacagatgcagacacaggcccctcagcccgctcaggttgccttagccaagcctccggtggtgtcggttcccgcagccgtggtgtcctctcccggagtaacaactcttccaatgaacgtagctgggatctccgtcgcgatcggccagcctcagaaggcagccggccagacagtggtggcccagcccgttcacatgcaacagctgctcaagctgaagcagcaggctgtgcagcaacaaaaggccatccagccacaagctgcgcagggaccagccgcagtgcagcagaagattaccgcccagcagatcaccaccccaggagcacagcagaaagtagcctacgccgcccaaccagctctgaaaacccaatttctgaccaccccgataagtcaggcccagaagctggccggagcccagcaggtacagacacagatacaggtggctaagctaccccaggtggtgcagcaacaaacaccagtcgcatcgattcagcaggtcgcaagtgcgtcacagcaggctagcccccagactgttgccctcacccaggcgaccgccgctggccagcaggtgcagatgattcctgcagtcaccgccacagctcaagtggtccagcagaagttaatccaacaacaagtggtaactaccgcttccgcacctcttcagacaccaggggccccgaatcccgcccaagtccctgcaagcagtgactctccaagccagcaacccaaactccagatgcgcgtgcccgccgtgcggctcaagacacctaccaagccgccgtgccagtag

SEQ ID NO: 115412 - DNA, 1314 bp, synthetic construct
  misc_feature 1..1314: note = Description of Artificial Sequence: Synthetic coding sequence
  source 1..1314: mol_type = other DNA
atgctgcagggtccccgggcactggcatcagcagctggtcaaactcccaaggttgtgcccgccatgagtcccacagagctgtggcccagcggactgagctctccacaactctgcccggctacagctacgtattacactccactgtacccacagacagccccccccgccgcagcccccgggacgtgtctggatgctacccctcacggtccagagggacaggtcgtgcgctgcctgcccgccggcaggctgccagccaagagaaagcttgacctcgaaggaataggacggcctgttgtgccggaattccctacgcctaaggggaagtgtattagggttgatgggctgccgagccccaaaacccccaaatcacctggcgaaaaaacgcgatatgacacgagcctcggccttctgaccaaaaaattcatctacctcttgtccgagagcgaggacggcgtgttagatctgaactgggccgctgaagtactggatgtccagaagaggcgtatctatgacatcactaacgtattggagggaatccaactcatcagaaaaaaagcaaagaataacatccagtgggtcgggagaggaatgtttgaggacccgacacggccggggaagcagcagcaactggggcaagagctgaaggagctgatgaacacagaacaagctctggaccagctgatccaaagctgcagtctctccttcaaacatctcacagaggataaggcaaataagcggttagcttatgtcacatatcaagatatccgcgccgttggcaattttaaggaacaaacggtgatagcagttaaggctcccccacagacccggcttgaggtcccagataggacagaagataaccttcagatctatctgaaaagcacacagggaccaattgaagtgtacctgtgccctgaggaagtgcaggagccagacagcccaagtgaggaacccctcccaagtaccagcactctgtgcccctcacccgattccgcccaacctagcagctcaaccgatccgtccattatggagcctaccgcatccagcgtgccagcccctgcaccaacaccacagcaggcgccccccccccctagcttggtgcccctggaggccacagatagtttactggaactgcctcacccactgctgcagcagacagaagaccagtttctgagccccactctagcctgcagtagtccactgatctcgttttcacccagtctcgatcaggatgactacctgtggggtctcgaggccggagaaggcatctccgacctatttgactcatatgatctgggagacctgctgatcaactag

SEQ ID NO: 115413 - DNA, 1398 bp, synthetic construct
  misc_feature 1..1398: note = Description of Artificial Sequence: Synthetic coding sequence
  source 1..1398: mol_type = other DNA
atgagaaaaggcattcagccagcactggaacagtacctcgttactgctggtgggggtgaaggggctgctgtagtagcagctgccgccgcagcgtctatggataaacgagcacttctggcctcccccggattcgctgcagctgccgctgctgctgcagctccgggtgcatacattcagatcttaaccacgaacacctctactacgtcctgcagttccagtcttcagtcaggagctgttgccgcagggcccctgctcccatcagccccaggagccgagcaaaccgctggaagtctgctctacaccaccccccacggaccgtctagtagggctggtctactccagcagcctccagccctgggtcgcggcggttctggaggtggaggcggcccacctgccaagcgtcggctggaactgggagagtcagggcaccaatatctgagcgacggcctgaagactccaaagggtaaggggcgggccgctctgcgatccccagattccccaaagacacctaagagcccatctgaaaagactcggtatgacacttcacttggtctgctgaccaaaaagtttatccagttactgagccagagccccgacggggtcctggatctgaataaagcggctgaagtgctcaaggtccagaagagaagaatttatgatattaccaacgtgttggagggtattcatctgataaagaagaagtcaaaaaacaacgttcagtggatggggtgctctctctcggaagatggggggatgttggcccagtgccaggggttaagcaaagaagtgacagagcttagtcaggaggagaagaagctggatgagctgattcaaagttgtacactagacttgaagctgctcaccgaagactctgaaaaccagcgtctggcttacgtcacataccaggacataagaaaaattagcggcctgaaggatcaaacggtcatcgtcgtgaaggcgccaccagagactcggctggaggtccctgattctattgaatcgttgcagattcacctggcctcaactcaaggacccatcgaagtgtacctgtgcccagaggaaacagaaacacatagcccaatgaagacaaataaccaggatcacaatggtaatatcccaaagccagccagcaaagatctcgcttccactaattccgggcatagcgattgtagcgtgagcatgggcaacctgtctccccttgcatctccagctaatcttttgcagcagaccgaggatcaaatcccatccaaccttgagggccctttcgtgaatttgcttcctcccctgttgcaggaggattatttattgagcttgggagaggaggaagggatttctgacctatttgacgcatacgaccttgagaagctcccattagtggaagattttatgtgttcctag

SEQ ID NO: 115414 - DNA, 387 bp, synthetic construct
  misc_feature 1..387: note = Description of Artificial Sequence: Synthetic coding sequence
  source 1..387: mol_type = other DNA
atggataagcgggccctgctagccagcggcggcggggggggcccccctgctaaaaggcggctggaacttggtgagagcggacatcagtatctaagtgacggacttaagaccccgaaaggaaagggccgggcagctcttcgatcccccgactcccccaaaaagaaaactcggtatgacacttccttgggcctgctgaccaagaagttcattcagctgctgtcgcagtctcccgacggggtccttgatctgaataaggctgccgaggtgttgaaagtgcagaaaaggaggatttatgatattacaaacgtcctggagggtattagtgacttattcgatgcctacgaccttgaaaaactgcctctggtggaagatttcatgtgctcctag

SEQ ID NO: 115415 - DNA, 1005 bp, synthetic construct
  misc_feature 1..1005: note = Description of Artificial Sequence: Synthetic coding sequence
  source 1..1005: mol_type = other DNA
atgccactacagcagcaggctaaacgccgccttgagctgggagagtcaggtcaccaatatctgtccgacgggctaaagacgccaaaagggaagggccgcgccgccctgaggtccccggatagccctaaaaagaaaacaaggtacgatacttccctgggcttactcaccaagaagttcattcagctgctgtcccagagtcctgatggtgtcctggacttaaacaaagccgccgaagttctcaaggtacaaaaacggagaatctatgacattacaaatgtcctggagggtatccacctaatcaagaagaagtcaaagaacaacgtgcagtggatgggctgtagtctgtcagaagacggaggaatgcttgctcagtgtcaggggttgagtaaggaagtaacagaactgtcacaggaggaaaaaaaactggacgaactcatccaatcctgcactcttgatctaaagctgctgaccgaggattctgagaaccagcggctggcttatgtgacataccaggacatacgcaagatttccggattaaaggatcagaccgttatagtcgtgaaggcccctccggagacccgactggaggttccagactccatcgagtccctccaaatccatctggcttctacacaggggcccatcgaggtttatttatgtccagaagagacggagacacattcaccaatgaagaccaataaccaggaccataacggcaatattcctaagcccgcaagcaaagatctggccagcaccaacagtggacattccgactgcagtgtcagcatgggaaacctgtcgcctttggcatctcccgcgaacttgttgcagcagacagaagaccagataccctcaaatttggagggccctttcgtgaaccttctaccacctcttctccaagaggactacctcttgagtttaggagaggaagagggcatctccgacctgttcgatgcgtatgaccttgagaagctccccttggtagaagattttatgtgctcttag

SEQ ID NO: 115416 - DNA, 2736 bp, synthetic construct
  misc_feature 1..2736: note = Description of Artificial Sequence: Synthetic coding sequence
  source 1..2736: mol_type = other DNA
atggaggtaaattgtctgacactgaaagacctgataagtcctaggcaacctaggctggatttcgcagtagaggacggtgagaatgcacagaaggaaaacatctttgtcgaccgcagccggatggcgccgaaaacccctatcaaaaatgaaccaatcgacctgtcaaaacagaagaagttcacaccagaaagaaaccccatcacaccggtcaaatttgtggatcgtcagcaagctgaaccgtggactcctacagccaacctcaaaatgcttatctctgctgcctcgcccgatattcgagacagggagaaaaagaaaggactcttcaggcccattgagaataaagacgatgcgttcaccgacagtctgcagctggatgttgtcggagacagcgccgtagacgaattcgaaaagcagcggccttcccgaaaacagaaaagcctcggtctcctgtgccagaaattccttgcccggtatcctagttatccactctcaacggaaaaaaccacaatatcacttgatgaagtggctgtgagtctaggggtggaaaggaggcggatctacgatatagtaaacgtgcttgagtcgctgcatcttgtgagccgtgtggcaaagaatcagtacggatggcatggcaggcattccctccccaaaaccttacgcaatttacagcgcctgggtgaagaacagaagtacgaggagcaaatggcttacctgcagcaaaaggagctcgacttgattgattataagtttggcgagcgcaagaaagatggtgacccggatagccaagagcagcagctgttggacttctcagagccagattgcccaagctcctctgctaactcaaggaaggacaaatccctgaggatcatgagccagaagtttgtgatgctatttttagtgtcaaagaccaaaattgttaccctcgatgtggccgctaagattcttattgaagaatcccaggatgcacctgaccatagcaaatttaaaacgaaggtgcggagattatacgacatcgctaacgtcctgacttctctggccctgattaaaaaggtgcacgtgactgaagaaagagggaggaagccggccttcaagtggatcggtcccgtggatttcagcagttccgatgaagagctggttgacgtaagcgcatccgtgttgcccgagctgaagagggaaacttacggacagatccaggtctgtgctaagcagaaattagcgcgccatggatcttttaacacagtccaggccagtgagcgtatccaaaggaaggttaatagtgagccaagctcgccataccgggaggaacaaggcagtggtggttattcacttgagatcgggtcactagcggctgtgtaccgacagaaaatcgaagataacagccaaggtaaagccttcgcctcaaagcgagttgtgccccctagctctagtttagatcccgttgccccctttccagtgctgagcgtcgatcccgaatattgcgtgaacccactagcccacccagtgttctcagtcgctcagaccgatctgcaggcgttctccatgcagaacggtctaaatgggcaggttgatgtatccttagcctcagctgcgtccgccgtcgagtcccttaaaccagcactgctcgctggacaacccttggtgtacgtcccctctgcctctctgttcatgttatacgggagcctccaggaaggcccagcctccggttccgggagtgagagagatgatcgcagctccgaggcccctgccacagtggagctgagctcagcacccagcgcccagaagagactctgtgaagagcgtaagccccaagaagaggatgaaccagcaaccaaacgacagagcagagagtacgaggatggccccctgagtcttgtgatgccgaagaagccgagcgatagtaccgaccttgcaagccccaagactatgggtaaccgcgccagtattccacttaaggacatccacgtcaatggccaattgccggctgcggaggagatctcaggaaaagccaccgccaactccctagtatcatctgagtgggggaacccgtcccggaatacggatgtcgagaaaccatcaaaagaaaacgagagtacgaaggagccgagcctgttacaatacctgtgcgtgcagtcccctgctgggttgaatgggtttaatgtcctccttagtggcagccagacaccccctactgtgggccccagcagcggacagttgccaagtttctctgtgccctgcatggtgctccccagcccacctctgggccccttcccggttctatattcccctgcaatgcctggaccggtcagttccactctcggcgccctccctaatacagggcccgtgaacttctcactccctggactgggctcgatcgcccagctgctcgtgggccccacagccgttgtgaaccctaagtcttctactctaccttccgccgacccacagttgcagagtcagccaagcttaaacctgtcaccagtaatgtccaggtcgcacagcgtcgtgcagcagcctgaatcccctgtgtacgtcgggcaccctgtttcagtggtcaaactccatcagagcccagttccagtgactccaaagtccatccaaaggactcatagggaaactttcttcaagacacctggctcgctgggcgatcctgtgctgaagagacgcgagaggaaccagtccaggaatacttctagtgctcaacggcgcctcgagattccttctgggggtgcagattag

SEQ ID NO: 115417 - DNA, 1149 bp, synthetic construct
  misc_feature 1..1149: note = Description of Artificial Sequence: Synthetic coding sequence
  source 1..1149: mol_type = other DNA
atgcagaatggattgaatgggcaggtggacgtcagtttggcaagcgctgcctctgccgtggagtcactgaagcctgctcttctggcaggccagcccttagtctacgtcccctcggcctctctgtttatgctgtatggctcacttcaagaggggcccgcatccggctcagggtccgagcgggacgatcgatcaagcgaggcccctgccactgtggagctcagctcggcccccagcgcccaaaaaaggctatgtgaggaaaggaaaccccaggaagaggacgaacctgctaccaagcgccagtcacgtgagtacgaggacgggccactctcgctggtcatgccaaaaaaaccatctgacagcaccgatcttgcctctccaaaaactatgggcaacagggcctcaatcccgctgaaagatattcatgtgaatgggcagcttcctgccgctgaggaaatttcaggtaaggcgaccgctaactctctcgtcagtagtgagtggggtaacccctcacgcaacacagacgtggagaaacccagtaaggaaaatgaaagtaccaaggagcctagtctgctgcaatacctctgcgtgcaatccccggccggcctcaatgggtttaacgtccttctgagcggctcccagacccctccgacagtgggccctagttcggggcagctgccttccttttcagtgccttgcatggtcctccccagccctcccctgggaccctttccggtgctctatagtccagcgatgcctggacccgtgtcaagcactttagggagtattgcacagttacttgttggccctacagccgtcgtgaaccccaaaagctcaacactgcccagcgccgatccgcagctccaaagccagcctagtctgaacttgtcccccgtgatgtctagatctcacagcgtggtccaacaacccgaaagcccagtatatgtgggacatcctgttagcgtcgtcaaactgcaccaaagccccgtgcctgtcaccccgaaaagcattcagcgaacacacagggaaactttttttaaaacccctggctcccttggagatcctgtactgaagcggcgtgaacgcaatcagtcacgcaatacgagttcagcccagcgtcgcttagaaatcccctccggcggagccgattag

SEQ ID NO: 115418 - DNA, 2187 bp, synthetic construct
  misc_feature 1..2187: note = Description of Artificial Sequence: Synthetic coding sequence
  source 1..2187: mol_type = other DNA
atggaagtgaattgcctgaccctgaaagatcttatatcaccaagacagcctcgcctagacttcgcggtggaggatggcgagaatgcccagaaggagaatatcttcgtggacagaagcaggatggcacccaagacccctatcaaaaatgaaccaatcgatctgtctaagcagaaaaagttcaccccggagagaaatcccataacacccgttaaattcgttgacagacagcaggccgagccctggacaccgacagccaatctaaagatgctcatcagtgcagcctcccccgacattagagatcgtgagaagaagaaggggttgttcaggccgatcgagaataaggatgacgccttcacagatagtctgcagctcgacgtggtgggggactccgctgtcgatgagtttgaaaagcagcgcccttcccggaagcaaaaatctctgggattgctgtgtcagaagtttcttgcccgttacccttcataccctctcagtacagaaaagacaacgatctctctagatgaagtcgcagtgtcattgggggtggaacgcaggagaatttacgatatagtaaatgtactggagtcactacaccttgttagccgcgtggccaagaaccagtatgggtggcacggccggcacagcctgccaaagacactgcgcaacctgcagcgcctgggcgaggaacagaagtatgaagagcaaatggcctatcttcaacagaaggaacttgatcttattgactacaagttcggtgagcgtaagaaagacggagatccggattctcaagaacagcagctgctggacttttcagagcccgattgcccatcttctagcgcgaactctcgcaaggacaagtctctgcgcattatgagccaaaaattcgttatgctgttccttgtctctaagacgaagatcgtgacgctcgacgtagccgctaagatcctgattgaggagagccaggatgctccggaccattccaaattcaagaccaaggttagaagattgtacgacatcgcaaacgtcctcacaagcttagctctgattaagaaagtgcatgttaccgaggagaggggcaggaaaccagcatttaagtggattggccctgttgatttctcctcatccgacgaggaattagtggatgtgtcagctagcgtcttgccagaactgaagcgtgagacctacggacagatacaggtatgtgcaaaacagaaactggcgcggcatggttcctttaatactgtgcaggcgtctgaaagaattcagcgcaaagtgaatagtgagccctcatccccctacagggaagagcagggtagcgggggctattccttggagatcggatctctagcagccgtataccggcagaaaatagaggacaatagccaagggaaagctttcgccagcaagcgggttgtgcccccctcctctagcctggatccggtggctcctttccccgtgttgagtgttgatcccgagtactgtgtcaaccccctggcacatccagtgttctcagttgctcaaaccgacctgcaggctttttccatgcaaaatggattgaacggccaggtggacgtgtctttggcctccgccgcctcagctgtagagtctctgaagccggccttactcgccggacagccactcgtgtatgtgcccagcgcgtcactctttatgctgtacgggtccctgcaggaaggccctgcctccggtagcggttcagagagggacgacaggagttcggaggcccctgcgacggtggaactttcttctgccccttccgctcagaagagactctgcgaggagcgtaagccacaggaagaggacgaaccagccaccaaaaggcagtctagggaatacgaggacgggcctctgagcctggtgatgcccaagaagcccagtgatagcaccgacttggcctctcctaagacgatgggcaaccgcgcttccattcctttgaaggacatccatgtgaacggtcagctgcctgccgccgaggaaattagcgggaaggccacagccaacagtttggtgagcagtgagtgggggaatccaagccgaaacacagacgtggaaaagccgagcaaggaaaatgagagtaccaaagagccatccttgctccagtatctctgtgtacaatcccctgcagtcacctcttccagcgaccctcaggagcaccccactcacacgtcctag

SEQ ID NO: 115419 - DNA, 348 bp, synthetic construct
  misc_feature 1..348: note = Description of Artificial Sequence: Synthetic coding sequence
  source 1..348: mol_type = other DNA
atggaagtgaactgtctgacattgaaggacctgatttctccccgccagcccaggctagactttgcagttgaagacggagagaacgcccaaaaagagaacattttcgtcgaccgctcccgcatggcacctaaaaccccaattaagaatgaacctatagacttatctaagcagaaaaaattcactcccgaacggaatccaattacccctgtcaagttcgtcgaccgccagcaggctgaaccatggactccaactgcgaaccttaagatgctgatcagcgcagccagtccggacatacgggacagggagaaaaagaagggcctgtttagacctatcgagaataaagattag

SEQ ID NO: 115420 - DNA, 2604 bp, synthetic construct
  misc_feature 1..2604: note = Description of Artificial Sequence: Synthetic coding sequence
  source 1..2604: mol_type = other DNA
atggagaacgaaaaggagaatctgttctgtgagcctcacaagagagggttgatgaaaactccccttaaagagtccactaccgccaacattgtccttgccgagatccaacctgatttcggacctttgaccaccccgaccaagcccaaggagggatctcagggggaaccctggacccctaccgcaaatctgaagatgctgatttctgccgtgagccccgaaataaggaacagagaccagaaacgaggccttttcgacaatcggtccggcctccctgaggcaaaagattgtattcacgagcacttgagtggcgacgagttcgaaaaatctcagcccagcagaaaggaaaagtctctcggacttctgtgccataaatttctagctcgctaccctaactaccctaaccccgcagtgaataacgacatctgcctggacgaggtggctgaggagctgaatgtagagcgaaggcggatttacgacattgtgaatgtgttggagtcgctacacatggtgagccgactagccaaaaaccgctatacctggcacgggcggcacaatttaaacaaaactctggggacactcaagagtattggtgaggagaacaagtacgccgaacagatcatgatgattaagaaaaaagaatacgagcaggaatttgacttcataaagagttactctattgaggatcatatcattaaatccaacaccggcccaaacggccaccccgacatgtgtttcgtcgaattgcctggggtcgagtttcgggccgcaagcgtgaatagccgtaaagacaaaagtctgagggtgatgagccagaagtttgtcatgctgttcctcgtgtccaccccccaaattgtctctttggaagtagccgccaagatcttaatcggcgaggaccacgtcgaagatttggacaaatctaaatttaaaacaaagatcagacggctttatgatattgccaatgtcctctcatccctagacttgataaaaaaagtccacgtgaccgaggagcgcggccgcaaaccagcattcaagtggaccggcccagaaatcagcccaaacacaagtggctcctcccccgtgatccactttacaccttccgatttggaggtgaggcggagttcaaaagaaaactgcgctaagaatttgttttccaccaggggtaaaccaaatttcacacggcacccctcattgatcaaattagttaagagcattgaaagcgacaggaggaaaatcaacagtgcccccagctctcctattaaaacgaataaggcagaatcatcccaaaactccgctcctttcccctcaaagatggctcagttagcggcgatttgtaagatgcaattagaagagcagtcctccgaaagccgacagaaggtaaaggtgcaactggctaggtccgggccttgcaagccagtggcccccctggacccccccgttaatgccgagatggagcttactgcaccgtcacttatccagcccttagggatggtgcctctgattccttcccccctgtcaagcgcggtccctctgatccttccccaagctcccagtggaccctcctacgccatttacctccagcccactcaggcccatcagtctgtgacacctccccaggggctgagcccaaccgtgtgcacaactcattcaagcaaggccactggctcaaaagattcaaccgacgctactaccgagaaagctgccaacgacacaagtaaggcgtccgcctcaactcgcccaggcagcctcctgcctgcccctgaaaggcagggagccaaatctcgtaccagagagcccgccggggagcgaggatccaaacgggcaagcatgctggaagactccggaagcaagaagaagtttaaggaagaccttaagggtctggagaatgtttcagcaaccctgttcccaagtggttacttgatcccactgactcagtgctcgagcctgggtgccgagtccatcctcagtgggaaggaaaatagctccgccctgtcgcccaatcatcgtatctacagctcacccatcgccggcgttattcccgtgacatccagtgaactgaccgccgttaactttccgagcttccatgtaacgccactcaaattgatggtgtctccaaccagtgtcgcagccgtgcccgtcgggaattccccagctctggcgtccagtcaccccgtgcctatccagaacccatcctcagcaatcgttaactttaccctgcagcacctgggattgatcagtccaaacgtccaactgagtgcaagcccaggatctggcattgtacctgtgagtccccgaattgagagcgtgaatgtggcgccagagaacgccgggacccagcagggtagagccaccaattacgatagcccagtgcctggccagagccagcccaacggccagagtgtcgctgtgaccggggcccagcagccagtccctgtgacacctaaaggctcacagttggtggccgagtccttttttcgtactcctgggggacccacaaagccaacaagctctagttgtatggatttcgagggcgcgaacaaaacctcgttaggtactctgttcgtgccacaaagaaaactagaggtcagcacggaggatgtgcactag

SEQ ID NO: 115421 - DNA, 2604 bp, synthetic construct
  misc_feature 1..2604: note = Description of Artificial Sequence: Synthetic coding sequence
  source 1..2604: mol_type = other DNA
atgcagaaaaagaaggagaacctgttctgtgagccccataagcggggcctaatgaagactcccctgaaggagtcaacaactgcaaatatcgtccttgcagagatccagccagacttcgggcccctgaccactccgactaagccaaaggaggggtcacaaggagagccgtggaccccaaccgctaatctgaagatgctgatcagtgcagtgagccctgaaatccgcaaccgggaccagaagcgcggcctgttcgacaaccgctctggactaccggaggcgaaggattgcattcacgaacatctaagcggcgatgagtttgagaagagccagccatctagaaaggagaaatctctgggacttctgtgccataaattcctcgcaagataccccaactatcccaaccccgctgtgaataacgacatctgcttggatgaggtggccgaggagcttaatgtagaaaggcgtcgcatctatgatattgttaatgtgcttgaatccctgcatatggtgtcaagacttgccaaaaacaggtacacttggcacgggagacacaatcttaataagacactgggaacactgaaaagtatcggggaagagaacaaatatgccgaacagataatgatgataaagaagaaggagtacgagcaagaatttgattttatcaagagttattccattgaagatcacatcattaagtccaacacaggaccaaatggccatcctgacatgtgctttgttgaattgcctggggtcgaatttcgggccgcaagtgtgaactcaaggaaggataagagccttagagtgatgagccagaaatttgtcatgctctttctagtaagtactccacagatagtgtcattagaggtggccgccaagattcttattggagaggatcacgtggaagacctcgataagtcaaagttcaaaacaaaaatacgacggctgtacgatattgccaacgtcctctcgtccctcgatctgattaaaaaagtgcacgtgaccgaggaaaggggaaggaagccagcctttaaatggacaggccctgagatctcccctaatacttccgggagcagtccagtcatacatttcacaccgtcagaccttgaagtgcgtcgctcgagtaaggagaattgtgcaaagaacttgtttagcactcgcggcaagccaaatttcactagacacccctcgctgattaagctggtcaagagtattgaatcagacagacgcaaaattaacagcgccccctcctcaccaattaagaccaacaaggcagaatcatctcagaacagtgccccattcccctctaaaatggcccagctggccgctatttgtaaaatgcaactggaggaacagtcatcagagagcaggcaaaaggtaaaggttcagctggcaagaagtggcccctgtaagcctgttgccccattagatccaccagtaaacgctgagatggagctgaccgcaccctcccttattcagcccctgggtatggtacccctgattccatctcccttatcatctgccgtgcctcttattcttcctcaggctccctctggtcccagctacgctatttacctccaacccacacaagcccaccaatctgtcacaccaccccagggtttatctccgacagtgtgcacaacacattccagtaaggccacagggtccaaagactctactgatgctactacagagaaggccgcgaacgacactagcaaggccagcgctagcacaagacctggttcacttttaccggcccccgaaaggcagggcgccaaatcacgcactagagagcctgcaggcgagcgagggagcaaaagagcgagcatgctcgaggacagtggatcaaagaagaaatttaaggaggacctgaaagggctcgaaaacgtgagcgccaccttattccccagcggctacttgatccccctcacccagtgtagctcccttggggcagagtccatattgagcggcaaggagaattctagtgccctgagcccgaaccatagaatctactcatcaccaatcgcgggagtaatcccagtaacaagtagcgaactaaccgccgtcaattttccctcgttccacgtaactccattgaaactgatggtctcaccaacttcagtggccgccgttcccgtgggtaactctccagcgctcgcctcctcgcacccagtgcctatccagaacccaagtagtgctattgtcaactttaccttacagcatctgggtctcatctcccctaacgttcaactctcagcctcacctggttccggaatagttcctgtcagtccacgaatcgagagcgtgaacgtggctcccgaaaacgccggcactcaacaaggcagagccaccaactacgattctcctgtgccagggcaaagtcaacctaacggtcagtccgttgcagtgacaggagcccagcagccagtacccgtcactccgaagggtagccagttggtagctgagtcattcttccggaccccaggaggccctaccaaacctacaagtagcagttgcatggactttgagggagcgaacaagacctcactcggaacactgttcgttccccagcgcaagctggaagtctccactgaagatgtgcactag

SEQ ID NO: 115422 - DNA, 2604 bp, synthetic construct
  misc_feature 1..2604: note = Description of Artificial Sequence: Synthetic coding sequence
  source 1..2604: mol_type = other DNA
atggagaacgagaaggaaaatctcttttgcgagccgcataagcggggtttaatgaagacacccttgaaggagagcaccaccgcaaacatcgtgctggccgaaattcaacctgacttcggacctctgacaacgccaacaaagcctaaggaagggtcccagggcgagccctggactccaactgcgaatctgaaaatgctgatcagcgcggtttcccccgagattcgaaacagggaccagaagagaggcctgtttgataacaggtctgggctgccagaagcgaaagattgtatccatgagcatctttcaggggacgaattcgagaagagccagcccagccgcaaagaaaagagcctcgggctgctctgtcacaaatttctggcaaggtaccctaactatccgaatcctgccgtgaataacgatatttgtctcgatgaggtggccgaggaactcaacgtggagcgcagacgaatctatgacatagtcaacgtgctggagtctctccatatggtgagtcggctggcaaagaaccggtacacctggcatgggcgtcataatctgaacaagacactgggtacgctgaaatctattggagaggagaacaagtacgccgaacaaatcatgatgatcaaaaagaaggagtatgaacaggagtttgatttcatcaaaagctacagcatcgaagaccacatcatcaaaagtaacacaggtcctaatggccatccggacatgtgttttgtggagctgccgggggtggagtttagagctgctagtgtgaacagccgtaaggataaatccttgcgtgtaatgtctcagaagtttgttatgttattccttgttagcacacctcagatcgtgtcccttgaagttgcggctaagattctgatcggagaagaccacgtagaggatttagataaatcgaaattcaagacaaaaatccgaagactgtacgacattgcaaatgtgctttcctctctggacctaatcaagaaggtacacgttacagaggaaagaggccgcaaacccgcctttaagtggaccggacccgagattagtccaaacacttcaggcagctctccagtaattcatttcaccccctctgacttggaagtgcggagaagtagcaaagagaattgtgctaagaacctcttcagtacaaggggcaagcctaatttcaccagacacccctctcttatcaaactggtgaaatctatcgaaagtgacagacgcaagatcaactctgcaccgagctctccaataaaaaccaataaggccgagagcagtcagaacagcgcaccttttccgagcaaaatggcacagttggctgccatatgcaagatgcagctcgaggagcagagtagcgaatccaggcaaaaagtgaaagttcaattggcccggagcggcccatgtaaacccgttgcgcccctggatcctcccgtaaacgctgagatggagcttactgccccctcactgatacaacccctgggcatggtgcctctgattccttctccattgagtagcgcagtgcccctcatcctgccacaggctccatccggaccatcatacgccatatacttgcagccaacccaggcacaccagtctgttactccccctcagggccttagccctacggtgtgcacgacccactctagcaaagccactggatcgaaagacagcaccgacgcaactactgaaaaggccgctaacgacacttcgaaggcctctgcgtctaccaggccagggagcctgttgccggctccagaacggcagggcgccaaatcaagaactcgggaaccggccggtgagaggggctctaagcgggcatcaatgctcgaagactcagggtctaaaaaaaagtttaaagaagacttgaagggtctggaaaacgtgtctgctacactattcccatcaggctaccttattccactgacccagtgttcatctctcggtgccgaatctattctatccgggaaggagaactcctcggctttaagtccaaaccataggatatatagctctcccatcgccggggtcatcccggtaacttcctccgagcttactgcagtaaattttccatcttttcacgttaccccactaaagttgatggtttctcccacctccgtggcagccgtgcccgtcggtaacagccctgcacttgcctcctcgcaccctgtgccaattcaaaacccttccagtgctatcgtaaacttcactctgcagcatctcggtttaatcagccccaatgtacagctttccgcgagcccgggctccggcatagtcccagtgtcaccccgcattgagtcagtgaacgtggcccccgagaatgctgggactcagcaggggagggcaaccaattatgactctcctgtgccagggcagagccagcctaatgggcagtcagtcgcggtgactggcgcccaacagccggtgcccgtgacacctaagggatcgcagctggttgctgagagtttcttccgaactcctggcggtccaacgaaacccacttcctccagctgcatggacttcgagggtgcaaacaagacttcactgggaaccctgtttgtgccccaaagaaaattggaggttagtacggaagacgtgcactag

SEQ ID NO: 115423 - DNA, 2355 bp, synthetic construct
  misc_feature 1..2355: note = Description of Artificial Sequence: Synthetic coding sequence
  source 1..2355: mol_type = other DNA
atggaaggcgccatggcggttagggtgaccgccgcccatacagcggaagcacaagcggaagcaggcagagaagccggcgagggagcagttgcagcagtcgccgccgcactcgcgccatcgggattcctgggccttccagcgccttttagtgaagaggacgaagatgatgtgcacagatgtggcaggtgtcaggccgaatttactgcgctggaagattttgttcaacataagatccaaaaggcttgccagcgtgctcccccagaggccctgcctgcgacacctgcaactactgccctcctgggccaggaagtggttcccgcagctcccggtccggaggagcctattaccgtcgcgcacatagtcgtagaggcggcatccttggccgctgacatcagtcatgccagcgatcttgtgggcggcgggcacatcaaagaagtgattgtggcggcagaagcagagttgggagatggggagatggcagaggcccctggatccccccggcagcaaggtctaggtctggccggtgagggggagcaagcccaagtaaagcttctggtcaacaaggacggtcgctatgtctgcgcattatgccataaaacttttaaaacaggcagtatccttaaggcccacatggtcacgcatagctcaaggaaggaccacgaatgtaaactgtgtggtgcttcttttagaactaagggctcgttaataagacaccatcgtcgccataccgatgagagaccttataaatgctctaaatgcgggaagtcattcagggagagtggtgccctgactagacacctgaaatccctgaccccttgtactgagaaaatacggttcagtgtgtccaaggacgtcgtcgtatctaaggaggacgccagggctggatctggggcgggggccgccggattgggtaccgccacttcctccgtgacaggcgaaccaattgagacctcgcccgtcattcatctggtcaccgacgccaagggcactgtgatccacgaagtgcacgtgcagatgcaagagctgtctttggggatgaaggccctggcccctgaaccacctgtgagtcaggaactgccttgtagctcggagggctccagagagaacctgcttcaccaggctatgcagaattcgggtatcgtactggagcgggcggccggagaggagggcgccctggagcccgctccagcagctggctcgtccccacagccgctggcagtggcagcccctcagctgcccgtcctggaggttcagccactcgaaacccaagtagcatctgaggcctccgccgtgcccagaacacacccctgtcctcagtgcagcgagacgttcccgactgccgctacacttgaggcccacaaacgtgggcacacaggcccacggccctttgcctgcgcccagtgtggtaaggcattccccaaagcatatttgctcaagaaacaccaggaggtgcacgtgagagaaaggcgatttcggtgtggagactgtggcaagttgtataagacaatcgcccatgtgcgaggacaccggcgggttcactcggacgaaaggccttacccatgtcccaaatgcgggaaaaggtacaagacaaagaacgcgcagcaggtccactttcggacccacctagaggagaagccccacgtgtgtcaattttgcagtcggggcttccgcgaaaagggcagtctggtccgacacgttaggcatcacactggggaaaagccgttcaagtgctacaaatgtggaaggggcttcgcggagcacggaaccctgaatcgtcatttacggactaaagggggctgtctgctggaggttgaggagttactcgtcagcgaagacagtccagcagcggcaacaaccgttttgactgaagacccacacactgtgctcgttgaattttcctctgtggtggccgacacgcaagagtatattatcgaggcaacagctgacgatgctgagacatcggaggccactgaaataatcgaaggaactcagacggaggttgactcccatatcatgaaagtcgtgcagcagatcgttcaccaagcctccgctggacatcaaattatcgtacaaaacgtgacaatggatgaagagaccgctctggggcctgaagctgcagcagcagacaccattaccatagctacccctgagtcactaactgagcaggtggctatgaccctcgcctccgcgatatcagaggggacagtattggctgcccgcgctggtacatcaggtaccgagcaggctactgtaactatggtgtcttcggaagacatcgagatactggaacatgccggtgagctggtgattgccagcccagaaggtcagctcgaagtgcaaaccgtgatagtctag

SEQ ID NO: 115424 - DNA, 1047 bp, synthetic construct
  misc_feature 1..1047: note = Description of Artificial Sequence: Synthetic coding sequence
  source 1..1047: mol_type = other DNA
atggcagctacttgtgagatcagcaacattttctcgaactattttagcgccatgtatagcagcgaggattcaaccctggcctccgttcctcccgctgccacttttggggctgatgatctggttttaaccttgtctaacccacagatgagtttggagggcactgaaaaggcgtcatggctgggagagcaacctcagttctggtccaaaacccaggtactcgactggattagttaccaggtcgagaagaataaatatgatgccagcgctattgacttctcccgctgtgatatggatggcgctactctgtgtaattgtgcactggaggagctgaggctggtattcggaccgctgggcgatcagcttcatgcgcagctccgggacctgacaagctcatctagtgatgagctttcatggattattgaattgctggagaaagacggaatggctttccaggaagcccttgatccaggtccgttcgatcagggatcaccatttgcccaagaactgctggatgatgtctcaaccgcgggcacaggcgcgtcaagatcttctcactccagcgatagtggcggctccgatgtggatttggacccaaccgacggcaaactcttcccttcagatggctttcgggactgtaaaaagggcgaccctaaacacggaaaacgcaagcgcggtcggcctcgtaagctgagcaaggagtactgggactgtttggagggaaaaaaaagcaagcatgcacccagggggactcacctgtgggaatttataagggacatcctgatccacccagaactgaacgaaggtctgatgaaatgggaaaataggcatgagggcgtgtttaagttccttcgctccgaggccgttgctcagctgtggggtcagaaaaagaaaaatagtaacatgacctatgagaaactctcgagggcaatgaggtactactacaaaagagagatccttgagcgggtggacgggaggcgcctggtgtacaagtttggtaaaaattcgagtggctggaaggaggaagaggtgctgcagagccggaactag

SEQ ID NO: 115425 - DNA, 1116 bp, synthetic construct
  misc_feature 1..1116: note = Description of Artificial Sequence: Synthetic coding sequence
  source 1..1116: mol_type = other DNA
atggccgcaacgtgcgaaattagcaacatcttcagtaactattttagtgccatgtattcgagcgaagatagcaccctggcatcagtgcctcctgccgccacctttggagcagatgaccttgtgctaactttgagcaatcctcagatgtccttagaaggaaccgaaaaggctagttggctcggggagcagccccagttttggagcaagacccaagtgctggattggatatcttaccaggttgagaaaaacaagtacgacgccagcgccatcgacttctctaggtgtgacatggacggggcaactttatgcaactgcgccttggaagagcttaggctggttttcggacctctcggagatcagctgcatgcccaactacgggacttaaccagctcttcttcagacgagctgagttggattatagaactgctggagaaagatggaatggctttccaggaggctctggatccgggaccattcgatcaagggagtcctttcgcccaggagttacttgatgatggtcagcaggcatccccctatcatcccggttcatgtggcgccggggccccgagcccgggcagtagcgacgtgtcaaccgccgggacaggcgcctcaagaagctcccacagttcagacagcggcggttctgatgtggacctcgatccaactgatggtaagctgtttccatcagatggcttccgggactgtaagaaaggtgaccccaagcacggaaagaggaagagaggcagacctcgaaagctgtctaaggagtattgggactgcctcgaaggtaagaagagtaagcacgcccctcgcggcacacacttgtgggaattcatacgcgatattctgatccatccggagctaaacgaaggcctcatgaaatgggagaaccgacacgagggagtgttcaagtttctcagatcagaggccgtcgcccagctgtggggtcagaagaaaaaaaattctaacatgacctacgaaaaactatcgcgagctatgagatattactataaacgagaaattctcgaaagagttgacggtaggaggttagtgtacaaattcggcaagaatagttccggctggaaggaggaagaggtccttcagagccgcaactag

SEQ ID NO: 115426 - DNA, 1116 bp, synthetic construct
  misc_feature 1..1116: note = Description of Artificial Sequence: Synthetic coding sequence
  source 1..1116: mol_type = other DNA
atggcggccacgtgcgagatttctaacatcttctcaaattacttcagtgctatgtactcctcggaggactcaacactggcctcagtgcccccagcagcaactttcggcgcagacgaccttgtgctgaccttgagcaacccacagatgtctttggagggcacggaaaaagcgtcatggctgggggaacagccacagttttggtccaagacgcaagtgcttgattggatctcctatcaggtggaaaaaaataaatatgacgctagcgccatcgatttctcgcgctgtgatatggatggcgctaccctgtgcaactgcgctctggaagagttgagactggtgtttggacccctaggagatcagcttcacgcccaactgcgagatctgacttcctctagtagtgacgagctgtcttggatcattgagttacttgaaaaggacggtatggctttccaggaagcccttgaccctggaccatttgatcagggcagtccattcgcccaggagctactggacgacggacagcaggccagcccatatcacccaggatcctgcggggctggcgcgccgagccctggctcgagcgacgtctctacagccggaacaggtgcctctaggtcttcacattccagcgactctgggggatctgatgtggacctcgatcctacagatggcaagcttttccctagcgacggtttccgcgactgcaagaagggcgatccaaagcatgggaagaggaagagggggaggcctaggaagctcagcaaggagtattgggactgcttggaaggaaaaaagtcaaaacacgctccccgcggcacacacctctgggagtttatacgtgatattctgatccaccctgagcttaatgaggggctcatgaagtgggagaaccgacatgaaggagtgtttaagtttctacgcagtgaggctgttgcccagctgtgggggcagaaaaagaaaaacagcaatatgacctatgagaagctgagtagggctatgagatattactacaaaagggagatattggagcgggtcgacggccggcgcctggtctacaaattcggcaaaaactcctccggctggaaggaagaagaggtactgcaatcgaggaattag

SEQ ID NO: 115427 - DNA, 1116 bp, synthetic construct
  misc_feature 1..1116: note = Description of Artificial Sequence: Synthetic coding sequence
  source 1..1116: mol_type = other DNA
atggctgccacgtgtgagatttcaaacattttctctaactacttcagcgccatgtactcatcagaggattccactctggcttctgtacccccagccgccacctttggtgccgacgatttagttctgaccctatctaatccccagatgtccctagagggtacagagaaggctagctggttgggcgagcagccccagttttggagcaagacacaggtgttagattggatctcttatcaggtcgaaaagaacaaatatgacgcgtcagccatcgattttagtagatgtgacatggacggggccacactttgtaactgcgctcttgaagaactgagacttgtgttcgggccacttggcgaccaactgcacgcgcagctaagagacttgacctcctcaagtagcgatgagctctcatggatcattgaactcctggagaaggacgggatggccttccaggaggcccttgatccaggcccattcgatcaggggtcgccttttgcccaggaactgctagacgacggacaacaggcctccccctatcatccaggctcatgtggtgcaggcgctccttcacctggctcctccgacgtctctactgcgggaacgggcgcgagcagatctagccattcatcagattctggcggcagcgatgtagaccttgacccaaccgacggcaagttgttccctagcgacgggttcagagactgcaaaaagggtgaccccaagcacggaaaacgcaagcgcggccggccccggaaactgtccaaagagtattgggactgtcttgagggtaagaagtcgaaacatgccccccgcggaactcatttgtgggagttcatacgtgatatcttgatccacccagagcttaacgaaggtttgatgaagtgggaaaacagacacgaaggcgtgttcaaattcctaaggagtgaagccgtcgcccagctgtggggacagaagaaaaagaattcaaatatgacctatgaaaaattatctcgggctatgcggtattactataaaagggagatacttgagcgcgtggacggccgaaggttggtttacaagttcggaaagaactcttcaggctggaaggaagaggaagtactccagagccgcaattag

SEQ ID NO: 115428 - DNA, 699 bp, synthetic construct
  misc_feature 1..699: note = Description of Artificial Sequence: Synthetic coding sequence
  source 1..699: mol_type = other DNA
atggcagctacctgtgaaatttctaacatcttttcgaactatttctccgctatgtacagtagcgaagactccactctggcctctgttccacctgctgccacatttggagctgatgacctggtcttaacactaagtaatccacagatgagcctcgaggagaaagcaagctggctcggggagcaaccacaattctggtccaaaacccaggtgctggactggatctcctaccaggtggaaaaaaacaaatatgacgcctccgcaattgatttttccagatgtgatatggacggagctactctatgcaattgtgcgctggaggagctgcgtctcgtctttggacctttgggcgatcagttacacgctcagcttcgggacctgaccagtagctcttcagatgagctcagctggattatagaactgttggagaaggatggcatggcattccaggaggctctggatcctggaccttttgatcaaggatctcccttcgctcaagaacttctggacgacggccaacaggcttccccctatcatcccggcagttgtggtgccggtgctccctccccaggtagtagtgatgtgagcaccgccggtaccggagcctcccggagtagtcattcctcagactccggaggctctgatgtagacctggatcctaccgacgggaagctgtttccatctgacggttttcgcgattag

SEQ ID NO: 115429 - DNA, 1992 bp, synthetic construct
  misc_feature 1..1992: note = Description of Artificial Sequence: Synthetic coding sequence
  source 1..1992: mol_type = other DNA
atggctattacgctgcaacccagtgacctgattttcgaatttgcatccaatggaatggatgacgacatccatcaattggaggacccatccgtattcccggcggtgattgtcgagcaagtgccttatcctgatttgctacatctgtatagcggcctcgagctagatgatgtgcataatgggattattactgatggtactctgtgcatgacccaagatcaaattctggagggtagctttttgcttaccgacgacaacgaagccacttcccacaccatgagcacagcagaagtccttttgaacatggagtctcccagtgacattttggatgagaaacaaattttctcaacatccgagatgctgccagacagtgacccagctcccgccgtaaccttgcccaattatctttttcccgcatccgagcccgacgccctgaatcgggctggcgacacctctgaccaggagggacactcactggaggagaaagcctccagagaggagagcgcaaagaaaactgggaaaagtaagaaacggatcaggaagaccaaaggaaatagatccacttctcccgtcacagatccctcgatcccaattcgaaagaaaagcaaggacggaaaggggtccaccatttacctttgggaatttctcctggccctgctgcaagatcgcaacacatgtccaaaatatattaagtggactcagcgggaaaagggtatcttcaagctggtggacagtaaggctgtgagcaagctgtggggaaaacaaaaaaataagcccgatatgaactacgaaacaatggggcgcgccctgaggtactactaccagcggggaatcctggctaaagttgaaggacaaaggctggtgtaccagttcaaggagatgcccaaagatctggtggtgattgaggacgaggatgagtctagtgaggctacagcggccccgcctcaggcctcgacggccagtgtggccagcgcatcgacaacccgacgcactagttccagagtttcctcaaggtctgccccccagggcaaaggaagctcatcctgggagaaaccaaaaattcagcacgtaggccttcagccttcagcttccttggagttgggaccatctttagacgaagagataccaactacctccaccatgctcgtcagtcccgccgaggggcaagtgaagctgacaaaggctgtttctgccagttctgtgccctccaacattcacctcggcgtcgcccctgtgggatccggatctgctctgacattacaaacaatcccactcactaccgttctaaccaacggccccccagcatctacaacggcccccacacagttggtgttacaatcagtaccggccgctagcacatttaaggacacctttactctgcaggctagttttccactgaatgccagttttcaggactcccaggtcgccgccccgggtgcccccctgatattaagcgggctccctcagctcctggctggcgcaaatcggcctacaaaccctgccccaccgacggtaaccggcgccggaccagccggacctagctcccaacccccaggaaccgtaatcgctgcgttcattcgcacgagcgggaccactgctgctccgagagtgaaagaggggcctctcagatcctcctcttacgtgcagggcatggttactggagcccccatggaggggctgctcgtaccagaggaaacattgcgagagcttctgagagatcaagcccatctgcagccattacccacccaggtggtctcaagggggtcccataacccaagtctgctcgggaaccagaccttatcaccccccagtaggccgaccgttggcttaacccccgtggcagaacttgaactgtccagcggcagtggatcgttgcttatggctgagccatccgtgacgaccagcggatccctgctgaccaggtcgcctacccccgcacctttttctcctttcaatcccacaagcctcatcaagatggagccacatgacatttag

SEQ ID NO: 115430 - DNA, 1992 bp, synthetic construct
  misc_feature 1..1992: note = Description of Artificial Sequence: Synthetic coding sequence
  source 1..1992: mol_type = other DNA
atggcaattaccttacagcctagcgatctcatcttcgaattcgctagcaacggcatggacgatgatatacaccagctcgaagatcccagcgtgttcccagctgtgattgtcgaacaggtgccgtacccggatcttctccatctttactccggactggaactggacgatgttcataacggcattatcacagacggcactctatgcatgacgcaagatcaaatactagagggcagctttcttctaaccgatgacaatgaagcaaccagccatactatgagcacggcagaggtgttgttgaatatggagtccccttctgatatcttagatgaaaaacagatcttctctacgagtgaaatgttaccagattcagaccctgcaccagcggtgacacttcccaactatcttttcccagccagcgagcccgacgcactgaatcgcgccggggacacatccgaccaggaaggccattccctggaagagaaggcctctagggaggagtcggccaagaaaacaggcaaatcaaaaaaacgcattaggaaaactaagggtaataggtccacaagtccagtcaccgacccctccatccctatcagaaagaagagcaaagacggtaaaggcagcacaatatatctatgggaatttttactggctttgctgcaggaccgcaatacctgtcccaaatacattaagtggacacagagagaaaaggggatttttaagctggtggatagcaaggctgtcagtaaactgtgggggaaacagaaaaataagccagatatgaactatgagactatgggcagggccctgcgctactactatcagcgcggcattctcgctaaagtagaggggcagcgacttgtataccagtttaaagaaatgcccaaggatctggtcgtcatagaagacgaggacgaatcatcagaggccactgccgcccctcctcaggcttctacggcttctgtagccagtgcatctaccacgcgcaggacgtcctctagagtctcctccaggagtgcccctcaaggtaaaggaagctcctcctgggaaaagccgaagatacagcatgtgggcctccagccttcggctagtctcgagctgggaccttcactggacgaagagattcctaccacgtcaaccatgctggtctcccccgccgaaggtcaggtaaaactgacaaaagctgtttcagcttcatccgttccatctaacattcacctgggggtggcccctgtggggagtggttctgcactgacacttcagacaatcccgcttaccacagtgctcacaaacggacctccagcctcaaccaccgctccgacccagctggtactccaaagcgtgcccgccgcgagcacgttcaaggataccttcaccttgcaagcctcgttccccctcaacgcctcatttcaggactcacaggtggccgctccgggcgcccccctcattctctcggggcttcctcaacttctggccggtgcaaacagaccaacaaaccccgccccccccaccgttacaggagccggccctgcaggtccctcaagccagcccccaggcacggtgattgcagcgtttatcagaacttcagggaccacagccgcacccagagttaaagaagggcctctccgtagctcaagctatgtccaggggatggtgacgggagctcccatggaaggcctgttggtgcccgaagagaccctgagggagctgctgcgcgaccaggcccacctgcagcccctgccgacccaagtggtgagccgtggctcccataatccatccctattgggcaaccagactctctcccctccatctagacccaccgtcggtctgacccccgtggcagagttggaactaagttcgggatcagggtccctgcttatggcggaaccgtccgtgaccacaagcggcagccttctcacccgcagcccaacgcccgccccgttttcaccgtttaaccccacgagtctgatcaaaatggagccacatgacatttag

SEQ ID NO: 115431 - DNA, 234 bp, synthetic construct
  misc_feature 1..234: note = Description of Artificial Sequence: Synthetic coding sequence
  source 1..234: mol_type = other DNA
atggacgatgacatacatcagctcgaggatcccagtgtctttccagcagtgatagtggaacaggtgccttacccagatctgctccatctgtacagcgggctcgaattagatgatgttcacaacggaataattacagacggaacattgtgcatgacacaggatcagatcctggagggctcattcctcttaacggacgacaatgaggccaccagtcatacaatgtcaaccgcatag
